United States Patent Application Publication US 2008/0050393 A1 - sequence listing, part 22

SEQ ID NO: 75936 - DNA, 714 bp, Homo sapiens
ttttttttttttgttttccagttttgtttttctgtactaaaaatatctagtgggtgctaggattgaaagggcaagagaggttgagatactgacatctcctcatgtggatgaagtggccattacctctggtttctgtctattggttgcatctctgtgaacactgaagagaggctattccaaatatcctccaggccaatcctgacccgtttccaaaaagccagggctgggcaggggctggcgggtggcaggctgggactgcttctgaggtggatggtggggaagggggtagtggtggtcctggtactggtggtgctctgagaggcacagttggtgtcagtacagagacttgtgtccagggggcactcttcccgaagtcggttgcagggacattgttgataggtgcaaggcttgtgctccgtgcggagctggctcagcgccccaactcgaaggcgcccggaaaggccgtgcagcttcccagaccggctccggctcatggtgcccgacttgcagtggcagtgccacgggccccagggcatcagcaccagccgcagatcctcaggagatggcatggctgtgggtgagggtgacggccaccggctcggggtagacccaggtgtggaccactggctcagggtggcctgcgagcctggcaggtcctcagtagacctcccgggggagcgcggcaggcttgaagtcagcctgatttcaggctcc

SEQ ID NO: 75937 - DNA, 3603 bp, Homo sapiens; identical to SEQ ID NO: 61362

SEQ ID NO: 75938 - DNA, 4264 bp, Homo sapiens; identical to SEQ ID NO: 61363

SEQ ID NO: 75939 - DNA, 2466 bp, Homo sapiens; identical to SEQ ID NO: 61364

SEQ ID NO: 75940 - DNA, 2100 bp, Homo sapiens; identical to SEQ ID NO: 61365

SEQ ID NO: 75941 - DNA, 3936 bp, Homo sapiens
  misc_feature (1)...(3936): n = a,t,c or g
tttcgtggcggcggcgcaagggtgagggcggccccagaaccccaggtaggtagagcaagaagatggtgtttctgcccctcaaatggtcccttgcaaccatgtcatttctactttcctcactgttggctctcttaactgtgtccactccttcatggtgtcagagcactgaagcatctccaaaacgtagtgatgggacaccatttccttggaataaaatacgacttcctgagtacgtcatcccagttcattatgatctcttgatccatgcaaaccttaccacgctgaccttctggggaaccacgaaagtagaaatcacagccagtcagcccaccagcaccatcatcctgcatagtcaccacctgcagatatctagggccaccctcaggaagggagctggagagaggctatcggaagaacccctgcaggtcctggaacacccccctcaggagcaaattgcactgctggctcccgagccccctctttgtcgggctcccgtacacagttgtcattcactatgctgggcaatctttcggagactttccacggattttacaaaagcacctacagaaccaaggaaggggaactgaggatactagcatcaacacaatttgaacccactgcagctagaatggcctttccctgctttgatgaacctgccttcaaagcaagtttctcaatcaaaattagaagagagccaaggcacctagccatctccaatatgccattggtgaaatctgtgactgttgctgaaggactcatagaagaccatttttgatgtccctgtgaagatgagcacctatctggtggccttcatcatttcagattttgagtctgtcagcaagataaccaagagtggagtcaaggtttctgtttatgctgtgccagacragataaatcaagcagattatgcactggatgctgcggtgactcttctagaattttatgaggattatttcagcataccgtatcccctacccaaacaagatcttgctgctattcccgactttcagtctggtgctatggaaaactggggactgacaacatatagagaatctgctctgttgtttgatgcagaaaagtcttctgcatcaagtaagcttggcatcacagtgactgtggcccatgaactggcccaccagtggtttgggaacctggtcactatggaatggtggaatgatctttggctaaatgaaggatttgccaaatttatggagtttgtgtctgtcagtgtgacccatcctgaactgaaagttggagattatttctttggcaaatgttttgacgcaatggaggtagatgctttaaattcctcacaccctgtgtctacacctgtggaaaatcctgctcagatccgggagatgtttgatgatgtttcttatgataagggagcttgtattctgaatatgctaagggagtatcttagcgctgacgcatttaaaagtggtattgtacagtatctccagaagcatagctataaaaatacaaaaaacgaggacctgtgggatagtatggcaagtatttgccctacagatggtgtaaaagggatggatggcttttgctctagaagtcaacattcatcttcatcctcacattggcatcaggaaggggtggatgtgaaaaccatgatgaacacttggacactgcagaggggttttcccctaataaccatcacagtgagggggaggaatgtacacatgaagcaagagcactacatgaagggctctgacggcgccccggacactgggtacctgtggcatgttccattgacattcatcaccagcaaatccgacatggtccatcgatttttgctaaaaacaaaaacagatgtgctcatcctcccagaagaggtggaatggatcaaatttaatgtgggcatgaatggctattacattgtgcattacgaggatgatggatgggactctttgactggccttttaaaaggaacacacacagcagtcagcagtaatgatcgggcgagtctcattaacaatgcatttcagctcgtcagcattgggaagctgtccattgaaaaggccttggatttatccctgtacttgaaacatgaaactgaaattatgcccgtgtttcaaggtttgaatgagctgattcctatgtataagttaatggagaaaagagatatgaatgaagtggaaactcaattcaaggccttcctcatcaggctgctaagggacctcattgataagcagacatggacagacgagggctcagtctcagagcaaatgctgcggagtgaactactactcctcgcctgtgtgcacaactatcagccgtgcgtacagagggcagaaggctatttcagaaagtggaaggaatccaatggaaacttgagcctgcctgtcgacgtgaccttggcagtgtttgctgtgggggcccagagcacagaaggctgggattttctttatagtaaatatcagttttctttgtccagtactgagaaaagccaaattgaatttgccctctgcagaacccaaaataaggaaaagcttcaatggctactagatgaaagctttaagggagataaaataaaaactcaggagtttccacaaattcttacactcattggcaggaacccagtaggatacccactggcctggcaatttctgaggaaaaactggaacaaacttgtacaaaagtttgaacttggctcatcttccatagcccacatggtaatgggtacaacaaatcaattctccacaagaacacggcttgaagaggtaaaaggattcttcagctctttgaaagaaaatggttctcagctccgttgtgtccaacagacaattgaaaccattgaagaaaacatcggttggatggataagaattttgataaaatcagagtgtggctgcaaagtgaaaagcttgaacgtatgtaaaaattcctcccttgccaggttcctgttatctctaatcaccaacattttgttgagtgtattttcaaactagagatggctgttttggctccaactggagatacttttttcccttcaactcattttttgactatccctgtgaaaagaatagctgttagtttttcatgaatgggctttttcatgaatgggctatcgctaccatgtgttttgttcatcacaggtgttgccctgcaacgtaaacccaagtgttgggttccctgccacagaagaataaagtaccttattcttctcattttatagtttatgcttaagcacccgtgtccaaaaccctgtaccccatgttttatcattcataaactggtttcatcagtctcctcgaaagactctgaatagtcgactactgaacaatgaacacctggatctgagactaagccggacgatgactgggttaaagctctcccggctcacccctccagacccgctgcccatccctcttccttgctccatgcccaggggctgacttgtaaaggccaagtcatcaagctttcttgccctttggatgttggtcagtggggagccggagagctggagctggggtcggaggaggtagtaggtggaggtgttcttccctgattcccttgcgggatgcctcgggctggcctcccctgagggtcttagctccgagaggggaccctcttttccacacagccttctccacctctggattttggtaactgctccctcctcatcccttcaggattagtggcctcagtgggagtctggcttttactagtcctggcggacttgtggtttctacataatgtgctcgcacttttgcaaaaaatctttttatagaaccctcctcagataattctgagtgagtgtcatctatttccctgactggtacagtatctcttctgaaaaagcagagtgcattcaagtctgtaggaaaacccttttcttagggaggtgattttttttctctctctgcttcttatttggcctactttaacaatttctnaactaaactagttattggccattttac

SEQ ID NO: 75942 - DNA, 4597 bp, Homo sapiens
ttttttttttttcttgttaacattaatatctgtagaaacatttttattgtcagtataaaaattaacaggttttattaaatactttctccaattttgtaacacataagatcagtgtaatctgcattcatcttgcacggctattgcaaagtgagtgggtgtttccaaagcaaaacacaatactttagtacagaaggaacaacggcgatattttgtctgatgtaggtatgaggctggatcttttggtgaggtcctgccagaattagatgaaagcaatcccttaaaaagatggacgtatccccaaaactatcagcagaacaactctgtgtttcaattttctatgatgggacttgaagatcctaacaggcgtctccaacgccaaagagtctggaagccattatcaaaattcactgaagagaatacaggctaatctgattaatgtgcaactcagaagcagaaggccagctgccagagagaagcacattctgctatcatttcaactaaggtctgtcctcaaggaatgggatttaggcatcttttaagaagaaccctggcaacatttatccttgggaagtcccagttagacgttgcgttgacgtaatgaacagggttgcacaccaaaatgaaacaccttcctatgaatgagttcttttaatatggggcatttaggaggtctaagaacaatcgtctgacagcagcatttaaacacaaataaatcaaaacttcattttccccaaattagtcatatattgtaaatattctcttttcaaaggatctgataactagttaagtccaagcaatagattaactagtctgctgtgctgcctgcatagaaatgccacttaaattacaaaaaaaactataaatgattaattgttttgtatattaccaatttattaataaattaacgttataccattttccctgaaagcaaaagtatttttccacctctgctcggtgaaaattaagaaattatgtgtaagaacagcatttagcaaatagctattaaaaaaagagagaccaattttctaggtgcattgggacatccatttaaaatcaatacaaaaaataactccttgtaaatatataatatatatttatacataatttgaatatatttacatacatccagcacctatatactgcatttgtgctctgtaagtgtgtgctgacataaatcttctccaattattacaaaattaacaaggaaggcagaacgcacgtccaccttgagtcctactggtccacagccaatacgcacggcaggtgagaggggttacatggtggcttgtggcagtccactgctccagaaaccttcttctcctcctggggaagattacaagttttcaactgtataaatctttacacatatgctgattacttttccaattatttactcctctgatccatatatacaagtggagacaacaagctctgggaggcatggtctccctgctcagtgtagctaggttcccagtgctgtcctgtttggggacaggcagacacagtcattcatgttttaacactgccgtttatgtgtggatactgaggaaggcatggttcgtaaggcatggggtctggagaaaaaacagaatcatctcctgaagaacaagaacttcttgtgtcagggtaactaggtgaatactgttcgagaggttggctgaggtccaagtattcctcattggttgtgagagtgagaattcgatccaagtcttctaccaactgcttgaacgttggtctctgggagggcactgcatgccaacagtccctcatcatcatgtacagttcgttggtgcagttggctggcttatccattctgtgtccttccttcagcagcttaaaaagttcctccacgggaatccctgggtagggcgagccccctaaagtgaagatctcccacattaacaccccgaaggaccagacatcactctgatgagtgtatactctatcaaacagggcttctggagccatccacttgactggaagccgcccattggtggtctttttgtaatagtctatattgttgatatctctggcgagtccaaagtctgctattttcatcacattgttttctgttaccaaaacatttctggctgctaaatctcgatgaatacatttttgggaagccaagtactccatgcctctggccagctggtaggtgcatgacaccaagtccttgaaggtcatctgctcctcaggaacacggttaatgtcataggagtactccatcccgggtggcctccgggctcggaggtattctcggaggttgcctttagaggcatactcaactatgacatagagaggcccatcctgtgtgcaggctccaagaagatttatgatattcttgtgtttcccaatcatcttcatcatctccatctctgacaccagatcagaaaggtctttctctgtggcatcatctttcaacatcttcacggccacggtgaccgcctccttgggcttgtctttgtcaattcccactgcttccgccatgaccacttgcccaaagcaaccttctcccaggggcttgcccagtgtcagcttatctcttggaaactcccattttgggtcctctggaagttcatactcggagacccctgccagcatgggggtgtctgccgttgaagagaggcgtgttgttatcctcaccagcggggtgttggagttcatggaggagctggactcagccgaaactgttacctgtctccgcagggggatacgtttggtcagcttgtgcacagccggctggctgctgaagtctggcttcttggtcgtgttcttcattcggcacaggatgactgttaccaccatacaggcgattaagaagacccctatgcagtaaatggctatctccaggtagtctggggaagctgtaatctccttttctcttccaggcgctggcagaactgtcaaccatgcagagtgaaaggatatcccaatagaattacccgccaagcacgtatattccccagcgtcctcaaaagttacattccgaatatagagaacctcaatctctttgtccgtggtgttaacaccggcggccttgagaaccttgagaaccttgaggtagggcagcccgtcgggcccgtatttactgccgttcttttccacgtgcttgatccactggatgtggggctgggcatcactgtaaaccttgcagacaaactctacgtctcctccgaccactgtggaggcatttgccggcagtccggcttggaggatgggccggtgaggcgatcgctccacaacatccaggtggtacgtgtgattgatggacccgtattcattctccaccacacaggtataatttcccttgtcagatgggaccacactttccataatgaggctccagtgctggtttcgtaccttgtagcctccaatgcgatgctcctgcttaaactccttcccgtttttcagccaccgcatggttggcattgggttccccccggctgggcagcgaaacttgacagtgttggccgcaggcacagcatggagccgcttttccatcttttctgtgttggtccagtatggtgctctcttgttgttactgttctcactgacaaaatcttccgcaccatcgggtgtcatcctcatcatctccggatgagatggcatctgtgacattcaccatgaagtacccaagtttcactgtctacagtcctactggcagtacaagcatagaggccggagtctctaggcgtggcgccctttatctgcaagtactccccaataagcactgtcctattgttgggccccaagtgcaccccatccttagtccaactgatcacggcggcatctttcaacaggcagcgcacctctagcgactcccctggcgcagccacgtacacttctggttgagagatttggtatttggttggtggctcttctggctctaatgtggtatcctcaactaaactgaaggagggccgggccagggacaaggttgccatggtgaccacgaccaggcagatgaaacgaccccagctgaccatggttacggtaccaatccccggtcctcttccatatctccatgtggacgttaatcccatctgcacacttcctctacgggcatggactacgcgcaatgccttcagcctgcggtgggctcaggaaccgaggcgctgccgctgctgctgcagtcacttgaatggcaacgctcctccgcgacctgtgttgtccccgcgccccgcgtgggtcgggatggagaaagcgacgagcccggggttgtggggagcaactccaaacgcagaagagtggtccttgggtcttcgccggcgccaagcctcccgggcttcagcgcgtaccccaggctgcggaggagcgcgggcatgacgcccgcgggctgccctcggatttggggaacgagaggaagaaaggactcaggcttggcgttgcctccaccaaactttgctcgcgagttgcgaaggctcagagcgcgcaggcaagctgcggcctcggggcccccggggctcgcggccggcccccgccagcccggagagcagtcgccgcgccgggccaggtacgccgcatgcagccccgcggcgcccgagctttgtggcggccgcgcgcgctccctcgcccgctcggtagcagtccacagatg

SEQ ID NO: 75943 - DNA, 867 bp, Homo sapiens; identical to SEQ ID NO: 61368

SEQ ID NO: 75944 - DNA, 4615 bp, Homo sapiens
agccattttacttatgggaaacagtgtggcgtattctgctgagcttcgcgctggaagaagcctcttttatacatctcttcagggaagagagaagcaatgggcatgttagtatacaatgatcacagccacgcaggcctgcaagctgccttttggacaggctgttgactgccgttccaattagctgattggagaatgtggaatgcagagtgataatgctgcatatctgctatcaggcagcagcaaaggtttttgtcttgggaaggcaagctttccctgcaatattatctcagcagctccctagctgcttaccctgaaaacgagggatccaaacggagggtgttgcactctgctaacgctggtcctgtgcgtggctgtggcatatgagcggcaggtctgaaaaagcaggtgtgtgctgggacgggcactggactggaacgcaggcggacgctctcgggtttacctgcttcctgttaacagattgtgggctcccagggcatatgtctgcacgctgaggccgaggcggagaaggggcttcctgagcgtcccagtacactgacagagacacttggattggacttaatcttaaacctctggagttcaagaccttttaaaaagggctaaataaacaatctctacatgtaaaaggccactgactcctacttcctctgtatagagcaactgttgaactcagctgcctgtaggaaaactgaagactttaataacaaactctccaaggtgaaaatgaacacagcggtgggtgtgctcgcaaacgtgccgccatgtctgttacgctaacatctgtgaagagagtgcaaagttctccaaacctattggctgcagggcgtgattctcagtcaccagactcagcaaaaggttttagaagcgttcgaccaaacctacaagataaaagatcaccaactcagagccagataacagtgaatggaaactcaggaggtgccgtgagtcccatgagttactatcagaggccgttttccccctcggcatattctctcccagcctcactcaactccagcattgtcatgcagcacggcacatccctcgattccacagacacatatccccagcatgcgcagtctctggatggcaccaccagcagctctatccccctgtaccgatcctcagaggaagagaagagagtgacagtcatcaaagccccgcattacccagggatcgggcccgtggatgaatccggaatccccacagcaattagaacgacagtcgaccggcccaaggactggtacaagacgatgtttaagcaaattcacatggtgcacaagccggatgatgacacagacatgtataatactccttatacatacaatgcaggtctgtacaacccaccctacagtgctcagtcacaccctgctgcaaagacccaaacctacagacctctttccaaaagccactccgacaacagccccaatgcctttaaggatgcgtcctccccagtgcctcccccacatgttccacctccagtcccgccgcttcgaccaagagatcggtcttcaacagaaaagcatgactgggatcctccagacagaaaagtggacacaagaaaatttcggtctgagccaaggagtatttttgaatatgaacctggcaagtcatcaattcttcagcatgaaagaccagcctccttgtatcagtcctctatagacagaagcctggaaagacccatgagttctgcaagcatggccagtgacttcaggaagcggaggaagagcgagcctgcagtgggtccaccacggggcttgggagatcaaagtgcgagcaggactagcccaggccgagtggacctcccaggatcaagcaccactcttacaaagtctttcactagctcttctccttcttccccatcaagagcaaaaggtggggatgatagcaaaatatgtccatccctttgcagttactcagggctcaacggcaacccctccagtgagttagattactgtagcacttacagacagcacttggatgtccctcgggactcaccaagagccattagtttcaagaacggctggcaaatggcccggcaaaacgcagaaatctggagcagcacggaagaaaccgtctctcccaaaatcaaatcccggagctgtgacgatctcctaaacgacgactgcgatagcttcccggacccgaaagtcaagtcggaaagcatgggctccctgttatgtgaggaggactccaaggagagctgccccatggcgtgggggtccccctacgtcccggaggttcgcagtaacggcagatcaaggatcagacacaggtcagcccgcaacgccccggggttcctgaagatgtacaagaaaatgcaccgcatcaaccgcaaggacctgatgaactccgaggtgatctgctccgtgaagtccaggattctgcagtacgagagcgagcagcagcacaaggacctgctgcgcgcctggagccagtgctccacggaggaggtgccccgggacatggtgcccacacgcatctccgaattcgaaaagctgatccagaagtccaaatccatgccaaatttaggggatgacatgctgtctcccgtaaccctagaaccaccgcaaaatggcctatgtcccaagaggcggttttccattgagtatttgctggaggaagaaaatcaaagcggcccccccgctcggggccggcgaggctgccagtctaacgccctggtgcccattcacattgaagtcaccagcgatgagcagccccgagcacacgtggagttttccgacagcgaccaggacggggttgtgtccgaccacagtgactacattcacctagaggggtcatccttctgcagtgaaagtgactttgatcacttttccttcacatcctccgaaagcttttacggatccagccaccaccaccaccatcaccaccaccaccaccaccgccacctcatcagctcctgcaaaggcaggtgcccggcctcctacactcgatttaccacaatgttaaaacacgaaagagccagacacgaaaacaccgaggagcccagaaggcaagaaatggaccctggcctttctaaacttgcttttctagtcagtcctgtgcctttccggaggaaaaaaaattcggctcctaagaaacagactgaaaaggcaaaatgtaaagcatctgtgtttgaggctctggactctgcccttaaagacatctgtgaccaaattaaagctgaaaagaaaagggggagcttgccggacaacagcatcctgcaccgcctcatcagtgagctgctgccagatgttcccgagaggaactcatccctgagagcgctgaggaggagccccctgcaccagcctctccacccactgcctcccgatggtgctattcattgtccaccctaccagaatgactgcggaagaatgccccgcagttgcctctttccaaggacgtgggacacaggccaacaggcagtttgccaccaccaagaccgtgggcggtggcattccaagaccgtgagtcccctagaagttactcatccactttgactgacatggggagaagtgcaccaagggaaagaagaggaactccagaaaaagagaaattgcctgcaaaagctgtttatgattttaaggctcagacatctaaggagttgtcatttaagaaaggagatactgtctacatcctcaggaaaattgatcaaaattggtatgagggagaacaccacgggagagtgggcatcttcccgatctcatacgtagagaaactcacacctcctgagaaagcacagcctgcaagaccacctccgccagcccagcccggagaaatcggagaagctatagccaaatacaacttcaacgcagacacaaatgtggagctgtcactgagaaagggagatagagttattcttcttaaaagagttgatcaaaactggtatgaaggtaaaatcccaggaaccaacagacaaggcatcttccctgtttcctatgtggaggtcgtcaagaagaacacaaaaggtgctgaggactaccctgaccctccaataccccacagctattctagtgataggattcacagcttgagctcaaataagccacagcgtcctgtgtttactcatgaaaatattcaaggtgggggggaaccgtttcaggctctgtataactatactcccaggaatgaagatgagctggagctcagagaaagtgatgtcattgatgtcatgggaaaagtgtggatgacggctggtttgtgggggacctcaaggaaggaaccaaatttcttttgggtactttccccaggaaaactacgttcaaagaggctgtgaaattgcgctcccttccttcttgtaagaggccgcctgccaagccatgcaccttgcgtcaacgcgcctgaaacacccccgcgggcctcccgttgtcatgccttacggtttccaatgcgccgtcaccatctccacttggccaccaaaccaccagcagagtagccgccgctgctgtgagcctggggacgacatggcaggctggtccccctccgtgaaagtgtggattcctacttcctgctctaagctttgacaccgtcaaaatgtgggatcagaaagaaaaaaaatcatgatatttaaaaatggtcaaatatttgaggcaaaaaaaaa

SEQ ID NO: 75945 - DNA, 4146 bp, Homo sapiens; identical to SEQ ID NO: 61370
  misc_feature (1)...(4146): n = a,t,c or g

SEQ ID NO: 75946 - DNA, 920 bp, Homo sapiens; identical to SEQ ID NO: 61371

SEQ ID NO: 75947 - DNA, 1092 bp, Homo sapiens; identical to SEQ ID NO: 61372

SEQ ID NO: 75948 - DNA, 5725 bp, Homo sapiens
  misc_feature (1)...(5725): n = a,t,c or g
ttttttttttttaaggactgcagtatttattttatttttatattatttatttattctttgttagtttttggagtgtgggttttgttttgttttttgaattttttattttgttctaactcggttttattcttattgctcaaggcttgagtgcaactggcctcttctcaagcntcaacctccgccttcttgggttcgggtaatgatggttccacgtcagcggccctccgccttcttgggtttgcgttaagggttccacggtcaccgaaccctccgcctcttggggttcgggtgatgatgggttccaccgnttcaagccgggggggcccccccccccccccctccgccctccttgggtttgccgtgaacggttccacaatcaccgacccttacgcctcttgggttcgggtgatgatgggttccacgtcagcgggccctccgcctcttgggtttgcgtgacggttccacgtcaccgaccctccgcctcttgggttcgggaggtggttccatctcagccgccctctgcctcttgggtttgcgtggtttttctgcctcagcctcctgagtagctaagggaggtgtcttgagattatcatccgctgagggtggaagcggcccccgcagacgctcggcaggtgtcttgatattatcatctgctgagggtggagctgagggtggaaggggagtgagctgacgctcagaaggtgtcttgagattatcatccgctgagggtggaagcggccccccgcagacgctcggcaggtgtcttgatattatcatctgctgagggtggagctgagggtggaaggggagtgagctgacgctcggaaggtgtcttgagattatcatccgctgagggtggaagcggcccccgcagacgctccccgcagacgctcggcaggtgtcttgatattatcatctgctgagggtggagctgagggtggaaagggagtgagctgacgctcggaaggtgtcttgagattatcatccgctgagggtggaagcggcccccgcagacgctccccgcagacgctcggcaggtgtcttgatattatcatctgctgagggtggagctgagggtggaaggggagtgagctgacgctcggaaggtgtcttgagattatcatccgctgagggtggaagcggcccccgcagacgctcggcaggtgtcttgatattatcatctgctgagggtggagctgagggtggaaggggagtgagctgacgctcggaaggtgtcttgagattatcatccgctgagggtggaagcggcccccgcagacgctcggcaggtgtcttgatattatcatctgctgagggtggagctgagggtggaaggggagtgagctgatgctcggaaggtgtcttgagattatcatccgctgagggtggaagcggcccccgcagacgctcggcaggtgtcttgatattatcatctgctgagggtggagctgagggtggaaggggagtgagctgacgctcggaaggtgtcttgagattatcatcggctgatggtggaagcggaatccgcagacgctcagcaggtatcttgatattatcatctgctgagggtggagctgagggtggaaggggagtgagctgacgctcggaaggtgtcttgagattatcatccgctgagggtggaagcggcccccgcagacggctcgccaggtgtccttgatattatcatctgctaagggtgaagctaagggtggaaggggagtgagctgacgctcggaaggtgtcttgagattatcatccgctgagggtggaagcggcccccgcagacgctccccgcagacgctcggcaggtgtcttgatattatcatctgctgagggtggagctgagggtggaaagggagtgagctgacgctcggaaggtgtcttgagattatcatccgctaagggtggaaaacggccccccgcaaacgcctcggccaggtgtccttgaatattatcatctgcctgagggtggagctgagggtggaaaggggaagttgagcgcacgctcggaaggtgtcttgagattatcatctgctgagggtggaagcggccctcgcagacgctccncgcagacgctcggcaggtgtcttgatattatcatctgctgaagggtggagctgagggtggaaggggaagttgagcgcacgctcggaaggtgtcttgagattatcatccgctgagggtggaaagcggcccgcgcagacgctcggcaggtgtcttgatattatcatctgctgagggtggagctgagggtggaagggggaggttactgacgctcggaaggtgtcttgagattatcatccgctgagggtggaaggggatggagcagagtactcggcacgtgtcttgagattatcatccgctgagggtggggctgggggtggagctgagggtggaaggggagtgagcagacactcgggaggtgtcttgagattatcatccgctgagggtggaaggggagtgagcagacactcgggaggtgtcttgagattatcatccgctgagggtggaaggggagtgagcagacactcaggaggtgtcttgagattatcatccgctgagtgnaaggtagagctgagggtggaaggggagtgagcacacactcgggaggtgtcttgagattatcatccgctgagggtggaaggggagtgagcacacactcgggaggtgtcttgaggctcagggagttatcagttatagaatgttgttgagttggaggaggtggctggtggcccatcctgttttttaaagtttcagctgtgaggtagggccagtagggcaatcctgaagaatgacgatgctccgctgccgccattctgacccagttgcaaagagcctttcttgcagaaggggggattttgcatttgtggtagtcctctgctcgccgccgcaactcttgcgcacgttgaaacattttctgttttctggcggtcttcctctttccattgattttgtcatgacggttgattttcgttgtcaccttcctcttacggattttagctctaacttttgtttccacatgcctccgtagagtaatgacgtctttcaggccaattttatttcctcgaaaggaagaaactcttttctttgtgtgcatacaaatggacctcagcccttcctgtctacggcggttggacctccaggctctctgctgtacatccgtggatccatcatgtccatttcgagaccagaagatagtcttcaggagagacacccaaaggtaaactatccagagggtaatgacaactttataacttgtcggaaacgcaataatgacatgtaaccaaggacttccaccaaagtcagtcccacgatgatgatggtcagacagagtattgataaccttcctcaggtactcgcatgggcatgtcactgactttacatgctgctgcagctccttggtgagctggccctggtcatgggacaggaactgtggggtcaggacaatagagagcttcaccatttgcagaatgagaacaggggctcatgatgagtgccaacctcagttttcttctgtgtgaaacaggaacaatagtttcattcgtcattcagtttctctcaagatttcacgagatcatacctttaattttctccaacaactgattctggtacacagtataccttaatgcctgcatccacggcctcacgtcatgctgtttacatgaacgtaaagcttcgccgaagagtggaataagacagtcctctgttgaaagtctgttagaaactgtggtctccaaagcagacgagcaatacagctgcaaggtacttagaactggcaaagactgtgaaactgttaaagtagaaagtctcagaggtccaatagcgatgcgggatgtttgcttcaagtactttaccacattttcagttatagactgccacttctgatcttgttctatcgggtttaaagcagttgccaaacaaacagaacttcttaacaatggaacttcaatggatttctgaggttcccttggatctggacttcacatgttacgaagcagttttttcatgtctattttttcttttgatcctccagcaagtagattgatattttctcctggtaacaattctaattgctcggtacattcaacaaattttccagactcaaagctgcttaatgattttatatagttgaagtcagctttcaggttgagggaagtgctactggtactctttttcaagtcatggatagcgttctgccattcctgcacagcagcccaatcggcagttgagatgtagcactcacatgctttgtttcctaaataatttataacctcaggggaagagtcagtcggtttggacagcacactttttctggattcaccattcagacaatgtttcaggctggcactcttacacccagcactggctaaggtgagcaccgatttgtcaaagctggagatgcagcaatcaacacctgtcatggcacacaggtgttcctggtactccacagaggccttttcaaacctcccttcagcctgttgagccactgagttaatccacagaagatgttttccaacaatagatgatgaccagacagcaattccctgtatagcttcaggacaatgaagttcacatagtgcttctaccaccatcataatgcttacttccaattcattcccctgagataggctggttgttttcatctctgtaagcaagtcaaagccatgtctcactgtcactgcaggctggcctgccaacaatcctaccctcatgatggagagtcgaatccgcgttagccagtcctgacaagtttggcgattggtatacaaaaaagttctaatgaccttgggaggtgaagttaaggcattagcacatccctcgtatgcattatacattaatttctccagattttccagatactgcagaagaagaacaagtctaagttggttgttaccatggccttcatcattgtctgcagttgtccactgactaacatcctgatcagggtttaatgtgtgacctgcgagacttcgaatgataccttcaattgtctggaaggtgtcttgagctctgcccagtggggttctcagcttagaaagaacagtgaattgtgcagcttcccatatggcccactgccaaaggacagcatctgtcttcaggagattgcgtggaattgttgactggtcacgcttatccagtctctggcagctatagaacagtctttccaaccaattgtccttccctgttctatgagagttcccatacaaaataaaactaatacatcagagaaatcttgggggtggaatgtattacttggtgctttactcatgtgacttcttaatgctaaagaaatttcttgaatttctgtgtgattgttattgcttaggaaaacacctaaaggaattgatttcaacagttttccaaatgcttgtcgaatacaagttccacggtgcactagttggacacggcaaacatcaacacatctctgtaaaagatcatctggcaaggaagaggatagagcatgtagactgctgcatgcctgcagacagatattcacatcttcaacgagagtgtcggctaaaaggcctttgcaaaatttatggaaagacggaagacagaataaaggtgcatatgtttcggacttcttcattacaacagctacttccaaagcccaagtcattaacagtttcctcgtgtcctggttatctttcttaagtaacattcccagaagatttaatataattgagaaatgtttctttgtggccatagttacagtgctcgtgcc

SEQ ID NO: 75949 - DNA, 2006 bp, Homo sapiens; identical to SEQ ID NO: 61373

SEQ ID NO: 75950 - DNA, 1923 bp, Homo sapiens; identical to SEQ ID NO: 61374

SEQ ID NO: 75951 - DNA, 1209 bp, Homo sapiens; identical to SEQ ID NO: 61264
  misc_feature (1)...(1209): n = a,t,c or g

SEQ ID NO: 75952 - DNA, 2338 bp, Homo sapiens; identical to SEQ ID NO: 61376

SEQ ID NO: 75953 - DNA, 4357 bp, Homo sapiens; identical to SEQ ID NO: 61377

SEQ ID NO: 75954 - DNA, 2959 bp, Homo sapiens; identical to SEQ ID NO: 61378

SEQ ID NO: 75955 - DNA, 1583 bp, Homo sapiens
aattcccagacaacgacagctgatcaactacttgaattttttaaacaagttggagaagtgaagtttgtgcggatggcaggtgatgagactcagccaactcggtttgcttttgtggaatttgcagaccaaaattctgtaccaagggcccttgcttttaatggagttatgtttggagacaggccactgaaaataaatcactccaacaatgcaatagtaaaaccccctgagatgacacctcaggctgcagctaaggagttagaagaagtaatgaagcgagtacgagaagctcagtcatttatctcagcagctattgaaccagggtggctgcactcaacgagtttatgcaatgactttcttggatgtttctgaaggaggaggatgtacagagagtaggccccttgcactatatgtggtacattccacttgtgcctgattattaactgggatctttaattgttctgagcttacactgcaaagtgattttttcctcccagagtctggaaagagcaatgaaagaaaaggcggtcgatctcgttcccatactcgctcaaaatccaggtctagctcaaaatcccattctagaaggaaaagatcacaatcaaaacacaggagtagatcccataatagatcacgttcaagacagaaagacagacgtagatctaagagcccacataaaaaacgctctaaatcaagggagagacggaagtcaaggagtcgttcgcattcacgggacaagagaaaagacactcgagaaaagatcaaggaaaaggaaagagtgaaagagaaagacagggaaaaggagagagagagggaaaaggaacgtgaaaaagaaaaggaacggggtaaaaacaaagaccgggacaaggaacgggaaaaggaccgggaaaaagacaaggaaaaggacagagagagagaacgggaaaaagagcatgagaaggatcgagacaaagagaaggaaaaggaacaggacaaagaaaaggaacgagaaaaagacagatccaaagagatagatgaaaaaagaaagaaggataaaaaatccagaacaccacccaggagttacaatgcatcgcgaagatctcgtagttccagcagggaaaggcgtaggaggaggagcaggagttcttccagatcgccaagaacatcaaaaaccataaaaaggaaatcttctagatctccgtcccccaggagcagaaataagaaggataaaaagagagaaaaagaaagggaccacatcagtgaaagaagagagagagaacgttcaacgtctatgagaaagagttctaatgatagagatgggaaggagaagttggagaagaacagtacttcacttaaagagaaagagcacaataaagaaccagattcaagtgtgagcaaagaagtagatgacaaggatgcaccaaggactgaggaaaacaaaatacagcacaatgggaattgtcagctgaatgaagaaaacctctctaccaaaacagaagcagtataggaccgacaagtgtacctctgcactcaatgctggaatcaaatccaaagcttttaattctctcaacaagatgtaaacaggaaagaaatctagttgagcatga

SEQ ID NO: 75956 - DNA, 835 bp, Homo sapiens; identical to SEQ ID NO: 60361

SEQ ID NO: 75957 - DNA, 985 bp, Homo sapiens; identical to SEQ ID NO: 60363

SEQ ID NO: 75958 - DNA, 893 bp, Homo sapiens
ggaaggggggcccccggaggtttttttttatgggcccccccccttttttttaattatatttttttttatttttttttttttttttttttttttttttttttttttttttttttttttttttttttttttttttttggcatttttaatttaggtttgttttatttaagtttaatgttaattccatgctgtgtttcagtaagaacaatacagattctgtatctgtggctccagtcagatatccagtagtacaaattagcttcaagttacacatactgaacaaaagaggttgagcgagcgaaggaggggaggagtgaggggaaggaggtagggggagggggaaggagaagaaacaaaagaattgaacaggcatgcaggcttttccataccaccttcaacgctaacctgcttcagtgggagagtaaagtaggcaagaatgagcagccacggattgttgaactgttaccagcaccatgcttttcagcaacatttcagcggagttggaaacattttttacagcaaaaccattacaacgaagtccctccccaaaccacctttaaccatctcaagctaacacccaattacttgcaaacactggtataaaacacagtttaaacaattagaaaaatgaaaactgataccacttatgcctctatagtgtgattaacctctctcttagatgcttgcatcacctataagtctaatggctttcaaatgtaatttccatttgctaatggtgatcttgccacatctggcacggagacgacacagtaatgctgaaaaagcctctatgtagtcctgttagtgtcttaaagaacctaaaagctgggaccagtaaaatccacagaaattcactcttgcctttaagaacttttgaaaactgtttaaaaaaaaaa

SEQ ID NO: 75959 - DNA, 3365 bp, Homo sapiens; identical to SEQ ID NO: 60366

SEQ ID NO: 75960 - DNA, 396 bp, Homo sapiens; identical to SEQ ID NO: 60367

SEQ ID NO: 75961 - DNA, 360 bp, Homo sapiens; identical to SEQ ID NO: 60368

SEQ ID NO: 75962 - DNA, 1348 bp, Homo sapiens; identical to SEQ ID NO: 60369

SEQ ID NO: 75963 - DNA, 5272 bp, Homo sapiens
ggggagcacggagctgcagccggttgggccggtgtactttcccgctctggaaaggaagagaaatggaagtgagaaagttgagcatttcctggcagttcttgatagttctggttctgatcctgcaaattctgtctgcgttggattttgacccatacagagtcctaggggtcagccgaacagccagtcaggctgatattaaaaaggcttataagaagctcgcccgggaatggcatcctgacaaaaacaaagatcctggagcagaagacaagttcattcaaatcagtaaggcttacgagattctttcaaatgaagaaaagagatcaaattatgatcaatatggagacgctggagagaaccagggctaccagaagcagcaacagcagcgagagtatcgcttccgccatttccatgaaaatttttattttgatgaatccttttttcacttcccttttaattctgaacggcgggactcaattgacgaaaagtatttattgcacttttcacattatgtgaatgaagtggctccagatagcttcaagaaaccctacctcatcaagatcacctccgattggtgctttagctgcattcatatcgagcctgtgtggaaagaagtcattcaagaactggaagaattgggtgtaggaattggcgtggtccatgctgggtatgagagacgcctggcccatcacctaggggcacacagcacgccctctatcctaggaatcattaacgggaaaatctccttcttccacaatgcagttgtccgtgaaaatctgcgacaatttgtagaaagtcttcttccagggaacttggtggagaaagttacaaataaaaattacgtcagattcctctctggctggcagcaagagaataagcctcatgtccttctgtttgaccaaacgcccattgtgccactgttatacaagttgactgcctttgcatacaaagattatttatcatttggatatgtatatgtgggtttgagagggacggaagagatgacaaggcggtacaacatcaatatctacgcccctaccctcttggtctttaaagaacatataaacaggcctgccgatgttatccaggcccgaggtatgaagaagcaaatcattgacgacttcatcacccgaaacaaatatctattggcagccaggctcaccagccagaagttgttccatgaactctgccctgtgaaacggtcgcatcgacagaggaagtactgtgtggttttattgactgctgagactaccaagttgagcaaaccctttgaggctttcctgtcctttgccctggcaaacactcaagacacagtgagatttgtgcatgtctacagcaatcggcagcaggagtttgccgacaccttactaccagacagtgaggcgtttcaagggaaatcagcggtgtctattttagaaaggcgcaacacagcaggaagggtggtgtataaaaccctggaagacccttggattgggagtgagagtgacaaatttatcctcttgggctatctcgaccagctgcgtaaagatccagctcttctgtcctctgaagcagtgcttcctgacctgaccgatgaacttgcccctgtttttctccttcgatggttctactctgcttctgactacatctcagactgctgggatagcatttttcacaacaactggcgggaaatgatgcccctgctgtccctgatcttctctgccctcttcatcctcttcggcactgtcatcgttcaggctttcagcgactctaatgatgagcgagagtcaagccctccagaaaaagaggaagcccaagagaagactgggaaaactgagccaagcttcaccaaagaaaacagcagcaagattcctaaaaaaggctttgtggaggtaactgaactcacagatgtaacatacaccagtaacttggtacgtctgaggccaggccacatgaatgtggtcctcatcctgtcgaattctaccaagaccagcctactacagaaatttgctttggaggtctacacatttactgggagcagctgcctacacttctccttcctgagtctagataaacacagagaatggctagaatacttactagaatttgctcaagatgcagctccaatcccaaaccaatatgataagcatttcatggagcgtgactacactggttatgtactggctctgaatggccacaagaaatacttctgcctcttcaagccccaaaagacagtcgaagagggagggaagccataggggtcgtgcagtgatgttgactcttccctctacctgggtgaatctcgagggaaaccttcctgtggccttggatccaggcccatcaaaggaaagttgagcaagctctctttatggatggaacgcctgctggagggctccttacagaggttttatatcccatcatggcctgaactagactgagaggattttccaaagagatttgaactcttcagactttttaacatgcccctgtgaacaggtattttcaggactcaaactaccacaatgaacagagtatagattttagattgctcttctagaaccatggctagaagaatctttcctttgtcctgttctaacctaggaatgaaaaacaccaccagtttgaatcgcctaaatgaaaatcttttcctctgggtgttatttttccccactgaatgccacaccattgaaaatagactgctcatcccctcttcctttcttgtccttgtcccatgctcaccccaccctcctgtcctgtgtcttggagaagcacagggctccaccctggcaagcggcatctggcggaccctcatgagcctgttcgtgcaggccaggtcattggcccctttcccaattccggccctgctgtgctgctgccatggcgcatgctcctaactctgaacaacccacggcagcttctagccccgcatctggaaaaaggcccctttccaagcaatctcacgtttactggttgttctgggagtaagtggctaaatgtatattttgggggtatcccccaacaacagtttgttggccacaggttgaaaaggaaaggaataaacgggagttctgcatgtgagttctcaagaaaaggaaagggaggctgagcagtggctgaagcgatgcagccttgagacacgctgtgagcatcccatccgccgccccagcgctgctggtagccaggggaggggtctgcacagcgagaagtactgtgatgactttgagccgttgacatgtatgtcttcagatgcctttctgcctctgtcgattttagggtatggatattaggagccataacttgtaatcttgttctctgaacgtagagataagctgctataaagccagtagatgttaaactgaagagaaattattcccacctgctatgagtcaggcttaaggaatctcttcaatagtgtctctttagtaaaataccaaacatgtctttgtatcaaggaacttaaaatttctcaacaattgtattttgaacactgttaccctaaaagtgctgtctcttcaagtcatcttttgcaggaagtgagccaagatttgttctagactcccattttgcaaaaggcttactttccacttctgggctgtattttgatgtctcatcttcattgttttcactcttaacttagagctgcttcaccagtattggggtcagactggccatcagcacctgagcgtgctgagctccaggtatagtggaccccagggtgcctcataccagccagttagagagcataccttttatttttcagggcagaatgaccagtggttctgagtttgagtttggacagcttcaaagagtggtccgttcaaatgtcaaagcaaggtgcctttggtggctttgtgaagggtgaaaatcagtgatgggacatttactaagtatttctttttttttttttttttttttagttgttgagacagagtttcactcttgttgcccaggctggagtgaaatggtgcgatctcggttcaccgcaacctccacatcccaggttcaagtgattctcctgcctcagcctcctgagtagctaggattacaggcatgtgccaccatgtaattagcccggctaattttgtatttttagtagagacgggatttctccatgttgatcaggctggtcatgaactcctgacctcaggtgatctgcctgcctcagcctcccaaagtgctgctgggatcacaggcgtgagccaccactcccggctaagttagtatttctttaatcttaatgctttaaactaagccacttggatcctgaataatttaaatcttgagctacattggtaagtaataaattatttaaggccaggaattcctgtagttttcatggagtctgtagctttattaaaaaataaatcactgccaggcttcattcttccatatgatcctctaaaaatggacacttcctctgaatgctgtatctcatggcacctggtccaactagaaatggtcaaggaattcatttggctccttgatacatcagtcctcaatattactttctaggtattttatggccagattgcttatatgagtggtcttttggtttggtagtaggtttttatttttaatttctgtactaatgaaattcctgactttaatttctgaaaaccaaaaactctccaagtgtatttatttatattttttttaatagagacgaggtcttgctatgttgcccaggctggtcccaaactcctggcctcaagcagtccttccaccttggcctcccaaagtgctgggattatcagtatgagccaccatgccagatttgttcatttttaaacatttttatctcttcaagtcatcttttgatcttttaaaaagcaccttcaaacagctgcaccttccatttgcactaggaaatgaaggtagtgatgggattggcaatgttcctggcagatgtttcagcccaaaagctcttctacagaccggtttagagctggtgccctatgagaatattagggagcttttattttaaattgaactttacccttgtccatgcaaggcattcctcctgaatgcatccatgaatttgtttacttttgcgtcaaacatatgagccattgtcatgctcagcctgtgccaccattggctctgtctgatgtaagtaatcatacaagacctgattttgggttctaacacagtgggtctttggactattcaacattggatggtttttagagatgggttcttctggttgatacagactactgcattgcgtttagcagatggggtaaaactggcctaaaacaagtctttgcagaatacatgccaatttccaaaaaaaaaa

SEQ ID NO: 75964 - DNA, 2018 bp, Homo sapiens; identical to SEQ ID NO: 60371

SEQ ID NO: 75965 - DNA, 338 bp, Homo sapiens; identical to SEQ ID NO: 60373

SEQ ID NO: 75966 - DNA, 5941 bp, Homo sapiens; identical to SEQ ID NO: 60374

SEQ ID NO: 75967 - DNA, 816 bp, Homo sapiens; identical to SEQ ID NO: 60375

SEQ ID NO: 75968 - DNA, 3039 bp, Homo sapiens; identical to SEQ ID NO: 60376

SEQ ID NO: 75969 - DNA, 1919 bp, Homo sapiens
  misc_feature (1)...(1919): n = a,t,c or g
ttttttttttttagaaaaatgaaagctgatttttattttatcatcaacagccattctttagacatgaacatgcatacgtaatattctacgcacacatcacagcttttaacgttagttaataaaggttaaacacacaacatacatccttacaaaaaaagtcaaaatgcaaacttaaaactttaaacaaaagtattactaatttaaaaaaagtttgtgttgggtaccatttgtacaacacagttaatttaaacattttcattttggttgcacatgaaaaaggcggcagtagaaaataaagtcattgagggtttttaaatagcagaataggcagttttgccatgcaggagaagcaatattaaatattagtttcaaaaaaaatccacatttaaaaatatttagttcaagtcacagaatttttctcagtagagaccccaatgcaatgcataattagctgccttagatggcccgtttgaaaggatgatatcccttcagagtgtaactttactgattttggcacagaaaagaagtcttaagaacatgattaaaaaagagggaagaggaacagaggaaagaaataaaagcaagaataaatgagatagtaattgcaatcactaaaaaactgcattctcagtcattgcagaatactgtcttctgtctacagcaggtgcttattccagaattgttattgcagcatggatttaatttgcttggaggtagtctcatcattcaaatgttttgttgtgtacctgagagcatttagaagaccttccacactattaggaggttggtccttaagaactttgatacaacctttcatatcaattttggaagttttagcaaatgctcccactggatgtacgtggtcatagagtattatgacacccaccattaccctcaagcagaatgacactgtctcttcatttgtaaatctgcttctgtattccggtgtttccagcatgactctgcatacactagccattgtgcttaaacaatctgtggtattttctattggtaaatttttattctctgatacaaattttgttgtggcatcactcaaggttttcagcattggagttgcctcagcataaaacaaagacattcgatttgccaattcattatttacttcattttctccttctgccggtacattgttaatcctcatacgactcaatgttcttctataatagctgaaatcattctgtatggcaggatttgtcatcttgagttcatcaaaccggagtgtgaaatgaagaatttctgcaaactgtttagcaagagcctgctctcgctctagatgctgggtgggagaatatggggtacttgttaaggctcccagaagacctcttaatgctgcttctaacctctgagaaaattcgtaaaatttctttaatttgcctactagtggaacaactgcaccccatgccttctcttgcaacttctcatctgctggatgctggattgcctctcgtatttcgtggccagctcctctgtatgactgcaagtcctccaagatgccttctgcatcttttaatactacattcacctgattataaatttccttctcagactctgtaggctgggcatctgccacttttcaaaatcaaggaaaaaatttggcccctgctcaaggtctgtgcatgtcaaaactttaagaagattccccatgttaaggtaccttcagccagtgctggtgattctgtccttgtccttctatccttggattggcgttccctctttcctagttcacttgttccagtccttcaacttctgtttcttgctaacaggtgtgcaaatgaattaccaactgggtaaccttgaatgagttaatcaaattccaggcctcagtttcttctccttcgagaagccgagccgccggcgctcgcacaaaaggaggcacgctgntctcgacgcgcctcccc

SEQ ID NO: 75970 - DNA, 1864 bp, Homo sapiens; identical to SEQ ID NO: 60379
  misc_feature (1)...(1864): n = a,t,c or g

SEQ ID NO: 75971 - DNA, 1910 bp, Homo sapiens; identical to SEQ ID NO: 60380

SEQ ID NO: 75972 - DNA, 1978 bp, Homo sapiens; identical to SEQ ID NO: 60381

SEQ ID NO: 75973 - DNA, 2474 bp, Homo sapiens; identical to SEQ ID NO: 60382

SEQ ID NO: 75974 - DNA, 1528 bp, Homo sapiens
  misc_feature (1)...(1528): n = a,t,c or g
cggacgatccacgcgaccggccgcgcgggcgcgagtcccatgcatcggctaatagtttggagactagctgaagcaaataagcaacatgtaagatgtcagaaatgcttggaatttggacattggacttatgaatgcacaggaaaaagaaaatacctacataggccctcaaggacagcagaactaaagaaagctttaaaagaaaaagaaaacagattattattgcaacaaagcattggagaaaccaatgtagaaagaaaggccaagaaaaaaaggtctaagagtgtaaccagttccagtagcagtagcagtgacagttctgccagtgattcttcatcagagagtgaagaaacatctacctcttcctcctcagaggacagtgacactgatgaaagctcctctagttcctcatcctcagcctcctccacaacctcttcctcctcctctgattcagactcagattccagctcttccagtaagcagtagcaccagcacagatagcagctctgacgatgaaccaccaaagaagaagaaaaagaaatagagttgctccattcatattggaccgatggactgaaaacattgatgtgattcttgaaagggaatttagaatatgttaaggccaagtaggttaactggtgaacatttctagaattcaaaagtttctaaatgttttacattgtaagagcatagagaatatttaataatggcttatagagagagacttttatttgaagggtgaatcttgttttttttatctttaaaatatatctctagaacttaaagctgaaaatatgcgtatctgtttgtgtgatgaaactatcttttctctctgtgaaataaatgccatactttgttatatatgttagtggtatgtatcagacatattttcaggatggtgcgtcaggatatctggcagtggatttctaatgcttttggctgtatgttatgtaagatttaatatgttgttactgtaagcttaggagttttcctactattaataaatgtgctctatttttacatttatgttcagaaagttatctgactttttgtcctaagtggtatgttcaaggagcctattaatatatttatagtttttgaatgctgtaagtttcaaattgctgtgttacgtcattcattttcttctggttccttaagtttttcaagttatccttttctgaggaaaattattctagaggaacctaaaaagggacaaaaaaattgaaacttcttaggagtctaatcttggtgccttctgttaaaagtcagtgtatcagaaaagaaagcagccatgtaagaggctaacttaagtagaagtgctagaaatatctttgtgtattaacatgcaataaaaggtaccattcaaagcagggggaaaggtagggaaggaaggaggtaatttttactggaaaattaggggcantgttgggtcgccttttatttaaaagcttttttttaaggctttcataaaggattgcnttttgcccattttttggaaanatgggntttataggtttgtanggggnacccg

SEQ ID NO: 75975 - DNA, 805 bp, Homo sapiens; identical to SEQ ID NO: 60384

SEQ ID NO: 75976 - DNA, 1134 bp, Homo sapiens; identical to SEQ ID NO: 60385

SEQ ID NO: 75977 - DNA, 1828 bp, Homo sapiens; identical to SEQ ID NO: 60386

SEQ ID NO: 75978 - DNA, 1097 bp, Homo sapiens; identical to SEQ ID NO: 60387

SEQ ID NO: 75979 - DNA, 1529 bp, Homo sapiens
  misc_feature (1)...(1529): n = a,t,c or g
gcggccgccacctctccccagcccaggagacggctgcggagccgcagccgcccagaccgcgcagcgcgggaggcaggttccgcacgaaataaatcagaatgagttatgcagaaaaacccgatgaaatcacgagaagatgagtggatggaaaagctcaataacttgcatgtccagagagcagacatgaaccgcctcatcatgaactacctggtcacagagggctttaaggaagcagcggagaagtttcgaatggaatctggaatcgaacctagtgtggatctggaaacacttgatgaacgaatcaagatccgggagatgatactgaaaggtcagattcaggaggccatcgccttgatcaacagcctccacccagagctcttggacacaaaccggtatctttacttccatttgcagcaacagcatttgatcgagctgatccgccagcgggagacagaggcggcgctggagtttgcacagactcagctggcggagcagggcgaggagagccgagagtgcctcacagagatggagcgtaccctggcactgctggcctttgacagtcccgaggagtcgcccttcggagacctcctccacaccatgcagaggcagaaggtgtggagtgaagttaaccaagctgtgctagattatgaaaatcgcgagtcaacacccaaactggcaaaattactgaaactactactttgggctcagaacgagctggaccagaagaaagtaaaatatcccaaaatgacagacctcagcaagggtgtgattgaggagcccaagtagcgcctgcgcttgcgtggtggatccaacaccagccctgcgtcgtgggacttgcctcagatcagcctgcgactgcaagattcttactgcagtagagaactctttttctcccttgtacttttttttgacctggcatctttttatagggaaaaatggcctttgtaggcagtggaaaacttgcaaggaaagctgccgtctctttggcagtctgatgcagagcctgcactctggcactcgctgaagaatctggaaggttgcggtttgctcttccagtgttcgggggcctctggctgctgaaggattcggtctaccacggagggctgtgctgttaggctgcatcccactcaaaatacaggaaaagcacgaatcatgattctgctttctgttagcttaggcagacattgggccttcacctacaagtttttccttacccctgtggtttttgtgtttttttttttctttttccataggaaagaatatataaatttgtaaatcctaattcaaagatggccncgtgtgtgagggccattgagttttgatttgttttccctttggtctgggttagctgtggcttttgggggatgcgtgtgagggggctatgtgttttttaattttttaaatatatattttggtgctgtgtgtgggtaaggagacttgttcctagtggatcaatgaaccatctcttctgggcagttttgttgaaaataaaggtttctctttgatttcaagaatgaccaaaaaaaaaa

SEQ ID NO: 75980 - DNA, 2183 bp, Homo sapiens; identical to SEQ ID NO: 60389

SEQ ID NO: 75981 - DNA, 2301 bp, Homo sapiens
tttcgtgaatatgtggtagggaccaaggcgagtttgaggaatcagagcttgatgctactgtacagaactggacaggttgggccggcagtggtggggccaaagggctctgtgctctaggagctaagccagcagcccccgagaggggacttggctgggcctttcctatgggcaaggcccagtgctcttcctgcccaccagggaccatggagcagtggcaccctatggggctatgatccctaggcctgggcctgggcctgcctgtggcccagagctaccctgggagtgtcagtgctagcagcacagctacctctggtggcaggagaagagaggcccagcacagcagcaggccaggccttcctgtccaggtctgcatggagcactcggtgacccagagcagggactggaggcacccccagccctgccccaggccacagcaggacaggccgggacaggcctcacccaaggccaaggctggcatcagccaatcattcagagctgaggccctgggcctagcctgcccttctcaggggccaataccaccccagccctgcccttggcctcactttttcccagcaataagtggggttcaccacccgcctcgggaatactttccccttctaaatgggacttgctgttacctcaggaggctccttagtgcaaatatgaccctggtcagggctttgccaccgttgaagccctgcagaaggtgcaatgtaggggttctggggccacagaggagaggccacttcccaccaggacccccaacatgaagtctaggcctcaggggctcccgcccttcttcctccagcagcgggaactgccactgctctcccaggccctgttctggaggctaaccttggttcctggagagtgtgcccctccaccctccctccagcagccctgatcacaccatgagagccaggaacgggtcaccctgctgaagatcactctgtgccctgggggaggagccaagccctcaccccacaaggggcaggtgggggcttggttgctgacccggcccaagtccccacagagcaccttctgtagctccagcttgtctccctggcttctctttgaaggagaaaaatgtaaaatatgcactgagaaagccagccccgcctgcttagtcagccccggcagcagggcagccatgggaactcaggaaaagcaggaaccctttccaaaagcccagagatgccctgggctcagatctgtaattctcccaggagctgtgatagagcaggccacacaaagtccctacgcctccctgctgcctcccccagatgcatgtgatggcatcaccattccccaaattgaatatcagcatgcggcctgaccagggactctttagatgcatgaatttatttatatgaaggctctcacagagacacacacagcacttcagtagcatttgcattcctggttaaagaatcaccaatatttaaaataaaaactttcctgaaattgggactgtcatgttatccagaagggctggtacatccgcccaccatgtccccctgctgggtcaggagccaacacaggaccctgcgtgtgagcgtgcctgacatctcacgcacggccactccagagccggtccctgtccttggaaagctgtgaagccttgcgttgagttccttctcgatactgacggctccgtgctgacattctgagctctggagtcacaccagcgcaggggcgtggaggaactgaggtttggaaggaatgccaggtctcgcacagcttggcctcgagaaggtgagaggaaggcaaaggccagggaggggacccagagaggcctggcacacaaggcccaagcaccaccgtcaacacagcccagtccatacagaaatgggtttcatgcctgaaaagctttttacagaaagatgccgcctgtagccagtgacagccgcaaccctacaggcctcagttccttgcagaggtgaggggtagagagtcagcctccctcccttccagcagcgacccagcttccctccacttccaggtggtgctgggctcaccgagggagcactggtgggtgctctgaaaacccacaggatcccacctccaggcccacctgggtcccatctcactctcttcttctttcaccaattgctaacatagaccttgttgggatcacgatggcttcacaagccagctgttgggtttgctatgtcactgtggctcagtcacatccctgcgtgtatactgtctgcggggcacatatgtatccatttagagctaaaggaatcagtgtacactacagctaatcctaataaatccgatgttttcggaaaaaaaaaa

SEQ ID NO: 75982 - DNA, 1130 bp, Homo sapiens; identical to SEQ ID NO: 60391

SEQ ID NO: 75983 - DNA, 1396 bp, Homo sapiens; identical to SEQ ID NO: 60392

SEQ ID NO: 75984 - DNA, 2659 bp, Homo sapiens; identical to SEQ ID NO: 60393

SEQ ID NO: 75985 - DNA, 1257 bp, Homo sapiens; identical to SEQ ID NO: 60394

SEQ ID NO: 75986 - DNA, 1565 bp, Homo sapiens; identical to SEQ ID NO: 60395
  misc_feature (1)...(1565): n = a,t,c or g

SEQ ID NO: 75987 - DNA, 1759 bp, Homo sapiens; identical to SEQ ID NO: 60396

SEQ ID NO: 75988 - DNA, 1499 bp, Homo sapiens; identical to SEQ ID NO: 60397

SEQ ID NO: 75989 - DNA, 2261 bp, Homo sapiens; identical to SEQ ID NO: 60398

SEQ ID NO: 75990 - DNA, 945 bp, Homo sapiens; identical to SEQ ID NO: 60399

SEQ ID NO: 75991 - DNA, 696 bp, Homo sapiens
ttttttttttttaaaggtttgcatgtttatttataattacaatttacattactccaacagaggagcccccttgctatgttctaattcttagccattaagtcctacaaaaataaacccaagcttttacagtaacttaatcaatacagaactaaagcctttatagctattagaggggtttagttaccaaggtgcttattttcgacaaaatgccctgtcactcagaggacgcatgcgtatactaaagttctgacccatcgactcatgcaacaaatgtagaccccaccctccctccacccactgttacaacacaaacacaaaacaacgatgtacaacagaggggaaatatgctcttggtcaactgaccttgcagaaaagactggcttgtttccaagtggatgagaacgccagtgtgtggccagagtccagcaatgactgaccggcccaggtcagaggctggcagggaccacagaagggccaaggcgctgccggggctcatcccaggctccaaccccaacctggaagcttgtggacaccaggctctgtgcagcagctccgtggctagcgtccagggcccctggccactactcccaaatgcttctagtccacccacccctggccagccccaaccttgacatcactgtggatgccatcagggtggtctggttcacttatacaacatgatccatgggctcgtgc

SEQ ID NO: 75992 - DNA, 715 bp, Homo sapiens; identical to SEQ ID NO: 60401

SEQ ID NO: 75993 - DNA, 1041 bp, Homo sapiens
ttttttttttttacacacagacacagaatttatttctggacgcattctgcaggctggaggtcccggcaggcacagggctcacaccttgggttttgcaaacacctcccagccctccagccggcccatcttgaccagggaggccgctatgccaaagtacacgcaggcggcggcgccaatcccgtagttgtgcgtgcgtgctcccagagtcaggcctccggcgcagccaccgaggaagtagttcagggggtcgtcgggcttctcgcggacatgggcgctgatgcaggtggtgaggccaaacacggccccgacagcagctgcagtgaacgtgtattgtccaaccttagccactccttcaaggaaggtgcccggaggattgagtgtgactctgtaggcagcggcggtcaggccagcgacgctggcaatactggtggtgctgtaggctttgcggtggcaatcggtgccatcggggatatcccagtactgacgaaaaaccttcggcgccatagcccgcaatctcgatcccgcaccacggaccccgccagctcgggaagcgcaagggcagcgtcttgtcaatgatccatggataatgggtcagcaggggatttaagaactgtatctttcagttcttgccagagagatacatcaatgtgcactgatgtgagctataatatgacacaccttgcagaaccctcaaaacccttcaggcactctaagctgcttttatgaagatacgggactaaaggttgtcagttaaggatggtattttgtaaataatttcggtaacagaatgatttccctatttctccatattaaattctaatgcataagaattaatcctcaggtttaaaagtccttagttttgttttgattatttccattacattagcagcagatctgtttttaccgatagggtaaaacagacccaatatatgcgttggtttatacatacattattgtatatatacattgtttatcgataagcgtggttggagtagaagcaagttacataatagcgtgctgcgttggtcaagactgagaact

SEQ ID NO: 75994 - DNA, 1227 bp, Homo sapiens
attttgaatggatgaatggtgcatcttagtgcagtggaatacatctagattcttgagtaaaaaggcatgagttactcagggtcgtggttggtggtcaaaccggcactgagccctagatcccacttactcacttggcagacgtactgtgtgtgccttgttctgggcaccgggttaggagctgggctggatacaggtgctgctagttggctctaggcagcaggttttgattggcagtactggagtctgtcttggaacgggctgctccaggtctgtgttcgagggcttctggctccatgtcagtgttgtgaaactctccaggggtggcctggaggccaagcagatgtggcagttctgcagcagaagcatctgccacaaaagcggaagatgactcctttcttcagtgggtcctgctcctcatccctgtgactgcctttggcttggggacatggcaggtccagcgtcggaagtggaagctgaacctgattgcagagttggagtccagagttctggctgagcctgtccctctgccagccgacccaatggaactgaaaaatctggagtataggccagtgaaggtcagggggtgctttgaccattccaaggagctgtatatgatgccccggaccatggtggaccctgtccgggaggcccgggagggcggcctcatctcctcctcaactcagagtggggcctatgtggtcactcccttccactgcaccgacctgggagtcaccatcctggtaaatagagggtttgttcccaggaagaaagtgaatcctgaaacccggcagaaaggccagattgagggagaagtggacctcattgggatggtgaggctgacagaaaccaggcagccttttgtccctgagaacaatccagaaaggaaccactggcattatcgagacctggaagctatggccagaatcacaggcgcagagcccatcttcattgatgccaacttccagagcacagtccctggaggacccattggagggcaaaccagagttactctgaggaacgagcatctgcagtacatcgtgacctggtatggactctctgcagctacatcctacctgtggtttaagaaattcctacgtgggacacctggtgtgtgacagatcagctgctgaagccctgtccctggataatgcagtatttcaagactgcctttatgctggatcatgtgctactggtataaagttctggccttctaccttaaaaaaaaaa

SEQ ID NO: 75995 - DNA, 2044 bp, Homo sapiens; identical to SEQ ID NO: 60402

SEQ ID NO: 75996 - DNA, 2660 bp, Homo sapiens; identical to SEQ ID NO: 60403

SEQ ID NO: 75997 - DNA, 1880 bp, Homo sapiens; identical to SEQ ID NO: 60404

SEQ ID NO: 75998 - DNA, 2317 bp, Homo sapiens; identical to SEQ ID NO: 60405
  misc_feature (1)...(2317): n = a,t,c or g

SEQ ID NO: 75999 - DNA, 1102 bp, Homo sapiens
ttttttttttttggggtgtccttgtagtataaactaatacaccagtcttgtaaaccggagatgaaaaccttttccaaggacaaatcagagaaaaagtctttaactccaccattagcacccaaagctaagattctaatttaaactattctctgttctttcatggggaagcaaatttgggtaccacccaagtattgactcacccatcaacaaccgctatgtatttcgtacattactgccagccaccatgaatattgaacggtaccataaatacttgaccacctgtagtacataaaaacccaatccacatcaaaaccccctccccatgcttacaagcaagcacagcaattaaccttcaactatcacacatcaactgcaactccaaagccacccctcacccactaggataccaacaaacctacctacccttaacagtacatagcacataaagccatttaccgtacatagcacattacagtcaaatcccttctcgtccccatggatgacccccctcagataggggtcccttgaccaccatcctccgtgaaatcaatatcccgcacaagagtgctactctcctcgctccgggcccataacacttgggggtagctaaagtgaactgtatccgacatctggttcctacttcagggccataaagcctaaatagcccacacgttccccttaaataagacatcacgatggatcacaggtctatcaccctattaaccactcacgggagctctccatgcatttggtattttcgtctggggggtgtgcacgcgatagcattgcgagacgctggagccggagcaccctatgtcgcagtatctgtctttgattcctgcctcatcctattatttatcgcacctacgttcaatattacagacggacatacttactaaagtgtgttaattaattaatgcttgtaggacataataataacaattgaatgtctgcacagccgctttccacacagacatcataacaaaaaatttccaccaaacccccccctccccccgcttctggccacagcacttaaacacatctctgccaaaccccaaaaacaaagaaccctaacaccagcctaaccagacggacgcgtggg

SEQ ID NO: 76000 - DNA, 2622 bp, Homo sapiens; identical to SEQ ID NO: 60408

SEQ ID NO: 76001 - DNA, 2150 bp, Homo sapiens
ggacactgtaggccacgtggggcggaacggaaacctcgcagggtcagaccgtagcgacgcgggaagtccggacgcagtagctccctgaagcggaggcgaaggggagtttaagccccagcggcggcaatggcggagaggcccgaggacctaaacctgcccaatgccgtgatcaccaggatcatcaaggaggcgctcccggacggtgtcaacatctccaaggaggcccggagcgccatctcccgcgccgccagcgtcttcgtgctgtacgccacatcctgtgctaacaactttgcaatgaaaggaaagcggaagacgctgaatgccagtgatgtgctctcagccatggaagagatggagttccagcggttcgttaccccattgaaagaagctctggaagcatataggcgggagcagaaaggcaagaaggaggcctcagagcaaaagaagaaggacaaagacaaaaaaacagactcggaagagcaagacaagagcagggatgaggacaatgatgaagacgaagaaaggctggaagaagaagaacagaatgaagaggaagaagtagacaactgaaaagggcgggagactgtggcaccttggaaggtaccacttgaaatgagacgtgctacgtgtttctgtgaagcttttccatgctgggcagagtagtctcaggcaaaagtgcctgaaaagatcagaataaaaactgactagaaataccgtcaaaaccagcacttaccaaactcagagcatctgagtagcagaatcctgttttgcttcatcaatctgaaggttatggccttttgacaagagggattctgaacgactaaattagtcagtttgctcgcttttgtttacttaaatgtatggttagatggtttttgatctgcagtcttccctagtcccccaaataagtaataataacttccatgctgcctgctgtgttccagatcacagaggcagccaaggctcaggaaaaactggggctttgcttatggtcagcctatgtttgattgcacagtctttgacaatagtagcttactaagactgctcagaatgagtaagctttaggaaactactaaaatgctgtgggagaataacaaaatccgttctctctcttcacttgacagaagcattaactgaattttgtttttcatagacccacttggcccaaaacctttctatattgcctgtagatgatcggcctgctggtgtggtagtaatctgatcacagatattcttaaatcagcagtgtggaatggtattagtcaaacatggtgccagtgtcttttacaaaaacagatggcatagtgtcagatgtaccttactctctgctactgtacagctttaggatttgtcatcacctcccggaaggtgtaaaaccccaggcttcctcttcttgtagtccatctcccagacttgtgactatggcttttcattcttcaattcatgacgagtgccaaacttgattttctctaggcacagctttctccctctgtgcctcctgcttcctttctctctcctgcctctcctctgctccccatcccactttctcatctgcctccttttctcacttctgtcagtctgtaagctttgataacctgcttaatactccaaagtgtgagttcctctgatctcttgattccttagttctaatctcacgttttgtttttaagagatggagtctctcactctgtggcccaggctggagtgcagtggcatgatcatagctcattgcatccttgaaatcctgggctcaggtgatcctcccgcctgagcctcctgagtatctgggactacagatgcgtgccaccaagcctggctaattttgtctcatgtcttctaaaaattattttgtgaagccccttcacaaaaaaccttaagggaaatctgatggtgctcaggaatctaactctccctaaaccatcctctttaactgcttctaaaatatctctgttggcctttcttagcctttttctgtttccattcagtgctccaagcgctttttgtttctaagttgagtgcttggggtttgacaggtagtgacgtgtagtttgacactgttaacttgttaaatacagtgaaaagtttgtgagtgaagaatgctgagaagattgtaatgctttgtacaaataaaagtcttgttaaaaaaaaaa

SEQ ID NO: 76002 - DNA, 911 bp, Homo sapiens; identical to SEQ ID NO: 60410
  misc_feature (1)...(911): n = a,t,c or g

SEQ ID NO: 76003 - DNA, 813 bp, Homo sapiens
gccagtggggcagcaaaggccccttggggtaacaaaggtgggatgtggaaggccaggggagcccgggggcgagagtgggggcagatggaggctcgggaagatcagtattgaggaccatgtaggggggagggggccgggaagggacctggctggggaatgagaaaacctggggccatcgtcaacccagagacttgggtttgcaggtgaagggtatcgggccgtccatccctctagcatgcttctcacgacttgcatctttacccactagacttctgcactgacccaggggctggagcgaatcccagaccagctcggctacctggtactgagtgaaggtgcagtgctggcgtcatctggggacctggagaatgatgagcaggcagccagtgccatctctgagctggtcagcacagcctgcggtttccggctgcaccgcggcatgaatgtgcccttcaagcgcctgtctgtggtctttggagaacacacactgctggtgacggtgtcaggacagagggtgtttgtggtgaagaggcagaaccgaggtcgggagcccattgatgtctgagcctgccggagggcgagggtcggagaagcggattgggtcctgggcctctgtgatgaggcaggcacacctgtcggtcttggcttgctgctagaactagggccttctgctcgcccacctcccacccctacctggacgggcccaggcttggggactctgagctgtgttaaggagaacaagggcaaggagacctccctttgtgctccctcactccctaataaacatgagtctgatgttctccaaaaaaaaaa

SEQ ID NO: 76004 - DNA, 2106 bp, Homo sapiens; identical to SEQ ID NO: 60412
  misc_feature (1)...(2106): n = a,t,c or g

SEQ ID NO: 76005 - DNA, 2385 bp, Homo sapiens; identical to SEQ ID NO: 60413

SEQ ID NO: 76006 - DNA, 776 bp, Homo sapiens; identical to SEQ ID NO: 60414

SEQ ID NO: 76007 - DNA, 1584 bp, Homo sapiens; identical to SEQ ID NO: 60415

SEQ ID NO: 76008 - DNA, 1083 bp, Homo sapiens
agggacggaccagctttaactctctgctcgccttcgccgctgtcgccgccacctcctctgatctacgaaagtcatgttacccaacaccgggaggctggcaggatgtacagtttttatcacaggtgcaagccgtggcattggcaaagctattgcattgaaagcagcaaaggatggagcaaatattgttattgctgcaaagaccgcccagccacatccaaaacttctaggcacaatctatactgctgctgaagaaattgaagcagttggaggaaaggccttgccatgtattgttgatgtgagagatgaacagcagatcagtgctgcagtggagaaagccatcaagaaatttggaggaattgatattctggtaaataatgccagtgccattagtttgaccaatacattggacacacctaccaagagattggatctgatgatgaacgtgaacaccagaggcacctaccttgcatctaaagcatgtattccttatttgaaaaagagcaaagttgctcatatccccaatatcagtccaccactgaacctaaatccagtttggttcaaacagcactgtggtaggtggtaggtggtagggtgaggggatggtttgtgcttaatttgttttgaattaaatctgtgtatgtctgatgtaatcacaatctgcacataacattcatcattgaattttctatgccaagtcattaagtggcatttggaaagtagattcttcatcttttatctgtaatttaaaaaattgaggcataattgacattcaataaaatgcacagctcttaatggttcagtttgatgagttttgagaaatgtatataaccaacacccaaatcaagatacagatttttaccatttcagaaagctcttttcatttcccaatggagtgtgttttactgtgtgtaatttattcatctataaagttggttaaaaactatctatgagatactttatttttcttagacaggtatgcacctgtagtcctagctacttgaaaggctgaggtgggaggatcgcttgagcccaggagtttgaggctgcagtgagctaggatcatggcactgcactcctgcctgg

SEQ ID NO: 76009 - DNA, 1157 bp, Homo sapiens; identical to SEQ ID NO: 60418

SEQ ID NO: 76010 - DNA, 1349 bp, Homo sapiens; identical to SEQ ID NO: 60419

SEQ ID NO: 76011 - DNA, 1346 bp, Homo sapiens; identical to SEQ ID NO: 60420
  misc_feature (1)...(1346): n = a,t,c or g

SEQ ID NO: 76012 - DNA, 1236 bp, Homo sapiens
ggaattcgctttctctgtttttcatattttggaaaatatccctctttaatctcttgttttttgaaagcctaaagatgccaggtaacaaatgttgcactctagaaccgtcaccttttttatataactttatagtagtttcttccacatttattatgaccttatgaattagctcagtaacattgctctgacaggtatcactaattaaatattgttcaaaaattctgtgaagcattctgcctcattaatgtagcatcattggtgaggctttataatttttttcatctgtctgcgcagtatgttttggttttctaatgctagcaagagctacatgcaacatatcatttgcctgggctgccagcagctgtgcatcttttgtaacctgtacgtaaaataaccattagcagccagaaatgttaacacattaacctcctcttaatgtataattatggatatatgggataactgttagcatgctcagctcactgctgaagaatttatcatctctttgtatacaggcatttgatgtatgcactaacctccctaaaatcatatgctgctttgttttgttttgcatggcttttaactaaactcttatccaacagatgctgagcaggaattactctcagatgacgcttcatctgtttcacaaattcagtctcaaactcagtcaccgcaaaatgtccctgaaaaattagaaggtactcaatgtaatttcccacatagcattcactgagttagtcttgagtctgtccctctgtgttttgttttcacgtgaggaagttgaatacctcatcacagtaagttttccatattttacttatatctcccaataattacatattttatatcattaaaaatggggcgctacttttgttcagcatttatattgatttaccttaatctgaattttggcaacccgcagttcttaagaatttgtggaattggctgggcgcggtggctcacacctgtaatcccagcactttggaaggccgaggcaggtggatcacgaggtcaggagatcaagaccatcctggctaacacggtgaaaccccgtctctactaaaaatacaaaaaattagctgggcgtggttgcaggcacctgtcgtcccagctactcgggaggctgaggcaggagaatggcgtgaacccgggaggcggagcttgcagtgagccgagatcgcaccactgcactccggcctgggggacagagcgagagtctgtctcataaaaaaaaaa

SEQ ID NO: 76013 - DNA, 1208 bp, Homo sapiens
  misc_feature (1)...(1208): n = a,t,c or g
ttttttttttttgtgtgtataaaaaagtgatatgtctttaatttaaaattatgacccggaaataactagtcagtttaagtgatccagacttcctcttcatacccaaatggaacagacacaatattggctcagatttccaaccccagaaaaaaaccaaaccaagtcctcaggaagtccctgcagcgaccttgctggggccatcagaccgcacagagtggaggtgcccaagctgctaggctgctcttaatccagccacactgagaagagctttccttctaccagcaactccctcgctgggtccgatatcccccttcacctcccttttagctggcactgcacgaatgcctccacagagaggctgacagtacagcagtcacctcccagctgtcttcggtgcatcttcagggccaccttcctgtggtcacaatagaggagttgagcattctaaacgttcgtgcccaggagggcagcgtcttctctttttagctgaggtctggagccctgagttgtaaccattggtcatatgtggctgaggcaccgacagcaaatcgccaaacttgggaaacgatctggggagatgcaagggccttggtaattgatggtgagtaagtccatggagttttcatcccatcatggcagaaggctggcctgacccctgccctcactggatgatgctgtctggctgcccattctgggccacctgcccagggtcagaggcgggggccgggttagctgtgttgctctgcaggtagcggcggaaatctttgatcataggccggaggacctggatgaggacgctcagggcagcctgtgtgccctccatggcctgggcctggcgctcctgggcacaggcctgcacttcctgggagcggcggatcatctgcagtaggtcgttctgctgttccaggtgctgtgcgatctccttcacatgcaggttggtgacccgctgctcctgtatcagcttggcggagttgagagcaatgcggctcttgagcgcttgcggcttgaccgacgtgtctgcatgctgggccatcatgtccacaggggtctctggtggcagaggtgggggcgcctcagccgtgcagtactccaccacgccctcctccagcgtgtgataggtggtctctgtggggatctgtgtcagggaattccacgcnntgtactgatgaattctatactcaattgnnnnnggcccgcctcccttccct

SEQ ID NO: 76014 - DNA, 1608 bp, Homo sapiens; identical to SEQ ID NO: 60422

SEQ ID NO: 76015 - DNA, 1235 bp, Homo sapiens; identical to SEQ ID NO: 60423

SEQ ID NO: 76016 - DNA, 591 bp, Homo sapiens; identical to SEQ ID NO: 60425

SEQ ID NO: 76017 - DNA, 2940 bp, Homo sapiens; identical to SEQ ID NO: 60426

SEQ ID NO: 76018 - DNA, 1451 bp, Homo sapiens; identical to SEQ ID NO: 60427

SEQ ID NO: 76019 - DNA, 2727 bp, Homo sapiens; identical to SEQ ID NO: 60428

SEQ ID NO: 76020 - DNA, 699 bp, Homo sapiens
ccccaaaaaataataataattaaaaatctacttaacctgtaaaccggggtagaggcgcggatttcccagctgaaaccgactgcctttcactgcaaaggtctgttacatcccagcgctgcccaccacccaaagttaacaccaaaggagttcaaaactcctcaagagtggcccacagaaaaggcgggggacttcagggcttgccaagatcccaggagccggccaatcccgattctgcagactgttaggtcccccgacttttttgcacacctaccctctggtcaaccgaataatatcccctggctgtataagacctccgatctcatcccacacggaaatagtgatgctgcccgttttatctgctactttgcacgatctcacttcatggccgtctttggttttggtcacgcgtcctatctccaggacaataaagacgacatttaagtttttcagtccgggcttaatatctcttataaaaataagtgggtcgttgaccctattcatattgggacaggcgcggctacggctgcggagacgcgagtgggcagggcggggtcaaagcttcccaccctcccgggacaggggcgaaggcagaggggcgaccttgggcaggggtggcgagagaaggggcaagaaagccgttagtcagggaccgggcaaaccagcccggacagcactgagcctaaaaaaagaaaaaaaaaa

SEQ ID NO: 76021 - DNA, 1555 bp, Homo sapiens; identical to SEQ ID NO: 60429

SEQ ID NO: 76022 - DNA, 789 bp, Homo sapiens; identical to SEQ ID NO: 60430

SEQ ID NO: 76023 - DNA, 1344 bp, Homo sapiens; identical to SEQ ID NO: 60431

SEQ ID NO: 76024 - DNA, 1151 bp, Homo sapiens; identical to SEQ ID NO: 60432
  misc_feature (1)...(1151): n = a,t,c or g

SEQ ID NO: 76025 - DNA, 1205 bp, Homo sapiens; identical to SEQ ID NO: 60434
  misc_feature (1)...(1205): n = a,t,c or g

SEQ ID NO: 76026 - DNA, 2362 bp, Homo sapiens; identical to SEQ ID NO: 60435

SEQ ID NO: 76027 - DNA, 1267 bp, Homo sapiens; identical to SEQ ID NO: 60436
  misc_feature (1)...(1267): n = a,t,c or g

SEQ ID NO: 76028 - DNA, 1135 bp, Homo sapiens; identical to SEQ ID NO: 60437
  misc_feature (1)...(1135): n = a,t,c or g

SEQ ID NO: 76029 - DNA, 2204 bp, Homo sapiens; identical to SEQ ID NO: 60438

SEQ ID NO: 76030 - DNA, 959 bp, Homo sapiens; identical to SEQ ID NO: 60439

SEQ ID NO: 76031 - DNA, 1663 bp, Homo sapiens; identical to SEQ ID NO: 60440

SEQ ID NO: 76032 - DNA, 1237 bp, Homo sapiens; identical to SEQ ID NO: 60441
  misc_feature (1)...(1237): n = a,t,c or g

SEQ ID NO: 76033 - DNA, 1830 bp, Homo sapiens; identical to SEQ ID NO: 60442
  misc_feature (1)...(1830): n = a,t,c or g

SEQ ID NO: 76034 - DNA, 1470 bp, Homo sapiens; identical to SEQ ID NO: 60443

SEQ ID NO: 76035 - DNA, 880 bp, Homo sapiens; identical to SEQ ID NO: 60444

SEQ ID NO: 76036 - DNA, 2034 bp, Homo sapiens; identical to SEQ ID NO: 60445

SEQ ID NO: 76037 - DNA, 1755 bp, Homo sapiens; identical to SEQ ID NO: 60446

SEQ ID NO: 76038 - DNA, 1044 bp, Homo sapiens; identical to SEQ ID NO: 60447
  misc_feature (1)...(1044): n = a,t,c or g

SEQ ID NO: 76039 - DNA, 1912 bp, Homo sapiens
ttttttttttttttagccttgaaatgtttttaatagaattggtctagtaatcgttcaggatttcggtgatgggccctccctgtctggacactgccaacccacagctggaggggcacttaaggcacgtcattttgtgattagaattacacgaaatttgattaatattatagctgcaaaattaacatacacaattttcactcataatttaaaatattttgatgaaattctttgctttcacaatagaagatcaatggtacacagtatattgaactctgtaacaaaattatttttgagaaaatacagaagtgagaaatagtgatttcctcaatttgtttatagtctatcacaaagtaggccaaagttcagtattaaatagatatcctaataaaagtttttacaagttttcctaaggaaatacattcataagactgtttaccttctgtttgacagcagtgacaggaacgtggggatccccactcatgacgagtccctagcactcagcccctggcacccacagccccggcgcgctccgtcacctggtagggagcagcctgggctgccgtgagtgaggtgttctcactctggttccgtgtttgtgtttagcctgtgcaattctcgtcaacacagaacacctgcctgcccacccccggtgctgaagaccgaccagtcaaggaggtgttggtgggagtgttgtgttcaccatgtggagatcaggcggcgattaccgcatcttctttgctgactttggtaaccgggtgtccagggaggagcgatcgggagtggccaagcagttgcctggactcagcttctgactctgcagctgggagtcagatgcaggcccaagggtccaggggagttgttcagcgcctggaatcgccatgcattgcgcggtggaccgcacgacgctcctgctctgttctcccaggcacagacaggcacttggaaggcagctttgctcctctggccacccggaaacctcccagcagttcagatgggacaaactgggggcctgtcagaacagccacttgtgccgggaaggccaggccccggcctgctccgatgaacgtcaggacggtggctgcagcagggaaccagggctggccttggatctgtccagtagggtcactgactgggcagggcttgctgcatagaggatggctgcattttgtgctcagagttggttgaaatggctacgaagtgtggagaataaccactgaatcccaaaaagtcactgcgcttgatctgatccaagtaacagtgactgcagttagggtcgagagcttctccgaagcagcggtcatgcaggcttttgtgtggctgacgcttccctttttcacaacagtaaaaagctatcaatgggaaattgtggacttttcccaccagggactcaatggggactcaatgtgcaatattcagtcaacataaaactctttaagaactcctcctgactggtgactgtcaacacttgatctgaaacgtgaatagtttaattttcctgagcaaggagctgcgagtctagctttagaaaagcccctaggagtgtccacctccaccacttccaccgtgcaggcaggtttcaggtgggttggaccctgtgggacttgccgtctgagggatggatggactccgagcaccctccccggctcagcacccgcggcctccgcccactcaatggactgtgcctcccagagcttgggctggatggtctccctgcagaggaccaggagctctgtccaaggcctcgccctgggacgctggaaggggtgggaagggtcaggggtccggggtctaggacaggctcaggggtctcagcaggttctccttggagggcctgagcctggtaggggggcggtgccctgggcccctccatgccccctggtttgttaagggggacagagcagctgctacgaaa

SEQ ID NO: 76040 - DNA, 1026 bp, Homo sapiens; identical to SEQ ID NO: 60449

SEQ ID NO: 76041 - DNA, 951 bp, Homo sapiens
  misc_feature (1)...(951): n = a,t,c or g
ttttttttttttatgactccatttttctcttatatttcatttcagtgtggaaggctctttagaaacactattaacataacagcattatgtcaaaaagcgccaataacattctcaccaacttttctttttaaaggaattaggtatagctagactgtaaaaaggcaagtggtgtgaagcccaaacctaagatcctaagatctaggatgagtcaagacttcatagtctacatgagtagaggcagcatctagaggaaaacaaaagtatgtggctatcaaattccaaagaagccccattttattacagagaaaatacaaagccgtttcctcacagggaaaagtacagtttcccttctccagggtgacagatgagccttttccgaagttctcagctttctcttctatcgaaacttcccatgtcggttaaagtgtttgtagagatagcggatgcgtttattaaggttgtgcaggtcatcagcgaacattctacttccaaccattttcctctttcggatacaacgttgcaattcattccctttccaacctcgaagccatatgggccccctgatcagttctttggggtgcttttcaaagtttcccaggatcccgatgttgtcatacactccgaacatggcccttttctcgttccaacgatcaaccactttggggggcgggagagtgagccttataccgatcaatctaggcacaccaagagagaagcttctgcacgccagaggcacccagtcccacaggcgcctacctgccccggataagaggttccctgccatttctctagtctccccccttcaacagcacaccaaataagcccaagaagatgacaggaaccgtccccgccaacttcacacgagtactaaggcgaagacagccatcttgggccttacccaggaattccaccacactgacatagacatcgaaantcaaannnnncccctcg

SEQ ID NO: 76042 - DNA, 1222 bp, Homo sapiens; identical to SEQ ID NO: 60451

SEQ ID NO: 76043 - DNA, 1858 bp, Homo sapiens; identical to SEQ ID NO: 60452

SEQ ID NO: 76044 - DNA, 2578 bp, Homo sapiens; identical to SEQ ID NO: 60453

SEQ ID NO: 76045 - DNA, 1040 bp, Homo sapiens; identical to SEQ ID NO: 60454

SEQ ID NO: 76046 - DNA, 4580 bp, Homo sapiens; identical to SEQ ID NO: 60455
  misc_feature (1)...(4580): n = a,t,c or g

SEQ ID NO: 76047 - DNA, 763 bp, Homo sapiens; identical to SEQ ID NO: 60456

SEQ ID NO: 76048 - DNA, 1653 bp, Homo sapiens
ctaaataaatgaatgcagaatggggacccctccctcctccccatgggagatgggcagctcagacactcagaaggttgtgtgggagcgagcaaacaaacacccatgcacacctgggtcccgtcagtcagatgcaggggacaggaagtgccctgccatctactggatgccagaagacaagacgtgacccacgagtaagtcacggtttctgtgaggtgctggtggcactggcacagggtcacagtgaaaagcctctacgcagaggacagcagaaaccccccgcagcctcaggaggcagcatcagatttatttattcctactcaacatgacccgggaacacaggagcaactctgtacacttctagaaactcacagctagctccaaaacaatagaaattttaaactacaaaagatgagttgtattcagcaaatataaagggtaattttagactgtgtgaacgtttatcagactatttacagcacccgggagacgggttcaaaatctcgccggcctccttctcttctgaacctccgtgaagccatcttcccgttggagcttctcaagcctccaagtccgggggccctcgctcgctccgcccgctctcccaggactcctctctggatgcccgctctctggagaacttgtatttcgcacttcggtcccgggaagcccgacgatgtccccggctgtggctccgggaacggctgcggtggcgccgatgtctatctcgggaccgggaccgggacaatttccgtcgctctcgggaggtagatcttgaccgcctccgacgccgatcccgggagcgtgacctcctgcgatctctggttcttgatcccgacctcctgctcagacgctcctcccgttccctctcctctctcctcctcaagcgatcctgatttctcttctcctgcttttcagcgacagttttctcagcttcttttttcttcgcacgaactttttccacttccataagaatcttctgggattcatccacattaccttcagcccctagctgttcggctttagcaaggagttttcctatttcttcatttaactcatgtactttttctgcctttgcagaaacttccgcactgatttcctcctgtgtttctgccagccgcttcttggcgagctcagttctccgatcacattcagcaataaaggactccaagtgatccattgcctagcacgggaaaagcacagcgctataatcaatgatgtgtaaagcgtaaagtcttagaacccatttgcttgataggaaatacactcctaggttcgtttctttaaagcctgtacattcaagggaaagatcttaaactacactaccactaacgcattcataattgcattaaatcaaggggatctgttaaacagaatgattgtttggaagcatggtcttctcatttgatttacttatttccaaaatttgtaaaaggacctccaaccctcaataacattacaaagaaattctgaggaaaattaaaacacttggcagcaattcatagagttctcggagggacagaaaaggctgagcctagactcgtgctggaggccctcttctggggagttgtgagagatgcatatgatgtactcactggtctttgtgagccacgtaaatattattccctcatgttctgagggtagggtccccccttt

SEQ ID NO: 76049 - DNA, 6164 bp, Homo sapiens; identical to SEQ ID NO: 60458

SEQ ID NO: 76050 - DNA, 2956 bp, Homo sapiens; identical to SEQ ID NO: 60460
  misc_feature (1)...(2956): n = a,t,c or g

SEQ ID NO: 76051 - DNA, 971 bp, Homo sapiens; identical to SEQ ID NO: 60461

SEQ ID NO: 76052 - DNA, 1471 bp, Homo sapiens; identical to SEQ ID NO: 60462
  misc_feature (1)...(1471): n = a,t,c or g

SEQ ID NO: 76053 - DNA, 1287 bp, Homo sapiens; identical to SEQ ID NO: 60463

SEQ ID NO: 76054 - DNA, 2024 bp, Homo sapiens
ctattttgttggttttgtttcggctagctagatagactatcagctgaacactctcttgaaggagttccagctaacagaggagaacactaagctccgatatctcacctgttctcttattgaagacatggccgccgcgtattttccagactgcatagtcagaccctttggctcctcagtcaacacttttgggaagttaggatgtgatttggacatgtttttggatctagatgaaaccagaaacctcagcgctcacaagatctcaggaaattttctgatggaatttcaagtgaaaaatgttccttcagaaagaattgcaactcagaagatcctgtctgtgttaggagagtgccttgaccactttggccctggctgtgtgggtgtgcaaaaaatattaaatgcccggtgtccgctcgtgaggttctcacaccaggcctccggatttcagtgtgatttgactacgaacaataggattgccttgacaagttccgaactcctttatatatatggtgccctagactcaagagtgagagccttggtgttcagtgtacggtgctgggctcgagcacattcactaacaagtagtattcctggtgcatggattacaaatttctcccttacaatgatggtcatcttttttctccagagaagatcaccccctattcttccaacactagattccttaaaaaccctagcagatgcagaagataaatgtgtaatagaaggcaacaactgcacatttgttcgtgacttgagtagaattaaaccttcacagaacacagaaacattagaattactactgaaggaattttttgagtattttggcaattttgctttcgataaaaattccataaatattcgacagggaagggagcaaaacaaacctgattcttctcctctgtacattcagaatccatttgaaacttctctcaacataagcaaaaatgtaagtcaaagccagctgcaaaaatttgtagatttggcccgagaaagtgcctggattttacaacaggaagatacagatcgaccttccatatcaagtaatcggccctgggggctggtatccctattgctaccatctgctccaaacagaaagtcctttaccaagaagaaaagcaataagtttgcaattgaaacagtcaaaaacttgctagaatctttaaaaggtaacagaacagaaaatttcacaaaaaccagtgggaagagaacaattagtactcagacatgatggctgctacattgtgtaaagaactgggcttagcctatcaaatggtctgtggacttacttggaaaaactgatttgaaactttcacagatctcagctttcatctgatgtcacttttcatgatcttctcattggcccccttaacctggtctgaagttctgggatgttttcagtttgatcagtctgatactcagtggcactttattaaaacatcagctgtggagtgtggcggtgcacacctgtagtcccagctgctcaggaggctgaggcaggaggatctcttgagcccaggattttgaatccatcgtggacaacatagcaagattccatctctaaaaaaaatgaaaataaacataagccacaaggaatgggtgaaagattattgtaatgtgctttaacgtaaataggtaaatatactaaacaaatgctaaaactcagttttaggatggaaccccattgttgatatcccaccatcagtccctgtttagaaaacatttaaaaatgacttttagttacgtacagtacgttggcaatgaataccattaagcctcaaaatttggtagtgcccctcggaatatgtatatttgtatttttcaagcgaagttctcttattcacatataaattaaagtgggttggtactgatatcaaaaaatgtttatgtttttagaacagacatttcagtccctgcattcttaggtattccaaaccagatttgatgacatcaatagattgcattttaaaaatattgtttgatttttctattttcaaaaataaaattctgtttctaactaaaaaaaaaaa

SEQ ID NO: 76055 - DNA, 2114 bp, Homo sapiens; identical to SEQ ID NO: 60465

SEQ ID NO: 76056 - DNA, 1534 bp, Homo sapiens; identical to SEQ ID NO: 60466

SEQ ID NO: 76057 - DNA, 2968 bp, Homo sapiens; identical to SEQ ID NO: 60468

SEQ ID NO: 76058 - DNA, 1375 bp, Homo sapiens; identical to SEQ ID NO: 60469

SEQ ID NO: 76059 - DNA, 1734 bp, Homo sapiens
  misc_feature (1)...(1734): n = a,t,c or g
ttttgctccggctgcaggaattcggcacgagggaacaaggtctgtaccccacttttcctcctgtgagcagtctggacttctcactgctacatgatgagtatcctcccctttccggatctgctgagccggacagcagtgctggactgcacagccccggggctccacattgctgtacgcacagagatgatatgcaagttcctggtacagctcagcatggatttcagctcctactacaaccgggagcctcgaccacacctctttggtcagatgttcgtccgcctgcagcttctgagagctgtgcgtgaggtgctccatactggcctggctatgctgggtctccctccactgagccacatttaaggccacagaggctccaatacctgggaatgttcacaaagtcatcaactggaaaaaaagcaaaaacccacggccaaaataaattggtactgtttgttacaaagttctgtcttgtcatggggagtcgggcatattcttggcagcactccactcaccttcagctcctgcaccgacatcaggaacccacggccaccacctcctcccctcaaggcatgctgagcatgggcacagacagcccttccctgctccatgctgtctgtgagcaggccccatgcccagcacgccagccaccgcaggatacctcagtcataccagttgtaaacctcaagcccctgacccccaagggcacaacggtggccaaactcagggctcacaggccagcagtccatgtcagccacatcaggcacatggaacacagtgctattcatgaaggtgggttcaccatgccccagacgccagaaggtcagccgttgatcaatggaggctgagaccatgatgcttgggcttaggatcttgaggcctgtcacatgggcagcatgtgcacaggggacagagtattcctctagcacacgcagctggggtaccagcccagcctctcccacagcctcttctagctgtagcatctccacagcaagcacgaagacatggagggatccatcttcactgccactggccacgagatggtggccctcacgggtgggcaaggtgtgcaggctgttgataccacagctgtgggcctggagagtcagggagggggtgccaagccggtagggaagcccaggatccactggaggctccaggacagtggagtcatggtctagcatggtggtgagatcccagaaagccaggctgccatcagtagctgcgctgcacaggaggagcctccgcctctggttgggtgcctcgtgtgtaaaggagtggaccttgaggacacatcgcttatggtggaaggtttcagcaaggagctgcagaatccgcccagaatcctgcaaaagaaagagccttacggccccatcactacaggctgcagccacaagggggccaaggccgggctggtcaagttcacacacagcaagggacatgtacctggtctctgggtctaccttaaccatccgatgccgattgcgttgccggtcccaatactcatctagccggtgggacgaaaggtgcatgacatggcaggcgaggcggcttggggtgctggggtccggagtaaccatgatgctgaagcagtgcatctcagcccgcccccccgcagacaccacatgggcagtcaggcctggctgaggatcctgagggccacctggggtgccaatgccccacacagccacagcacgtaccgagaaaataaagttcaacagccttnnntgcgtgcga

SEQ ID NO: 76060 - DNA, 1653 bp, Homo sapiens; identical to SEQ ID NO: 60471

SEQ ID NO: 76061 - DNA, 934 bp, Homo sapiens
ttttttttttttcacacgcacaacttgggaatttaatcttcacttttcctcccataaatatagagtgagggtgtgataccagccccagcccagtctccttggggtctgcatctctgcttcctggcagcctcttgagtcgacttggggatttgacgtcagttgctcagctccattcctttccttctggacttggggaggtccgggatatgtcggggagtgagtcagtgcaggggactgagggggtggttcccattcttccctcttagcccccttcaaccaatgatccaagttcaaggagctcatctctgtttttcagaccatcgagctagtgccttgaagtctccggaacagcgcacccaggaaggggatgttgcagacattgcccaggaagccgaaggcgacagggaaaaagcccttaaagaggctgaagaatccgtaggtttccaggaacatgccgaggaggggccagcgtaggagcacgataaccacaccccccaggaggaagctggttcccttgagtttgtgccgttggaagaagaaccaaaaggtcttcctcaggccaatgatgagggacaggcccgtcaggaacagcaggtttccaaaggccaggagcacggaatcaaagtacaggagtgttccaaagaggatgaagaagatgccgaaaccggtgatccccacaccaatcttctgccattcggtgatggagatcatgccgcactcagcctggggggctttccgggtggaagcgggcaagtggagcgtggcccagaggacgcagctggtacatggtcacgggaagctgacccttggttaagttgcgaaatgagcctgtggcaaatcattaactctccctccagcccccgctccacccccgcacaccacgcaggtgcttctactcgccagctccctcctcccgttttccggtagggcaatg

SEQ ID NO: 76062 - DNA, 1009 bp, Homo sapiens; identical to SEQ ID NO: 60473

SEQ ID NO: 76063 - DNA, 1533 bp, Homo sapiens; identical to SEQ ID NO: 60474

SEQ ID NO: 76064 - DNA, 1153 bp, Homo sapiens; identical to SEQ ID NO: 60475

SEQ ID NO: 76065 - DNA, 1127 bp, Homo sapiens; identical to SEQ ID NO: 60476

SEQ ID NO: 76066 - DNA, 1491 bp, Homo sapiens; identical to SEQ ID NO: 60478

SEQ ID NO: 76067 - DNA, 1976 bp, Homo sapiens; identical to SEQ ID NO: 60479

SEQ ID NO: 76068 - DNA, 6248 bp, Homo sapiens; identical to SEQ ID NO: 60480

SEQ ID NO: 76069 - DNA, 2085 bp, Homo sapiens; identical to SEQ ID NO: 60481

SEQ ID NO: 76070 - DNA, 957 bp, Homo sapiens; identical to SEQ ID NO: 60482

SEQ ID NO: 76071 - DNA, 2468 bp, Homo sapiens; identical to SEQ ID NO: 60483

SEQ ID NO: 76072 - DNA, 393 bp, Homo sapiens; identical to SEQ ID NO: 60484

SEQ ID NO: 76073 - DNA, 651 bp, Homo sapiens; identical to SEQ ID NO: 60485

SEQ ID NO: 76074 - DNA, 2035 bp, Homo sapiens; identical to SEQ ID NO: 60487
  misc_feature (1)...(2035): n = a,t,c or g

SEQ ID NO: 76075 - DNA, 1027 bp, Homo sapiens; identical to SEQ ID NO: 60488

SEQ ID NO: 76076 - DNA, 1437 bp, Homo sapiens; identical to SEQ ID NO: 60490

SEQ ID NO: 76077 - DNA, 2002 bp, Homo sapiens; identical to SEQ ID NO: 60491

SEQ ID NO: 76078 - DNA, 1110 bp, Homo sapiens; identical to SEQ ID NO: 60492

SEQ ID NO: 76079 - DNA, 1049 bp, Homo sapiens; identical to SEQ ID NO: 60493
  misc_feature (1)...(1049): n = a,t,c or g

SEQ ID NO: 76080 - DNA, 1053 bp, Homo sapiens; identical to SEQ ID NO: 60494

SEQ ID NO: 76081 - DNA, 2433 bp, Homo sapiens; identical to SEQ ID NO: 60495

SEQ ID NO: 76082 - DNA, 1699 bp, Homo sapiens; identical to SEQ ID NO: 60496

SEQ ID NO: 76083 - DNA, 4953 bp, Homo sapiens
cggcaggctagctgtcggagacggcaagcacggatcgggcacggccggcgggtcgcagccgggctggaggccggtcggaaccgagcgggcaggaggccaccgctgcagcgcgggccccgcagaggaaggaagccggcgggcggggtgaagctcgtgtgtggagtgccacggtacaatcagacgacagatggacagtgtgacaaaagtgtcagaaaggattgggcctcgctgtgagagtcagcctggattcaaagtgttgacaagttgctgaaaaggaagccagtgagaggactgtggcacgcagaggaagtggagccctgtcttcggtcacaccattgatggaggacagatggacagccgtatggccagtcacctctcctcttaaacctttggagagaggtcctttgtcctctgctggacacataataggaattctaacacattctctgaattcacttttcataaaaacgtaaaatcagactgctctgtacaaccaggctcaactgttgcatggtagcagatttgcaaacatgagtgctgaggggtaccagtacagagcgctgtatgattaaaaaaaggaaagagaagaagatattgacttgcacttgggtgacatattgactgtgaataaagggtccttagtagctcttggattcagtgatggacaggaagccaggcctgaagaaattggctggttaaatggctataatgaaaccacaggggaaaggggggactttccgggaacttatgtaaaatatattggaaggaaaaaaatctcgccttccacaccaaagccccggccacctcggcctcttcctgttgcaccaggttcttcgaaaactgaagcagatgttgaacaacaagctttgactctcccggatcttgcagagcagtttgcccctcctgacattgccccgcctcttcttatcaagctcgtggaagccattgaaaagaaaggtctggaatgttcaactctatacagaacacagagctccagcaacctggcagaattacgacagcttcttgattgtgatacaccctccgtggacttggaaatgatcgatgtgcacgttttggctgacgctttcaaacgctatctcctggacttaccaaatcctgtcattccagcagccgtttacagtgaaatgatttctttagctccagaagtacaaagctccgaagaatatattcagctattgaagaagcttattaggtcgcctagcatacctcatcagtattggcttacgcttcagtatttgttaaaacatttcttcaagctctctcaaacctccagcaaaaatctgttgaatgcaagagtactctctgaaattttcagccctatgcttttcagattctcagcagccagctctgataatactgaaaacctcataaaagttatagaaattttaatctcaactgaatggaatgaacgacagcctgcaccagcactgcctcctaaaccaccaaaacctactactgtagccaacaacggtatgaataacaatatgtccttacaagatgctgaatggtactggggagatatctcgagggaagaagtgaatgaaaaacttcgagatacagcagacgggacctttttggtacgagatgcgtctactaaaatgcatggtgattatactcttacactaaggaaagggggaaataacaaattaatcaaaatatttcatcgagatgggaaatatggcttctctgacccattaaccttcagttctgtggttgaattaataaaccactaccggaatgaatctctagctcagtataatcccaaattggatgtgaaattactttatccagtatccaaataccaacaggatcaagttgtcaaagaagataatattgaagctgtagggaaaaaattacatgaatataacactcagtttcaagaaaaaagtcgagaatatgatagattatatgaagaatatacccgcacatcccaggaaatccaaatgaaaaggacagctattgaagcatttaatgaaaccataaaaatatttgaagaacagtgccagacccaagagcggtacagcaaagaatacatagaaaagtttaaacgtgaaggcaatgagaaagaaatacaaaggattatgcataattatgataagttgaagtctcgaatcagtgaaattattgacagtagaagaagattggaagaagacttgaagaagcaggcagctgagtatcgagaaattgacaaacgtatgaacagcattaaaccagaccttatccagctgagaaagacgagagaccaatacttgatgtggttgactcaaaaaggtgttcggcaaaagaagttgaacgagtggttgggcaatgaaaacactgaagaccaatattcactggtggaagatgatgaagatttgccccatcatgatgagaagacatggaatgttggaagcagcaaccgaaacaaagctgaaaacctgttgcgagggaagcgagatggcacttttcttgtccgggagagcagtaaacagggctgctatgcctgctctgtagtggtggacggcgaagtaaagcattgtgtcataaacaaaacagcaactggctatggctttgccgagccctataacttgtacagctctctgaaagaactggtgctacattaccaacacacctcccttgtgcagcacaacgactccctcaatgtcacactagcctacccagtatatgcacagcagaggcgatgaagcgcttactctttgatccttctcctgaagttcagccaccctgaggcctctggaaagcaaagggctcctctccagtctgatctgtgaattgagctgcagaaacgaagccatctttctttggatgggactagagctttctttcacaaaaaagaagtaggggaagacatgcagcctaaggctgtatgatgaccacacgttcctaagctggagtgcttatcccttctttttctttttttctttggtttaatttaaagccacaaccacatacaacacaaagagaaaaagaaatgcaaaaatctctgcgtgcagggacaaagaggcctttaaccatggtgcttgttaatgctttctgaagctttaccagctgaaagttgggactctggagagcggaggagagagaggcagaagaaccctggcctgagaaggtttggtccagcctggtttagcctggatgttgctgtgcacggtggacccagacacatcgcactgtggattatttcattttgtaacaaatgaacgatatgtagcagaaaggcacgtccactcacaagggacgctttgggagaatgtcagttcatgtatgttcagaagaaattctgtcatagaaagtgccagaaagtgtttaacttgtcaaaaaacaaaaacccagcaacagaaaaatggagtttggaaaacaggacttaaaatgacattcagtatataaaatatgtacataatattggatgactaactatcaaatagatggatttgtatcaataccaaatagcttctgttttgttttgctgaaggctaaattcacagcgctatgcaattcttaattttcattaagttgttatttcagttttaaatgtaccttcagaataagcttccccaccccagtttttgttgcttgaaaatattgttgtcccggatttttgttaatattcatttttgttatccttttttaaaagtaaatgtacaggatgccagtaaaaaaaaaaaatggcttcagaattaaaactatgaaatattttacagttttttttgtacaaaggacttggctgttaccccagggttaaaaagttcataacaaattttttttggactgttttgttgggcagtgcctgataagcttcaaagctgctttattcaataaaaaaaagaaatgaaaaagatatatgaatatgacaaagtattgctgagtccaacaatgttgttttaagactcttaaaatacgggtacctgggcaatggttaattttccataaaagaattgtgaacttcttgaaatctaggggagggggaatgtagtgaagggatgtatcaagtggggtggtgggagggggaggcaaggttatatgcactttctcatgatttacagagaagtgaataactgcaaagtgaagttgcttcttctacttcagtcttctctcactttgatttgctagttgttatcaattaatgacaattacaaacctactgtatctctaatacagtgtgactggtcaggtatttcagttcttaggaaggaagtgccaagtttgtttttgggttcctggaacagcgctcacctttgtttagaacactggtttaaagggataatcatctctgtcacattagactatccatcatgaccagcaaatactcattttaggaaaaaaaaaagcatgatctgaaaaatacttttggtggtatgttggttaccctcctagctttccatttggtttagaacataaagcaaatagacacagtcatactgtcactgctctggactgtgtggagctcgctaaagtcatggtcattgcaggaatccaagtggcagtccttctcattcattctaatcattgtatgtgcttcactacgggggggagaaggaaacgttagcatcatgtttcccatttagggcaggagtgagaggtctctcttcctgatttagatatgcaaaagctggtatgttcagtaggaactgtacatgtgttgggaggcataaagactaattagcaaccataatatggtcactaccctaatagactaaatgaaatcttgcaatttcaaaattactcctttccccaatattaagatttaccccacaagctaatatttcccgtttaaagtactaagggtgagggttttctgttactttgttttttaatgttgttccttttgaaagaatcagtcttgcagctgagtgaaaaatctgtggaatgtattatttgtcctctttacatgaaactactcatacttaagcaaaagtcagtcttatagcaaga

SEQ ID NO: 76084 - DNA, 2137 bp, Homo sapiens; identical to SEQ ID NO: 60498

SEQ ID NO: 76085 - DNA, 1200 bp, Homo sapiens; identical to SEQ ID NO: 60499
  misc_feature (1)...(1200): n = a,t,c or g

SEQ ID NO: 76086 - DNA, 392 bp, Homo sapiens
tttcgtgtggcggccggctcccaaggtggcagcaagacttttgttctctgacctggggttcttggcctcctggattccaaagaatggaaccttggggccatgcgataaatatgctgaggcatgttttcaaggaggggagagagattccttttcctcagccgggcacagagccaacctgaagtgtagcactgtggtgacctggcgggatctgctctccagtcactcccgagggcccttctggggacaaggagacttttctgtgcggcctgttgatttgagatcgaggctatcaagctacagatgatcttacaaatggaaccccaaatgagctcaactaacaactaccaaggacccctggaccaacccgctggccctttcaatggcctaaagag

SEQ ID NO: 76087 - DNA, 721 bp, Homo sapiens; identical to SEQ ID NO: 60500
  misc_feature (1)...(721): n = a,t,c or g

SEQ ID NO: 76088 - DNA, 712 bp, Homo sapiens; identical to SEQ ID NO: 60501

SEQ ID NO: 76089 - DNA, 478 bp, Homo sapiens; identical to SEQ ID NO: 60502

SEQ ID NO: 76090 - DNA, 2176 bp, Homo sapiens; identical to SEQ ID NO: 60503

SEQ ID NO: 76091 - DNA, 3228 bp, Homo sapiens
  misc_feature (1)...(3228): n = a,t,c or g
cgtatatttgtaccatgacgaccgcccgaattcccggtcgacgatttcgtgccgccgggagctgccacgtccgagacctgttcagctaccgccgcaatcatggtgagtgttggtactgaggaggcctagcagggtgaaggccacggtcgcggccttcacgggttcctcggccgtcctgagtcccaaatcccaagctggagccgttcagctcccctccaccgcttagagatttggggggctctggccccgtccttgcggaccattccgaggggagtccagaggtgaggccgaggaacctccctgactttgcggggcgcgccgctcctgcgtctcctgccagtctcccttccttcttttcggtcaacaattgaaaacaaaacgaggaacagcagaggagctactgtataccgagccctcagcattgttcgtaatctccgcctgctaacagccttgtgaagaaggtgtcagtaattaacactgtggatacctcccatgaggacatgattcacgacgcccagatggactactatggcacccgcctggcaacctgctcatcagacaggtccgtcaaaatctttgatgtgcgcaatggagggcagatccttatcgccgacctcaggggtcatgagggtcctgtgtggcaagtggcctgggctcaccccatgtacggcaacatcctggcatcgtgctcctatgaccggaaagtcattatctggagagaggaaaacggcacctgggagaagagccacgagcatgcgggacacgactcctcagtgaactcggtgtgctgggccccccatgactacggcctgatcctggcctgtgggagctcggatggggccatctccctgctgacttacaccggggaaggccaatgggaagtaaagaagatcaacaacgctcacaccattggctgcaatgccgtcagctgggcccctgctgttgtacctggaagcctcatagaccacccatcggggcagaaacccaattacatcaagaggtttgcatcaggtggctgtgacaacctcatcaagctgtggaaggaggaggaggacggccagtggaaggaggagcagaagctagaagcgcacagtgactgggttcgagatgtggcctgggccccctccatcggcctgcccaccagcaccatcgccagctgctcccaggatggtcgtgtgttcatttggacctgtgatgatgcctcaagcaatacgtggtcccctaaattgttgcacaagttcaacgatgtggtgtggcatgtgagctggtccatcacagccaacatcctggctgtctctggtggagacaataaggtgaccctgtggaaggagtcagttgatgggcagtgggtgtgcatcagtgatgtcaacaagggccagggctccgtatcagcatcagtgacagagggccagcagaacgagcagtgacaagacaggtggggcctggctccccacccgccagctccaggactgccccttcctgggccaactaaccaaacaactgggaagagcccccaactccaacaggattattttcccaggaggagttacagatgcagccacagattgatcatctgccttaacgtgatcggagatgctttgtaatctactgtccagctgaaagcactcatgttacgaggaagaaactacaagtgatgttcaaatctattttgggtcatttttatgtacctttgggttcaggcattatttggggggttttgtttccaaaggaactaaataaagtcatattgcttataaaaaaatgacccaaaatagatttgaacatcacttgtagtttcttcctcgtaacatgagctgtttccagctcggacagtagattacaaagcatctcagatcacagttaagggcagatggatcaatctgtgggctgcatctgtaactccctcctgggaaaataatccctgttgggagttggggggctcttcccaagttgtctggttacgttggcccagggaaggggcagtccctggaagctggcggggtggggagccagggccccacctcgtcattgtcactggctcgttctagctgggccttcctggtcactggatggctgatacgggagcccttggcccctttgttgaacatcactggatggcacaacccacttggcccatcaacttgactccttccacaggggtatctttattgtctccatcagagacagccaggatgttggctgtgatggaccaagctcacatgccacaccacatcgttgaacttgtgcaaaaatttaggggaccacgtattgcttgaggcatcatcacaggtccaaatgaacacacgacccatcctgggagcagctgggcgatggtgctggtgggcaggcccgatggagggggcccaggccacatctcgaaacccagtcactgtggcgcttctagcttctgctcctccttccactggccgtcctcctcctccttccacagcttgaatgaggttgtccacagccacctgatgcaaacctcttgatgtaattgggtttctgaccccgatggggtcgtctatgaggcttccaggtacaacaagcaggggcccaagttgacggcattgcagccaatggtgtgagcgttgttgatcttctttacttccccattggccttcccccggtgtaaagtccagccagggaagatggcccccnatccgagactacccaacaggcccaggaatncaggaccgtaagtccatggggggcccagcaacacccgaagttcaacttgaggagtcgtgtccccgcattgctcgtggctctttcttcccagggtgccgttttcctctctccagataatgacttttccggtcataggagcacgatgccaggatgttgccgtaccatggggtgagcccaggccacttgccacacaggaccctcatgacccctgaggtcggcgataaggatctgccctccattgcgcacatcaaagattttgacggacctgtctgatgagcaggttgccaggcgggtgccatagtagtccatctgggcgtcgtgaatcatgtcctcatgggaggtatccacagtgttaattactgacacctctggactcccctcggaatggtccgcaaggacggggccagagccccccaaatctctaagcggtggaggggagctgaacggctccagcttgggatttgggactcaggacggccgaggaacccgtgaaggccgcgaccgtggccttcaccctgctaggcctcctcagtacca

SEQ ID NO: 76092 - DNA, 803 bp, Homo sapiens; identical to SEQ ID NO: 60506

SEQ ID NO: 76093 - DNA, 1043 bp, Homo sapiens; identical to SEQ ID NO: 60507

SEQ ID NO: 76094 - DNA, 762 bp, Homo sapiens; identical to SEQ ID NO: 60508

SEQ ID NO: 76095 - DNA, 2735 bp, Homo sapiens; identical to SEQ ID NO: 60509

SEQ ID NO: 76096 - DNA, 2538 bp, Homo sapiens; identical to SEQ ID NO: 60510

SEQ ID NO: 76097 - DNA, 1820 bp, Homo sapiens; identical to SEQ ID NO: 60511

SEQ ID NO: 76098 - DNA, 542 bp, Homo sapiens; identical to SEQ ID NO: 60512
  misc_feature (1)...(542): n = a,t,c or g

SEQ ID NO: 76099 - DNA, 5406 bp, Homo sapiens; identical to SEQ ID NO: 60513

SEQ ID NO: 76100 - DNA, 1026 bp, Homo sapiens; identical to SEQ ID NO: 60514

SEQ ID NO: 76101 - DNA, 8689 bp, Homo sapiens; identical to SEQ ID NO: 60515

SEQ ID NO: 76102 - DNA, 1331 bp, Homo sapiens; identical to SEQ ID NO: 60516

SEQ ID NO: 76103 - DNA, 971 bp, Homo sapiens
ttttttttttttgatctaagaaactttattgctcagaaccttccctccctgggcaatggaaagagctttggagaccagcccatggggacagagtcagaggcactgggtgtaaaaaagagcgagcgtgtggcacatttggtccattgtcatgtgcgggtatggcaggaggagggggtaatctagaagccccacatctagggccttctagggacccagatatgcccccttaggcaaggctcacatgccaaagcaaagcagatgaggtcagcctggcttgggttgagggctcagtgcctcttagccttgccctggggttcttggaccttccggaaactgagccacatcaggctcacgttgatagcataggtggtgatacaaacaatgcagaaatcatagagcacgaagaacaggatccaggccaggtagacagaaccagcgagagacaccagggagctcagcagcatcaggacagaggcccagcgtgtccgcaggcaacctaacaatagctgtagtgtgtagaagatgcaaccgaatatgctgttggattgattgaggatgctgtcctgtcccagcacatgctccaccagcccgaaacccctgccccacctggaggagaagacgcgcgaacagctgatggcggtgcccacgtcgcagagcgcgcggtaatcccggtcccgggcgcgcgccgccttcacgtgcagcgcgtagagcgagagcactaagcccgtcaggcaaagagcgagccgcacccagccagggctcccccaggtgctgcccattatctccaggttccgcccgaggcgcccgcggagaaaaccagccacggagcaggggccgggcggcgaatggccgcgcccctcctggccctctgactcggcgattggccggccgtgctcgcactccacgacccaaatggctgttccagggcgctagtcaagcgggcgagttaggaaaacagcgaagaatgccgg

SEQ ID NO: 76104 - DNA, 1509 bp, Homo sapiens
ttttttttttttcccaaaaaactttatttattgtttcaagtggcaaaatgtcattggtctctgtggggtacctggcggggcagacggagacctggggtgaggcagggatacagtcccacccattataaaaatcaaaggcttttataaaaaatgctataaattggtatcaaaagaaaacccaagggaggctggaggaggaagcagagagggagagggaaggaggagaggaagggacaaaaccttcaaccactagtgatgaaatccagggaagggaaggtgtggggggagttcggagggtgatacaaagtgcataaatgtgcctccccagacgctcctcagaggtggaggggacagaggctgcagcctggggcatggtggggctccagccgtctcctcacccagggaccccacaggaatgggcactgcctgagactgccaggtgggaagaacctcagtgacttctcagaccttcttcttcttcagtttcagggcttgaagccagttgggcgacgatccttctgacctaggaggcagacggcaaaggtccagaatgcaaactttgaggaaactgaacacaacaaggagacgtgatagggacagaaaccaccctctaaccagaagaggcagtctggggcctggctgcagggacccaaattctgacaccatcttcataccgttcatctggggcatgtccgactgaggttcctctttgagcctcagtttgcctcttctgtgaagtgagagtttcccttttcatcagggtaatacagtgaggtcagcggatgcccagagcttaggtcacctaccctgaggatttctctggcttgggaggtaacgtgaggggctttcccagtcctgggaccttgcaggatttcgaacgctggaccgcggactccttctggctcgacttgctctcagccagctctccctcctcagctgagcgattccgggggcgcagcttggccttcagggctgaggggctcaggccaggaaagaggttgactttcagccccttggtgcccaacgacatccgtgtccggcggctctgaggttcctccactacctcttcatctgaagatggcacccgagatgcccgtggctctgtagagtcctggaacaggtgtgcatccgagtctgctgcctccgacaggcccaaggtacccccaggccgaatgaccggggcccggtgcccacgcttgcgccccaagttggcacggctccgatacatggcactgtcgaggatctcggtgtcctcaatgaaggagaagtcctgactgggggatctggcaggagggccttgggagggtcgccgagaagtctgtgctggcccctgatcgctccacctggctgctgaagagccccaggtgccatccacgtcttctgtctggctggcctcaccatcaggctgcggcctccaggagggtggagagtccctgccaggctccagcacctcctcttgggcagcacctgccccggctccttcctccgccgaattccaccgcactagac

SEQ ID NO: 76105 - DNA, 1424 bp, Homo sapiens
agactcgaagactctgagcttgtaggagggtaaaatagagacccagtaaaattgtaataagcagtgcttgaattatttggtttcggttgttttctattagactatggtgagctcaggtgattgatactcctgatgcgagtaatacggatgtgtttaggagtgggacttctaggggatttagcggggtgatgcctgttgggggccagtgccctcctagttggggggtaggggctaggctggagtggtaaaaggctcagaaaaatcctgcgaagaaaaaaacttctgaggtaataaataggattatcccgtatcgaaggcctttttggacaggtggtgtgtggtggccttggtatgtgctttctcgtgttacatcgcgccatcattggtatatggttagtgtgttggttagtaggcctagtatgaggagcgttatggagtggaagtgaaatcacatggctaggccggaggtcattaggagggctgagagggcccctgttaggggtcatgggctgggttttactatatgataggcatgtgattggtgggtcattatgtgttgtcgtgcaggtagaggcttactagaagtgtgaaaacgtaggcttggattaaggcgacagcgatttctaggatagtcagtagaattagaattgtgaagatgataagtgtagagggaaggttaatggttgatattgctagggtggcgcttccaattaggtgcatgagtaggtggcctgcagtaatgttagcggttaggcgtacggctagggctattggttgaatgagtaggctgatggtttcgataataactagtatggggataaggggtgtaggtgtgccttgtggtaagaagtgggctagggcatttttaatcttagagcgaaagcctataatcactgcgcccgctcataaggggatggccatggctaggtttatagatagttgggtggttggtgtaaatgagtgaggcaggagtccgaggaggttagttgtggcaataaaaatgattaaggatactagtataagagatcaggttcgtcctttagtgttgtgtatggttatcatttgttttgaggttagtttgattagtcattgttgggtggtgattagtcggttgttgatgagatatttggaggtggggatcaatagagggggaaatagaatgatcagtactgcggcgggtaggcctaggattgtgggggcaatgaatgaagcgaacagattttcgttcattctggttctcagggtttgttataatttttttatttttatgggctttggtgagggaggtaggtggtagtttgtgtttaatatttttagttgggtggatgaggaatagtgtaaggagtatgggggtaattatggtgggccatacggtagtatttagttggggcattcccttctgtcgtcttctcgcagccgtaccc

SEQ ID NO: 76106 - DNA, 587 bp, Homo sapiens; identical to SEQ ID NO: 60519

SEQ ID NO: 76107 - DNA, 1838 bp, Homo sapiens; identical to SEQ ID NO: 60520

SEQ ID NO: 76108 - DNA, 580 bp, Homo sapiens; identical to SEQ ID NO: 60521

SEQ ID NO: 76109 - DNA, 1669 bp, Homo sapiens; identical to SEQ ID NO: 60522

SEQ ID NO: 76110 - DNA, 5600 bp, Homo sapiens; identical to SEQ ID NO: 60523

SEQ ID NO: 76111 - DNA, 1569 bp, Homo sapiens; identical to SEQ ID NO: 60524
  misc_feature (1)...(1569): n = a,t,c or g

SEQ ID NO: 76112 - DNA, 2349 bp, Homo sapiens
cgggacagctcagagcagggcagaactggggacactctgggccggccttctgcctgcatggacgctctgaagccaccctgtctctggaggaaccacgagcgagggaagaaggacagggactcgtgtggcaggaagaactcagagccgggaagcccccattcactagaagcactgagagatgcggccccctcgcagggtctgaatttcctgctgctgttcacaaagatgctttttatctttaactttttgttttccccacttccgaccccggcgttgatctgcatcctgacatttggagctgccatcttcttgtggctgatcaccagacctcaacccgtcttacctcttcttgacctgaacaatcagtctgtgggaattgagggaggagcacggaagggggtttcccagaagaacaatgacctaacaagttgctgcttctcagatgccaagactatgtatgaggttttccaaagaggactcgctgtgtctgacaatgggccctgcttgggatatagaaaaccaaaccagccctacagatggctatcttacaaacaggtgtctgatagagcagagtacctgggttcctgtctcttgcataaagggtataaatcatcaccagaccagtttgtcggcatctttgctcagaataggccagagtggatcatctccgaattggcttgttacacgtactctatggtagctgtacctctgtatgacaccttgggaccagaagccatcgtacatattgtcaacaaggctgatatcgccatggtgatctgtgacacaccccaaaaggcattggtgctgatagggaatgtagagaaaggcttcaccccgagcctgaaggtgatcatccttatggacccctttgatgatgacctgaagcaaagaggggagaagagtggaattgagatcttatccctatatgatgctgagaacctaggcaaagagcacttcagaaaacctgtgcctcctagcccagaagacctgagcgtcatctgcttcaccagtgggaccacaggtgaccccaaaggagccatgataacccatcaaaatattgtttcaaatgctgctgcctttctcaaatgtgtggagcatgcttatgagcccactcctgatgatgtggccatatcctacctccctctggctcatatgtttgagaggattgtacaggctgttgtgtacagctgtggagccagagttggattcttccaaggggatattcggttgctggctgacgacatgaagactttgaagcccacattgtttcccgcggtgcctcgactccttaacaggatctacgataaggtacaaaatgaggccaagacacccttgaagaagttcttgttgaagctggctgtttccagtaaattcaaagagcttcaaaagggtatcatcaggcatgatagtttctgggacaagctcatctttgcaaagatccaggacagcctgggcggaagggttcgtgtaattgtcactggagctgcccccatgtccacttcagtcatgacattcttccgggcagcaatgggatgtcaggtgtatgaagcttatggtcaaacagaatgcacaggtggctgtacatttacattacctggggactggacatcaggtcacgttggggtgcccctggcttgcaattacgtgaagctggaagatgtggctgacatgaactactttacagtgaataatgaaggagaggtctgcatcaagggtacaaacgtgttcaaaggatacctgaaggaccctgagaagacacaggaagccctggacagtgatggctggcttcacacaggagacattggtcgctggctcccgaatggaactctgaagatcatcgaccgtaaaaagaacattttcaagctggcccaaggagaatacattgcaccagagaagatagaaaatatctacaacaggagtcaaccagtgttacaaatttttgtacacggggagagcttacggtcatccttagtaggagtggtggttcctgacacagatgtacttccctcatttgcagccaagcttggggtgaagggctcctttgaggaactgtgccaaaaccaagttgtaagggaagccattttagaagacttgcagaaaattgggaaagaaagtggccttaaaacttttgaacaggtcaaagccatttttcttcatccagagccattttccattgaaaatgggctcttgacaccaacattgaaagcaaagcgaggagagctttccaaatactttcggacccaaattgacagcctgtatgagcacatccaggattaggatacagtacttaagtacctgccggccccctgtgcactgcttgtgagaaaatggattaaaaactattcttac

SEQ ID NO: 76113 - DNA, 1833 bp, Homo sapiens; identical to SEQ ID NO: 58644

SEQ ID NO: 76114 - DNA, 1536 bp, Homo sapiens
cggccgcgaccactaccaccactgagcaccgcttcttccgccggagcgtcatctgcgactccaatgccactgcactggagcttcccggccttcctctttccctgccccagcccagcatccccgcggctgtcccgcagagtgctccaccggagccccaccgggaagagaccgtgaccgccaccgccacttcccaggtagcccagcagcctccagccgctgccgcccctggggaacaggccgtcgcgggccctgccccctcgactgtccccagcagtaccagcaaagaccgcccagtgtcccagcctagccttgtggggagcaaagaggagccgccgccggcgagaagtggcagcggcggcggcagcgccaaggagccacaggaggaacggagccagcagcaggatgatatcgaagagctggagaccaaggccgtgggaatgtctaacgatggccgctttctcaagtttgacatcgaaatcggcagaggctcctttaagacggtctacaaaggtctggacactgaaaccaccgtggaagtcgcctggtgtgaactgcaggatcgaaaattaacaaagtctgagaggcagagatttaaagaagaagctgaaatgttaaaaggtcttcagcatcccaatattgttagattttatgattcctgggaatccacagtaaaaggaaagaagtgcattgttttggtgactgaacttatgacgtctggaacacttaaaacgtatctgaaaaggtttaaagtgatgaagatcaaagttctaagaagctggtgccgtcagatccttaaaggtcttcagtttcttcatactcgaactccacctatcattcaccgcgatcttaaatgtgacaacatctttatcaccggccctactggctcagtcaagattggagacctcggtctggcaaccctgaagcgggcttcttttgccaagagtgtgataggtaccccagagttcatggcccctgagatgtatgaggagaaatatgatgaatccgttgacgtttatgcttttgggatgtgcatgcttgagatggctacatctgaatatccttactcggagtgccaaaatgctgcacagatctaccgtcgcgtgaccagtggggtgaagccagccagttttgacaaagtagcaattcctgaagtgaaggaaattattgaaggatgcatacgacaaaacaaagatgaaagatattccatcaaagaccttttgaaccatgccttcttccaagaggaaacaggagtacgggtagaattagcagaagaagatgatggagaaaaaatagccataaaattatggctacgtattgaagatattaagaaattaaagggaaaatacaaagataatgaagctattgagttttcttttgatttagagagaaatgtcccagaagatgttgcacaagaaatggtagagtctgggtatgtctgtgaaggtgatcacaagaccatggctaaagctatcaaagacagagtatcattaattaagaggaaacgagagcagcggcagttggtacgggaggagcaag

SEQ ID NO: 76115 - DNA, 1406 bp, Homo sapiens; identical to SEQ ID NO: 58646

SEQ ID NO: 76116 - DNA, 2575 bp, Homo sapiens; identical to SEQ ID NO: 58647

SEQ ID NO: 76117 - DNA, 2646 bp, Homo sapiens; identical to SEQ ID NO: 58648

SEQ ID NO: 76118 - DNA, 1857 bp, Homo sapiens; identical to SEQ ID NO: 58649

SEQ ID NO: 76119 - DNA, 1218 bp, Homo sapiens; identical to SEQ ID NO: 58650

SEQ ID NO: 76120 - DNA, 782 bp, Homo sapiens; identical to SEQ ID NO: 58651

SEQ ID NO: 76121 - DNA, 2034 bp, Homo sapiens; identical to SEQ ID NO: 58652

SEQ ID NO: 76122 - DNA, 6641 bp, Homo sapiens; identical to SEQ ID NO: 58653

SEQ ID NO: 76123 - DNA, 1952 bp, Homo sapiens; identical to SEQ ID NO: 58654

SEQ ID NO: 76124 - DNA, 1216 bp, Homo sapiens; identical to SEQ ID NO: 58655

SEQ ID NO: 76125 - DNA, 2752 bp, Homo sapiens; identical to SEQ ID NO: 58656

SEQ ID NO: 76126 - DNA, 1493 bp, Homo sapiens; identical to SEQ ID NO: 58657

SEQ ID NO: 76127 - DNA, 4923 bp, Homo sapiens
ctcacgacgggccgagcctgccactgctaactatatgtcagaaagcatcagcttttctcgatggacccattcatctaatgaaatatgcctgtactattttaaaaagctttgtatttcgtcatagaaaagttcatccccccagaatgaaaatgaggacatttgagaaggtgatttaaggtgtggacatttgagaaggtgtcctatcaaattagtaaaccaaaggaaaagtactgaatagattaatccaaaacacttacttttttttaaacgaagaggatttcaccttgacagaaaaacaacttttattcaatatgtatttcctgaaattaaagagacaagtacagactgaaaggaaaatagattcgtaaataagctacgtcaactctatcctgctgaggatagctcagtgatgttaaatcctttacaaatccctggttgtcttcctacagacaagactgctttttgatgggactgatattaagagaaataggacctttggggcattcaactccttgataaaacttaaaagtatcggcatgagtggcttaacagaggaaataaagaagttttcaactaaatccaaaagtgcggtcattttctttactgctgttattttaaaaacctcttcataaccattgaaaaagaatcgacaactattttaaaagattaaagaaaggcagatgtctgcaaataattcccctccatcagcccagaagtctgtattacccacagctattcctgctgtgcttccagctgcttctccgtgttcaagtcctaagacgggactctctgcccgactctctaatggaagcttcagtgcaccatcactcaccaactccagaggctcagtgcatacagtttcatttctactgcaaattggcctcacacgggagagtgttaccattgaagcccaggaactgtctttatctgctgtcaaggatcttgtgtgctccatagtttatcaaaagtttccagagtgtggattctttggcatgtatgacaaaattcttctctttcgccatgacatgaactcagaaaacattttgcagctgattacctcagcagatgaaatacatgaaggagacctagtggaagtggttctttcagctttagccacagtagaagacttccagattcgtccacatactctctatgtacattcttacaaagctcctactttctgtgattactgtggtgagatgctgtggggattggtacgtcaaggactgaaatgtgaaggctgtggattaaattaccataaacgatgtgccttcaagattccaaataactgtagtggagtaagaaagagacgtctgtcaaatgtatctttaccaggacccggcctctcagttccaagacccctacagcctgaatatgtagcccttcccagtgaagagtcacatgtccaccaggaaccaagtaagagaattccttcttggagtggtcgcccaatctggatggaaaagatggtaatgtgcagagtgaaagttccacacacatttgctgttcactcttacacccgtcccacgatatgtcagtactgcaagcggttactgaaaggcctctttcgccaaggaatgcagtgtaaagattgcaaattcaactgccataaacgctgtgcatcaaaagtaccaagagactgccttggagaggttactttcaatggagaaccttccagtctgggaacagatacagatataccaatggatattgacaataatgacataaatagtgatagtagtcggggtttggatgacacagaagagccatcacccccagaagataagatgttcttcttggatccatctgatctcgatgtggaaagagatgaagaagccgttaaaacaatcagtccatcaacaagcaataatattccgctaatgagggttgtacaatccatcaagcacacaaagaggaagagcagcacaatggtgaaggaagggtggatggtccattacaccagcagggataacctgagaaagaggcattattggagacttgacagcaaatgtctaacattatttcagaatgaatctggatcaaagtattataaggaaattccactttcagaaattctccgcatatcttcaccacgagatttcacaaacatttcacaaggcagcaatccacactgttttgaaatcattactgatactatggtatacttcgttggtgagaacaatggggacagctctcataatcctgttcttgctgccactggagttggacttgatgtagcacagagctgggaaaaagcaattcgccaagccctcatgcctgttactcctcaagcaagtgtttgcacttctccagggcaagggaaagatcacaaagatttgtctacaagtatctctgtatctaattgtcagattcaggagaatgtggatatcagtactgtttaccagatctttgcagatgaggtgcttggttcaggccagtttggcatcgtttatggaggaaaacatagaaagactgggagggatgtggctattaaagtaattgataagatgagattccccacaaaacaagaaagtcaactccgtaatgaagtggctattttacagaatttgcaccatcctgggattgtaaacctggaatgtatgtttgaaaccccagaacgagtctttgtagtaatggaaaagctgcatggagatatgttggaaatgattctatccagtgagaaaagtcggcttccagaacgaattactaaattcatggtcacacagatacttgttgctttgaggaatctgcattttaagaatattgtgcactgtgatttaaagccagaaaatgtgctgcttgcatcagcagagccatttcctcaggtgaagctgtgtgactttggatttgcacgcatcattggtgaaaagtcattcaggagatctgtggtaggaactccagcatacttagcccctgaagttctccggagcaaaggttacaaccgttccctagatatgtggtcagtgggagttatcatctatgtgagcctcagtggcacatttccttttaatgaggatgaagatataaatgaccaaatccaaaatgctgcatttatgtacccaccaaatccatggagagaaatttctggtgaagcaattgatctgataaacaatctgcttcaagtgaagatgagaaaacgttacagtgttgacaaatctcttagtcatccctggctacaggactatcagacttggcttgaccttagagaatttgaaactcgcattggagaacgttacattacacatgaaagtgatgatgctcgctgggaaatacatgcatacacacataaccttgtatacccaaagcacttcattatggctcctaatccagatgatatggaagaagatccttaatcactgagctaacctaaataaggaaggatttcattttatggactgatattttgctgtgtaacttgttcttcgtaaattgtcatctgcagtgctgcaaagatatgaagaaatatgataacgaataagtgacaccagtactgtagttcataatgagtaggtacaggcgggaaactgaataataagaagtcataatggaatcaaggtgaagctttttataaacttttttagcctaagcaataactggttttgtattttttcttaatccttcactttaatacaataggctcacttaatttgtcttcccatttctctttatatatatatatatatataaaaaaatataaatatatgtttgtttgtttgtttttttaaggaaaaacaagtcaagctagcatccagttactatatagcttggctaaattatacaagacttacaagattgattactcgacaggcttgtatttaagagataactgtgaggttaccattatgtgatgttactataaggacttttaacattggtttaacaaaccatagaggcattgaagggtttttcttagatgcctagaaaaagcacactgggctgttttacctttcttttttaggtcaatcaagactccaaaatagtgattcctaacctttttggagttgctctgctactctgaatatgttctatacagcataaggattgtcaccttctgtgtgttgcaacagcttctaagataattagggacaaatgatgttacaaaaggaagagtactgctggtctaagtgctgagttgtatgtctttgcatagctccactctgctgctaaatatgcatgttctgactgacaccatcttgatgccagtactggattccagcattcagcaggtgcagatctcggctttacacaatttatctttacctagggttcagtcagtaatttctgctttttagcagggccagtgcagggtcagttaatgctacagttactgtatagcaaacagtatccttttttctccttcccctagcctattgggctttgcagatatctggagtgttttaaagtcaattattttaagcagtttgaggggatgtgtaggagtggagcatgaaacagtttataaggctggggctgtattatcagcacagcaaattaaagaatgaaagaagtacttctttttacatttcagctccagcagccagctatttaaaaaatatttttaaatatcttccccaaagtttaagatgtgggaccatctacttgtaagaaacagtggcttatttcttcatttctcagtaatcattgtaaacctttttttttttcttctccactctaacaaaagtaaaagaacaaaacttttgctgaggtcttggactccactacttgttagttatgttggcctggacagatggcaggtctgtcggcagttcctcagtctgtaaaatgaagattatcattcttgcctctccctttgtcacagtgttgtcgtgaagatcagatatgtatgaatgcagtcaaataaactaaaaactaggaaagtgttaactatcgttgcccaccgaatttgaggtagcaaaaaaaaaa

SEQ ID NO: 76128 - DNA, 340 bp, Homo sapiens; identical to SEQ ID NO: 58659

SEQ ID NO: 76129 - DNA, 2054 bp, Homo sapiens; identical to SEQ ID NO: 58660

SEQ ID NO: 76130 - DNA, 1815 bp, Homo sapiens
cgagagggagaggaggaaaactcagagggaagtggcgtggcttcaacagactttcttttgcctgtctttgtcccagagcctcttccctggccctgctgagaccactgctctaagaagagaccaccagactgagagaggactcccagctgccctcagagcggaggccgagtgctgcacagccacagctgctctgaagcccttccatgaatccccggaagaaggtggacctgaaactcattatcgtcggagccattggtgtgggaaagacctccctccttcaccaatatgtgcacaagacgttttatgaggaataccagaccacactgggggccagcatcctctccaagattatcatattgggtgacacaactttgaagttacagatctgggacacgggcggtcaggagcgggtccgctccatggtgtccacgttctacaagggctccgatggctgcatcctagcttttgatgtcaccgacctggagtcttttgaagccctggatatctggcggggtgatgtcctggccaagattgtccccatggagcagtcctaccccatggtgttgttggggaacaagatcgatctggcagaccggaagtaccagagcatcttagaaaatcacctcacagaatccatcaagctctcgccagaccagtcaaggagcagatgctgctgacctccagacgcctgctctggaagcccagaaacagagcctgccccgagcctggtcaccccaggcttgagaacaggtgaccatccccctccagccccactgcctgcccaagcacagtgcagggggcctaagctctgcggcagagcccttgaccctggtgctgggcccagagtcagagggcagcccctggctcaggctgagtatagtgagagcgtctggatgaagcccggaatgtcagagccaaaccctggtcctgcagaagtcacagtttccgcagtggcttccagctttccccacccattccacccctcaaacactcccgctccagaacacacatctccgcagaccggccactgattggagtctggttacatcctcctgtggacagaccttcctcacccgctcccacctcacacccctcagccacaagcaaagctttggacaatggcacagctcagcctccttcaacgagcagactaaggagtaaaggtctggaccccacatgctgggcccgcctcagctcctggcagaagctgtcgtgcctgagaccccctctgctccctccagggtagaagactgagggagcacaggagaagccacaagggaccatggctcattcctccttgctgggtgctcaggcaactcacataaatctctgagtctcaatttgtttatctgtcctgtgggggtgagatgtgccttgccccctgtatcacagtgtggttttgaggaccagaagctgtgcttaaatccagtagctgttgtcaatatgcatttatttacttctttgacaagtttatttttgcgtatctactatgtacgatgcattgaagtccagtgacaaacaaaacacagggactctgccctcctggagccgacatctggtgagggagagacgcagactctagacagatatttccaaatagcaggtaagtgctataaacaaagggaaacagggtaatgggatagagtgacagggggtgggatgagttgctattttagatgaagtggtccaggagggcttccctgaggaggtggcatttggtctgagggctagagaatgagaaagcagctgtcacctgagagctggagaaagaacattccagggagagggagcatcaagacccaaagccctgaggca

SEQ ID NO: 76131 - DNA, 353 bp, Homo sapiens; identical to SEQ ID NO: 58662

SEQ ID NO: 76132 - DNA, 733 bp, Homo sapiens; identical to SEQ ID NO: 58663

SEQ ID NO: 76133 - DNA, 5276 bp, Homo sapiens
tttttttttctttcttttggtggtaaataggtatttatttgaaatgaaaaaaaaattacttaagtacctggactattgcatttaatcatgtattgtaattgtgttactctacctttttgcatcagagacaaatatacaatgaacattcagatatcacagactgcacactagatagtaattcttcaggtcttttacataaccaccaagaaacagatattggtttctgcaatatagtataaaagtccacaatcaatccagtcttagccagtatcttcaatttacttctgttgctgtacaaataattggccattactagggcttacaagttaataacaggacaaaaaatatacattgcactgacacaaaaagtcagctgtgttaagagtcatgcaacaagtaaccaaacttgctgaaattaaaaatactttctaaaaacagttttaacggcataaatattttatacacagttcatttaccaaaacaaaatgtatttaaatgatacaaagcaaaaataagtttctaccaactttatacataagaaagtgcaaaataacttatctagagtgttttgctattatccagacggatggctgctatgggcagctattctcttcttcaaaagcatgacattagagttgcacactacatagaaatgttagaatacatggatgaacaaatgaacaggtggatggatgaatgaacaaactacaaagatcaggcaggagccctatgaggtactctcagaaaaagaatgcagaccatactaaggtagatgtacatgttgacaatagatgttggtaaataaatttacatggaacacagaaagatatccagagaaataattagtttatgtatgtgagtgtacttgtatgtgtgagtgattctgttgatttctgcattagaggcaaaaagaaaagaaacccgattgaacaaaacagttgcccacagcaccagctgccagaggaaatactaccatgagggttttggtttccaccttctagttatggaagttctgttagaaagttagtaatggaagttgtgtcggaaagtttaaaagtgttcatcccatatagtttcctattacaaagaggaataacctttaagtaactacacacacacattcatatattcaagtctttaaagaacacctctgccactgggtatggggtaaacatgattcatggacaaaaggaggacgcttcttttaaaaagtgtagaataacactgctacaaatcatctagagggccagacaggggcaaggcccacagttacataatagcacaatttctgcaactgttgaacatcagcattatttattagaattgaagatggtgatgggggagggagagtgtggggggagtaagacacagaaaggaaaacagaacacaacttttctttaaattaaagtattaatgccgataatccttttattaacaagtatatttgaacttttagaaatggaagtgttttaatcaattttgatatgtaatcataaatagactgtaggctcaaacccaggtaaataaagatttaaatttagtaagcgtaaggcactaaagcagcctttctattttctcttggagacctagttatcatatcaggaagaacaaatttgttcttaagctggtttcagcccatcaggtacaagatcaccattgtaccaaatgcctatttttgaatgcatgtgcatatatgtgcattttagtgcataagtgtgcctctcaccagggcctaaagatggaaaattggaaaagccaaagccgctgtcctttgcatgatgcctctgtgagggtgtgaaggcctttcctttcgcacctgtgaaggtgtgaaggcctatcttgggccattaatgattctatatttttcaaatcacagggcttttagaattgttcataatgttatcactaagtttctgaaaatgttaaaatctagattaattgtttcatttttaatatatattatatatatatatatatgtacataacacacatttaaaaaaatcccaccaccaagccttttctctgtaaactaatctcttagccccttccagctttaatccccctggatttgtgtgttctgtatccaactagtagaacaaattaaataactaaatattaaaatactgtaattatattcatagcaaaaacaaaaaaatagacattgatacagtataaatctcactgttttcaggtagatgacattaaatggtaaaggttaattttaagcagttctgacatgattcagttttacaacaaagtttatatgttaattctgtacacttctttctttcctttttttaccccttgtttgaaaataagctatagtagaacattagtgtcaccaaagacacatacttattatgttctatgcaagataagctaattttgggttacatgcaaatatatttccattagttgagacagggctgtttcctgcactacactggtcatctgaccacctttctgcaatgctaagaaggtattctttgaccaaacagcagtccacatacaagtttaaaaggggccctgtttatgtaggaacaacactgaggtggtgcgtagccaggtacaagacgcccaaatatttccagtttatcttacggctggactcctattctcccacactgtttcctaaagaaggtccacattattttggttactagcctagtttaagtggagatactgtgggcaacttgaaagaaatgacatcaggcacacaggctgagcttgaaaggaaaaaaagaccacagataatgtctttggggatttaaaaaaacatatttataattaattggtaagttgagggatgtcagacaaaccataagtagttcattgagttagtggtttagtttgaagtttcatgttacaggcagttaagtccttatttagaaaaaaaggcctttttatatcctatttacaatatacatagttacttgcaaagaagtcagatttacaaccattttctaaaagccttttttgttgttggtttttccaaataaggatgagtagctcctttaaaaatgagatgcaagaaaagagagttaataagtgaggatttttctcttggagacagctactgtcatcacgggagaactggagggtcgaaagtgttgctcctaggaaccacctcatattcttcttgtgctgttcacctgaatcgcgtctgccccattcctgtactctacacccgttttattcaatgatccctttgaattttaacacttcaaacacgtggtatgaagagatgtgtaaacggagactgttttcaatgccttccaagctgggacaggagaatcgggaaggggtctacagaccatggtctccactcagcttgttgaatcttcaacaatttcgaggcccatcttctgaacctctctcatgctgtaagttataataacagttctgacaaacacgcaccggggatgagattttcaagcgtttgatttcagattgaaagcgactgcacttctggcagaagagctgaccacagttcctgcaatggtgtcgtctttctgtgagtgaaaacctcaccgagcagcctgagcagctgtcaccaccttcatccttcacccagtgatcagcagcagaacggcctggctggtcactcacagaccagctgaaaactcggcctcgactgtcaccaacgaggatcctactgtgatccttggagatgcccaaggcagtgacctcagctgggtgtgcattgtcctttcgatcaaaggctgtgtgcatagtcagcttactcctgaacaccagctgccgttcccatcggtacccaggtttcaatctgctgtaattccgcacctcaatgggattggggtgggggtggctaagggggccctgcagatgggctctggtctggccctctgaatagttcacaaatatgaagccgtctttctcatctagactgagctggtcggaccagcgtctggagtcgtcagagccactgtcagtacaccaggcggctgttgcgcggcaggaggctgcccggggcctgtggctggtgctgctgggttggcttggagtgtccttagggtcctggctgatgctctgctcatctgcttctgaatcactgctgtcctcgtcttgggcttcctgccctatttgtgcttctggacagtcttcctgcatttctaggacttcagcaggctcaggagctggtgtttcaggaacttgcaaaaattccattctccaaaaccgaaccactccatctgagtgtcctgtcactatgacgttctgcgtgtcccattcgttcatctccgacatgcagcagcagatgatctgctggctcctacctgtgaacgtgttgacactcacgatagggttcccattgatgctccacacatggatatatgtgccagcgcaggacacaatgtcccctgttaattcattgatacaaagagcagaaactggagctcgatgccctcgaagctgggttagaaatgacagtttgttcaaatcccaaatgatacaggttcgatcacgggacccactgacaattatgtgataggctaatgatgctgtggcgcaggtgacggtatcagtgtggcccagtaaggcctgtttgagggtgacggtcttggccttttctttggaggtgcccatctcccacacacacacaaccgtgcttgttccacccgtgatgaccagcttggggttggggcagattgcacagagaatctggccccactcagacaagcattcataaacagtcatggccttgtctgactcataggttcccagtctgcaactgaggtctgcatagccccaagcaaaagttttattccaggttggtgggataagaaccttattctgttccaccgcaagaatacctttatctgtacatacgatttgtcctacaggttctttgagttcttttacaggtgttagagaaggcctcaagttgtctagatgatgaaaaaagatcttgtcacttgtagatcctggtaggacagagattcctgcattgtctccattgagtcgacttctcactcgctttggtggatgaggttttttaaataactgtttagggatctgaccgaagttattaatgaacccaattgtggctgtctcctttagtgggtcattgatgttgtagatatccacttgaccctcataaaaaagatgatggaagacatttacagcttctactgcagcagggccttgctgtttataaccgaagattaagtcaatccactcatgtagatgggcactcacgtaatcacactccaaagcctcacgatggactctgatgaattctcgtgggtccccttttg

SEQ ID NO: 76134 - DNA, 2553 bp, Homo sapiens; identical to SEQ ID NO: 58665

SEQ ID NO: 76135 - DNA, 822 bp, Homo sapiens
tttttttagttaaacaatcattttattgcttgagtacacagacaaatttatgcgaccagggcagaggctgtagatgattcatatttccaattgggagggaggactcgcttggtcttataatatcgagccaaacggtgaatccggctctctattagaatcagacggaatttagcatccttatcctttctgttcctctcaagatgctttcgaacagcaactgctttcttaattaaatggtagagatcttcaggaagatcaggagcaagtcccttagacttaagaattcttaaaattttgttgcctgatcgccgccatcatgggtcgcatgcatgctcccgggaagggcctgtcccagtcggctttaccctatcgacgcagcgtccccacttggttgaagttgacatctgacgacgtgaaggagcagatttacaaactggccaagaagggccttactccttcacagatcggtgtaatcctgagagattcacatggtgttgcacaagtacgttttgtgacaggcaataaaattttaagaattcttaagtctaagggacttgctcctgatcttcctgaagatctctaccatttaattaagaaagcagttgctgttcgaaagcatcttgagaggaacagaaaggataaggatgctaaattccgtctgattctaatagagagccggattcaccgtttggctcgatattataagaccaagcgagtcctccctcccaattggaaatatgaatcatctacagcctctgccctggtcgcataaatttgtctgtgtactcaagcaataaaatgattgtttaactaaaaaaaaaa

SEQ ID NO: 76136 - DNA, 1789 bp, Homo sapiens; identical to SEQ ID NO: 58668

SEQ ID NO: 76137 - DNA, 1653 bp, Homo sapiens
cccacgcgtgcgcccacgcgtccgcccacgcgtccggtcggcttgtcaggtggtggaggaaaaggcgctccgtcatggggatccagacgagccccgtcctgctggcctccctgggggtggggctggtcactctgctcggcctggctgtgggctcctacttggttcggaggtcccgccggcctcaggtcactctcctggaccccaatgaaaagtacctgctacgactgctagacaagacgactgtgagccacaacaccaagaggttccgctttgccctgcccaccgcccaccacactctggggctgcctgtgggcaaacatatctacctctccacccgaattgatggcagcctggtcatcaggccatacactcctgtcaccagtgatgaggatcaaggctatgtggatcttgtcatcaaggtctacctgaagggtgtgcaccccaaatttcctgagggagggaagatgtctcagtacctggatagcctgaaggttggggatgtggtggagtttcgggggccaagcgggttgctcacttacactggaaaagggcattttaacattcagcccaacaagaaatctccaccagaaccccgagtggcgaagaaactgggaatgattgccggcgggacaggaatcaccccaatgctacagctgatccgggccatcctgaaagtccctgaagatccaacccagtgctttctgctttttgccaaccagacagaaaaggatatcatcttgcgggaggacttagaggaactgcaggcccgctatcccaatcgctttaagctctggttcactctggatcatcccccaaaagattgggcctacagcaagggctttgtgactgccgacatgatccgggaacacctgcccgctccaggggatgatgtgctggtactgctttgtgggccacccccaatggtgcagctggcctgccatcccaacttggacaaactgggctactcacaaaagatgcgattcacctactgagcatcctccagcttccctggtgctgttcgctgcagttgttccccatcagtactcaagcactataagccttagattcctttcctcagagtttcaggttttttcagttacatctagagctgaaatctggatagtacctgcaggaacaatattcctgtagccatggaagagggccaaggctcagtcactccttggatggcctcctaaatctccccgtggcaacaggtccaggagaggcccatggagcagtctcttccatggagtaagaaggaagggagcatgtacgcttggtccaagattggctagttccttgatagcatcttactctcaccttctttgtgtctgtgatgaaaggaacagtctgtgcaatgggttttacttaaacttcactgttcaacctatgagcaaatctgtatgtgtgagtataagttgagcatagcatacttccagaggtggtcttatggagatggcaagaaaggaggaaatgatttcttcagatctcaaaggagtctgaaatatcatatttctgtgtgtgtctctctcagcccctgcccaggctagagggaaacagctactgataatcgaaaactgctgtttgtggcaggaacccctggctgtgcaaataaatggggctgaggcccctgtgtgattttgaaaaaaaaaa

SEQ ID NO: 76138 - DNA, 2154 bp, Homo sapiens; identical to SEQ ID NO: 58670

SEQ ID NO: 76139 - DNA, 1913 bp, Homo sapiens; identical to SEQ ID NO: 58671

SEQ ID NO: 76140 - DNA, 4483 bp, Homo sapiens
cgaggtatataatctaccatagttggtactttatataggcctcgggtacctatttgaggcgttctatgatcatacccatcctcgagacctataaatggttattaggtgaatgttacccaggttctcctcagttcataagcaattctttctttactgattattatttatctttgtttattaactttacccacagttgcttacatttgtagcaggctgaactgtaatctttcctgactgatcttttccagagcctggcccaactagagaatctgtgcaaacagctgtatgaaaccacagacacaaccactcgactccaggcagagaaagccttggttgaatttaccaacagccctgattgcctgagcaagtgccagctactcctcgaaagaggaagttcctcttactcccagttactggcagctacatgccttaccaagcttgtatcacgcacaaacaaccccctaccattggaacagcgaatagatattcggaactatgtgctcaactaccttgccactcggccgaagttggctactttcgtgacacaagcacttattcagttatatgccagaatcacaaaactgggctggtttgactgtcagaaggatgactatgtcttcagaaatgcaatcacagacgtcacaaggtttttacaggatagtgttgaatactgcatcattggtgtcacaattttatctcagctaaccaatgaaattaatcaagtaagtgctacagccttcctcattgaagcagacaccacccatcctttaaccaagcacagaaaaatagcctcttcttttcgcgattcatcattatttgatatcttcacactttcctgcaatttactaaaacaggcttcaggaaagaatctaaacttgaatgatgaaagtcagcatggcttgctcatgcaactgctcaagctcactcataactgcctcaactttgacttcatcggcacttccactgatgagtcctcagacgacctgtgtacagtgcagattcccaccagctggagatcagccttcttagattcttcaaccttgcagctgtccaccattgggcgttgtgaatatgagaagacgtgtgcactcctcgtgcagttgtttgaccagtcggcccagtcgtaccaggagctgctacagagcgccagcgcaagcccaatggacattgcagtgcaggagggaaggctgacatggctggtttacattattggagcagtgatcggtggccgggtttcttttgccagcactgatgagcaagacgccatggatggtgagcttgtctgtcgggtgctccagctgatgaacctaacagattctcgtttggcccaggcgggtaatgagaagctagagttggccatgctgagcttttttgaacagtttcgtaagatctacattggggaccaagtgcagaaatcctctaagctgtaccgccgactctcagaagttctgggcttgaatgatgagaccatggtcctaagcgtcttcataggaaaaatcatcaccaacttgaagtactggggccgttgtgaaccaatcacctccaagacactacagcttctcaatgacctgtccattgggtacagtagcgtaaggaagctagtgaagcttagtgcggtacagttcatgctgaacaatcacacgagcgagcacttttcatttttgggtattaacaatcagtccaacctgacagacatgcggtgtcggactaccttctacacagcacttgggcgtctcctcatggtggatttaggagaggatgaagatcagtatgagcagttcatgctgccactcacagcagcatttgaggctgtggcccagatgtttagcaccaatagtttcaacgagcaggaggcaaagcgaactctagttggcctagtaagagacctgagagggatcgctttcgctttcaatgccaagaccagcttcatgatgctctttgaatggatatatccatcctatatgccaattctccaacgggcaattgagctctggtaccatgatccagcctgtactacacctgtactcaagttgatggctgaattggttcataataggtcccagcgactccagtttgatgtctcttcccccaatggcatcttactcttccgagaaaccagcaagatgataacaatgtatggcaatcgcatcctgacactaggagaggtcccaaaggatcaggtctatgctctgaagctcaagggcatctccatctgcttctccatgctgaaggctgctctcagtgggagttacgtcaatttcggagtctttcgtctctatggagacgatgccctggacaatgctctgcagaccttcatcaagctgctcctctctattcctcacagtgatctcttggattaccccaagctcagccagtcttattattcactactggaagtcctgacccaggaccatatgaactttattgcaagcctggaacctcacgtcatcatgtatattctctcttccatttctgaaggacttactgcacttgacaccatggtatgcacaggctgctgctcctgcctggaccacattgtgacatacctcttcaagcagctgtcacgtagcaccaagaagaggaccacacccctgaaccaggagagcgaccgctttctgcacatcatgcagcagcatccagagatgatccagcagatgctgtccacggtgctgaacatcatcatctttgaagactgtaggaaccagtggtctatgtcccgaccactacttggcttgatattgcttaatgaaaagtatttttctgacctaagaaacagtattgtgaacagccagccaccggagaagcagcaggccatgcacctgtgttttgagaacctgatggaaggcatcgagcgaaatcttcttacgaaaaacagagacaggttcacccagaacctgtcagcattccgtcgagaagtcaacgactcaatgaagaattccacttatggcgtgaatagcaatgacatgatgagctgacacctccttggactctacctgtacagagcagcgtccctttggtttggcccagaggggcgaacaattgcaagggagagggcctggctgatcctggctcttttctccaggggtgtggggaaaatggcaaaggtcaactagctgcttccccagggaataggggtgtgagtacactcactagggggcagggcgctgctggttcctgggggactgggtgggaagggtggtgggaggagataagagatacaaactgagactccagcctctcctcctggggcccaccccaagtggggagaacccctagtgtcctgcccaacctgccttgtataaacatgtacattttttcataacattttgaacaaggtttatattgactcaagtttaaaaacaaaaagtgtgactgaaaaatttttacagagtctagtgcaccaatgctgatgtgaggggttgtgtatgcgagtgaagaaaatgtgtattctggtggcctgaagctttactggacaaggatgtgtgagagtgcagagatatatttagtgacacagtagagaggcaaaaaaaaagctaaaattccaaatgtatattttttcgtattgccctgtcctcacccagaaatgatcaattcctgttactgtattaacccttgttattaggaactctaagccatgccagaacaccgtccctccccttggaccgtatagattctgccctgggtccctagccccttgcagtgataaataactccagctaaaagtgtttgggtgttcttatctccaccctctttcctactttgcttaccctcatcctcagacagatgcctcttgcttttaaaagttggatttaacgacgtgttgtagggttcttggtctgtgtgaaggcagagaccagagagaaggaagtgagcccactgctctcctgggagcaatgtgggtgagtccaccagaggccctgctgtgtgtggccaataaattttagtcttccccagccctcgaggcagtgtgtgtggatgtatgcgtgtggatatttatatatgtaccctgcactcatgaatgtatgaactggaggaagttactacagtggaagggttcttaataacaaggtctacctagcatgaagtatttaacattctcccatcccttaaaaaatatacatttttataaaatgaaaaccataataaatgttttgaatattaaaaaaaataataacctacagaggaaaattaatggagacagctatttgccttgtactttttccacaattgttgctgctagttgtacacatctctagttcagctcttgcccacgggacactcatcaattaggttttatttttatttctttcctctacccccagaaacaagcctgttaattttttttccttctcctctggcgactgtgtgatgaatcctttcttgcgtgatcaggttgcggatagacttgtaagggtgtttgctgcatacagtgtaagcattgtgaccgccaataaacttcaatggtttctactgaaaaaaaaaa

SEQ ID NO: 76141 - DNA, 1682 bp, Homo sapiens; identical to SEQ ID NO: 58672

SEQ ID NO: 76142 - DNA, 1139 bp, Homo sapiens
ttttttttttttgtgtctttgtacaaaattttattaaaggtctttagagagcaacatccagactccagaatacagctgccaaggagaccctgttatgctgtggggactggctggggcatggcaggcggctctggcttcccacccttctgttctgagatgggggtggtgggcagtatctcatctttgggttccacaatgctcacgtggtcaggcaggggcttcttagggccaatcttaccagttgggtcccagggcagcatgatcttcaccttgatgcccagcacaccctgtctgagcaacacgtggcgcacagcagtgtcaacgtagtagttaacagggtctccgctgtggatcatcaggccatccacaaacttcatggatttagccctctgtcctcggagtttcccagacaccacaacctcgcagcctttggccccactctccatgatgaaccgcagcacaccatagcaggccctccgcacagcaagccctcctaggagtttgtaacgcagagactctgcctgggcaatggcacacagacctctagtggccaccttttcagcataaagctctacactgccctctggaaagccaaacctcttctgaactacagcagtcagttcccgaatccgccggcccttctcaccaagaacattctgtgttctggtggctaagataatgatttctgtcctggttggtgtaactcgcacctcaactccagagtagccatcttcagccagctcccgagtaagaaactcattcagttcagctttgaagatgccatcagcgacaaacttcctcttcttggatatttgcactgccatcttgccaattgctcgaattttgtttcttatgatttctttccgggctgcagctgaacctacatcaaactggtcttcaccttcagtcattagttcatcatcagagcaaatactcagaacatttaccaacatttctgtcactttttctccaacaaacggtaaagaccacgtgaagacatccataaaattaggcaaccagtaaggatgtggagaacagttaacctgtcgaatattcatcacattattttcatacaaaaatacagcagctttattatgtagacatctaagtaagagcgctcgtgtcacgctaggcgagat

SEQ ID NO: 76143 - DNA, 1637 bp, Homo sapiens
ttcttaattatcaactttcaaaaaaccctgaaacttggatgatagatattatggtacaatatatttgctaggggaaaaactgtctatagtagcaccatcttcttcctttgaatgggaaaagtttgaccaagaagcaacataaagtattagcagcaaaatactgttgaaccagctatcatccccaagactcccactataaacatgttagcaacagtgatacacactgccttacagcaatttttggctgtaaaaatctagccaattcagttttttgatatttggtttttaatagtcttgttcaagtaagaaactagctgctagtttctgttctgaaaagacatggaagattcattagaggcacacaattgcttaatgtgagacttactgaaaaacaaaagtcacattaccccctagcttaaggcttcatttcctaaaaagctgacgtgatttatttttagaaccacctgtcaagtcagtcttggaaggtgattctgatttgaagtattctaactgatgttagaccttaaaaactcaagaccatcttgagtattaactacctttaattaatcatattttatagaagctcaaaacacccaaatatttatcctttatatgaataaacaaaagccctatgaattacaatatgcagaacactatataaaagaattcccataaaaattacattggaatatttttcatcagtggagcaactgctgtagcttcctctgaatgggacagcatctgcctgaatgcacgttcttctttgtgataatctaaacttagtgtaagtacaaatcacagaagaaattaaagttttcatctttaatgaaatgactttggaaataacgtacattcccatgacaccaatactacagttttcggagtcacagtaagatacacagaattacatccgtaattaatatgaatgccaacatgtcaagcagtaatttgttacatggcaaacaaaatcaagaaagcaaccatcaaacaaaagagacccatagcttcagacaaggcaaatcccaggatagcatatgagaacagctgctgcttcagcgaagggtttctggcataaccaatgataaggctgccaaagactgttccaataccagcaccagaaccagccactcctactgttgcagcacctgcaccaataaatttggcagcagtatcaatgtctctgctgattgcactggtctgaaactccctttggattagctgagacacaccattctgggccccattaaataccgtagagccctctccagtcctactagcctctggtcgagataacactgatgcagaaattggtctgtatgcaactctggatccagctcggatcagagagggggtgcaggcgagcttggcgcaggcgaacatcttacactcttcgggactgcgcggctggagatattgggtgacaggagacgtgggctcctctcccgcttcctctctgcggaggaaaagaggcttaaggtcaagtgccctccaggggcctgttcttcccacccaggctccgcaggctcccgtgcacgccgtcagcttgggccccgtgcccagtgaggcgccggcacaatgaatgggtccctactgggcgccgctccgccctggccaggccgggctccctgtgccctcca

SEQ ID NO: 76144 - DNA, 736 bp, Homo sapiens; identical to SEQ ID NO: 58674

SEQ ID NO: 76145 - DNA, 1535 bp, Homo sapiens; identical to SEQ ID NO: 58675

SEQ ID NO: 76146 - DNA, 1011 bp, Homo sapiens
  misc_feature (1)...(1011): n = a,t,c or g
gtgcaagaattaaaaataccgagacagccctaggtggaaaacttccggaaggcccaagcgttcgtaagggctctctaccccgctcggagcatagatggtaccgtccggaagtccgggcggagaccgtagctgcgcttctcgcgaaagggcaggcatcgcggggctggccacttccgtacttccgctttccggcccagccagcgcccgcgatgactgccactctccgcccctacctgagtgccgtgcgggccacattgcaggctgccctctgcctggagaacttctcctcccaggttgtggaacgacacaacaagccggaagtggaagtcaggagtagcaaagagctcctgttacaacctgtgaccatcagcaggaatgagaaggaaaaggttctgattgagggctccatcaactctgtccgggtcagcattgctgtgaaacaggctgatgagatcgagaagattttgtgccacaagttcatgcgcttcatgatgatgcgagcagagaacttctttatccttcgaaggaagcctgtggaggggtatgatatcagctttctgatcaccaacttccacacagagcagatgtacaaacacaagttggtggactttgtgatccacttcatggaggagattgacaaggagatcagtgagatgaagctgtcagtcaatgcccgtgcccgcattgtggctgaagagttccttaagaatttttaaaccatctggctggatctcgtggccttccccctcagactacccatgtctccacgaaggcgtcctggagtcactccccgagcagcgcggcggcggcagggagttgggttggggtgggcatttgatgcgggaggtgggtggtgtgcttgctagctgggcaagaaagcagcagtggacctgccccaaggccacacgtgcctggtcaggctggcttctgatgttcagtcccctggggccnggacagatttttttttaacgtcttgaaacttaaactctgtgcttgtaggatactgtaaaa

SEQ ID NO: 76147 - DNA, 984 bp, Homo sapiens; identical to SEQ ID NO: 58676
  misc_feature (1)...(984): n = a,t,c or g

SEQ ID NO: 76148 - DNA, 3612 bp, Homo sapiens; identical to SEQ ID NO: 58677

SEQ ID NO: 76149 - DNA, 907 bp, Homo sapiens; identical to SEQ ID NO: 58678

SEQ ID NO: 76150 - DNA, 1089 bp, Homo sapiens; identical to SEQ ID NO: 58679

SEQ ID NO: 76151 - DNA, 1575 bp, Homo sapiens; identical to SEQ ID NO: 58680

SEQ ID NO: 76152 - DNA, 1957 bp, Homo sapiens; identical to SEQ ID NO: 58681

SEQ ID NO: 76153 - DNA, 1900 bp, Homo sapiens; identical to SEQ ID NO: 58682

SEQ ID NO: 76154 - DNA, 2546 bp, Homo sapiens; identical to SEQ ID NO: 58683

SEQ ID NO: 76155 - DNA, 2986 bp, Homo sapiens
attgaccgcctattagaccgcctgcagaattcggacgagcttgaaccggggcattgctgctgtcaaggaggatgcagtcgagatgctggccagctacgggctggcgtactccctcatgaagttcttcacgggtcccatgagtgacttcaaaaatgtgggcctggtgtttgtgaacagcaagagagacaggaccaaagccgtcctgtgtatggtggtggcaggggccatcgctgccgtctttcacacactgatagcttatagtgatttaggatactacattatcaataaactgcaccatgtggacgagtcggtggggagcaagacgagaagggccttcctgtacctcgccgcctttcctttcatggacgcaatggcatggacccatgctggcattctcttaaaacacaaatacagtttcctggtgggatgtgcctcaatctcagatgtcatagctcaggttgtttttgtagccattttgcttcacagtcacctggaatgccgggagcccctgctcatcccgatcctctccttgtacatgggcgcacttgtgcgctgcaccaccctgtgcctgggctactacaagaacattcacgacatcatccctgacagaagtggcccggagctggggggagatgcaacaataagaaagatgctgagcttctggtggcctttggctctaattctggccacacagagaatcagtcggcctattgtcaacctctttgtttcccgggaccttggtggcagttctgcagccacagaggcagtggcgattttgacagccacataccctgtgggtcacatgccatacggctggttgacggaaatccgtgctgtgtatcctgctttcgacaagaataaccccagcaacaaactggtgagcacgagcaacacagtcacggcagcccacatcaagaagttcaccttcgtctgcatggctctgtcactcacgctctgtttcgtgatgttttggacacccaacgtgtctgagaaaatcttgatagacatcatcggagtggactttgcctttgcagaactctgtgttgttcctttgcggatcttctccttcttcccagttccagtcacagtgagggcgcatctcaccgggtggctgatgacactgaagaaaaccttcgtccttgcccccagctctgtgctgcggatcatcgtcctcatcgccagcctcgtggtcctaccctacctgggggtgcacggtgcgaccctgggcgtgggctccctcctggcgggctttgtgggagaatccaccatggacgccatcgctgcgtgctatgtctaccggaagcagaaaaagaagatggagaatgagtcggccacggagggggaagactctgccatgacagacatgcctccgacagaggaggtgacagacatcgtggaaatgagagaggagaatgaataaggcacgggacgccatgggcactgcagggacagtcagtcaggatgacacttcggcatcatctcttccctctcccatcgtattttgttcccttttttttgttttgttttggtaatgaaagaggccttgatttaaaggtttcgtgtcaattctctagcatactgggtatgctcacactgacggggggacctagtgaatggtctttactgttgctatgtaaaaacaaacgaaacaactgacttcatacccctgcctcacgaaaacccaaaagacacagctgcctcacggttgacgttgtgtcctcctcccctggacaatctcctcttggaaccaaaggactgcagctgtgccatcgcgcctcggtcaccctgcacagcaggccacagactctcctgtcccccttcatcgctcttaagaatcaacaggttaaaactcggcttcctttgatttgcttcccagtcacatggccgtacaaagagatggagccccggtggcctcttaaatttcccttccgccacggagttcgaaaccatctactccacacatgcaggaggcgggtggcacgctgcagcccggagtccccgttcacactgaggaacggagacctgtgaccacagcaggctgacagatggacagaatctcccgtagaaaggtttggtttgaaatgccccgggggcagcaaactgacatggttgaatgatagcatttcactctgcgttctcctagatctgagcaagctgtcagttctcacccccaccgtgtatatacatgagctaacttttttaaattgtcacaaaagcgcatctccagattccagaccctgccgcatgacttttcctgaaggcttgcttttccctcgcctttcctgaaggtcgcattagagcgagtcacatggagcatcctaactttgcattttagtttttacagtgaactgaagctttaagtctcatccagcattctaatgccaggttgctgtagggtaacttttgaagtagatatattacctggttctgctatccttagtcataactctgcggtacaggtaattgagaatgtactacggtacttccctcccacaccatacgataaagcaagacattttataacgataccagagtcactatgtggtcctccctgaaataacgcattcgaaatccatgcagtgcagtatatttttctaagttttggaaagcaggttttttcctttaaaaaaattatagacacggttcactaaattgatttagtcagaattcctagactgaaagaacctaaacaaaaaaatattttaaagatataaatatatgctgtatatgttatgtaatttattttaggctataatacatttcctattttcgcattttcaataaaatgtctctaatacaatacggtgattgcttgtgtgctcaacatacctgcagttgaaacgtattgtatcaatgaacattgtaccttattggcagcagttttataaagtccgtcatttgcatttgaatgtaaggctcagtaaatgacagaactatttttcattatgggtaactgggggaataaatggggtcactgggagtaggg

SEQ ID NO: 76156 - DNA, 2459 bp, Homo sapiens; identical to SEQ ID NO: 58686

SEQ ID NO: 76157 - DNA, 3047 bp, Homo sapiens; identical to SEQ ID NO: 58687

SEQ ID NO: 76158 - DNA, 2164 bp, Homo sapiens; identical to SEQ ID NO: 58688

SEQ ID NO: 76159 - DNA, 2402 bp, Homo sapiens; identical to SEQ ID NO: 58689

SEQ ID NO: 76160 - DNA, 4088 bp, Homo sapiens; identical to SEQ ID NO: 58690

SEQ ID NO: 76161 - DNA, 739 bp, Homo sapiens; identical to SEQ ID NO: 58691

SEQ ID NO: 76162 - DNA, 869 bp, Homo sapiens; identical to SEQ ID NO: 58692

SEQ ID NO: 76163 - DNA, 1064 bp, Homo sapiens; identical to SEQ ID NO: 58693

SEQ ID NO: 76164 - DNA, 416 bp, Homo sapiens; identical to SEQ ID NO: 58694

SEQ ID NO: 76165 - DNA, 2872 bp, Homo sapiens
  misc_feature (1)...(2872): n = a,t,c or g
ccaagccaaagcctgcaacttactttaaaaaagaaaaggaaaaaaagcacttaggaaagttacagacaactacccccaaaaaataccctcccacacacaaaatccaaaccgtttcctcatctccctcccgcctcccccgacacaatacagtttcctgttttctttctttttaaaaacgttgcctgctacctctccatttgggaagcccagggcatgactgctggtgggtggtgacaggcacacagcgggcaaagcccatctttggccagagggaggtgggaggaccagtccctgccacatcctcaatccacagacacccaccagccagcctttactttgggcctcccactagagggtagtggggcaagaacaggtggtcccaatggctgggcaatcagcacttctggcgttcccacctggactacctctatacccttctccaattaaaaggaaagtctcactttgggccgggaaaccactattacataaagggatggacacttacacattttagaatgtgggacacttggtttagggcagtgggaacttataaagatagcagccagttttcttccttgccttctcctgaagggtaatcctccctcttactgactgaagctctggttccagctctgctcatgggcaatgcctggctttacagttataaggctgtgctatggactagctgctgactcagctggcagctggcccttcctccgaaggagaggacgtgttggggcatggcttactgggcctggcctaccattcccacagggaaccaacgagggagtgagcctgtgagactcagcttgccaccttggccaccacgtgctgccctcatcacaaaaaccacaccaaccactccgaaacgtatctgctggtcaggagcagggaggctgtctggctggctgagggataaggcgcagtgcaacggaagggatcaggaagcctgagaggagccaggtacacacagctgctctgggcagctgccctcttagtctcttccacctcaaggagccaaagcaaaccccaggctccagggacagaggataaactgccttcattccaggccctcgctctggaaaaaggggtgacgggtagcctaggcctctgaggaaccagtctgtcatcaatctttgcaaagcaaagctgttctttttccaactttattcagaatgttctgccttcaaggtactgattgcacacaggaaatgtaccaggtatagttactgagctggggccaccaatggagatggagcactgcagacccctaagagttcaagccatgctggagtgggaagacctatccaccttctgaacatacgaggcagaaggctcagagtcctggaggcagactctctcctggttttccttgtgctgatggcaaaatactaaacaagtcttctctccgtcacttctaagcccagggatgcaatctcactccctggcactctgctttcttctagaagtagtaagcctggctggtagggaaccaccctgaggggtatgggaaggggaagtcggttcactttccctatctcccaaaatactagaggtggggttggcaccctccccaggctctccgagcctacagagctagcccagtctccaggcaaggcccagatgccctgggacttagctcggggagggaggtataggcatggggtgctcgtctgtcctggcggctgcagagccctgccccttttctgggcggcagtaggaatacagaagctaagctcaccaaaatcctattggttaatgtttctagtgaatttcccagaaacatttttaagtagactaccaaactaccctttcttaattaaaaattcattaaaccactaaaacccctcccatgcactttttcttgcaaatcagatatttgtataaacaaacaaaaataggaagaaaaaaaaaagaaaggatattttcaaatggaacttactttttaagtgatggagacatgcacttgggggtgggtgggtgtgagttttcatttgtgttttgaaatcccaaattaatgagcatgataaactgttattgctggcactggctttaccccaagtggccaagtggcactgtctgactctctgagtccttgctgggtccccccaaccttcccctaacccccaccctttccctttccattgacttgggacagcccttgtcgatgtgccaatcacagtgggaagggggagaaggggggaggtcacagtgcatggggttcaaggtcacagtgggcggagcaagggggatcacagtgcaagtaagtcaggtcgttccctctgctcaagtccagctgtctgccacggcagtgcaacccgtggcggacgacccaggaggcggtgacggcagcaacggcggcatcttttcttgcctgcatttatctgcgctgtttgaagccttgagacccatcaggacccaaaggctgtctgatcacattattgggctgcctgctgtcttcgggttgggagatcctggttggcctgtcgaggatgggtttctcctgctcctcctcggggctggcgctgcccaggatccgcttccgggcctcggcgtactcggcctctcgctgtgctagggacttgactggaagggtgggcctgctggtggagttggggctgctgaccacaccgttgctggtgggcctcttgaggatgcggatctgtggagggggccccgcgggaaggctatcgtcctgaatcacaatgggcactttgggaggagatttggatttcctgcccgctgtctgccgcctcttcccagctctcagcgacctcctcatcttccatcttactcggggcgtttgccctnaatttcnggngcngttgctcngncannctaggnntactcagtttnnggaagctgggnacct

SEQ ID NO: 76166 - DNA, 551 bp, Homo sapiens
tataaatgcagaccgcgcggccgtagcttcctctctgctctcgcggccgactcgcaagatggcgccgcagaaagacaggaagcccaagaggtcaacctggaggtttaatttggaccttactcatccagtagaagatggaatttttgattctggaaattttgagcaatttctacgggagaaggttaaagtcaatggcaaaactggaaatctcgggaatgttgttcacattgaacgcttcaagaataaaatcacagttgtttctgagaaacagttctctaaaaggtatttgaaataccttaccaagaaataccttaagaagaacaatcttcgtgattggcttcgagtggttgcatctgacaaggagacctacgaacttcgttacttccagattagtcaagatgaagatgaatcagagtcggaggactaggcaaaggctccccttacagggctttgcttattaataaaataaatgaagtatacatgagaaataccaagaaattggcttttagtttatcagtgaataaaaaatattatactcttgaaaaaaaaaa

SEQ ID NO: 76167 - DNA, 4820 bp, Homo sapiens
cctcaggatgcactgttgccagtcagcgttactcattttattccctagggaacagtgggtttggtagaactctcttctaaatctctttttcatagaatttaaattataaattggtcatttactgttgtcacacaatattgcgttgctgaattttccactgattatattcattttatttcctcccagaacttggtttcttgtttttctgctcactgtccacacccactccaccccaaggctggaataattctcttggagcaaaaaaatcatctttttctttgtatttcattgaacgttctctttacagtgttaggtaaaccgctgctgcgcgttttgtcccgcgtctcgccccgtccgtctcctgactggccgctcttgtccttcctcccgctttttcttctctcgtcttgcggtctgaagatgccctcggccaccagccacagcgggagcggcagcaagtcgtccggaccgctcaccgccgtcgggtatctccgggagtgaggcggccgcgggagccggggccgccgcgccggcttctcagcaccccgcaaccggcaccggcgctgtccagaccgaggccatgaagcagattctcggggtgatcgacaagaaacttcggaacctggagaagaaaaagggtaagcttgatgattaccaggaacgaatgaacaaaggggaaaggcttaatcaagatcagctggatgccgtttctaagtaccaggaagtcacaaataatttggagtttgcaaaagaattacagaggagtttcatggcactaagtcaagatattcagaaaacaataaagaagacagcacgtcgggagcagcttatgagagaagaagctgaacagaaacgtttaaaaactgtacttgagctacagtatgttttggacaaattgggagatgatgaagtgcggactgacctgaaacaaggtttgaatggagtgccaatattgtccgaagaggagttgtcattgttggatgaattctataagctagtagaccctgaacgggacatgagcttgaggttgaatgaacagtatgaacatgcctccattcacctgtgggacctgctggaagggaaggaaaaacctgtatgtggaaccacctataaagttctaaaggaaattgttgagcgtgtttttcagtcaaactactttgacagcacccacaaccaccagaatgggctgtgtgaggaagaagaggcagcctcagcacctgcagttgaagaccaggtacctgaagctgaacctgagccagcagaagagtacactgagcaaagtgaagttgaatcaacagagtatgtaaatagacagttcatggcagaaacacagttcaccagtggtgaaaaggagcaggtagatgagtggacagttgaaacggttgaggtggtaaattcactccagcagcaacctcaggctgcatccccttcagtaccagagccccactctttgactccagtggctcaggcagatccccttgtgagaagacagcgagtacaagaccttatggcacaaatgcagggtccctataatttcatacaggattcaatgctggattttgaaaatcagacacttgatcctgccattgtatctgcacagcctatgaatccaacacaaaacatggacatgccccagctggtttgccctccagttcattctgaatctagacttgctcagcctaatcaagttcctgtacaaccagaagcgacacaggttcctttggtatcatccacaagtgaggggtacacagcatctcaacccttgtaccagccttctcatgctacagagcaacgaccacagaaggaaccaattgatcagattcaggcaacaatctctttaaatacagaccagactacagcatcatcatcccttcctgctgcgtctcagcctcaagtatttcaggctgggacaagcaaacctttacatagcagtggaatcaatgtaaatgcagctccattccaatccatgcaaacggtgttcaatatgaatgccccagttcctcctgttaatgaaccagaaactttaaaacagcaaaatcagtaccaggccagttataaccagagcttttctagtcagcctcaccaagtagaacaaacagagcttcagcaagaacagcttcaaacagtggttggcacttaccatggttccccagaccagtcccatcaagtgactggtaaccaccagcagcctcctcagcagaacactggatttccacgtagcaatcagccctattacaatagtcgtggtgtgtctcgtggaggctcccgtggtgctagaggcttgatgaatggataccggggccctgccaatggattcagaggaggatatgatggttaccgcccttcattctctaacactccaaacagtggttatacacagtctcagttcagtgctccccgggattactctggctatcaacgggatggatatcagcagaatttcaagcgaggctctgggcagagtggaccacggggagccccacgaggtcgtggagggcccccaagacccaacagagggatgccgcaaatgaacactcagcaagtgaattaatctgattcacaggattatgtttaatcgccaaaaacacactggccagtgtaccataatatgttaccagaagagttattatctatttgttctccctttcaggaaacttattgtaaagggactgttttcatcccataaagacaggactacaattgtcagctttctattacctggatatggaaggaaactatttttactctgcatgttctgtcctaagcgtcatcttgagccttgcacatgatactcagattcctcacccttgcttaggagtaaaacaatatactttacagggtgataataatctccatagttatttgaagtggcttgaaaaaggcaagattgacttttatgacattggataaaatctacaaatcagccctcgagttattcaatgataactgacaaactaaattatttccctagaaaggaagatgaaaggagtggagtgtggtttggcagaacaactgcatttcacagcttttccagttaaattggagcactgaacgttcagatgcataccaaattatgcatgggtcctaatcacacatataaggctggctaccagctttgacacagcactgttcatctggccaaacaactgtggttaaaaacacatgtaaaatgctttttaacagctgatactgtataagacaaagccaagatgcaaaattaggctttgattggcactttttgaaaaatatgcaacaaatatgggatgtaatccggatggccgcttctgtacttaatgtgaaatatttagatacctttttgaacacttaacagtttctttgagacaatgacttttgtaaggattggtactatctatcattccttatgacatgtacattgtctgtcactaatccttggattttgctgtattgtcacctaaattggtacaggtactgatgaaaatctctagtggataatcataacactctcggtcacatgtttttccttcagcttgaaagcttttttttaaaaggaaaagataccaaatgcctgctgctaccacccttttcaattgctatcttttgaaaggcaccagtatgtgttttagattgatttccctgtttcagggaaatcacggacagtagtttcagttctgatggtataagcaaaacaaataaaacgtttataaaagttgtatcttgaaacactggtgttcaacagctagcagcttatgtgattcaccccatgccacgttagtgtcacaaattttatggtttatctccagcaacatttctctagtacttgcacttattatcttttgtctaatttaaccttaactgaattctccgtttctcctggaggcatttatattcagtgataattccttcccttagatgcatagggagagtctctaaatttgatggaaatggacacttgagtagtgacttagccttatgtactctgttggaatttgtgctagcagtttgagcactagttctgtgtgcctatgaagttaatgctgcttattgtctcattctgacttcatggagaattaatcccacctttaagcaaaggctactaagttaatggtattttctgtgcagaaattaaattttattttcagcatttagcccaggaattcttccagtaggtgctcagctatttaaaaacaaaactattctcaaacattcatcattagacaactggagtttttgctggttttgtaacctaccaaaatggataggctgttgaacattccacattcaaaagttttgtagggtggtgggaaatgggggatcttcaatgtttattttaaaataaaataaaataagttcttgacttttctcatgtgtggttgtggtacatcatattggaagggttaaccctgttactttggcaaatgagtatttttttgctagcacctccccttgcgtgctttaaatgacatcctgcctgggatgtaccacaaccataatgttacctgtatcttaaggggaatggataaaatatttgtggtttactgggtaatccctagatgatgtatgcttgcagtcctatataaaactaaatttgctatctgtgtagaaaataatttcatgacatttacaatcaggactgaagtaagttcttcacacagtgacctctgaatcagtttcagagaagggatgggggagaaaatgccttctaggttttgaacttctatgcattagtgcagatgttgtgaatgtgtaaaggtgttcatagtttgactgtttctatgtatgttttttcaaagaattgttcctttttttgaactataatttttcttttattggttatttta

SEQ ID NO: 76168 - DNA, 406 bp, Homo sapiens; identical to SEQ ID NO: 58697

SEQ ID NO: 76169 - DNA, 5185 bp, Homo sapiens
ggtcgggaggacgagcaccgagtcgagggctcgctcgtctgggccgcccgagagtcttaatcgcgggcgcttgggccgccatcttagatggcgggagtaagaggaaaacgattgtgaggcgggaacggctttctgctgccttttttgggccccgaaaagggtcagctggccgggctttggggcgcgtgccctgaggcgcggagcgcgtttgctacgatgcgggggctgctcggggctccgtcccctgggctggggacgcgccgaatgtgaccgcctcccgctccctcacccgccgcggggaggaggagcgggcgagaagctgccgccgaacgacaggacgttggggcggcctggctccctcaggtttaagaattgtttaagctgcatcaatggagcacatacagggagcttggaagacgatcagcaatggttttggattcaaagatgccgtgtttgatggctccagctgcatctctcctacaatagttcagcagtttggctatcagcgccgggcatcagatgatggcaaactcacagatccttctaagacaagcaacactatccgtgttttcttgccgaacaagcaaagaacagtggtcaatgtgcgaaatggaatgagcttgcatgactgccttatgaaagcactcaaggtgaggggcctgcaaccagagtgctgtgcagtgttcagacttctccacgaacacaaaggtaaaaaagcacgcttagattggaatactgatgctgcgtctttgattggagaagaacttcaagtagatttcctggatcatgttcccctcacaacacacaactttgctcggaagacgttcctgaagcttgccttctgtgacatctgtcagaaattcctgctcaatggatttcgatgtcagacttgtggctacaaatttcatgagcactgtagcaccaaagtacctactatgtgtgtggactggagtaacatcagacaactcttattgtttccaaattccactattggtgatagtggagtcccagcactaccttctttgactatgcgtcgtatgcgagagtctgtttccaggatgcctgttagttctcagcacagatattctacacctcacgccttcacctttaacacctccagtccctcatctgaaggttccctctcccagaggcagaggtcgacatccacacctaatgtccacatggtcagcaccaccctgcctgtggacagcaggatgattgaggatgcaattcgaagtcacagcgaatcagcctcaccttcagccctgtccagtagccccaacaatctgagcccaacaggctggtcacagccgaaaacccccgtgccagcacaaagagagcgggcaccagtatctgggacccaggagaaaaacaaaattaggcctcgtggacagagagattcaagctattattgggaaatagaagccagtgaagtgatgctgtccactcggattgggtcaggctcttttggaactgtttataagggtaaatggcacggagatgttgcagtaaagatcctaaaggttgtcgacccaaccccagagcaattccaggccttcaggaatgaggtggctgttctgcgcaaaacacggcatgtgaacattctgcttttcatggggtacatgacaaaggacaacctggcaattgtgacccagtggtgcgagggcagcagcctctacaaacacctgcatgtccaggagaccaagtttcagatgttccagctaattgacattgcccggcagacggctcagggaatggactatttgcatgcaaagaacatcatccatagagacatgaaatccaacaatatatttctccatgaaggcttaacagtgaaaattggagattttggtttggcaacagtaaagtcacgctggagtggttctcagcaggttgaacaacctactggctctgtcctctggatggccccagaggtgatccgaatgcaggataacaacccattcagtttccagtcggatgtctactcctatggcatcgtattgtatgaactgatgacgggggagcttccttattctcacatcaacaaccgagatcagatcatcttcatggtgggccgaggatatgcctccccagatcttagtaagctatataagaactgccccaaagcaatgaagaggctggtagctgactgtgtgaagaaagtaaaggaagagaggcctctttttccccagatcctgtcttccattgagctgctccaacactctctaccgaagatcaaccggagcgcttccgagccatccttgcatcgggcagcccacactgaggatatcaatgcttgcacgctgaccacgtccccgaggctgcctgtcttctagttgactttgcacctgtcttcaggctgccaggggaggaggagaagccagcaggcaccacttttctgctccctttctccagaggcagaacacatgttttcagagaagctgctgctaaggaccttctagactgctcacagggccttaacttcatgttgccttcttttctatccctttgggccctgggagaaggaagccatttgcagtgctggtgtgtcctgctccctccccacattccccatgctcaaggcccagccttctgtagatgcgcaagtggatgttgatggtagtacaaaaagcaggggcccagccccagctgttggctacatgagtatttagaggaagtaaggtagcaggcagtccagccctgatgtggagacacatgggattttggaaatcagcttctggaggaatgcatgtcacaggcgggactttcttcagagagtggtgcagcgccagacattttgcacataaggcaccaaacagcccaggactgccgagactctggccgcccgaaggagcctgctttggtactatggaacttttcttaggggacacgtcctcctttcacagcttctaaggtgtccagtgcattgggatggttttccaggcaaggcactcggccaatccgcatctcagccctctcagggagcagtcttccatcatgctgaattttgtcttccaggagctgcccctatggggcggggccgcagggccagcctttgtgccagccttgtttctctaacaaacaagggccagccttgtttctctaacaaacaaacaaacaaacagccttgtttctctagtcacatcatgtgtatacaaggaagccaggaatacaggttttcttgatgatttgggttttaattttgtttttattgcacctgacaaaatacagttatctgatggtccctcaattatgttattttaataaaataaattaaatttaggtgtaatggctggctgttacctccttttaaagtaattctgagctcacaacttgaatgccccatttgttcaccctcttcaggagcagaattcaagaacaggaaatgtgcccagagcctaggctgggaatgaatttgtaatttaacctttgtactctttgtaaacctctactgaagagttaagtataaaaattaattaagcagaaagtactctaaactcagctaataccttaagtaatacattttataaactatttatttatttggtaggtacagcttttttaaacacaaaaatagattagataaattccagcttggaacaagctagtgctggttcacaaggttatgctcacccttcaattaaaatcaaaatgactacaagacttgccatcagctctcttcaggaccactgctgggtcagaatcagaaaccttgggtgccatgaaatttttacaaaatttcaaatcaaagccaggctttgcagctagataatagatcacttgagtacgaaccacacatgtaagtgcacgtatatttgagttctcaatacaattaccctgatgggcaagaacccacaggtgagagcagaggcttggttcccctagagggccctggctggaggccccaacaccaaccagacgacaggagggccagactgctacccagtactgtacctcctgctccttcaagagcctccctaagggagaagaagatctatacttccactttgtttgctgcacatgtggcaacaagattgctaccctgatttgggacacttgagagaacttgaaaaaaatgaccacccttaaagccctagaaaaaagttgtatgtttgttaacagctatgctgcgctcactttgcattgtgtgttcttgaaagctctgtataaatcaaaattttgacgacacactaaatacactagagaaatacactatagaggaatccttttatagggctgaagactcctttggtaagaaaaatatgctgcattaggggcagctgcaagtttactatttctggggaagaaaagatcaaagataagagccaggtttgttttttaaagcaatcaatccaaacagtttgggtgtttgttagttgttacccctgaggggcttgaggtgtaactatatcagctataaaaatagcaattccatacatttaattaggttactttatatctttcactcttccccatggctgtaataatggagattgaatgagactaaggctaagcgcaactccactcaaatccaagtcacacgtcaccttgggctgcagtacagggaagctccgcacaccctggcttgggaaagtttcggccgatggagcccaagatgcagggcaaccatctaactctttagggttctgatgaattcccactccagaaaggtgcatgaaagaggtccccgagctctgtcatgtcgacatcttcattgttggggacatgccggctttctcggttctcgatgaaatcccagagccgcacttgaattaaagaacctcacagtggccttgagaacttgagctgtttccgaggtttctcaggctctgctaagccgcccatcggggtaagcatggcgataaagacatttgcttccaaatgggcaggtccccttgccttgctcaaagtatttacaggcttttttccccatcccctggtttgaaagcttcaatcaactcgttctttttattctgatcttccacccaatacacacttggaattacaaactctgatatcacacggcattctggacaagacttaatgattgggttttcaaactgtttggcacaccgccactgccggatgcaggacaaacagtacgtgtgattgcaattggagagaatcccaaatctcctctcagaagcagaggccttctccaggatcacttccatgcagatactgc

SEQ ID NO: 76170 - DNA, 3002 bp, Homo sapiens; identical to SEQ ID NO: 58699

SEQ ID NO: 76171 - DNA, 1868 bp, Homo sapiens; identical to SEQ ID NO: 58700

SEQ ID NO: 76172 - DNA, 1945 bp, Homo sapiens; identical to SEQ ID NO: 58701

SEQ ID NO: 76173 - DNA, 2000 bp, Homo sapiens; identical to SEQ ID NO: 58702

SEQ ID NO: 76174 - DNA, 1737 bp, Homo sapiens; identical to SEQ ID NO: 58703

SEQ ID NO: 76175 - DNA, 1354 bp, Homo sapiens; identical to SEQ ID NO: 58704

SEQ ID NO: 76176 - DNA, 814 bp, Homo sapiens
ttttttttttttcctttaaaaattttaatggacaggaaatggtatagaataactgccaagtcacataagttaacttttttgttaatgtttgtgatcccggaaagaacacactatcagtcgatgcaaaccgcatgggcgttttcatcagtcgttgtctgagcacatgaccgagtgtgggccacggacccatctttacttggtccagaaataaaagcggctgccatgtgtggcaggctgcagatctccctcgatctcagggctgggatccggtcttggtcttgagtgatagggattctccggtaaaggtcgatctgttttcactttggtgacctttgacagttctcccaggtcaggccgcacccagcccagtttgtccagcacacactcgtcaaactttgcctgctgtttgcgacagtgacgaaataactgctggccagtataatcaatgcaagtccaatattctgtaaaaggctctgcacagtgacgttttatctgcctaaagaagtccaaagcacacttgttgaccagtttgccttcctctaaacaccgcctcggatctttctcttcccagcggcagagcataaactccttgttgggcttatcacattgagctccatagtgatgggccgcagctttaagcacagcagaactaattttcacctcatctactttcagctcctctagagtgggcagctccactatccccggcatgacggctgcagccccgaccccgacgagaagccctcagccgcgtcgcccccgtctccttgaactcccctttcgaccgccgagtgccacacggcgcctgcgcatg

SEQ ID NO: 76177 - DNA, 956 bp, Homo sapiens
ccgccccggcccgagagggtgctcggcgccacagcccggaggcccggcccgcgcaggaggcgctcctccttcccaccggtgtctttcaggttgcagaaaagatggaaaaaaggacatgtgcactctgccccaaagatgtcgaatataatgtcctgtactttgcacaatcagagaatatagctgctcatgagaattgtttgctgtattcttcaggacttgtggaatgtgaggatcaggatccacttaatcctgatagaagttttgatgtggaatcagtaaagaaagaaatccagagaggaaggaagttgaaatgcaaattttgtcataaaagaggagccaccgtgggatgtgatttaaaaaactgtaacaagaattaccactttttctgtgccaagaaggacgacgcagttccacagtctgatggagttcgaggaatttataaactgctttgccagcaacatgctcaattcccgatcatcgctcaaagtgctaaattttcaggagtgaaaagaaaaagaggaaggaagaaacccctctcaggcaatcatgtacagccacccgaaacaatgaaatgtaatacattcataagacaagtgaaagaagagcatggcagacacacaggtttgcgctaagtgttgtctgtaacaaatatggcctacaatacttataaaaatgtcaacccacctgtttcaaacttggtatcccgcctaaatctttattcttctaggcttgtggtaattaatgagtataaatctttatcgcaactgtccactctattgtaatcccagcatatcaagataacttaggttggaatggtccattgcattcagtattaagaaaagatagacttctattaataaagacacagacaggcttgcctgagctcagaatccagcaatgtgtcacccctcacactgtgacccctgtaactgtagttctctgttctttaaagaaat

SEQ ID NO: 76178 - DNA, 829 bp, Homo sapiens; identical to SEQ ID NO: 58707

SEQ ID NO: 76179 - DNA, 1977 bp, Homo sapiens; identical to SEQ ID NO: 58708

SEQ ID NO: 76180 - DNA, 1778 bp, Homo sapiens; identical to SEQ ID NO: 58709

SEQ ID NO: 76181 - DNA, 1085 bp, Homo sapiens; identical to SEQ ID NO: 58710

SEQ ID NO: 76182 - DNA, 1965 bp, Homo sapiens; identical to SEQ ID NO: 58711

SEQ ID NO: 76183 - DNA, 2744 bp, Homo sapiens
agatagtaaataatctcggaaaggcgagaaagaagctgtctccatcttgtctgtatccgctgctcttgtgacgttgtggagatggggagcgtcctggggctgtgctccatggcgagctggataccatgtttgtgtggaagtgccccgtgtttgctatgccgatgctgtcctagtggaaacaactccactgtaactagattgatctatgcacttttcttgcttgttggagtatgtgtagcttgtgtaatgttgataccaggaatggaagaacaactgaataagattcctggattttgtgagaatgagaaaggtgttgtcccttgtaacattttggttggctataaagctgtatatcgtttgtgctttggtttggctatgttctatcttcttctctctttactaatgatcaaagtgaagagtagcagtgatcctagagctgcagtgcacaatggattttggttctttaaatttgctgcagcaattgcaattattattggggcattcttcattccagaaggaacttttacaactgtgtggttttatgtaggcatggcaggtgccttttgtttcatcctcatacaactagtcttacttattgattttgcacattcatggaatgaatcgtgggttgaaaaaatggaagaagggaactcgagatgttggtatgcagccttgttatcagctacagctctgaattatctgctgtctttagttgctatcgtcctgttctttgtctactacactcatccagccagttgttcagaaaacaaggcgttcatcagtgtcaacatgctcctctgcgttggtgcttctgtaatgtctatactgccaaaaatccaagaatcacaaccaagatctggtttgttacagtcttcagtaattacagtctacacaatgtatttgacatggtcagctatgaccaatgaaccagaaacaaattgcaacccaagtctactaagcataattggctacaatacaacaagcactgtcccaaaggaagggcagtcagtccagtggtggcatgctcaaggaattataggactaattctctttttgttgtgtgtattttattccagcatccgtacttcaaacaatagtcaggttaataaactgactctaacaagtgatgaatctacattaatagaagatggtggagctagaagtgatggatcactggaggatggggacgatgttcaccgagctgtagataatgaaagggatggtgtcacttacagttattccttctttcacttcatgcttttcctggcttcactttatatcatgatgacccttaccaactggtacaggtatgaaccctctcgtgagatgaaaagtcagtggacagctgtctgggtgaaaatctcttccagttggattggcatcgtgctgtatgtttggacactcgtggcaccacttgttcttacaaatcgtgattttgactgagtgagacttctagcatgaaagtcccactttgattattgcttatttgaaaacagtattcccaacttttgtaaagttgtgtatgtttttgcttcccatgtaacttctccagtgttctggcatgaattagattttactgcttgtcattttgttattttcttaccaagtgcattgatatgtgaagtagaatgaattgcagaggaaagttttatgaatatggtgatgagttagtaaaagtggccactattgggcttattctctgctctatagttgtgaaatgaagagtgaaaacaaatttgtttgactattttaaaattatattagaccttaagctgttttagcaagcattaaagcaaatgtatggctgccttttgaaatatttgatgtgttgcctggcaggatactgcaaagaacatggtttattttaaaatttataaacaagtcacttaaatgccagttgtctgaaaaatcttataaggttttacccttgatacggaatttacacaggtagggagtgtttagtggacaatagtgtaggttatggatggaggtgtcggtactaaattgaataacgagtaaataatcttacttgggtagagatggcctttgccaacaaagtgaactgttttggttgttttaaactcatgaagtatgggttcagtggaaatgtttggaactctgaaggatttagacaaggttttgaaaaggataatcatgggttagaaggaagtgtttgaaagtcactttgaaagttagttttgggccagcacggtagctcacccttgtaatcccagcactttgggaggctgaggtgggtagattacttgagcccaggaattcaagaccagcctgggcaacatggtgaaaccctgtttctataaaaaataatctgggctttgtagcatatgcctgtggtcccagctactgaggaggctgaggtgggaggattgcttgagcccaggaggcagaggttgcagtgagccaaggtcacgtcactgcactctagcctgggcaacagagtaagacaaaaaaatatatatatattgaaaatcaaaggaggcaaaattttgacagggaaggaagtaactgcaaaacactaggctttagttaggtacttatataaaatctagtccagttctctcatttaaaaaaatgaagacactgaagtacagacttaaatagctcagatagctaattaggaaatttcaagttggccaataatagcattctctctgacatttaaaaataatttctattcagaatacatgcataattgattttacacctcattactggtggataat

SEQ ID NO: 76184 - DNA, 840 bp, Homo sapiens; identical to SEQ ID NO: 58713

SEQ ID NO: 76185 - DNA, 3041 bp, Homo sapiens; identical to SEQ ID NO: 58714

SEQ ID NO: 76186 - DNA, 1467 bp, Homo sapiens
ttttttttttttaaagagatagttttatgggtaacagtatgggacagactgggaaggttgccagggcctgtagtgatgagcttcccaggaatagaccaacacacaggcaggagtggcccagacagacaagtagatagacagacagacagagggacaagaaaacaaccaagtgggtaagaggcccaggccaggctcagcagctgtgtccaggcatcagctccagctctgctctggggaactggtggaggagaagggctggccggggcctcagtccttacagggctccttctcctcatgccctactatccctcatccagcctgctgggatccttggcaggtggaattcccagggctatggatggctgggctgagtgagcagaggatcgaggctcttggagactccctggggaggtggaggcctgggtggtgtggggttagcagcagcactggggggaatctggtcaagttccaggatggggccactgctcagcagggcccctgtgtccagggcaggccctccacctgcccaccacaccaacatggtgcaataaataaagtttcaagtagtaagtcagtgtcaagcaggagagctgcaggctggcagacaggcagggactgagaaagagaagcctccagccacccaccatatctgctcagtgggctcaagcggtcgcaagtctgtcttgtgcactggagtgggtgtctggccctgatgtcccatgagcactccccgcaggggctcagcccctcacaccagcgccagagcctgctcggtggggcagaagcagggcaacatggtgcccacagcgtccacgatggctgccaggtgctcgtcctgcgcctgaggcccacagagctgcatgacgtcccgcacacgcagcaagtattcaaggttgtggccggagaagccccggcaggccaggatctgcgtggcaatggcctcttcaggcgcagggcccaggtaaccagggttctgtggggtggccacataggccaatgccttcagtggttggtcaggagcatcttggggatagaaggtgacctccttggtatcgtagccaccaagcactgcctctcgcacattcaggtacttcagggccttgcttacctgctccccttgcacttggtatgccacgccccaagtgcagccctcatgatcttcaaggagcgtcaccacacggccaggcatcttgtcgctgccccgatggaaggtgtctccctgccagaaacggcggctgtagccgcgcacgaagcccacacggctgtcgctgtaggcgaagtcgggcctccacaccagggagccgtacccgaaaatccacagcgcttgagggtcgcggacgcgggctcgaccgggaatccggacggttccaaagggtatcgatgggctccgaccgttagccttacagagcctatcgatagataccgcgacctcctcatcgctcaagtaccgtgccattacgtagagac

SEQ ID NO: 76187 - DNA, 3252 bp, Homo sapiens
ggcacgagagtaacgccattaccgccggagccgccgagagccttagccgacggaaactggacactggaccggcagcgccatgagactcctcccccgcttgctgctgcttctcttactcgtgttccctgccactgtcttgttccgaggcggccccagaggctcgttagcagtggcacaagatcttacagaggatgaagaaacagtagaagattccataattgaggatgaagatgatgaagccgaggtagaagaagatgaacccacagatttggtagaagataaagaggaagaagatgtgtctggtgaacctgaagcttcaccgagtgcagatacaactatactgtttgtaaaaggagaagattttccagcaaataacattgtgaagttcctggtaggctttaccaacaagggtacagaagattttattgttgaatccttagatgcctcattccgttatcctcaggactaccagttttatatccagaatttcacagctcttcctctgaacactgtagtgccaccccagagacaggcaacttttgagtactctttcattcctgcagagcccatgggcggacgaccatttggtttggtcatcaatctgaactacaaagatttgaacggcaatgtattccaagatgcagtcttcaatcaaacagttacagttattgaaagagaggatgggttagatggagaaacaatctttatgtatatgttccttgctggtcttgggcttctggttattgttggccttcatcaactcctagaatctagaaagcgtaagagacccatacagaaagtagaaatgggtacatcaagtcagaatgatgttgacatgagttggattcctcaggaaacattgaatcaaatcaataaagcttcaccaagaaggttgcccaggaaacgggcacagaagagatcagtgggatctgatgagtaaatgttcctttgtgcaacaattcggtctttacttaacctgccctaatatttttcggcctgatgggaattagtgcagagaagccatgtcaccatagaaggcaactcctacttgtgtgtggactgagcaatcagagtctgtggcgataatattgctgaaaatgcactgcattcatttttctaaagtaacaaatttggtttttttttaaaccattaaaatctatgtgtgtgcgtgtgtatgtatgtgagcagttggtcttaccagaatcattgttgaactacctgaaacaagtctttagaatactaaatataatgctgttgtctcttcctttttgacattttctgatttttttcccccaaaactcagttaatatttacccactatgattattgatgtcctgccttgaacagttttaaagaaaacaatttttggaatagctcaaatttcaattgatggcacaaatcagcattttgttgttgttactgtattacaattagtattctaaaggcagaagcagaagtagctgctttttagcaatagaattgtttcagtattttgctgctgtttaatgcgcatcttcagaaaacttcccagtggcttcaaggaatttggggatctctctggcaacaaattgtgaaacatgaaatttctgctgactttaatatatgaaacctaatcctacccccttttttaacaaaaagaaactagtacatttgtgaaaattgtgttgtgttgtccattgttgctctagttctgacccagaggtagctctggagtgattttagacctactcactcagttgtgtgtaggtttttttgttttgttttgagagagaatttttctctccttaatagaagcatcctttttaaagagaagttgccttggtccacacactaagcagaaaaccaagttatcaggacagagatatttcccagttactcctaatcaatgaagaaagtgagttggatatttttaaagcagttaactaattttttcttacctaatcttttgggagttttgcttgttgatataacctttttagttaacctgaaagattccaaaaattgttcttaagtgcttgagactggaaccaaaattaaattgtacttcataaaatcctcttatagagttactcttgccctagattgtaaattaagtttggcattattgtcagactggatggagggtgaagtaaaatagtatgaacaattaagaggctctccccctcttgtctttaagccatattctcctacatgtattttataagaaaatgttaagtcaaattttagtggctctttaattcctgacctcttcattctccttttcagtataacctcccctatgctcatgcccacacagacaaaaaaacaaaacgaaatacacacagaaaaaagtctttccaaactgtttaagtatttaaacatctgagccaaagcagatagaagttattgtataattgttaatcactttgcaaataggggctatcaaattacctatattggcattgctggattataaactctatatctgtaatataaagtgtttgagtttttaattgggctgttatgatcagtagttgattttgagaaagctctatgagctctaagtaactgcatggttttttgtttaatgtaatataggagacccttcacattcccaaggaatatattccaaaacatttttgtgaatatctaagtttgtgaaactactagggcatgatacagtaaggtgtaattacagaatttacgaaatgtaaatgacctctacagagttttatggaatacctggtactaacgtaggcagctgcaaaaccacactgagttacagctgtcagccctcctcattcctaaataacttgccttacatatcagccctcccacttctgaagttcaaattagtgcctcggaaatgtagaatttattatttgtcatttttttttttttagcatagattgagaacagttgaactcttaaatcctcagatgccaggggtctgctctagccatcagtaagtatttaggcagaaacctaaccccgtaatgaatggaattccatttccacacattggttggttcaagcacacttaataagtagccctattttttaaatgtctttttaaaatgtaaatatttggatgaagtttttctttgttttgatatattcatttgctacaccgaactatgttttcagaattcatcttttgaacaacttggtttcagaatatgtaaaatgactttaaggatcttgtgtatcaaacctatccccggatgtgtgagaataatgtgttcataaagcatggatttcccaaaaaaaaaa

SEQ ID NO: 76188 - DNA, 4514 bp, Homo sapiens; identical to SEQ ID NO: 58717

SEQ ID NO: 76189 - DNA, 533 bp, Homo sapiens; identical to SEQ ID NO: 58718

SEQ ID NO: 76190 - DNA, 1643 bp, Homo sapiens; identical to SEQ ID NO: 58719

SEQ ID NO: 76191 - DNA, 633 bp, Homo sapiens; identical to SEQ ID NO: 58720

SEQ ID NO: 76192 - DNA, 820 bp, Homo sapiens; identical to SEQ ID NO: 58721

SEQ ID NO: 76193 - DNA, 869 bp, Homo sapiens
cccacgcgtccgcccacgcgtccgccgcgctggtgaacaggacccgtcgccatgggccgtgtgatccgtggacagaggaagggcgccgggtctgtgttccgcgcgcacgtgaagcaccgtaaaggcgctgcgcgcctgcgcgccgtggatttcgctgagcggcacggctacatcaagggcatcgtcaaggacatcatccacgacccgggccgcggcgcgcccctcgccaaggtggtcttccgggatccgtatcggtttaagaagcggacggagctgttcattgccgccgagggcattcacacgggccagtttgtgtattgcggcaagaaggcccagctcaacattggcaatgtgctccctgtgggcaccatgcctgagggtacaatcgtgtgctgcctggaggagaagcctggagaccgtggcaagctggcccgggcatcagggaactatgccaccgttatctcccacaaccctgagaccaagaagacccgtgtgaagctgccctccggctccaagaaggttatctcctcagccaacagagctgtggttggtgtggtggctggaggtggccgaattgacaaacccatcttgaaggctggccgggcgtaccacaaatataaggcaaagaggaactgctggccacgagtacggggtgtggccatgaatcctgtggagcatccttttggaggtggcaaccaccagcacatcggcaagccctccaccatccgcagagatgcccctgctggccgcaaagtgggtctcattgctgcccgccggactggacgtctccggggaaccaagactgtgcaggagaaagagaactagtgctgagggcctcaataaagtttgtgtttatgccaaaaaaaaaa

SEQ ID NO: 76194 - DNA, 1021 bp, Homo sapiens; identical to SEQ ID NO: 58723

SEQ ID NO: 76195 - DNA, 950 bp, Homo sapiens; identical to SEQ ID NO: 58724

SEQ ID NO: 76196 - DNA, 725 bp, Homo sapiens; identical to SEQ ID NO: 58725

SEQ ID NO: 76197 - DNA, 1744 bp, Homo sapiens; identical to SEQ ID NO: 58726

SEQ ID NO: 76198 - DNA, 1758 bp, Homo sapiens; identical to SEQ ID NO: 58727

SEQ ID NO: 76199 - DNA, 3834 bp, Homo sapiens; identical to SEQ ID NO: 58728

SEQ ID NO: 76200 - DNA, 1826 bp, Homo sapiens; identical to SEQ ID NO: 58729

SEQ ID NO: 76201 - DNA, 1192 bp, Homo sapiens; identical to SEQ ID NO: 58730

SEQ ID NO: 76202 - DNA, 1779 bp, Homo sapiens; identical to SEQ ID NO: 58731
  misc_feature (1)...(1779): n = a,t,c or g

SEQ ID NO: 76203 - DNA, 1884 bp, Homo sapiens
ctgaagtgggagctacgtcccggaggtgcggtgtggggcaccgggcggggcgcgggaaccggcgccccacggagctgctgctgtcagaccaaccccgggcccccatcatcactgcgccgcgctttcaggcgccgagaactaccgttcccggcatgccatgaaattggcctcggcgctgaggcggggtccggccctccacccgctcccgccgcgcgcgaatcgcggtcgcgagccatggaggaggaggcatcgtccccggggctgggctgcagcaagccgcacctggagaagctgaccctgggcatcacgcgcatcctagaatcttccccaggtgtgactgaagtgaccatcatagaaaagcctcctgctgaacgtcatatgatttcttcctgggaacaaaagaataactgtgtgatgcctgaagatgtgaagaacttttacctgatgaccaatggcttccacatgacatggagtgtgaagctggatgagcacatcattccactgggaagcatggcaattaacagcatctcaaaactgactcagctcacccagtcttccatgtattcacttcctaatgcacccactctggcagacctggaggacgatacacatgaagccagtgatgatcagccagagaagcctcactttgactctcgcagtgtgatatttgagctggattcatgcaatggcagtgggaaagtttgccttgtctacaaaagtgggaaaccagcattagcagaagacactgagatctggttcctggacagagcgttatactggcattttctcacagacacctttactgcctattaccgcctgctcatcacccacctgggcctgccccagtggcaatatgccttcaccagctatggcattagcccacaggccaagcaaagagtcagcatgtataaacctatcacctacaacacaaacctgctcacagaagagaccgactcctttgtgaataagctagatcccagcaaagtgtttaagagcaagaacaagatcgtaatcccaaaaaagaaagggcctgtgcagcctgcaggtggccagaaagggccctcaggaccctccggtccctccacttcctccacttctaaatcctcctctggctctggaaaccccacccggaagtgagcacccctccctccaactccctaccagctccagagtggtggtttccatgcacagatggccctaggggtgacctccagttttgcgtgtggaccgtaggcctctttctagttgaatgaccaaaattgtaaggcttttagtcccaccgacattagccaggctcgtagtgaggcctccagagcaggttgtgctgtcccctgcctctagaagcaatggggaatttggaatcttgtgtaagtgcccaaataagtctgagtgctttcctcttcttcaacactcaaccctcaatcccttagcactgattgattagagaggtcccccaaagaaaccactggttttgacccatgaagcattagaactgcattgttcattcaggagccactagtcacatatgactatttaaatttaaagtaaattgtatgaaaaattcatttcttcaattgcattagccacattttgagtattcatgtggctggtagattctgtattagcacaaagatatggaacatttccatcaccacagaaagttctgttggacagcactgcattagaatattttcatactgctcttcctcaattaatttttgttgttaatgttgatgtcttcattggatgggtcataatgttccatgaaacctctcaagtacacaattgtatgttctttgtatcccttaccacaaatatctcgctctgctcatttcttttgcagcttcctataaagtttgtcttcctcatcaaaaaaaaaaaaag

SEQ ID NO: 76204 - DNA, 450 bp, Homo sapiens
cctcctttccctttcgggattcccgacgctgtggttgctgtaaggggtcctccctgcgccacacggccgtcgccatggtgaagctgagcaaagaggccaagcagagactacagcagctcttcaaggggagccagtttgccattcgctggggctttatccctcttgtgatttacctgggatttaagaggggtgcagatcccggaatgcctgaaccaactgttttgagcctactttggggataaaggattatttggtcttctggatttggaggcaatcagcggacagcatggaagatgtgtgctctggctcggataagagatgggacatcattcagtcactagttggatggcacaaggctcttcacagacgcatctgtagcagagtggaacttgtactaacttatgatagaatgtatcagaataaatgtttttaacagtgttaaaaaaaaaa

SEQ ID NO: 76205 - DNA, 2145 bp, Homo sapiens; identical to SEQ ID NO: 58734

SEQ ID NO: 76206 - DNA, 1716 bp, Homo sapiens; identical to SEQ ID NO: 58735

SEQ ID NO: 76207 - DNA, 2029 bp, Homo sapiens; identical to SEQ ID NO: 58736

SEQ ID NO: 76208 - DNA, 1601 bp, Homo sapiens; identical to SEQ ID NO: 58737

SEQ ID NO: 76209 - DNA, 3221 bp, Homo sapiens; identical to SEQ ID NO: 58738

SEQ ID NO: 76210 - DNA, 1902 bp, Homo sapiens; identical to SEQ ID NO: 58739

SEQ ID NO: 76211 - DNA, 541 bp, Homo sapiens; identical to SEQ ID NO: 58740

SEQ ID NO: 76212 - DNA, 2162 bp, Homo sapiens; identical to SEQ ID NO: 58741

SEQ ID NO: 76213 - DNA, 918 bp, Homo sapiens; identical to SEQ ID NO: 58742

SEQ ID NO: 76214 - DNA, 2592 bp, Homo sapiens
tttcgtcgcaggcgggcctcgcgggtccgggagcgcggcggagacgatgcctgagatcagagtcacgcccttgggggccggccaggacgtgggccgaagctgcatcctggtctccattgcgggcaagaatgtcatgctggactgtggaatgcacatgggcttcaatgacgaccgacgcttccctgacttctcctacatcacccagaacggccgcctaacagacttcctggactgtgtgatcattagccacttccacctggaccactgcggggcactcccctacttcagcgagatggtgggctacgacggccccatctacatgactcaccccacccaggccatctgccccatcttgctggaggactaccgcaagatcgccgtagacaagaagggcgaggccaacttcttcacctcccagatgatcaaagactgcatgaagaaggtggtggctgtccacctccaccagacggtccaggtagatgatgagctggagatcaaggcctactatgcaggccacgtgctgggggcagccatgttccagattaaagtgggctcagagtctgtggtctacacgggtgattataacatgaccccagaccgacacttaggagctgcctggattgacaagtgccgccccaacctgctcatcacagagtccacgtacgccacgaccatccgtgactccaagcgctgccgggagcgagacttcctgaagaaagtccacgagaccgtggagcgtggtgggaaggtgctgatacctgtgttcgcgctgggccgcgcccaggagctctgcatcctcctggagaccttctgggagcgcatgaacctgaaggtgcccatctacttctccacggggctgaccgagaaggccaaccactactacaagctgttcatcccctggaccaaccagaagatccgcaagactttcgtgcagaggaacatgtttgagttcaagcacatcaaggccttcgaccgggcttttgctgacaacccaggaccgatggttgtgtttgccacgccaggaatgctgcacgctgggcagtccctgcagatcttccggaaatgggccggaaacgaaaagaacatggtcatcatgcccggctactgcgtgcagggcaccgtcggccacaagatcctcagcgggcagcggaagctcgagatggaggggcggcaggtgctggaggtcaagatgcaggtggagtacatgtcattcagcgcacacgcggacgccaagggcatcatgcagctggtgggccaggcagagccggagagcgtgctgctggtgcatggcgaggccaagaagatggagttcctgaagcagaagatcgagcaggagctccgggtcaactgctacatgccggccaatggcgagacggtgacgctgcccacaagccccagcatccccgtaggcatctcgctggggctgctgaagcgggagatggcgcaggggctgctccctgaggccaagaagcctcggctcctgcacggcaccctgatcatgaaggacagcaacttccggctggtgtcctcagagcaagccctcaaagagctgggtctggctgagcaccagctgcgcttcacctgccgcgtgcacctgcatgacacacgcaaggagcaggagacggcattgcgcgtctacagccacctcaagagcgtcctgaaggaccactgtgtgcagcacctcccagacggctctgtgactgtggagtccgtcctcctccaggccgccgccccttctgaggacccaggcaccaaggtgctgctggtctcctggacctaccaggacgaggagctggggagcttcctcacatctctgctgaagaagggcctcccccaggcccccagctgaggccggcaactcacccagccgccacctctgccctctcccagctggacagaccctgggcctgcacttcaggactgtgggtgccctgggtgaacagaccctgcaggtcccatccctggggacagaggccttgtgtcacctgcctgcccaggcagctgtttgcagctgaagaaacaaactggtctccaggctgtcttgcctttattcctggttagggcaggtggtcctagacagcagtttccagtaaaagctgaacaaaagactacttggtactctcttcttggtgtacatggctgtgtcctgcactgtgccccatcccgcctgggacagagacgggcatccagggtgctgggacccgggcagggaggctactgtggagaccaggcagcagtgctgtgggccccaagcagctgtgactgccctggcttgaccagcacagggttgggcctggtgtggcctaactttggcttgagtgtccagggtcatccgtggctcccgaactgtggcccctgcagggtgcaggaggcagcaccgaggttcccgtacagcactgacttgaggaataagccgtgggctggggctacacgtgtctggtgcttgcccaggggatcttggctctccagaatcgtcttcacctgggcaggtgccaaagcccccagccccacggccaccagcacagccgtcatcctccgtacctgtctatacaggaaagactggctctcaaactccaggttcagaaccgcagc

SEQ ID NO: 76215 - DNA, 596 bp, Homo sapiens; identical to SEQ ID NO: 58744

SEQ ID NO: 76216 - DNA, 346 bp, Homo sapiens; identical to SEQ ID NO: 58745

SEQ ID NO: 76217 - DNA, 1393 bp, Homo sapiens; identical to SEQ ID NO: 58747

SEQ ID NO: 76218 - DNA, 2312 bp, Homo sapiens; identical to SEQ ID NO: 58748

SEQ ID NO: 76219 - DNA, 1464 bp, Homo sapiens; identical to SEQ ID NO: 58749

SEQ ID NO: 76220 - DNA, 3678 bp, Homo sapiens
cgtattgaactcgggttggaagaggcgagtccggtctcaaaatggaggtaaaaccgccgcccggtcgcccccagcccgactccggccgtcgccgtcgccgccggggggaggagggccatgatccaaaggaaccagagcagttgagaaaactgtttattggtggtctgagctttgaaactacagatgatagtttacgagaacattttgagaaatggggcacactcacagattgtgtggtaatgagagacccccaaacaaaacgttccaggggctttggttttgtgacttattcttgtgttgaagaggtggatgcagcaatgtgtgctcgaccacacaaggttgatgggcgtgtagtggaaccaaagagagctgtttctagagaggattctgtaaagcctggtgcccatctaacagtgaagaaaatttttgttggtggtattaaagaagatacagaagaatataatttgagagactactttgaaaagtatggcaagattgaaaccatagaagttatggaagacaggcagagtggaaaaaagagaggatttgcttttgtaacttttgatgatcatgatacagttgataaaattgttgttcagaaataccacactattaatgggcataattgtgaagtgaaaaaggccctttctaaacaagagatgcagtctgctggatcacagaggggtcgtggaggtggatctggcaattttatgggtcgcggagggaactttggaggtggtggaggtaattttggccgtggtggaaactttggtggaagaggaggctatggtggtggaggtggtggcagcagaggtagttatggaggaggtgatggtggatataatggatttggaggtgatggtggcaactatggcggtggtcctggttatagtagtagagggggctatggtggtggtggaccaggatatggaaaccaaggtggtggatatggtggaggtggaggatatgatggttacaatgaaggaggaaattttggcggtggtaactatggtggtggtgggaactataatgattttggaaattatagtggacaacagcaatcaaattatggacccatgaaagggggcagttttggtggaagaagctcgggcagtccctatggtggtggttatggatctggtggtggaagtggtggatatggtagcagaaggttctaaaaacagcagaaaagggctacagttcttagcaggagagagagcgaggagttgtcaggaaagctgcaggttactttgagacagtcgtcccaaatgcattagaggaactgtaaaaatctgccacagaaggaacgatgatccatagtcagaaaagttactgcagcttaaacaggaaacccttcttgttcaggactgtcatagccacagtttgcaaaaagtgcagctattgattaatgcaatgtagtgtcaattagatgtacattcctgaggtcttttatctgttgtagctttgtctttttctttttcttttcattacatcaggtatattgccctgtaaattgtggtagtggtaccaggaataaaaaattaaggaatttttaacttttcaatatttgtgtagttcagtttttctacattttagtacagaaactttaacaaaatgcagtttcgaaggtgtttccttgtgagttaacaagtaaagaagatcattgttaattactattttgtatgaattttgctaaagttaactgtaaagaaacacctgctgacttgcagtttaaggggaatctattctccccatttccaaaccatgatatgaatgggcgctgacatgtggagagaatagataatttgtgtgtttgcaatgtgtgttttagataaataggattgggtatttaaattagcatttgtgaatttaatagcattaagattaccttcaaatgaaaaaaaatctcaaaatttctatttggtttttgtgcattttcttttaaaatgtaatcatatgattttagtgtgttagacttgctgagtcctagctgtgtttagaacagaacatctctattctacatttaccttggtcaaatttgaactgctgccataggttttgggtgtaaagaatgtttactgccctccatttaaattctgaaaagggatggtggatgttttccctctcctacgttagaaaccattcttaaaaacttttgaaaatatagaaccattaagcctgctatatctgagcaaattaatgggtaccttttttttcttatttaaagcacaagaggcccataaatcttgagttactttaaattcttttttttgatacaagttttcagagcaagagaataaaaatcatgtgttattaaacccctaactggctggcatgctttcctgtttgtattctatacattttgctggatgaaaccaaggatagttcaggtataattgtccaaaataacctaactgcagcagaaatgtagcacagttgcttagtacaggcttctcacttcctacagacctgaattcaaatttggatagtctgagttcttaaattcccaaagaacacactgttatttcttgtgtatatttcaacataaatcatgttgttaccaatttgtttggaaggccctggttgagaagagttttagttaataaggtcatatatacatatattaatataaaccaatgtctactgttttgctccagctagtgcttacagtttcattcgagccctgagtatgtgccctgctgttactctctttggtagttgaacgttgaattcaagtcttttgttttaagaagtactaagcaaacaagcaataaaaaggggaatggggtgtgctagtgtttgaatatgctctcttgttgctctaattctgtgcctctgtgcattaatatttggatgcatgcaatgccagcatggaaattggtcttcacatatactgcagttttccagaaacattcacaaaccaataaatgtaacagacattccatttgttaatgggcatatatgtgaaaagcagtgtagaaaataggctaatattagaaaatggttaagtcctaaataacttcaagtgtggttatataatggacactgtcaatgttcataacttaaacctgggtacctggtcaaaataatgcttgggaaacattaaaattgagctaaattgtctcaagttcttttattcatataaataaagtttaaaggaatgggggagattaacatttcctgttttatgtttgtgaaattgtttgacacaaccttgacagtatcctttaatggcatgaggttaattgtactgttaaccaactttctatgttctggaactagtattatagtgaaaacatttacagtaagttgatgtttacaacctataagcaggtgaaatctgtgtatgtgacctgtttataagttgtattagcttagctcttgtgaacagtgtggaaaagtaagccatgaggagagcgatttaaccacctttaaaggacctaagatgtgctttttaagcacagtgtggatcacagaaactcactaagacaggacttcagcagccttttgtgtttggacaagtcagcataaataaagaatgacaaggcagcagcaagagcttcaactacagagaagtgaaggcataagatactatgatgatagtgagccactttccaaaagctagttaaaatctgcttattacaactgaaatatcgagaaagtctagcaggaaggagc

SEQ ID NO: 76221 - DNA, 1471 bp, Homo sapiens
tttacaagaaacactcattatttattcatgtggctgaaagagtatattaattatgtttagatttttggaaaaagtctgaacaaaaaaaggacctatacagtgctcaaactatatttttaaaaatactaattttatttttactccacatatggaaaaaaatggctgtactatcatgtttaccatacatactaacattggaaacagaataacgaattgtatttaaattttatgaagaacacacaaacattaaaacactgattggttacagaaagcagagtttgaggaaaaaacattagctataattttcattttcattaaagagcagcaccctctgagaataatcaaactgattagtaatattcatctatactgcaaaataatatgtacaaaggaaagttagtgattgtactgattttattacttttaccaagccattttatgttcctcactcaatgcaaagaaataaaacataatctgaagaaaaatatgtccttattattattcacaataaaaagttggctttattctgcaagcctgggcatattgtacaattggcagcacttaacggctcaagtggatcaatgtaccagtttgattctgatccactgaatagaatctctcatccatatctggtgaccagactaactccatgggagctgtgatagactgaaccatttctgtggtatccctagatctcactaaataagaaagaccctacaccagaaaatatagcaactgatctatctataaattacatctatatgctagctctttagtataagttggaaaaaggggccctttcttgagcacatggataaaagtattattgtagtctaaagattgctggattgatattgtgttgttataatgaagataaggtacacactgaaaccactgtcagattaagaaacttccacaacttgtctcagttcttcaaacaatggagcaagttccttttctaggctgacaattagtcctgtattggcactgctgctggctatgaaactcaccaccaaaggtaaacgattaaattgaaccacctggtaggtgttatagtaacagatgatacttttatttttggaaagtccaagtttgcttccttggtctgttgcaagggcaaaagtggataagaaaccaggtcgcaaagcatgctctggagcattgtcatttgccactttaataacaggtactccatctctatctgacacaacaatggcatggagcccttcaacacttggtaactttttatacaagaatcgctttaggtcatccgccatgatgaacccccttctctcgcaggatcaatctccacgcctggggtttctgggctgcctggttctctccgctgtcacttcagggacagctttaaagacaggttcctcctcaagccaccgtcacatgattcatgacctcgtctgcgctccaggaagcactttataagccgccgtcgccctacgatacgggatttccg

SEQ ID NO: 76222 - DNA, 839 bp, Homo sapiens; identical to SEQ ID NO: 58752

SEQ ID NO: 76223 - DNA, 1124 bp, Homo sapiens; identical to SEQ ID NO: 58753

SEQ ID NO: 76224 - DNA, 2152 bp, Homo sapiens
  misc_feature (1)...(2152): n = a,t,c or g
cgccgggcctggggaaggggcgggcgcggggacccgatgcgcgggagcggaggccgagatggcttcggcgggaggcgaagactgcgagagccccgcgccggaggccgaccgtccgcaccagcggcccttcctgataggggtgagcggcggcactgccagcgggaagtcgaccgtgtgtgagaagatcatggagttgctgggacagaacgaggtggaacagcggcagcggaaggtggtcatcctgagccaggacaggttctacaaggtcctgacggcagagcagaaggccaaggccttgaaaggacagtacaattttgaccatccagatgcctttgataatgatttgatgcacaggactctgaagaacatcgtggagggcaaaacggtggaggtgccgacctatgattttgtgacacactcaaggttaccagagaccacggtggtctaccctgcggacgtggttctgtttgagggcatcttggtgttctacagccaggagatccgggacatgttccacctgcgcctcttcgtggacaccgactccgacgtcaggctgtctcgaagagttctccgggacgtgcgccgagggagggacctggagcagattctgacgcagtacaccaccttcgtgaagccggccttcgaggagttctgcctgccgacaaagaagtatgccgatgtgatcatcccgcgaggagtggacaatatggttgccatcaacctgatcgtgcagcacatccaggacattctgaatggtgacatctgcaaatggcaccgaggagggtccaatgggcggagctacaagcggaccttttctgagccaggggaccaccctgggatgctgacctctggcaaacggtcacatttggagtccagcagcagaccccactgaggggctgccgagcctcagggcaggtctcccgcccggcatgtgtgttcagggactgagcctggggacgcccacccacacccactgcttcctctcggcgcaccccaggggagtgttagcagcgaggccttcctcactcaggagtggaaactcagatgtgtcactcagactcaacttgctgggacactgacaggcgttcctgaggttttcagccacttaggctcgttgcggtttaaagatccctctaggtcactgagaaatgccacagaatgtgcaggaagcctgggaggcttctgtgaggaatgtgaggcacattattggggaaattgaggagacagcctagacactggctggcctgatgttttgttgacagtgaacccacagtgggagagagttttttccagtctgatctggttcttacacactcacacacataactcaaaagttttgtgaacaagtactttccttttttacatgttacatgtcctcatgttttctgttttctgtttcataacacaaggctggttgtggcctacaaacctaatttcatgacccagtggtttgcagtccagcgtggcctacacggatatggggagccactgagggatgttttccccccttgcttgtgccttaaaggcagagaagcgaggcggatgccctggaagcacccagcatcacacccaggcttgtgcggggccaggctgggagcccatgcagtagggcagaaggcagcggaggccaggtctgtcccggctggagaacagcgttccacgcaagtcctgcctggggtcaggccctcactgaccctcaggggagcccccaaggtgctgtctgtcctaaaacaggctgttcccaccccagggtggctagtgggcccatatgcagggaatggtgcttcctggctgtggcactgcactgggntcaacccaggtccccagcagacatggcctgcccaaagtcagcaagcctcctttgtgcgtatgtggagctcacagcctcacatgtgaacacccgtgtctgggttgcctggggtgatcctccctcctgcgtggtggctgtctctggaaagcatcccttgccgctgccatgggcagccccagcccccgtccgtccaggctcacccacagtagtgatgcagacgtgacgtgggggaagggggctgagccctgtggctgggttctgacaactgtaacggttttgtcgagcttaggcccctttggagggagaatcaataaataacaaacaccaactacaaaaaaaaaa

SEQ ID NO: 76225 - DNA, 883 bp, Homo sapiens; identical to SEQ ID NO: 58755

SEQ ID NO: 76226 - DNA, 2356 bp, Homo sapiens
  misc_feature (1)...(2356): n = a,t,c or g
ttttttttttttcccaggtccagctttattacctaatacaagtccaacctctggaacatccaaattcgctgttccaaagtttaattaaaaacacaatttacaaatatttaatatcttctgaaaagcatttttaagttaagaatgaaaaagtatgtacataatatataatcaaataccaggcagcctcaacttccaccaggtccacactcagcaacatccgtctttttaggttcttcagtgtcttctgtcaaatccacaaagttgttttccatgacgggggaaggaatggaaatccccattgcttttcgaactccatacgtgcttacgatatcacctggagttacttgctgtgcaagttctttaagattattggtcacttgttcagcaagatgcatttctctgtatgagggacccaagagacagatcatgttcggagggggtctggtgctcaaacgttcattctgggcttcctggagttccctgagcaatctggtggtctcatcaagtttcttctggaatatttcagcttcttcagagtcaaaaacttcaactggaacgccaaaatttgttactgctttcagcgctatgagcctgtcttgagtactggagtccaaacgccctggtggctctacttctgtaatctgctccatttcttttgctgtgtcaagtgtcctagtatggccttcatcttcaggcaatgacatctccatctcttgtagggtcctggaatgccctccttttgttaaaacatccagtaaactatctgccatgacatacggataatcttggcacgtggccaaaaactcatggatgctgaaatcacttggaagatcagagtcttccccataggttgaatagattaaatcagaatcatccttgctgatatttgcaaatgtggagtcataatgcggtgcataagaactgtagggcccataattcaaatataacactggagtgactttgttccttttatcctctttgaacccctgcaaagtattcactccagactgaagtcttccagttgtcattcccagtctcacagggcagtagcctggctctcctacaatgggatccacaggatggagaagtcccaacgtcgttgttccatctggttttcttctttcaaattcgcactgactgttcacaagccgcctggtcagctttcctccagattccttcacgatgcggtcaagctgctcctgctctctctctaaattattgcttttaaacttatcttcaagcatatctttgtctttctttttattttctttgctgggactcttgaaggcgtgtgcttcggcatctccagagtcctctctctctctctgccagcagcctccgtcctccccactctgtgaggtgtctgttccatctttctgctttcgagttttctgcaagtcagccatgaagtctatgctctgcttcaggctctgaattctttcctggctaagaattttcattcctgagtgcaacagcttctttgcagctttataataaatggtctctggtttattgtaaatcatggcattagtacacattagtttgaagttatcctttagttcttctatggactgatagtcattgttcttgatcttttctttcatggtactaaaatccattgggtgtttaatgatcatggagtagccaggagcaataaaatcagtcacaggaaatgaaaagaaagcacttggatcttttctctgcaattgtctcatcagttgattcaaagcttcttgaaggggtgtctgttctacttcttcttgtttggctaaagagcttgtgagaggcttctcaggaggcaagtctaatctcacaggggcgtgacactggagatctttttctgcctcattctccacccggtctcgatctcgcttctttttatcctccttaactcttctccgttttctccccttttcttcccctggaatctgcttctctcctttctttctctttttccgctttctgtccttgtgtttgtcatgatcgtttttgtcttcgaagaggctggagtcgtgccccgagctgcccgtggagagttcggtgacttcgttccctcctactttgaggaccagcttcaagggcttctctacatactcctcgtagaggtgtttgtccgacttgtgcttcttgtgcttcttgcagaaaactcgaaagcagaaagatggaacagacacctcacagagtggggaggncggaggctgctggcagagagagagagaggactctggagatgccgaagtacacgccttcaagagtcccagcaaagaaaataaaaagaaagacaaagatatgcttgaagataagtttaaaagcaataatttagagagagagcaggagcagcttaaccgcatcgtga

SEQ ID NO: 76227 - DNA, 1944 bp, Homo sapiens; identical to SEQ ID NO: 58757

SEQ ID NO: 76228 - DNA, 1565 bp, Homo sapiens
ccgctgagtcggcagcctcgccggcagctcgctcggcccccgcttggcccggcccgcagggttctctccccttgccaccatgagcgagtcatttgactgtgcaaaatgcaacgagtccctgtatggacgcaagtacatccagacagacagcggcccctactgtgtgccctgctatgacaatacctttgccaacacctgtgctgagtgccagcagcttatcgggcatgactcgagggagctgttctatgaagaccgccatttccacgagggctgcttccgctgctgccgctgccagcgctcactagccgatgaacccttcacctgccaggacagtgagctgctctgcaatgactgctactgcagtgcgttttcctcgcagtgctccgcttgtggggagactgtcatgcctgggtcccggaagctggaatatggaggccagacatggcatgagcactgcttcctgtgcagtggctgtgaacagccactgggctcccgttcttttgtgcccgacaagggtgctcactactgcgtgccctgctatgagaacaagtttgctcctcgctgcgcccgctgcagcaagacgctgacacagggtggagtgacataccgtgatcagccgtggcatcgagaatgtctggtctgtaccggatgccagacgcccctggcagggcagcagttcacctcccgggatgaagatccctactgtgtggcctgttttggagaactctttgcacctaagtgcagcagctgcaagcgccccatcgtaggactcggtggaggcaagtatgtgtcctttgaagaccgacactggcaccacaactgcttctcctgcgcccgctgctctacctccctggtgggccagggcttcgtaccggatggagaccaagtgctctgccagggctgtagccaggcagggccctaagccagggctcctggacccaggctttcccataccacgggcccaggactgtggctccttttctaaaccacctctgggactcagctccccccgccaaaaaaaatgggtctccttctgggctccaggattgtctccccactccagcatccccaaactggtactccctgacccaggcccccaatcctgggctcttacagagcctccatgagtcaagccccctccccacacctggactccagaattcaccctctcccctgcagtctgggttcccagactgagtcctctccccaaatcagggctctagacccgagccctccaaacctggactctgggacttaggcccccttaaatctagacttctctttataggtttcaggtctcctatgggtgcctgggaagtccttgaaagtggactgttctcaggcttgacctgccccaccccatccccgcggttgaggctgtgggggcagcagatcaggagcccactgataaggggccctagggtacagggtgctgcccagcaggtcgccaccgagtgtcttctcattttatttcagctccattttgcccatagatgggcagaggggtgagattggctcatcccccttccagattctgcaataaagcggtgtgaggaaaaaaaaaa

SEQ ID NO: 76229 - DNA, 2219 bp, Homo sapiens
gagacggagtttccctcttgttgcccaggctggaaatggcgcgatctcggctcacagcaacctctgcctcccggatttaagcgattctcctgcttcagcctcccgagtagctgggattacaggcatgcaccaccatgcctggctaattttgtatttctagtagagatggggtttctccatgttggtcaggctggtcttgaactcccgacctcaggtgatccacctgccttggcctcccaaagtgctgggattacaggcgtgacgactgcacctgcagccgcctagtcctcttctccttctctttgatgattcagggcctcggcttccctcacgatattgcagaaagacacagctttcctcttcctctccaaaccacctcgaagcaggggcataattggaatatcatttggagaaagtgtcatggaagttctgcgtccacagcttataagaattgatggccggaattacaggaagaatccagtccaagaacagacctatcaacatgaagaagatgaagaggacttctatcaaggctccatggagtgtgctgatgagccctgtgatgcctacgaggtggagcagaccccacaaggattccggtctactttgagggcccccagcttgctctataagcatatagttggaaagagaggggacactaggaagaaaatagaaatggagaccaaaacttctattagcattcctaaacctggacaagacggggaaattgtaatcactggccagcatcgaaatggtgtaatttcagcccgaacacggattgatgttcttttggacacttttcgaagaaagcagcccttcactcacttccttgcctttttcctcaatgaagttgaggttcaggaaggattcctgagattccaggaggaagtactggcgaagtgctccatggatcatggggttgacagcagcattttccagaatcctaaaaagcttcatctaactattgggatgttggtgcttttgagtgaggaagagatccagcagacatgtgagatgctacagcagtgtaaagaggaattcattaagctacaagaattagttgatcgagtgctggaacgttttcaggcatctggactaatagtgaaagagtggaatagtgtgaaactgcatgctacagttatgaatacactattcaggaaagaccccaatgctgaaggcaggtacaatctctacacagcggaaggcaaatatatcttcaaggaaagagaatcatttgatggccgaaatattttaaagttgtttgagaacttctactttggctccctaaagctgaattcaattcacatctctcagaggttcaccgtagacagctttggaaactacgcttcctgtggacaaattgacttctcctgaggtggatcttggaaagcactagaaactaaacatcttcaccaggtgctgaagaaaagtgtcttcgttttaattgccaagcagggatgtggacatttggatggtgactttcctgggtggttccccatagattcaccattgcctctaatggtgtctacacccgtcatactaccagctgagatggtggtgggcataaggagaatttgtgcctataacccttagtgtgttctggttttttttcttttaatttttaaattgtcgtaaaatactcataaaacatactgtcttcaccatttttaagtgcacagttcagtaacgttaactgttaatacattcataatgctgtgtggccgtcaccggccgtccaatctccccataggcttctccagcctgtaaaaatgggaaaactgtacccccattaaaacagtaaatccccaactccctcccccagccccccgcagcccacccatcctgcctttcctgtcctcctctggttttgactattctcagtatctcatataagtggaatcatacagtgacttgtctttttgtgactggcttatttcacttagcataatgtcctcaaggttcatccatgttgtgtcaggtgacaggatttccttcctgtattatacatataatggaatgttccgttacatgtgcgtaccacactctgttcctccatcagtgaacacttggcttgcttcctcttgactattgggagtagtgctaatacagacacgggggtgcaaatatctctttgagactctgcctttaattcctttaccacccagagttttatctttagcaaaataaccattaaagttgtttgccttttaaaaaaaaaa

SEQ ID NO: 76230 - DNA, 5359 bp, Homo sapiens
cccacgcgtccgcttctgcacagggtatcgcctctctccgtttggtacatcccctcctcccccacgcccggactggggtggtagacgccgcctccgctcatcgcccctccccatcggtttccgcgcgaaaagccggggcgcctgcgctgccgccgccgcgtctgctgaagcctccgagatgccggcgcgtaccgccccagcccgggtgcccacactggccgtcccggccatctcgctgcccgacgatgtccgcaggcggctcaaagatttggaaagagacagcttaacagaaaaggaatgtgtgaaggagaaattgaatctcttgcacgaatttctgcaaacagaaataaagaatcagttatgtgacttggaaaccaaattacgtaaagaagaattatccgaggagggctacctggctaaagtcaaatcccttttaaataaagatttgtccttggagaacggtgctcatgcttacaaccgggaagtgaatggacgtctagaaaacgggaaccaagcaagaagtgaagcccgtagagtgggaatggcagatgccaacagcccccccaaacccctttccaaacctcgcacgcccaggaggagcaagtccgatggagaggctaagcctgaaccttcacctagccccaggattacaaggaaaagcaccaggcaaaccaccatcacatctcattttgcaaagggccctgccaaacggaaacctcaggaagagtctgaaagagccaaatcggatgagtccatcaaggaagaagacaaagaccaggatgagaagagacgtagagttacatccagagaacgagttgctagaccgcttcctgcagaagaacctgaaagagcaaaatcaggaacgcgcactgaaaaggaagaagaaagagatgaaaaagaagaaaagagactccgaagtcaaaccaaagaaccaacacccaaacagaaactgaaggaggagccggacagagaagccagggcaggcgtgcaggctgacgaggacgaagatggagacgagaaagatgagaagaagcacagaagtcaacccaaagatctagctgccaaacggaggcccgaagaaaaagaacctgaaaaagtaaatccacagatttctgatgaaaaagacgaggatgaaaaggaggagaagagacgcaaaacgacccccaaagaaccaacggagaaaaaaatggctcgcgccaaaacagtcatgaactccaagacccaccctcccaagtgcattcagtgcgggcagtacctggacgaccctgacctcaaatatgggcagcacccaccagacgcggtggatgagccacagatgctgacaaatgagaagctgtccatctttgatgccaacgagtctggctttgagagttatgaggcgcttccccagcacaaactgacctgcttcagtgtgtactgtaagcacggtcacctgtgtcccatcgacaccggcctcatcgagaagaatatcgaactcttcttttctggttcagcaaaaccaatctatgatgatgacccgtctcttgaaggtggtgttaatggcaaaaatcttggccccataaatgaatggtggatcactggctttgatggaggtgaaaaggccctcatcggcttcagcacctcatttgccgaatacattctgatggatcccagtcccgagtatgcgcccatatttgggctgatgcaggagaagatctacatcagcaagattgtggtggagttcctgcagagcaattccgactcgacctatgaggacctgatcaacaagatcgagaccacggttcctccttctggcctcaacttgaaccgcttcacagaggactccctcctgcgacacgcgcagtttgtggtggagcaggtggagagttatgacgaggccggggacagtgatgagcagcccatcttcctgacgccctgcatgcgggacctgatcaagctggctggggtcacgctgggacagaggcgagcccaggcgaggcggcagaccatcaggcattctaccagggagaaggacaggggacccacgaaagccaccaccaccaagctggtctaccagatcttcgatactttcttcgcagagcaaattgaaaaggatgacagagaagacaaggagaacgcctttaagcgccggcgatgtggcgtctgtgaggtgtgtcagcagcctgagtgtgggaaatgtaaagcctgcaaggacatggttaaatttggtggcagtggacggagcaagcaggcttgccaagagcggaggtgtcccaatatggccatgaaggaggcagatgacgatgaggaagtcgatgataacatcccagagatgccgtcacccaaaaaaatgcaccaggggaagaagaagaaacagaacaagaatcgcatctcttgggtcggagaagccgtcaagactgatgggaagaagagttactataagaaggtgtgcattgatgcggaaaccctggaagtgggggactgtgtctctgttattccagatgattcctcaaaaccgctgtatctagcaagggtcacggcgctgtgggaggacagcagcaacgggcagatgtttcacgcccactggttctgcgctgggacagacacagtcctcggggccacgtcggaccctctggagctgttcttggtggatgaatgtgaggacatgcagctttcatatatccacagcaaagtgaaagtcatctacaaagccccctccgaaaactgggccatggagggaggcatggatcccgagtccctgctggagggggacgacgggaagacctacttctaccagctgtggtatgatcaagactacgcgagattcgagtcccctccaaaaacccagccaacagaggacaacaagttcaaattctgtgtgagctgtgcccgtctggctgagatgaggcaaaaagaaatccccagggtcctggagcagctcgaggacctggatagccgggtcctctactactcagccaccaagaacggcatcctgtaccgagttggtgatggtgtgtacctgccccctgaggccttcacgttcaacatcaagctgtccagtcccgtgaaacgcccacggaaggagcccgtggatgaggacctgtacccagagcactaccggaaatactccgactacatcaaaggcagcaacctggatgcccctgagccctaccgaattggccggatcaaagagatcttctgtcccaagaagagcaacggcaggcccaatgagactgacatcaaaatccgggtcaacaagttctacaggcctgagaacacccacaagtccactccagcgagctaccacgcagacatcaacctgctctactggagcgacgaggaggccgtggtggacttcaaggctgtgcagggccgctgcaccgtggagtatggggaggacctgcccgagtgcgtccaggtgtactccatgggcggccccaaccgcttctacttcctcgaggcctataatgcaaagagcaaaagctttgaagatcctcccaaccatgcccgtagccctggaaacaaagggaagggcaagggaaaagggaagggcaagcccaagtcccaagcctgtgagccgagcgagccagagatagagatcaagctgcccaagctgcggaccctggatgtgttttctggctgcggggggttgtcggagggattccaccaagcaggcatctctgacacgctgtgggccatcgagatgtgggaccctgcggcccaggcgttccggctgaacaaccccggctccacagtgttcacagaggactgcaacatcctgctgaagctggtcatggctggggagaccaccaactcccgcggccagcggctgccccagaagggagacgtggagatgctgtgcggcgggccgccctgccagggcttcagcggcatgaaccgcttcaattcgcgcacctactccaagttcaaaaactctctggtggtttccttcctcagctactgcgactactaccggccccggttcttcctcctggagaatgtcaggaactttgtctccttcaagcgctccatggtcctgaagctcaccctccgctgcctggtccgcatgggctatcagtgcaccttcggcgtgctgcaggccggtcagtacggcgtggcccagactaggaggcgggccatcatcctggccgcggcccctggagagaagctccctctgttcccggagccactgcacgtgtttgctccccgggcctgccagctgagcgtggtggtggatgacaagaagtttgtgagcaacataaccaggttgagctcgggtcctttccggaccatcacggtgcgagacacgatgtccgacctgccggaggtgcggaatggagcctcggcactggagatctcctacaacggggagcctcagtcctggttccagaggcagctccggggcgcacagtaccagcccatcctcagggaccacatctgtaaggacatgagtgcattggtggctgcccgcatgcggcacatccccttggccccagggtcagactggcgcgatctgcccaacatcgaggtgcggctctcagacggcaccatggccaggaagctgcggtatacccaccatgacaggaagaacggccgcagcagctctggggccctccgtggggtctgctcctgcgtggaagccggcaaagcctgcgaccccgcagccaggcagttcaacaccctcatcccctggtgcctgccccacaccgggaaccggcacaaccactgggctggcctctatggaaggctcgagtgggacggcttcttcagcacaaccgtcaccaaccccgagcccatgggcaagcagggccgcgtgctccacccagagcagcaccgtgtggtgagcgtgcgggagtgtgcccgctcccagggcttccctgacacctaccggctcttcggcaacatcctggacaagcaccggcaggtgggcaatgccgtgccaccgcccctggccaaagccattggcttggagatcaagctttgtatgttggccaaagcccgagagagtgcctcagctaaaataaaggaggaggaagctgctaaggactagttctgccctcccgtcacccctgtttctggcaccaggaatccccaacatgcactgatgttgtgtttttaacatgtcaatctgtccgttcacatgtgtggtacatggtgtttgtggccttggctgacatgaagctgttgtgtgaggttcgcttatcaactaatgatttagtgatcaaattgtgcagtactttgtgcattctggattttaaaagttttttattatgcattatatcaaatctaccactgtatgagtggaaattaagactttatgtagtttttatatgttgtaatatttcttcaaataaatctctcctataaaccaaaaaaaaaa

SEQ ID NO: 76231 - DNA, 844 bp, Homo sapiens
aggatccttaataaattaatccccccccccccgctttcctttcgctgctgcggccgcagccatgagtatgctcaggcttcagaagaggctcgcctctagtgtcctccgctgtggcaagaagaaggtctggttagaccccaatgagaccaatgaaatcgccaatgccaactcccgtcagcagatccggaagctcatcaaagatgggctgatcatccgcaagcctgtgacggtccattcccgggctcgatgccggaaaaacaccttggcccgccggaagggcaggcacatgggcataggtaagcggaagggtacagccaatgcccgaatgccagagaaggtcacatggatgaggagaatgaggattttgcgccggctgctcagaagataccgtgaatctaagaagatcgatcgccacatgtatcacagcctgtacctgaaggtgaaggggaatgtgttcaaaaacaagcggattctcatggaacacatccacaagctgaaggcagacaaggcccgcaagaagctcctggctgaccaggctgaggcccgcaggtctaagaccaaggaagcacgcaagcgccgtgaagagcgcctccaggccaagaaggaggagatcatcaagactttatccaaggaggaagagaccaagaaataaaacctcccactttgtctgtacatactggcctctgtgattacatagatcagccattaaaataaaacaagccttaaaaaaaaaaaaaaggggcggccgttttaaaggatccttgggggggcccaagtttacgcgggcatgcaaggtaatagttttttccttatagggagtggtattataacctacctggggatt

SEQ ID NO: 76232 - DNA, 2315 bp, Homo sapiens; identical to SEQ ID NO: 58761

SEQ ID NO: 76233 - DNA, 1646 bp, Homo sapiens; identical to SEQ ID NO: 58762

SEQ ID NO: 76234 - DNA, 1264 bp, Homo sapiens
gccaggaatgtgcccaaatttggactacccaatctcatggctctggggctgggtccatggctggcagtggaaatccctgatctgtttcagaagggcgtcatccaacacagggagaaatgcaaccaatgaagaatccagccactgaggcagggcagaggaagcagcttttattgatgggttatctccagaaaccagaaagactatatgtactcactttcagttacccccgtgcctccagaatcgcatgttgctccacctgggggcggatataaattacctctagattgtccaaagcccagtctttcccttccctgtgcagccttagaaactaagtagcagtactgtttggtgtgtgtttgtttcttccccagcaatgcctactgcagctacttagtaacaactagaggtggagggtgtccggggaagcagttagatgagttaagtgtgatgcacaggaaaatagtatcgtagcctatcaaaggtccctctgccctgcctcagtggcttgattcttcattggttgcatttctctttgtgttggatgacgcccttctgaatcagatcagggatttccactgccagccatggacccagccccagagccatgagatgagctagtccaaatttgggcacattcctggcccacaaaggtttgaaatgatccgtcaggcatattttgccacccctgtacatctttgctgtctttccatccagctcaggaactgcaatttctggggcagtagtaggatatgtgataggaatgtcaaactcgatgtcaaactcatatttcaggaggtcatggatataccagcattttccaaaccaccgagttccttccttgttggactccagtcggaaccaatcgttgtcagcattcttgttgttctccacataccggataagggactgatattcctccttcagtcgctgcacccacaactcacgatctcggggtccggcgttagtcttcagcaccgggatctcagacacaacacgtcgcgtggcttcatccgccatcttggaccagggcgcaagagaaacgcggaagtggtgttgcctgtagcttacctcaaggcgccgtcatctttactatgggaagatgagacgttgggttgctgtaagacctcttttgaataagatctttgttttcttgtcacctagttacccgcttgtgagtgcatcgagaagaacagaatgtaaacagattactccgtcctatatatgacacctatcattaaaatcaccgcataaggcaaaaaaaaaa

SEQ ID NO: 76235 - DNA, 975 bp, Homo sapiens; identical to SEQ ID NO: 58765

SEQ ID NO: 76236 - DNA, 1296 bp, Homo sapiens
caagactgtccgcatctgggtacccaatgtcaaaggtgagtccactgtgtttcgtgcacacacagccacagtgaggagtgtccacttctgcagtgatggccagtccttcgtgacagcctctgacgacaagacagtcaaagtgtgggcaactcatcgccagaaattcctgttctccctgagccagcatatcaactgggtccgctgtgccaagttctcccccgacgggcggctcatcgtgtctgccagtgatgacaagactgttaagctgtgggacaagagcagccgggaatgtgtccactcgtattgtgagcatggcggctttgtcacctatgtggacttccaccccagtgggacgtgcattgccgctgccggcatggacaacacagtgaaggtgtgggacgtgcggactcaccggctgctgcagcattatcagttgcacagtgcagcagtgaacgggctctctttccacccgtcgggaaactacctgatcacagcctccagtgactcaaccctgaagatcctggacctgatggagggccggctgctctacacactccacgggcatcagggaccagccaccactgttgccttttcaagaacgggggagtattttgcttctggaggctctgatgaacaagtgatggtttggaagagtaactttgatattggtgatcatggagaagtcacgaaagtgccgaggcccccagccacactggccagctccatggggaatctgacagtctccattctggagcagcggttgacactggaagaagacaagctgaagcagtgtctggagaaccagcagctaatcatgcagagagcaacaccatgatcaggggagcaggaatcaggagctcggtggatttgcaggtggcaggccagggatttgtaccatgggacttgggtaaataaaggggactgaactctgtgggaatcacatccatactggagccctggatttttgcagttctgccctccaccttgctatctgcaccaggaggctctccacctggcagccagaggtcccccagtgggccgggctcacacacaaatgatgcttcagacccgaatgagaggaccacattttgcttaatgtaaaggagccacttgaaaatgtctgctccttcggggtcctgagattgtggctccccctctggaggaggtggctccacgatgccttgattttcactcatcatttggacatgtgactggcttttcctacctctgccatggtgtagaaattgattgcacaggaatctcaaaattaaacctgaattcaatgcaaaaaaaaaa

SEQ ID NO: 76237 - DNA, 1356 bp, Homo sapiens; identical to SEQ ID NO: 58767

SEQ ID NO: 76238 - DNA, 1764 bp, Homo sapiens
atccgcttcgccggaacaatcctgtgagtttatgatatctgctatacagatgaggataacagaagttgactaacttgcccaagtcacaagtttgtaaagatggatctgggatttaaacccagtgagtgatggattggaactgagaccgaaatataatggaattttacattgcttgactaccatttggaaacttgatggactacggggactttatcaaggagtaaccccaaatatatggggtgcaggtttatcctggggactctactttgttttttacaatgccatcaagtcatataaaacagaaggaagagctgaacgtttagaggcaacagaataccttgtctcagctgctgaagctggagccatgaccctctgcattacaaacccattatgggtaacaaaaactcgccttatgttacagtatgatgctgttgttaactccccacaccgacaatataaaggaatgtttgatacacttgtgaaaatatataagtatgaaggtgtgcgtggattatataagggatttgttcctgggctgtttggaacatcgcatggtgcccttcagtttatggcatatgaattgctgaagttgaagtacaaccagcatatcaatagattaccagaagcccagttgagcacagtagaatatatatctgttgcagcactatccaaaatatttgctgtcgcagcaacatacccatatcaagtcgtaagagctcgtcttcaggatcaacacatgttttacagtggtgtaatagatgtaatcacaaagacatggaggaaagaaggcgtcggtggattttacaagggaattgctcctaatttgattagagtgactccagcctgctgtattacctttgtggtatatgaaaacgtctcacattttttacttgaccttagagaaaagagaaagtaagctcaaagaggacaattccagtatatctgcccaaggcagcaacaagctcttttgtgtttaaggcataaaagaagaattctgcatagaaacatggctcatattcgaaattgctctatagtcattagaagccagagaactgctaagtctcctgcaatgtttttctgctttttgccttccccatatatatggaacttggctacctctgcctgaaatggctgccatcaacacaatgttaaaactgacacgaaggatagagtttcacagatttctacgttttattggtggaagctgatttgcaacatttgctaaatggattagatgaatgtacttctttttgtgagcttacttgcctggattgctttaaaattaacctttgtgcaataccaagaaaatagctctttaaaagaatgtctttgtatgtctcaaggtaaattaaggatttactgaataaggtgttgaccaaatccagaccattttattttatttttttatttatttattttttgagatggagtcttgctttgtcgcccaggctggagtgcagtggcgtgatctcagctcactgcaacctccacctcccgggttcacgccattctcctgcctcagcctcctgagtagctgggactacaggcacctgccaccacgcctggctaacttttttttatattttgagtagaaatggggtttcaccatgttagccaggatgggctcaatctcctgaccttgtgatccgcctgccttggcctcccaaagtgctgggattacaggcgtgagccactgcgcctggccagaccattttagaattgggaaattgtagtgagaaaaaatgcactgtaaatatgctttat

SEQ ID NO: 76239 - DNA, 2334 bp, Homo sapiens; identical to SEQ ID NO: 58769

SEQ ID NO: 76240 - DNA, 2309 bp, Homo sapiens; identical to SEQ ID NO: 58770

SEQ ID NO: 76241 - DNA, 2694 bp, Homo sapiens; identical to SEQ ID NO: 58771

SEQ ID NO: 76242 - DNA, 599 bp, Homo sapiens; identical to SEQ ID NO: 58772

SEQ ID NO: 76243 - DNA, 717 bp, Homo sapiens; identical to SEQ ID NO: 58773

SEQ ID NO: 76244 - DNA, 2193 bp, Homo sapiens; identical to SEQ ID NO: 58774

SEQ ID NO: 76245 - DNA, 349 bp, Homo sapiens; identical to SEQ ID NO: 58775

SEQ ID NO: 76246 - DNA, 682 bp, Homo sapiens; identical to SEQ ID NO: 58776

SEQ ID NO: 76247 - DNA, 1393 bp, Homo sapiens; identical to SEQ ID NO: 58777

SEQ ID NO: 76248 - DNA, 2094 bp, Homo sapiens
  misc_feature (1)...(2094): n = a,t,c or g
ggcacgagccggggatggctgtgtgttgctagagcacaggctgattaagcgctcactgtgctggctctctgtgccactcctggaaaataatgaattgggtaaggaacagttaataagaaaatgtgccttgctaactgtgcacattacaacaaagagctggcagctcctgaaggaaaagggcttgtgccgctgccgttcaaacttgtcagtcaactcatgccagcagcctcagcgtctgcctccccagcacaccctcattacatgtgtctgtctggcctgatctgtgcatctgctcggagacgctcctgacaagtcgggaatttctctatttctccactggtgcaaagagcggatttctccctgcttctcttctgtcacccccgctcctctcccccaggaggctccttgatttatggtagctttggacttgcttccccgtctgactgtccttgacttctagaatggaagaagctgagctggtgaagggaagactccaggccatcacagataaaagaaaaatacaggaagaaatctcacagaagcgtctgaaaatagaggaagacaaactaaagcaccagcatttgaagaaaaaggccttgagggagaaatggcttctagatggaatcagcagcggaaaagaacaggaagagatgaagaagcaaaatcaacaagaccagcaccagatccaggttctagaacaaagtatcctcaggcttgagaaagagatccaagatcttgaaaaagctgaactgcaaatctcaacgaaggaagaggccattttaaagaaactaaagtcaattgagcggacaacagaagacattataagatctgtgaaagtggaaagagaagaaagagcagaagagtcaattgaggacatctatgctaatatccctgaccttccaaagtcctacataccttctaggttaaggaaggagataaatgaagaaaaagaagatgatgaacaaaataggaaagctttatatgccatggaaattaaagttgaaaaagacttgaagactggagaaagtacagttctgtcttcaatacctctgccatcagatgactttaaaggtacaggaataaaagtttatgatgatgggcaaaagtcagtgtatgcagtaagttctaatcacagtgcagcatacaatggcaccgatggcctggcaccagttgaagtagaggaacttctaagacaagcctcagagagaaactctaaatccccaacagagtatcatgagcctgtatatgccaatcccttttacaggcctacaaccccacagagagaaacggtgacccctggaccaaactttcaagaaaggataaagattaaaactaatggactgggtattggtgtaaatgaatccatacacaatatgggcaatggtctttcagaggaaaggggaaacaacttcaatcacatcagtcccattccgccagtgcctcatccccgatcagtgattcaacaagcagaagagaagcttcacaccccgcaaaaaaggctaatgactccttgggaagaatcgaatgtcatgcaggacaaagatgcaccctctccaaagccaaggctgagccccagagagacaatatttgggaaatctgaacaccagaattcttcacccacttgtcaggaggacgaggaagatgtcagatataatatcgttcattccctgcctccagacataaatgatacagaaccggtgacaatgattttcatggggtatcagcaggcagaagacagtgaagaagataagaagtttctgacaggatatgatgggatcatccatgctgagctggttgtgattgatgatgaggaggaggaggatgaaggagaagcagagaaaccgtcctaccaccccatagctccccatagtcaggtgtaccagccagccaaaccaacaccacttcctagaaaaagatcagaagctagtcctcatgaaaaacacaaatcataaatccccccacaaaaattccatatctctggaaagagccaagaagaaagctttgggcagccctggttccaccattccccatttgatgctcagacaacttggagttggggactgagggatccatccttaacagcntttaagggat

SEQ ID NO: 76249 - DNA, 2525 bp, Homo sapiens; identical to SEQ ID NO: 58779

SEQ ID NO: 76250 - DNA, 2372 bp, Homo sapiens; identical to SEQ ID NO: 58780

SEQ ID NO: 76251 - DNA, 3597 bp, Homo sapiens; identical to SEQ ID NO: 58781

SEQ ID NO: 76252 - DNA, 869 bp, Homo sapiens; identical to SEQ ID NO: 58782

SEQ ID NO: 76253 - DNA, 2211 bp, Homo sapiens; identical to SEQ ID NO: 58783

SEQ ID NO: 76254 - DNA, 1855 bp, Homo sapiens
ggaattcgccgggttccgtgtgtctatgtcaatgtgtctgtccttcactcctccattgtctgccgccactgctgctgctgctgctgctgccgctgctgctgcacgaatcgccgcagcccccagccttgcgcgtcgtcgctacctcctcggacagaaattttatgaataagcatcagaagccagtgctaacaggccagcggttcaaaactcggaaaagggatgaaaaagagaaattcgaacccacagtcttcagggatacacttgtccaggggcttaatgaggctggtgatgaccttgaagctgtagccaaatttctggactctacaggctcaagattagattatcgtcgctatgcagacacactcttcgatatcctggtggctggcagtatgcttgcccctggaggaacgcgcatagatgatggtgacaagaccaagatgaccaaccactgtgtgttttcagcaaatgaagatcatgaaaccatccgaaactatgctcaggtcttcaataaactcatcaggagatataagtatttggagaaggcatttgaagatgaaatgaaaaagcttctcctcttccttaaagccttttccgaaacagagcagacaaagttggcgatgctgtcggggattctgctgggcaatggcaccctgcccgccaccatcctcaccagtctcttcaccgacagcttagtcaaagaaggcattgcggcctcatttgctgtcaagcttttcaaagcatggatggcagaaaaagatgccaactctgttacctcgtctttgagaaaagccaacttagacaagaggctgcttgaactctttccagttaacagacagagtgtggatcattttgctaaatacttcactgacgcaggtcttaaggagctttccgacttcctccgagtccagcagtccctgggcaccaggaaggaactgcagaaggagctccaggagcgtctttctcaggaatgcccgatcaaggaggtggtgctttatgtcaaagaagaaatgaagaggaatgatcttccagaaacagcagtgattggtcttctgtggacatgtataatgaacgctgttgagtggaacaagaaggaagaacttgttgcagagcaggctctgaagcacctgaagcaatatgctcccctgctggccgtgttcagctcccaaggccagtcagagctgatcctcctccagaaggttcaggaatactgctacgacaacatccatttcatgaaagcctttcagaagattgtggttctcttttataaagctgatgttctgagcgaagaagcaatactgaaatggtataaggaagcacatgttgctaaaggcaaaagtgtttttcttgaccagatgaagaaatttgttgagtggttacaaaatgcagaagaagaatccgaatcggaaggtgaggaaaattaaatggctcaacaagcacaatacctaggttaccacacaccactttttgattgggaatgctgaaccatttgagaagagaaacttggcttctgttttcgcaaaggaaaaaaaaaataggataggcttcccttgtgcagagggagaaatggttttgtttttgttttgtttttaaatggagccctgaggcatcagctattatacttgggactctacctctcactcactatatgctaacttaaagccattcaacaaggagtcaagtagatctgaaattaaatactcaacagactcctccttttttagctgtatttttcaggtactgtgtggtgaccgccccactggtgtctattacaggccactttggtagttgtgtatctgctcatgtatgtgatttgacaaaccagttttttaaaataaatggctttttaaaaaaaaaa

SEQ ID NO: 76255 - DNA, 2720 bp, Homo sapiens; identical to SEQ ID NO: 58784

SEQ ID NO: 76256 - DNA, 2022 bp, Homo sapiens
ttttttttttttgacaataacatagaaattttattacagcatttcatgtttaagccagattccctgccaggatattttctgcttgaattaatgaggcaggatttggtcataccttaatgagtttcacagaaaaagagttcaagcattagcgcaaactgccttctgacattaaaataaaataaagcaaacatgggattttcacaaagttaaaagcctcctgtgatgcacattttggatagtaggagacattgagccccaaaatgtttaacataaagcatggttaattaaatgaaaccactgaaaaatgtgaatacatgaagaagaaagaataaaataattttgatgttaccatttcaactactatttttgatataatcattcttggcaaaatcattcttaaaggtgggaaacgagcaggctggatagtacagccagtaagagaaagtcaatactgatggcctccacttgctgatcctctgagactgcatcttatagttcataaaatctgctgaagctcacaactgaggtacaacgacttgtgttacttgtactgtagcaatgagggctttcccaggccacaacatctgggatcaaggaacacattttgactaaataaactatacagaagtctgttttaggattttatgcaaatattaacctcattttaaaacatgaggaaaaatattacccacatttagggctaatttagctgtcaggaatagaccatacagttgaaaaaaacacagtctcatttaaaaagtttcagcagagacaaaaaggtactaaagatgatattcatccttcttcatcactgctgctccaggcatcttcaaaggccggatttaattgtgattttgttgtagtctcatcatcatcaggaactggttcatataaggatggaacccaagccagaatgttgcagtctctgctaccactataaagttcctggaaatttgactgaaatacacagcagtcaacagttttataatgtcccttaagcatagttatctgttctcctgagtaaactgtataaacagcaatggtgctaccatatggtacaaaaacaaattctgaactgcagccacaggagacagtgaatttcaatccttttttactgttattacaaacttttccatagttcacaagtgtgttttctccattggaactattccagagcctcattcgattatctgtaccaacagtgaggaggtgaagtccatcacttgtaaaacataagccattaactttcccattatgagcagtgtttgctgattcaacagcttgtgactttttcccattatgttgatcaagagtaatcaaacatcctgatgctcttctcacatcccataattttactctactgtcagcacttgctgttgccaagatatagtcataacgtggagaccaggaaactgctaatatttcttgtctgtgaccctgtagaatgtgagaacaggatccagacttcaagtcacaaagttgtactttgggtcctctagtaccaactgctaccaaacagtgcttggtggagactggagacatatgatgactataaactgtttcctcaaaattaaatacatctgcagtttgtaatgtatttgtatcccatactttcagagttttatcaaatgagcttgatgtgaacatgccagtgtcatgaggataccactgtacagtctccacactgtatctgtgaacatcaggatgatctctgccaatggaacacactgctttacatgtgtaataagattgtctgctggagttctcaaggtcataaagtacaatcacaccatctgaaccacctgataacatgtatctcccttcaacaggttcaatgtcaagggtgttaattccaccgccgtggattctttcaacatctctgtctttatttaattccagtcccaaaactctccgtgttgactctgctctccgaaggcgaagagggtcctccaaacccgtttggcgtgcggacaaaaaccccagcatatcgtgtcctcacaccggctggagcactggacgtcg

SEQ ID NO: 76257 - DNA, 968 bp, Homo sapiens
cggacgcgtgggcgcgaaccatggccggcatggtggacttccaggatgaggagcaggtcaagtcctttttggagaacatggaggtggagtgcaactaccactgctaccacgagaaggacccggacggttgctatcggctggtggactatttggaagggatccggaagaattttgatgaggctgccaaggtgttgaagtttaactgtgaagagaaccagcacagtgatagctgctacaaactgggggcctactatgtgactggaaaaggtggtctgacccaggacctgaaagctgccgccaggtgctttttgatggcgtgtgagaagcctggaaagaagtcaatagcagcatgtcacaacgttggcctcctggcacatgatggacaggttaatgaggatggccagcctgacttgggaaaggccagggactactacacaagggcctgtgatggtggctatacttccagttgcttcaacctcagtgccatgttcctgcagggtgccccaggctttcccaaggacatggacctggcatgtaaatactccatgaaagcctgtgacctgggtcatatctgggcctgtgccaatgccagtcgcatgtacaagctgggggatggtgttgataaggttgaggccaaggccgaggtgctaaaaaatcgagcccagcaggtacacaaagaacagcagaaaggtgtccaacccttaacatttgggtaatgtggtccaccctccctcccaggcaacaaactgcttgaggctggcagctcctgtttctgaagactgatgcagcccttgaaggtcaacctgctggagcaaaaaaacttgggacttgaatttgtagctccatttacatggatccattgccccagctactggagtatagcctacaatgtttatttcagtcaatattcctttatctgggtgttctgtacaatgtttattacagtcaatattccttcaaaaaaaaaa

SEQ ID NO: 76258 - DNA, 2115 bp, Homo sapiens; identical to SEQ ID NO: 58787

SEQ ID NO: 76259 - DNA, 922 bp, Homo sapiens; identical to SEQ ID NO: 58788

SEQ ID NO: 76260 - DNA, 2198 bp, Homo sapiens; identical to SEQ ID NO: 58789

SEQ ID NO: 76261 - DNA, 1972 bp, Homo sapiens
ccccgcgctgcaggaattcggcacgaggccaactctcgcactctgttcttccgccgctccgccgtcgcgtttctctgccggtcgcaatggaagaagagatcgccgcgctggtcattgacaatggctccggcatgtgcaaagctggttttgctggggacgacgctccccgagccgtgtttccttccatcgtcgggcgccccagacaccagggcgtcatggtgggcatgggccagaaggactcctacgtgggcgacgaggcccagagcaagcgtggcatcctgaccctgaagtaccccattgagcatggcatcgtcaccaactgggacgacatggagaagatctggcaccacaccttctacaacgagctgcgcgtggccccggaggagcacccagtgctgctgaccgaggcccccctgaaccccaaggccaacagagagaagatgactcagattatgtttgagaccttcaacaccccggccatgtacgtggccatccaggccgtgctgtccctctacgcctctgggcgcaccactggcattgtcatggactctggagacggggtcacccacacggtgcccatctacgagggctacgccctcccccacgccatcctgcgtctggacctggctggccgggacctgaccgactacctcatgaagatcctcactgagcgaggctacagcttcaccaccacggccgagcgggaaatcgtgcgcgacatcaaggagaagctgtgctacgtcgccctggacttcgagcaggagatggccaccgccgcatcctcctcttctctggagaagagctacgagctgcccgatggccaggtcatcaccattggcaatgagcggttccggtgtccggaggcgctgttccagccttccttcctgggtatggaatcttgcggcatccacgagaccaccttcaactccatcatgaagtgtgacgtggacatccgcaaagacctgtacgccaacacggtgctgtcgggcggcaccaccatgtatccgggcattgccgacaggatgcagaaggagatcaccgccctggcgcccagcaccatgaagatcaagatcatcgcacccccagagcgcaagtactcggtgtggatcggtggctccatcctggcctcactgtccaccttccagcagatgtggattagcaagcaggagtacgacgagtcgggcccctccatcgtccaccgcaaatgcttctaaacggactcagcagatgcgtagcatttgctgcatgggttaattgagaatagaaatttgcccctggcaaatgcacacacctcatgctagcctcacgaaactggaataagccttcgaaaagaaattgtccttgaagcttgtatctgatatcagcactggattgtagaacttgttgctgattttgaccttgtattgaagttaactgttccccttggtatttgtttaataccctgtacatatctttgagttcaacctttagtacgtgtggcttggtcacttcgtggctaaggtaagaacgtgcttgtggaagacaagtctgtggcttggtgagtctgtgtggccagcagcctctgatctgtgcagggtattaacgtgtcagggctgagtgttctgggatttctctagaggctggcaagaaccagttgtttttgtctttgcggggtctgttcaggggtttggaaaagtccaagccgtaggaccccagtttcctttcttaagctgatgtcttttggccaagaacacccgtggggctggttacttgctttgaagttggaagcgggtttggacatttacgcctgtaaatgtattcattcttaatttatgtaaggtttttttttgtacgcaattctccgattcttttgaagaagatgacaacaaattttgggttttctacatgttatgtgagaacattagcgccccacgcaacactgtcattggtgtaaggaaaaaataaaagttgctgcccgtaaccaaaaaaaaaa

SEQ ID NO: 76262 - DNA, 2499 bp, Homo sapiens; identical to SEQ ID NO: 58791

SEQ ID NO: 76263 - DNA, 1748 bp, Homo sapiens
ttttttttttttcatacaaacattatgtatctttatttaaatttgcaaatgaaaacaacacatatttcatgttagttttaataagagattccctatcctctgccccagtaaaacctaaccaagccagcctgacaggttatatcaatacagggagctggagtgggagccaagggtggtgttagataggggtggggtacagatcaagggggcctgggagactcagtgactggaagtctctgcccctcactcttggtgagtagctaatttcagcagctggcttcataaggaggagtcaggggtgggtggaggctcctcccaattccagatccacttcctcttctccttctgtctcctggacacttaggtcttactgagatggttttcccacagtaaagagaggtgggggcagagtactaagggtcaggagtgtgactctttcccatgactcaggcctctgtgctagaggtgacccttataggaaggagagaccccaaatcctttagccaatgagtggtggggtcatcataccagagagccagcttgactctgggcaggcaccatcacaggcacagcacccatgcggctcaagccagaggaagaaacccccccagggatgggggatattggttgagggtgggccccatctgtcgtgggcagtcttggtgagggcagggcctggctggagagactgggcgtgggggtcaatgcaccaggcctgggagggccatggggtggccggagggctcgtgcggaggtgacagaggaaagggtcccattcttggagattgtgtctgagctcttgggccagggcagggtccggggagcaatggcatcctccttgatatcattggctggctcctccagggccttgccccggcggtggtacaagaggaccagcccagccagcaaccccagtccaaccagggtacccacaacagctccagcaaccactgcagctccaggccctgtgctcacttccagcgtcacattacattgggcagtgcccacctcattgtgggccttgcagacatagactccagccatggaagacgaaaggttggtgaggcttaaagacccacggatgacatctaatgctggtgcaaagaaagtctggaaggatggaagctgccgatcccactggtattggacagcgggcttactccttggagactggcagctcagggtcacgtttgcccccacatggggcacaccctggagacggcaggatggaggagctggaggaaccagtacattgagttctaaggttttgatgctgtggcccctagatttgccttgtttgtcttgcacattcacggagcagctgtaggggccagagtctttctcctggagaccctccagccgcagggacaggttccgggagggcatggagtagaccaaggatactccaggtttgcttgttgtgaccccattgatgtaggacaacacctggtgtggggcataacacatccccgtcattactacatgtgtctactgtgcctacaggctcagccactctccctcccccagctcgcattctccaaatgcccctcacatgcacccattcttctaacctgaaccagctccccattcaccttttgtccctagccccctctcactgcccctgggtcctcttcaccagaacagttcttcgttcctgcgcattgtctcatctcccaattgcggtgtttagaaaggtgacataatagtgggaggagggacatgtaaataggaggtatgtatctcgtgcc

SEQ ID NO: 76264 - DNA, 2303 bp, Homo sapiens; identical to SEQ ID NO: 58793

SEQ ID NO: 76265 - DNA, 1792 bp, Homo sapiens; identical to SEQ ID NO: 58794

SEQ ID NO: 76266 - DNA, 1704 bp, Homo sapiens; identical to SEQ ID NO: 58795

SEQ ID NO: 76267 - DNA, 1090 bp, Homo sapiens
gtcgacccacgcgtccggtacagtcgccgcgtgcggagcttgttactggttacttggcctcatggcggtccgagcttcgttcgagaacaactgtgagatcggctgctttgccaagctcaccaacacctactgtctggtagcgatcggaggctcagagaacttctacagtgtgttcgagggcgagctctccgataccatccccgtggtgcacgcgtctatcgccggctgccgcatcatcgggcgcatgtgtgtggggaacaggcacggtctcctggtacccaacaataccaccgaccaggagctgcaacacattcgcaacagcctcccagacacagtgcagattaggcgggtggaggagcggctctcagccttgggcaatgtcaccacctgcaatgactacgtggccttggtccacccagacttggacagggagacagaagaaattctggcagatgtgctcaaggtggaagtcttcagacagacagtggccgaccaggtgctagtaggaagctactgtgtcttcagcaatcagggagggctggtgcatcccaagacttcaattgaagaccaggatgagctgtcctctcttcttcaagtcccccttgtggcggggactgtgaaccgaggcagtgaggtgattgctgctgggatggtggtgaatgactggtgtgccttctgtggcctggacacaaccagcacagagctgtcagtggtggagagtgtcttcaagctgaatgaagcccagcctagcaccattgccaccagcatgcgggattccctcattgacagcctcacctgagtcaccttccaagttgttccatgggctcctggctctggactgtggccaaccttctccacattccgcccaatctgtaccggatgctggcagggaggtggcagagagctcactgggactgaggggctgggcacccaacccttttccacctgtgcttatcgcctggatctatcattactgcaaaaacctgctctgttgtgctggctggcaggccctgtggctgctggctgagggttctgctgtctgtcctgtgccaccccattaaagtgcagttccctccgggcaaaaaaaaaa

SEQ ID NO: 76268 - DNA, 818 bp, Homo sapiens; identical to SEQ ID NO: 58797

SEQ ID NO: 76269 - DNA, 1111 bp, Homo sapiens; identical to SEQ ID NO: 58798

SEQ ID NO: 76270 - DNA, 1917 bp, Homo sapiens; identical to SEQ ID NO: 58799

SEQ ID NO: 76271 - DNA, 981 bp, Homo sapiens
agttggagcctgcggagttcgagaccatgctgctgttctgccccggctgcgggaacgggctgatcgtggaggagggacaacgctgccaccgcttcgcctgcaacacgtgcccctacgtgcacaacatcacccgcaaggtaacaaatcggaagtacccaaaactgaaagaagtggatgatgtgcttggtggagcagctgcctgggagaatgttgactctactgcagagtcgtgtcccaaatgcgaacatcctcgtgcttacttcatgcagcttcagacccgctctgcagatgagccgatgaccaccttctacaagtgctgcaatgctcagtgtggacaccgctggagggattagggccaggatggcccagctgccctagtgtgtgcttgccttgtccctcggggtagatgcttagctggcagtatgagtcgtgtgtcctgagggtctttgctagtgtggtggaaagataaaccttttgaggtgaagagccagggggtcaggaaatatggcctatctgccaggcagggtggatgaagtcatgaatgtctgggagtttttctgtgtggggaggagacagagacccataactaaatatgctctgtgtaaagccctattctttcatcttccactttattggcagttgacattcccttactcccaatcaacactcttaaatatttgtactgtttgtaaaacttactacatgtccctaaatatttaactgcttccagaccagacactttggaaaaggaggaaaatactacgtcctgaggccactgagccacttattaatactgctatccatctctttgccaactctgctgccacttgcatagtgatcacagacagccagggaggagcatgtgtctgtttcaagcttctgggaattactgcgggaagaatatcggaagctccctatggcactgtcagtgtcctcatccccatcacccacaccatcatcctcatactccttgaccttctt

SEQ ID NO: 76272 - DNA, 1814 bp, Homo sapiens; identical to SEQ ID NO: 58801

SEQ ID NO: 76273 - DNA, 590 bp, Homo sapiens; identical to SEQ ID NO: 58802

SEQ ID NO: 76274 - DNA, 3161 bp, Homo sapiens
ggctgcagggccaagagcgctgtcaagaagacccacacgcccccctccagcagctgaattcctgcagctcagcagccgccgccagagcaggacgaaccgccaatcgcaaggcacctctgagaacttcaggatgcagatgtctccagccctcacctgcctagtcctgggcctggcccttgtctttggtgaagggtctgctgtgcaccatcccccatcctacgtggcccacctggcctcagacttcggggtgagggtgtttcagcaggtggcgcaggcctccaaggaccgcaacgtggttttctcaccctatggggtggcctcggtgttggccatgctccagctgacaacaggaggagaaacccagcagcagattcaagcagctatgggattcaagattgatgacaagggcatggcccccgccctccggcatctgtacaaggagctcatggggccatggaacaaggatgagatcagcaccacagacgcgatcttcgtccagcgggatctgaagctggtccagggcttcatgccccacttcttcaggctgttccggagcacggtcaagcaagtggacttttcagaggtggagagagccagattcatcatcaatgactgggtgaagacacacacaaaaggtatgatcagcaacttgcttgggaaaggagccgtggaccagctgacacggctggtgctggtgaatgccctctacttcaacggccagtggaagactcccttccccgactccagcacccaccgccgcctcttccacaaatcagacggcagcactgtctctgtgcccatgatggctcagaccaacaagttcaactatactgagttcaccacgcccgatggccattactacgacatcctggaactgccctaccacggggacaccctcagcatgttcattgctgccccttatgaaaaagaggtgcctctctctgccctcaccaacattctgagtgcccagctcatcagccactggaaaggcaacatgaccaggctgccccgcctcctggttctgcccaagttctccctggagactgaagtcgacctcaggaagcccctagagaacctgggaatgaccgacatgttcagacagtttcaggctgacttcacgagtctttcataccaagagcctctccacgtcgcgcaggcgctgcagaaagtgaagatcgaggtgaacgagagtggcacggtggcctcctcatccacagctgtcatagtctcagcccgcatggcccccgaggagatcatcatggacagacccttcctctttgtggtccggcacaaccccacaggaacagtccttttcatgggccaagtgatggaaccctgaccctggggaaagacgccttcatctgggacaaaactggagatgcatcgggaaagaagaaactccgaagaaaagaattttagtgttaatgactctttctgaaggaagagaagacatttgccttttgttaaaagatggtaaaccagatctgtctccaagaccttggcctctccttggaggacctttaggtcaaactccctagtctccacctgagaccctgggagagaagtttgaagcacaactcccttaaggtctccaaaccagacggtgacgcctgcgggaccatctggggcacctgcttccacccgtctctctgcccactcgggtctgcagacctggttcccactgaggccctttgcaggatggaactacggggcttacaggagcttttgtgtgcctggtagaaactatttctgttccagtcacattgccatcactcttgtactgcctgccaccgcggaggaggctggtgacaggccaaaggccagtggaagaaacaccctttcatctcagagtccactgtggcactggccacccctccccagtacaggggtgctgcaggtggcagagtgaatgtcccccatcatgtggcccaactctcctggcctggccatctccctccccagaaacagtgtgcatgggttattttggagtgtaggtgacttgtttactcattgaagcagatttctgcttccttttatttttataggaatagaggaagaaatgtcagatgcgtgcccagctcttcaccccccaatctcttggtggggaggggtgtacctaaatatttatcatatccttgcccttgagtgcttgttagagagaaagagaactactaaggaaaataatattatttaaactcgctcctagtgtttctttgtggtctgtgtcaccgtatctcaggaagtccagccacttgactggcacacacccctccggacatccagcgtgacggagcccacactgccaccttgtggccgcctgagaccctcgcgccccccgcgccccccgcgcccctctttttccccttgatggaaattgaccatacaatttcatcctccttcaggggatcaaaaggacggagtggggggacagagactcagatgaggacagagtggtttccaatgtgttcaatagatttaggagcagaaatgcaaggggctgcatgacctaccaggacagaactttccccaattacagggtgactcacagccgcattggtgactcacttcaatgtgtcatttccggctgctgtgtgtgagcagtggacacgtgaggggggggtgggtgagagagacaggcagctcggattcaactaccttagataatatttctgaaaacctaccagccagagggtagggcacaaagatggatgtaatgcactttgggaggccaaggcgggaggattgcttgagcccaggagttcaagaccagcctgggcaacataccaagacccccgtctctttaaaaatatatatattttaaatatacttaaatatatatttctaatatctttaaatatatatatatattttaaagaccaatttatgggagaattgcacacagatgtgaaatgaatgtaatctaatagaagcctaatcagcccaccatgttctccactgaaaaatcctctttctttgggggttttctttctttcttttttgattttgcactggacggtgacgtcagccatgtacaggatccacaggggtggtgtcaaatgctattgaaattgtgttgaattgtatgctttttcacttttgataaataaacatgtaaaaatgtttcaaaaaaataataaaataaataaatacgaaaaaaaaaa

SEQ ID NO: 76275 - DNA, 1238 bp, Homo sapiens
ttttttttttttatttcaaaatgataaaaatttattgtctttctggcctatggactcagctgtagttgactgaagtcgctaaacaggacggatttaagtagaggtgatatgtccagtcaccggcatagagacgtcctctgcgtcaccatccacacacagggcttctggtagacatcaggcaaagccctccatgttaatattcatctgaatatggataattagggtggctagcaaaactatcactgttaaaatagtggagatttctgtctaggccatctatggctttcatgtcctctgcagtcaactggaactcaaaaacctgcacgttctgtctgatgcgctgctcattgtagctcttggccaggaccacaaccccacgctgcagctggtagcgcagggcaatcagggctggggttcgcttgtgcttttttgccaaggcacaaaggactgggtcctccaagagcaccggggagttcgggtccacccatcgtttgtctcgttgagatcccagagcactataggcaaccagaacaatatctttcgacttgcagaaatctagcaatttactccggttgaaatacggatgacattctacctggttgcagacaggcttgtacttgagtcctggcttgttgaggatcatctccagctgcctgcggttgaagtttgacaccccaatggacttggccaatcctgcatccttacacttctccatggcctcccaggtggtacagagatccactatgtcaaatattacttttccattttcatctgttggtgaaagttcctcacctggctttagagacattggagaatgaataagatagaggtcaacatagtccaattgagcttttttcagtgagttttccaaggctggtcggaccaactctggtcgatgaaaagtggaccaaagctttgaagtgtagaatatgtcttctctcttcacactgccatctgcaatcttgcttcggatggccagtccaacctgctcctcattattgtataaatgagcagaatctatatggcggaacccagcttctattgctaattttgtgacctccaaagctttacttctcggaacctctggaggtgcataggtgccaaatcccaatacaggcatgaagtggccatcatttagctttacacactgctgtttggaatccattccctgtcacttgtctgactagcaaatgtttgctgctgcttctcctcagcccacgcgtccgcccacgcgtccg

SEQ ID NO: 76276 - DNA, 340 bp, Homo sapiens; identical to SEQ ID NO: 58804

SEQ ID NO: 76277 - DNA, 3100 bp, Homo sapiens; identical to SEQ ID NO: 58805

SEQ ID NO: 76278 - DNA, 1843 bp, Homo sapiens; identical to SEQ ID NO: 58806

SEQ ID NO: 76279 - DNA, 848 bp, Homo sapiens; identical to SEQ ID NO: 58807

SEQ ID NO: 76280 - DNA, 1678 bp, Homo sapiens
ttttttttttttagacccgagttttataagaaatttattttttcacagatacagaacataaatccaagaaaaattattattatttttcacaattatgactaaatcatgttatttctagttatttacaagtactacaatgttctatgcatttcttcatcctagacattaataaaacacatccctttggtcttagatacttctctttggtctgtgttttctcctttctgaattttaatcttctgtgatgtgaggaaatttacgtgaacctttcacatatctatttttttccttgtgcacagttgataatttcctcccttagattccctatttgctcaaaaggcaaatcctctaagaagtcatctgcagcccatagcattcgtctcagagcagaaagaattagaacatcctttacagggtccagctcccactcagaggaataattgctaaccaccgagatgtcagaaagagcaaatccaagttttctttggacttcctctagcttggacctcacaggctcacatctctctatttctataaggtcaccttttgtaatcaaatccatgctatccacatgagtgagcaaagccacatgtaccacaccagcgtttaccaactcccttcgaattcttttgatctttactatcatctgagaggagaagtattgaatagagctggcatcaaatacaaatgccacacaatgaattctgtccttcagcgatggggaatcaatgtagtcatgatgatttaatttgattgattccatgggattaaactggtatctatcacgaatgttaccgttcaagatatagaatatgtcatccctgcacaggccgccttctttctcactcagccccagtgagtcacacagaataaacggcaggtatttgccatctttcccgtctctaatagagtatgtcctatacttctcagatatcccagttgtattagtgcccaccaaagcctgatgcgttacatgcccttggaaaacagacctcactgagttgaaaaagctggacttcccagctccaattggacccagcagcagaattcgtatttgttgaaccagggatccatatggttcataagttctcaaggcagacagtaagctcttcctgagctcaatgaccccttttatctttctttcatccagtgaatcttcgcatcgaaaaacttcataatcctgaatagagatagtacaattttgagcaagtccaagattttccattgtctttaagtccataatcacttttctatttcttccatctatctggaaattagttggggagttatattttgtaacatcacaacaaaacagtgtttctggtgtacatagtcctagtttccattctgaaattttagtatcttgaagtgcaaaaaggatgatggaagcatactttccttcctggtaactctcttctgcatatgctccaataatatgatcttcactataaatcactgttagagtaggcccttgattacaacatctgtcaagcaaaactccattacggaatccatggacactacccttatagagaaggctaagccgcttccctccaaaatgattttgcaggatcttttcgtgcaaccatgtcaaacgagttgtcactgccatacttcttgatctgttgtactgtctgtagtatcagctagagctgagggtagctgctctgtctggata

SEQ ID NO: 76281 - DNA, 476 bp, Homo sapiens
tctttttttcttgctgcagcaacgcgagtgggagcaccaggatctcgggctcggaacgagactgcacggattgttttaagaaaatggcagacaaaccagacatgggggaaatcgccagcttcgataaggccaagctgaagaaaacggagacgcaggagaagaacaccctgccgaccaaagagaccattgagcaggagaagcggagtgaaatttcctaagatcctggaggatttcctacccccgtcctcttcgagaccccagtcgtgatgtggaggaagagccacctgcaagatggacacgagccacaagctgcactgtgaacctgggcactccgcgccgatgccaccggcctgtgggtctctgaagggaccccccccccaatcggactgccaaattctccggtttgccccgggatattatagaaaattatttgtatgaataatgaaaataaaacacacctcgtggcaaaaaaaaaa

SEQ ID NO: 76282 - DNA, 3582 bp, Homo sapiens
  misc_feature (1)...(3582): n = a,t,c or g
ttttttttttttgcatatacagagattttatttccagatatgactgtgagagaatgatgaggggagcagttacttagtctatttgagctgttataataaaataccactgactaggaaatgtataaagaggactttattttcccagagttctggaggctgggaagttcaacatcaaaacatcagtaggtgcagttgtctgttgagggctcatgtctgtttccaagatgatgccttcatgctgcatcttttggaagggaggagcattgtgtcctcacagagcagaaaatagaagggccacaggacaaactccctctatcaagccttttcataagggcacctgatcccattcgcaaagctctatcttcgtgacttgacttaatcacttcccaaaggtcccacctcctaatacttacactgtttcaacagtaaacagtttatgtagagtttcaacataaattaaggaggggacaaaacatccaaaccaaggaaggctgggagggaagccagagggaaagtgcaagaggaggtttggtggaggtgtcctagattgtttgcagtccaaggaggttggggagagtgtaacaggcctgccttggtatccctgctctgcagtcactggctaagagcagtccttaggaagcacagcctggcacaaatacaacaagaatatgtgctcagtaggaaagagaccacatttccccaatagcccaggtaatgccctcccctcaactggcatctctgttccctaaacattgacctcttttctctgaatctcttggggacacatgggttgaattcaggttctctgtagccctctggattctgtctgcctctgttatatcttcacgaacaagttatgcagcctcaactaaagcttgtaacaaagcaaagttactctcctgagtgtgtcctctgatggatggtgagatataacttcaagatgaagcctcacccacactccctgtacaaaaacgcttctcacgtaagtgtctctttaagtgcttactgtagtatgacttattgctaaactttcgtccacactcttggcattcataaggcctctctcctgtgtgtattctttcatgcacagtgaggtctgacttactggtatagcctcgcttacactcctggcaaacaaaaggcttctcctttgagtgtatccgccagtggtgtctggtgagacttctcttccagctgaagccttgcccacacacattacacacgaagggcttctcccctgagtgtgtcctctggtgtgtgaggagatttcccttccagttgaagcctcgcccacactccttgcatacaaaaggctgcttgccagaatgtgcaagctggtgtttcacaagatttgacttccagataaatccttgcccacattcactacagatgaaaggcttctcccctgagtgtgtcttctggtggaagaggagagttgattttaggatgaagcctcgcccgcaatccttgcaattaaatggcctttcccccgagtgtgtccactgatgtctaagaagatttgccttcaaactaaaacttttctcacactgcttgcacatgaagggcttctctcctgagtgtgtcctctgatgtatggtgagatttggcttcaaggtaaagcctcgcccacaatccctgcagaaaaaacgtttctcacccaagtgtgccctcaggtgcttgttataggaggacttatcccgaaaccttcgcccacactcccgacatccataaggcttctcctctgagtgtgtcctctggtgtaaagtgaaggttgacttttggataaagcctcgtccacagtccttgcacacaaaaggcttctcctctgagtgtgtgatctgatgtttcacaagggttgacttctgaataaatccttgcccacattctctacaaacaaaaggtttctcccctgagtgtgttctctggtggtagacaagagttgacttttggctaaagcttcgctcacaatccttgcacacaaaaggcttctcccctgagtgtgttctctggtgtctgaggagacttcctttcacgctaaaactttgcttacactgcctgcacgcaaagggcttctcccctgagtgtgtcctctggtgtgtgataaggtgtgacttattgctaaagcctcggccacactcctggcatctgtaaggcttctctcctgagtgtattctcttgtgcacaacgaagtatgacttattagtatagcctcgcccacactccttgcacacaaaaggcttctcccctgaatgcgccttcaagtgcttgttgtatgaggacttatcgttaaaccttcgcccacactcctggcattcataaggcttctctcctgtgtgtgttctctcatgcacagtgaggtatgacttactggtatagcctcgtccacacaccttgcacagaaaaggcttctctcctgagtgtgtcctctggtgtctgaggaggttggccttgaggctgaagcctcgcccacacacactgcacacataggacttctctcctgtgtgtgtgttctggtgcaagagcaatgctgactcatctctaaagccctggtgacactccctgcatgtaaaaagtttctgcctggaatgtgcttttttgtgtatgattaccatcatcttccggctgaagtcttgcccacgctctgcacacttgaatgctccccatcttgaattttctattcctttcaatactttgtctatttctgtaggattttccctctggccttgactagactctatttccactacactgttcctcctccttgagcttactgcatgtcttaggggtgggctggaaaatgccatgggcttagtgcttttttctttctcttgaccttcagctgtgtcactctggaagctttgatcagaaaattgtagttgctgttgcctctgatgtgcaagtccaagattcttgggccgcaggacatgttctgcatatattcctgcacaggggcctggccggcgtcttctctcttctccccagggcacttccccttgctctagccgcctgatgagttctggtttagaatggagaattcctagtgagaccaggtggctgtagttctccagtgtcacctccctgtacagggccctctgagcagggctcagcagcctccattccttctgggtgaaatccacagtgacatccccaaatgccaagaaagcctgtctcctggctccctgaggtcccatgactgtcttcctgctctccacggagaagggaagcttgcagatggccaatctgtggcaggagagaagtcagagggtggctgggtgcagctgccctccccatgtgtgacagttggtgtgattccaataccagctggggatctggggagggcgcacctgcacaattcccctgtggggatctggccaaaaggtttagggagccaggctccctgcaaatccaggacaagctcatctgggagtccagtgtgccccaggagctgggtgacgtttgcagcaaacatcaaagaggggctaaaaggatgaggtacaccagcagatgaggtcttgccggacgcgtaggtcgatacggnactttcgcacggtcgtactgatctcaggattttattaagtctcg

SEQ ID NO: 76283 - DNA, 415 bp, Homo sapiens; identical to SEQ ID NO: 58810

SEQ ID NO: 76284 - DNA, 3029 bp, Homo sapiens; identical to SEQ ID NO: 60635
  misc_feature (1)...(3029): n = a,t,c or g

SEQ ID NO: 76285 - DNA, 4377 bp, Homo sapiens; identical to SEQ ID NO: 58811

SEQ ID NO: 76286 - DNA, 1169 bp, Homo sapiens; identical to SEQ ID NO: 58815

SEQ ID NO: 76287 - DNA, 2098 bp, Homo sapiens; identical to SEQ ID NO: 58816

SEQ ID NO: 76288 - DNA, 2951 bp, Homo sapiens; identical to SEQ ID NO: 58817

SEQ ID NO: 76289 - DNA, 1623 bp, Homo sapiens; identical to SEQ ID NO: 58818

SEQ ID NO: 76290 - DNA, 2023 bp, Homo sapiens; identical to SEQ ID NO: 58819

SEQ ID NO: 76291 - DNA, 2226 bp, Homo sapiens; identical to SEQ ID NO: 58820
  misc_feature (1)...(2226): n = a,t,c or g

SEQ ID NO: 76292 - DNA, 1425 bp, Homo sapiens
cgcagcccgatattcctgtggacatttccaggacggtcagcttggtccccccgccgaagaccacgaagttgctcccgctttcatgttctgccccacagtggaagtcactctcatcgtcttcttggatgttgttgatgatgagaaaccgattcaggcctgaggccaacactgagaagcgattagggatgccatcccccctggagcccacaatgccaccggggcccactcgcatcacaaaccgggggcccctccctggtctctgctggtaccggtcgacgatttcgttgtcctggctcttgccctcatcctggttctggaatcctcagttcaaggttatcctacgcagagagccaggtaccaatgggtgcgctgcaatccagacagtaattctgcaaactgccttgaagaaaaaggaccaatgttcgaactacttccaggtgaatccaacaagatcccccgtctgaggactgacctttttccaaagacgagaatccaggacttgaatcgtatcttcccactttctgaggactactctggatcaggcttcggctccggctccggctctggatcaggatctgggagtggcttcctaacggaaatggaacaggattaccaactagtagacgaaagtgatgctttccatgacaaccttaggtctcttgacaggaatctgccctcagacagccaggacttgggtcaacatggattagaagaggattttatgttataaaagaggattttcccaccttgacaccaggcaatgtagttagcatattttatgtaccatggttatatgattaatcttgggacaaagaattttatagaaatttttaaacatctgaaaaagaagcttaagttttatcatccttttttttctcatgaattcttaaaggattatgctttaatgctgttatctatcttattgttcttgaaaatacctgcattttttggtatcatgttcaaccaacatcattatgaaattaattagattcccatggccataaaatggctttaaagaatatatatatatttttaaagtagcttgagaagcaaattggcaggtaatatttcatacctaaattaagactctgacttggattgtgaattataatgatatgccccttttcttataaaaacaaaaaaaaaaataatgaaacacagtgaatttgtagagtgggggtatttgacatattttacagggtggagtgtactatatactattacctttgaatgtgtttgcagagctagtggatgtgtttgtctacaagtatgattgctgttacataacaccccaaattaactcccaaattaaaacacagttgtgctgtcaatacctcatactgctttacctttttttcctggatatctgtgtattttcaaatgttactatatattaaagcagaaatataaccaagaaaaaaaaaa

SEQ ID NO: 76293 - DNA, 2448 bp, Homo sapiens; identical to SEQ ID NO: 58822

SEQ ID NO: 76294 - DNA, 3915 bp, Homo sapiens
cttttttttttttttcaaccctgcttccttcctgctaggaggtgccatgtcatttattcaaagaaaacaaaacgaaaccaaacaaaacagggcaaacacatttcttaataagtgcagtttgttaaaatcatgttaaaacatatgagtcaaggggaagtaaaaataaagggtatcactgtaggaaaagcttttgggtctggcacctgggagacccactggagaggaggcagtgggagaaacttcaagttctgaagggaaggagccccccaacctccccttcttccctctcacccactgaatcccaccagaaactaccaagacgcccggaataaaaggtttcaagttcaatagtcactctctccaaatacaaaaagcagttacaattcaactgaacacagaagcttgtgtgcaaagttatggggaactggggcatcgtataaaaagttgggttaaagatgattctgtggtttggttttgttgtgttttgttttgtggctcttcctcagtcacctgaactcaggaaagaaatgcttatcttgatgaaatatcaacagcccacccacagtaaaaagacaaattctaaaaattaaaaaaaagcgcataattaccaaaaaaaagtcactgcttcctccccctccccattttgctttttaaacttttttttttttaagttttgattttttttttaatcctgaaaagtagacagtaaaacagctcctgggagaatttacaaccaactgcatgagggtctgggaagctgaggggctggagcagggttgggagagtgaacaggaggggattctcccctcagtcactgtagcctcactgtatgatcaagggaggtggggattatttagtcaaaaaggaagaaggtaggaagaacaggaggtggaaggctggggaggtggggacaaacagaaaataaaaggtcattgttgcctgtttgaatccagaaaaaaatgcctggccctatggaggggaaggaagcccctcagaggggaggcagtgggctggagggaggcagccctgggatgaccccatccccagcaccacgggatctggcgggggcagaggaggggccgaggcaggcgctggtggaggaagccggcaggggcctccgggagcctctgggtcacactggctactgtgtacttgtgccaccctgtgtgttcccggagtagctcccgtagtcgtagttcccgtagtatggcggccactggccctggttctgatagtactggttccactgctgggcatactgctgatactggttatagctgggctgagggtaggtctgtgcggtggggggtggcggtggggtatagggggccgggttgtaaccgccgtagctcccatagttgtaggcaggtggtggtggaggtggaggcggtggggctgtgtagccctggctgtaacctccctggttgtagggtggctggctgtaactcggctggaaagtggagggaaaaaagccaaagctctgtggagggctgtagctgctgacggtgggggtgctggtattggcgcttgagccagggatgttgctgttcttattgtaggtgctggcccctggggggttccgagcagggctgtagctgggtggtggcggtggctgctggggtggtggctgtggtggcggaggctgctgtggtggcggctgttgctggggagcccggttgtagctgcctctgttgttggagttgttgttatcccggttgttgttaccccagcggttctggctatagccaccacctccgctgcggttgaaacctcctcggtagttgcctcctccaccgctgcctccccctcggttctggaagccgccacggttgcctccagggggtcctcggttttcatagcgctggaagccaccaccacccccgcggccccggaagccaccaccacctcggttgtcaaagcgcttttcagggggtggcccagccttgcggccttcctcgttgtactgcctcactagcttgtccgcttcctcccgctgcagctcaatgaacagaacctcatccaggaagtccccaacatctggcaacgtgaagttggctttcatttctaagaccgcatgatctgggacatccttcccttcctcgtcggttcgctttattgttcggtcttttaggtcctcgtcagtgggacaaattacaatagctttgcgctggaagccttcaaatggtctcatttttcgtctctgggctgacccataaacatttgtctgatctaggatatagttgcgtttcttgcgggcagcaatctggatgaggcggttgaggcactgggtggcctgctggatcaggacatcccagcggccagcatagttccgctgccggcgtaggcccatcacccgcatcttatccatgatggcattggtacccaggatgttgtacttcttggaagggttggaggctgcatgtttgatggcccatgtggtcttgccagcagcaggcaggcccaccatcatcagaatctcacattctgccttgctctttggtccaacggtgccccggatacgctcactaaggggaaggtgctggatgaaggtaaaccccgggaggacagaacagtagggctctgctctctgtccgaagttgaactccactgcgcaattcttcaccaggacatgaggatagagggcctgaccccccaaggcttccttctggattcggaaagcaatgcccatccactttccattcttggtaaaagacagttccacgtcatttccacattcaaaatccgcaaagcagccaatcacatcgttctctgcaaacttgtctccgtagttttcaaaccggctattggtggacttcttcccagtgcctccatagccataggagaaaggctcttcgcctagctgggtgctgcaggagtccagggaccagccgatacggaccacgtgggggtcaggctctgtagacggaaggtgcttcacggagatttcctcattgatcttcatctcgaagcatacacggcccctcctgaccccatagctggcacgggctcctgaccacaggtatgcaaagccctcaattgtgagcggatagccactactccgatctcgggccaccttgaagtggaggtcgcagttataggtgtcaatagcaacaagggtatcatcaaagtcatcttcatcctcttcagcaggaggctgaggagagcggcccctcctatcctctcggtgctcaaagtacccccgtccccggttttcttcataaggcctctttcgactctggaattgctgcctgtctggcttgagttgagaagcttcaggcgggaggaagctggtgggtgctccttgcttcatctctgtcttcatttctggacgataggcctgctgctgctccatttccagtggtctcctctcgtagcctgactcgttttcttgtttgatgacttgggtatcgtagaattggttctgcctggtaatattgtccatggcataatgtccgtccggccccgagtagccgccgggctccgcgtgcggctgcagcccgggcggcggtggctgcgcggtcccctccagctcggagcccccctcggtctcgacctcctcgttgatgtgcccgggtcgccccggttcgtcgtcggcgtcgagctcccgctcgtcgtcaggctcctcggcctccaacgccgcctgcagccgctcagcaagctcggtcttgaggcctcgagtgtccaggccgcggcgctgcagctcctcgcgaagttcgttcaccttcagacggcgcacatccatggcccgggcccccggggtggcccccgagcccggcccggcctcccagggctctgtcccccttaaacctttcctgtcaggaggcgaagggggaaagggggggggcccactccaatggcggcagcggctcaaaatggccgccgccaccgcctcccccctcactcgtgcctcgtccg

SEQ ID NO: 76295 - DNA, 1730 bp, Homo sapiens
ttttttttttttcaaaaggaaatcccaatctttttattacggaaagccatcaactgggtgtggggagtatgtcagagggttagtgaaagtccaggggatttctcctccaagtcctaccacacaaaggaaagtctcaagcctctattcaccccttctcaatccccacaaaatagggggttgttcaatattgtcttcaatgataaaaactttgtggttaaaggtttctccttaggactagcgacaaagttaggcttatacttttaatgaagaccataaacgaagccagaagggcttaaggaagcaagagtccttgggggaaaattcttagcgttctataccccagcatcttaccttagggttaaatctaggtctaaccaagctgtgcaggtcaactaagaaggaatgatgaaaccacagagtttcatggagaaaccatggagatgtctgaatagctgataagcagttaacacactgacccaagcttggagggaaaccatttccccctccgtcctatgagatctctttcttgctccagtgaaacagttggccacagcatggcaggccttcctgtagggtgcctgacaattccctagatgcctctttaaaatcagaagctgcatgctgccccacccagtcacagccaaagggaaaacataaataaaaggctgcagcctcaggcttgtggttatggaaagagcctggaattgacaggagaggaagcactgccaaagtgaggatcttatttatccttcttgttttccccatctgacactgtggtgggggttgaagccacaggctgctcctcagggatattgtctccagcctttgatagtttcttggcccgctggtatagctcatttaagttaaattctcggatcacattctcctcagagaaggtccatgagacagcccgtcctttcttgtcaatctgtggccgccgcattgcctccttgccaccttggaacaggatcagggtagggagttgcttggtgaggggtgatgtgctcactttgtaccgcgtactaacatcagtatagcgtccaacatccaccttcccaaaatttagccctgtacagttgtatttaagggagaggtcagcatagataggggcaaatgattggcagtcattagaccaattggcaaagaactccacaatccaagtgaccctcttgtcccgttctagttcctcatcaatggttttatcattgaagtacttgatatactcagggcccatatatagggggggtttgcacgtcatcaggaacactatgcagagtgtgatgtaaagtaggcccatgcgaatatccaagcggaagaaaagaattgtgttggccactttactaaacatgaaaatgttgcctatatgttgctccacagtgatggatctgcggttcttcatcatcacaatggcactgagaaacatcaggatctccacttctctccagtcaaagtcacacgggttaccgtcttcgcgttgggtgggcagaccgtggcagagcggcggcagtttcctcacgagtaggaaggcagcagagagcagggccgacagaaggtagtaaggttgggcgagccatcgtgaaagtcgcggcaccgaatacacgagagcaattagaggtgccaagaccgccatcttttcggccgtaacggccactgctcgccggcgtcgtaggtctcgccccgcctcccccaccataacgactgctattgggctatatcgcaaacgtaccccc

SEQ ID NO: 76296 - DNA, 2051 bp, Homo sapiens; identical to SEQ ID NO: 58825

SEQ ID NO: 76297 - DNA, 1603 bp, Homo sapiens; identical to SEQ ID NO: 58826

SEQ ID NO: 76298 - DNA, 1967 bp, Homo sapiens; identical to SEQ ID NO: 58827

SEQ ID NO: 76299 - DNA, 3407 bp, Homo sapiens
tttcgtcccaagataggcttctgaggtcaagtcagcgactgaagacgggagcgccagaatctgcggactcaagagtctagaatcaagtggaaaaaccggaaaaaaggccaggaacctgaatacgacctaatagctgtttccgagggggcaacttccacggagaaccttctgccctggtaacggccaaagaggaggagatggcgccagtcagggagcggccgtggcccagacagtgaggaagcgcgaaggcggagcaaccgaggaatcctccggagaagaatcagagccgtcgctaccgccactaccgccaccaccatggaaggagcaaagccgacattgcagctcgtgtaccaggcagtgcaggcgctttaccacgacccagatcccagcggaaaggagcgcgcctctttttggcttggggagctgcagcgttcggttcatgcatgggagatctcagaccagttgttacagatccggcaggatgtggagtcatgctattttgctgcacagaccatgaaaatgaagattcagacctcattttatgagctccccacagactctcatgcctctttacgggactcattgctaacccatatccagaacttgaaagacttgtcacctgttattgtaacgcagctggctttagcaatagcagatcttgccctacagatgccttcctggaagggatgtgtgcaaacactggtggaaaaatacagcaatgatgtgacttctttgccttttttgctggagatccttacagtgttacctgaagaagtacatagtcgttccttacgaattggagctaatcggcgcacagaaattatagaagatttggccttctactctagtacagtagtatctctattgatgacctgtgtagaaaaagcaggaacagatgagaaaatgcttatgaaggtttttcgctgtttgggaagttggtttaacttgggagttttggacagtaacttcatggctaacaataaattactagcactcctttttgaggttttgcaacaggataagacctcgtctaacctacatgaagctgcttcggactgtgtatgctcagctctctatgccattgagaatgtggagactaacttgccattagccatgcaactttttcagggagtgctgacattggagactgcctatcatatggccgtggcacgtgaagatttagacaaagttctgaattactgccgtattttcactgaactatgtgaaacttttcttgaaaaaattgtttgtactccaggccaaggtcttggggaccttcgaactctggagctgctgcttatctgtgcaggccatcctcaatatgaggtagtagaaatttcatttaacttttggtaccgactgggggaacatttgtacaaaactaacgatgaagttattcatggcatcttcaaagcttacattcagaggctgcttcacgccttggctcgacactgccagctggaaccagaccatgagggggttcctgaggagactgatgactttggggagtttcgcatgagggtatcagacctggtaaaggacttgattttcttgatagggtctatggagtgttttgctcagttatattctactctgaaagaaggcaacccaccctgggaggtgacagaagcggttctctttatcatggctgctatagcaaagagtgttgatccggaaaacaatccaacacttgtggaagtcctagaaggagttgtccgcctcccggagaccgtacatacggctgtgcgatacaccagcattgaattggttggagagatgagtgaagtcgttgatcgaaatcctcagttccttgaccctgtgttgggctatttgatgaaaggcctgtgtgaaaagcccctggcttctgctgcagccaaagccattcataacatttgctctgtctgccgagatcacatggctcagcactttaatggactcctggagattgcccgctccctcgattccttcctgttgtctccagaagctgctgtgggcttgctaaaagggacagcacttgtcctagcccgattacctttggataagattaccgaatgtcttagtgaactatgttctgttcaggttatggcattgaaaaagctgttgtctcaagagcccagcaatggcatatcctcagatcccacagtgttcttagatcgccttgcagtgatatttaggcataccaatcccattgtggaaaatggacagactcatccgtgtcagaaagtcatacaggaaatatggccagttttatccgagactctaaataagcaccgagctgataatcggattgtagagcgttgttgcaggtgcctgcgctttgctgttcgctgtgtaggcaaaggatctgcagcactgctgcagccactagtcacacagatggtgaatgtgtaccacgtacatcagcattcctgcttcctgtaccttggcagtatccttgtggatgaatatggcatggaagaaggctgtcggcagggactgctagacatgctccaggcactgtgcatccccacctttcagctcctagaacagcagaatggtctccagaatcaccctgacactgtagatgacctgttccggctagccaccaggtttattcagcgtagccctgtcaccttgctgcggagccaagtggtcatccctatcttacagtgggccattgcctctactaccctggaccaccgggatgccaattgtagtgtcatgaggtttctacgagacctcattcatacaggggtagccaatgatcatgaagaagactttgaattacggaaagaactgattggacaggtgatgaaccagcttggacagcagcttgtcagccagctgctgcacacctgctgcttttgcctccccccctataccctaccagatgtggctgaagtgctctgggagatcatgcaggttgacagaccgactttttgtcgatggttagaaaattccttaaaaggtttgccaaaggaaacaaccgtgggagccgtcacagtgacacacaaacaacttacagacttccacaagcaagtcactagtgctgaggaatgtaaacaagtttgctgggccttgcgagacttcaccaggttgtttcgatagctcacactcctgcactgtgcctgtcacccaggaatgtcttttttaattagaagacaggaagaaaacaaaaaccagactgtgtcccacaatcagaaacctccgttgtggcagaggggccttcaccgccaccagggtgtcccgccagacagggagagactccagccttctgaggccatcctgaggagttcctgtttgggggtgtgagggaaaatcagcgcggattttaaaaagatggctgtggcctgcccggcgtggtgggaggggagctggtttcctggtgaactttctaaaaggaaaaataattttaagtaaaaaaaaaa

SEQ ID NO: 76300 - DNA, 2759 bp, Homo sapiens; identical to SEQ ID NO: 60648

SEQ ID NO: 76301 - DNA, 2828 bp, Homo sapiens; identical to SEQ ID NO: 58829

SEQ ID NO: 76302 - DNA, 869 bp, Homo sapiens; identical to SEQ ID NO: 58830

SEQ ID NO: 76303 - DNA, 3677 bp, Homo sapiens
ttcctaattttcagatcaagcttcacagcaaatattaaagattatttaaatttgaagtcgatgttttgggaaatcagatataaaagtgttggtactgtgtttgacccccacgttttttggtatacttatttggtagaaggttctttacattctgatctagcaaaataatgaacacccacttgctggtagacacagctgagcgcccggacttcaagtggaagtttatctgagcccagatctcagtagccagaccccgtccctgccccctgaagggagagcatttgggggtgagtcctttcaaagaagagccaatgcattagtaatttgttcttcaggcctgacagaagcttagcttccaaatacaaacaaacagcacttaaaataattttagcaaggcacgaagtaccaattactacccacctccatctgataattgtcagcatcgattcaactcggtgcacggctcttgcttctgcttcccagcaaagtctgaaatgtattccaaggatttcagaaccaaatgaaaatgcagctgctgtgatctttagtaacctcattctctgttgggagagctcacttactcttcaacttaatggcagactgtgatcgctaactgcatctggcacaaaaacatgatcattatttttagcttcttttgcttaattggaaacttgcttcacaaaaaacacaaaaaggctacgctgggtctcagctgatgagctcgtggcggccctgtgcttgatgagggcggtgaggcagcccaagctccttgtgactgccctggcttgtgcaatggggaagggaccaggcagcgcgctcatcctcaaaacaaacaaaaacagtggagacagcacccccggccaaccaggaagcttcagggtgacctccaggggagtcagccaccaacagtacacccacatagagacacagcaggaaagggattgccaaaatctgcatttgcagtctctggtccttaggaagttttgaaaatcagcaccaggagtgagggcctcacttctagaagtagtaaggcaatcagatgaaaaaatggcaagtgctaatttaataaagcaaggcagagaactgactgacatttatatcaatctcttaaaaggatcacaaagaaatgctggtagtctactggcagagcctggtcgcctatgtgtacattgtcttcattcaaagaaagggcaaactaatatttagacaaatgctcagttttattgatttaattttgacactagggaatctcacagcagaagtacaaatcatatgtacaagtatttatatcaatgaaaatttccattggtgattttttggcagaatattggtcttgactctgtggaataaatgacgacgtaaacgtagctgcacaggggtgttcctgtataatgcttgaatcaattgtgtgtgaaagcatcatgcaaatggctaattaaattgggtgatgactgaaaggttataaatccttcattccagctccacgagcagatccccttctccaactgtgtctccagcttgacagtgcacagatttcaccgtgccagttttcccagctgtcatactattctgcattttcatggcttcaatcacacaaatttcttgaccttctgctaccgcgtctccaggcttgacagagacggccaccaccactccgggcatcggggaacgcagaacactgcttgtgtcctcagtcactttttccagcataaatttgttcaattctgcggcaagtctggttaagatattcaccttgtacactgtaccaagaaactgaatgctcatgtttccacctgcttctcgagaaagacactggacagtcctctgagtgccatcaacgctgacagacaataagggcgaagccaggttccacgtgctggtcacatttagtttcgacccatcaacttccaccgagaacactgacccattgtttgatgctactacggtatgaactttatcatgcaattttactgagagctcccagttggctatgtctggtttaataacaggcattcttgaattttcttgaaaatgttgtgctcttaactggaatgccacaaacaatgatgatgctattgccaataactggttcttctcactcttggttagcatgtgtcctttgaagccatcaggatacacatcggagagaaatttagtgctgatgtctccttttacaaagcgtgagttgattatcacctctcgaagtaatgcaatattatgtgtaacacctcgaataacatagttatccagtgcatctgccattctcttcagtgcctcagttctatcagagccatatgtgattagttttgaaatcataggatcataataaatgctaatatcacttcctggttggatgccactgtccactcggacaccaggtagatgtaacggttcttggtactgagacaatctcccaatagatggtaaaccaaaagacttgtaggggtcctcagcataaacccgacattcaactgcccagccgttgatgcgaatatcagcttgtttgtgcctgagagggtagcccttagcaacacggatcatttcctggactaggtccaggccagtaatgcattctgtgacaggatgctcaacctggagtcttgtattcatttccaagaaataaaaattcttcttagagtccacaaggaactccacggtcccagcagaggaatattttactgctctggcaagagctacagcttgttctcccatcgctcttcgagtctccgcatccaaaaaaatgcttggtgcttcctccaccaccttctgatttcttctctgaattgagcactctctttcattaagccataaagcattcccatgtttatcacctagaacctggatttctatatgacgaggattatcaataaatttttctattagtagtctatcatcgccaaaactagaagcagcttcttgagatgacaatctaaaaccatccctggtctcttcatcatcccaagcaatgcgcatgcctttcccaccaccacctgctgaggccttgatcatgacagggtagccaatttcccttgcaattctgacagcttcttctgcatccttgactactccatcaaagccagggattgtattaacctctgctttcttagctaataatttgctttcaatcttgtcgcccatggcttgaatagcatgtgtgtcaggtccaatgaaaacgacatcttctgctgccaaacatctggcaaattctttgttttctgaaaggaatccataacctggatgtacagcttgggccctggttttcttaatggcttccatgatggcatccatgttgaggtagcttttactggtgggagctgggccaacacagacagcctcatccgccattttcacatgaacagaactagcatcaacatcactgtggatggcaactgtcttaatgcccatcttcttgcaagttctaataacccgacatgcaatttctcctctattagcaacaagaattttatcaaaagttttttcattaggatcatatcccactgaaccaagattacgggacaccattaagcactgtcttgaatagtacagaacatgcttcagggtccgcagcgccgcgctcagcatcagctgctgcggcggccaccgcccacgccgtccggcagcgaccagcggtgctgtcccgacccagaaccccgccattgttgtccccgcaacgaaag

SEQ ID NO: 76304 - DNA, 4079 bp, Homo sapiens; identical to SEQ ID NO: 58832

SEQ ID NO: 76305 - DNA, 1839 bp, Homo sapiens; identical to SEQ ID NO: 58833

SEQ ID NO: 76306 - DNA, 573 bp, Homo sapiens; identical to SEQ ID NO: 58834

SEQ ID NO: 76307 - DNA, 6411 bp, Homo sapiens
ttgcgaagatgatgatatggccaagccaaggaagggaacctacagtgaagagtacaggtgtctctgatctacatatccaagaactgcaagaaaaatgtccagatgggcatcagatacctagtccagtccttggcaaaagtctgggctttggaaaccaagggcaagaggcgatgacaactaatctatagtaattaaaactcccacccccctattaagactccaccctcccacatcccccaagcgtgattttgcacaacaagttaaataaaagtaaactgttttattaaaagatacagcaaaggtacagatacagagatacatacaaagatacagatatatatatatatttacatatatatacagtcttgctgttttcatgtgcactatatttagcagcacattatttaatcaggcggcattttaatggggttgttttgacacttggcattattaagatacaactatagccccgtggaaatttcaacgtttgaattccacttctccgacttttaatagtagcaaagaggggaaggagaagggaatggagtaccaaggctgagcattaggttaaacacaagaatttaaaagggccaaggtagcaaagggaaggaaaaataattaaaattaaaggctatctgacaaacaacccagagaaacagtaagaaaccatcattaagggcaatgggctatgtacccaagatgctcacatcaacctacaatgaccttttccaatccagttcttgtgttgaacctgaggatctgccctctccgatcaatccctccacccgataaatttgctaccaccaaaatctagagctatagagccttgaaagcaaaatcgggaagctaaatagttgtaccttggactaccttcccacaagtgcagggagggcccaatgttgggtagggatgtgataacactgttctctgcaattcgatgcttttcactttgtggcttggttccacaaagtgaattgcatcgagttactgtcaaatgagaagctgcgggttgtttcatctgtcgtctaacccggccctgccgtttaacccggccctctgagggcaaattgctgctgaaaacattatcatcatctttgttttcttcaccatttttctccacaggaacccattctccataaacactatccgcttcttttttccgatgttgagatccagatgatacagggaattcttttgttaatgttacctggctttttggtggagttggttttgctgcagcaatattcagattgaaaaaaataggtttgggttcactgagtttaaagggatgatgataaaaaggaggttcttcttcctcttcatccgaaacatgaggtttattcactattacatcatcatcttctttactctgtgcgatctgtttacatttctcagttagttcttctatagtagctcctcctgactttttagcaactttctcttctatagtaggtggaggtgcaggctttaggtttggtggtaaagggacaccagccttagcacacatggcagctgcattagctttggctatttcaagtaattgagccttatccaaatctgtcagacgtttgggtgatctgcctcgttcagaagacctggatcttttacgacggatgggagatctgctaaaccttcttcttaagggtgttcttgatcgccttaatctgactggtgagatactgaagcttcgtcttcttaccacagaccttgatcttctccggcggcttggggtgcggctccgacggctaggggtgcggctccggcggctgggggtgcggctgcggcggctgggggtgcggctgcggcggctgggggtgcggctgcggcggctgggggtgcggctgcggcggcttggggaaatgctaaagctccttcttctacccacagatctagaccttcgtcgacgacttggagtatgactccgactccgacgacttggggttcgacttcgagctctaactgtctttcggttatccctggagcttgatctttttttttttctttccctagacttggatctgtgctttggagatcttttgcgcttctcttttgatacagatcttcttcctctagactttgatcttgatctgctgcttctcctcctgcgtcttgaacgtgaccgtgaacgtgtctgagagcgatgagacttggacttagatgatctctttcttgccctagaacgagattcactggtacgcttgcgtgatttgtgttcagaagatttggaacgcttacttcgagatcttaatgaagagtctcttttcttctctttctcccccttatcacggttcttatttttcttgcttttttcgtgagtgtccttaacttttacaaaaatttcataatcatctttttcctctgaagaagactctgaagctctttctggcatactacttacaaccgggctggcagcagatctgtcacgtccaacatcacttgcaagtaaaggtccttcaatgccagctctaaggcttgtaagacgttccatgtccttaggaagtaacggtctcactaaatctgcttcattaatatcctcaatattggcagaaaatcctgaatcaggcagtgtctctttaggagggggaggtacttctttttctcctccactactttctttagggctgagcagagctgctaatgtctggtcactctcttttacaggtaatggttcttctgtatccttactaacaaggttattattagatggtaaatcaagatgaatatctttagcaggcaaaggcccttcaatgtcagcttcactaccaccactaggactggtggaaattaccatgtcatgttcagtatcttgagtagttaaagataaatcaacatcatatttattaactaaactgagagtagatgctgtggtaaattcaatacccttactagttcctgttgcatcaggttccagagcaaaaggaccagtagaagatagagtttctcctgcatcagcttcactaacaccagggtaggtatccaatactgtgcactgtttagtctcactggtgggcaaaattttctcttcaccaatttccccaacaggactagtaccagcagcacacactgtattatgttccatctctttagcaattaaatgattatttatattaaggtctatatttataccatgttcactttcgtaaaagtcacctttcaggtgttcctcagcatgtggttcttcacctgaatgcaatgcaatctcctgcatgccaatctctggagcaagattttgatcaccagaggatagattaattcctttcataacatgtgatgacatgatactagattccagtatcattggtgtggactctatagccacctcagttggtattacttgagtctgctctgagactgtgacagcaggctctgaaactgtcacagtcgattcctggacagaaacagatggttctgaaacaatcatagaaggttgaaggactgacaccgctggttccagaacaggcacagaaggctccagcgcagaaacaactggcacaggaatggtaacatagtctggctcagccacaacaggaggctccgggacagtcacaaccgaaggctctaggacagttacagtcgaagactccaggacagtcacagtcgaagactccaggacggtcacagccgaagactccaggacagccatagctgaagactctggggcagccatggctggcggctccagaatgctctctgccagcactggagtagttactgctggaaccaacaaggatgtagatacttctgaggcaacatgtcctgaggctctcatggaatcaaatgtttctgctgtctctgacataacaggaggctctgatgctaacacagttggttcagctgacatggcgggagtttcagataccatacaagtcactggtctctctggaacaacttcatgttcttctgctactactgcagactctacaggtgttaacgtaattgaagattctggctctggtggtggttctggaacagtcacagcagcctctgatactaaaactgagggatctgatgctgacactgaataatcagtaggcactgctgaaggctccgaaatctcactttgactcacaggaggctcaggctgcgatacagactcttcagatggtaatgatggcacctctgtaggccaagtattttcagctgttaatgctgactgctcagtgggcaatgctggaccctctggtggttcctcaggaggcaatggtggtgtcattggtggctcctcaggtggcaacggtggcattgttgggggctcttcaggaggcaaaggtggcaccatatatgcctctgtatatgtgtcagtgtaagaatcggtgtaagaatcagcagccatagacatcattgaacgatcagcagtataagatgacatcatagatcggtcagctgcagagtacgatgacatcatagaccggtcagcagcagagtatgacgacatcatagaccggtcagcacccatggacatcatagatcgatcagccattggggacatcatggagcgttcataagctgacatcatggagcgttcataagctgacatcatagagcgctcagccataggggacatcatagagcgctcgtaggctgacatcatagagcgctcgtaggctgacatcatagagcgttcagccataggggacatcatagaccgctcataagacatcatagagcgttcgtaagatgacatcatggaacgttctgcagcataggacatcatcatagaacgtctagatgctaacatcaggggtctaggtgctaacctatatggcctgggtgctattctataggacctgggtgctatcctgtagggtctaggtgacatcctatagggatcaggagttagtctgtagggatcatggcctaatctataagggtcttgtcctaacctgtaagcatcatgacctaatctataggggtcatggcccaacctatagggatcctgagctaacctgtaaggatcctgagctaacctatagggatcaggagattttgaacccaacatagcagagtcttgggtactagacgctaacatctgggcatccatggtaccagacgctaacatctgagcatccatggtgccagaagctaacatttgagagtccatagtgccagatgctaacatctgggaatccattgagctagttgccaacatctgggagtccatggtgctggttgctaacatctgagaatccatggtgctggttgctaacatctgggagtccatggagctggttgctaacatctgggagtccatggagctggttgctaacatctgggagtccatggagctggttgctaacatctgggagtccatggaactggttgctaacatctgggagtccatagtgctagttgctaacatctgggagtccatggagctagttgctaacatctgggagtccatggagctagttgctaacatctgggagtccatggtgctagacgctaacatctgggagtccatggtgttggatgctagcatctgggagtccatggtgttggacgctagcatttgggagtccatggtattggatgctaatatatgggtctccatggtgttagaagctaatatatgggattctggggccatcaagggatccactcctactgttacagaagtctcccccactaatgtagtaggcagctcctgtgctaccgtattataggattccagcgctgtcgtcgagggcacctccagggactgcgacacggtcatcgttgacagctccgatgttgtcaccacagactgaacagagatctccagcgccacagttgccacaggctgcccaggcaactctggcgccccaggctgccctggcaactccagcacccctgttgccagaggctgccccaaaagctccagtgctccagctgccccagactgccccgagaactccagtgccccagctgccatgagcggcccaggcaactctagtgccccagttgccacaggctgccccgacaactccagtgccctagttgccgaaggcagccccggcaactctggcaccccagtcaccgaaggctgccccggcaactccagcgctgtcgttgccactggctgtcctggcaactccagcaccatcgttgcctcaggctgccccagcaaccctgttgccgttgtcacctcaggatgcccaggatgttccaccgttgtcatccccacaggctgctccaactctgtcgtcgtcacaggttgttcggtcaactccattgctactgttaccgcaggctgctctggcaactctactgctgctgtcaccaaaggcagccctggcaactcctgtgccatcacaggtggctctggtacctcctgtggtggctccaaccccatggatggtgctggaagccctggcaattcctgcgacaactgtggcactggtgtcacagagggccctggcaactcagacgaaa

SEQ ID NO: 76308 - DNA, 798 bp, Homo sapiens; identical to SEQ ID NO: 58835

SEQ ID NO: 76309 - DNA, 1772 bp, Homo sapiens
ttttttttttttacatctgaatgtattttaatataaaaataacagctttcccccaattctcgctctaggaaaatgtgctatgctcaccttccctctacccctgtcccatcaggcccagagccaaggccatagggctgctgaatacacatgtgagggggccgaggggaagacaacagtaccaggagggcaggcagggcacccccaggctggccagtggaggggtgggggtatcgatcccgccgggggctggcttggttgctggtgccctgagcccttctctgcccgcctgggtgttgccttcactgatggaggtaggcgtccagccagatgtcaccagacttcttcagggacctgacgatgtccaccagcgcggtgaggaagggcttcacttcgtagctgaggccgtgcttggcacacagcgacttgaccagcggggccacccggctgtagttgtgtctcggcatcctggggaagaggtggtgctcgatctggaagttgaggtgcccgctgaaccagttggtgaaaagtgagggctccacgttgcaggtggctgccagctgagagctgacccagtcccggtgcttctcgtggccgatctccttggggatgtggttcatctgtgtgatccacacgaaccagtggctttccaggaccctgacagcaacaaagaagagcagcaccccagggacgccgtagaaggggaggtaggataagaagaagcgggcatagaagctggcggcccagagcaaatccgcccactgcatgcacaccagcatgtacgccagattttccacttcaaagttcaccagggtgagcagcggcgggccgatcaggaagaagtacaggtgctgctggttgtagggtaggtatctgcgtttcttcttgccatactcgacggatgactcccccaggaggaagacgggcgccaccgtcacgtctgggtctttgtggaagatgttgggcttggcgtggtgctggaagtggcggaagttccaccagtgggcggagaagccctttagctgccccatcacgaacttctgggccacgtggttccaccaggacttcttgaagatggaggcatggcccaggtcatgctgcagacaccaggactgagcctgagagatggccaggatgaaggcggccagggcactgggcacccagccaggacccaggaggtagataaggagccaggccagcacctccatggccaggatgtggcccagtaggaaagcaaagaaggtgggactggcatcaaacagcttcatgtcctcggctgcctggtgcagggctcggaagtcctcgaccagctgcgcattcaggggtccatcctggctgggttcttccggagccagctctccaatcaacaggggctgtaggaacttgcgcacaaaattgagatcttgatggaaggcacggaaggcatccgtggcgtcctcagcgccgtggtggccgatgaggcggctgccccctgggtgccgctgtgcccagcggctgatgtcgtagacgcggcgctcgatgaccagccacttgtcgccgggctggtcgtgcgcgcggatctgctcccagcagaaggtgggcagcggtgcccccggctgcgcgggtccctcccgcggtcccggctccccgacgccgcccatgctgcacgcacgagtcctggggatcccaggcggtggccgaggtccgagcaagaccccgagggaagcgaagagcgctcccgggcgccgcctccgccgccgcccgctgctccggccccgccctgccgccgcggccgc

SEQ ID NO: 76310 - DNA, 1730 bp, Homo sapiens
tttttttttttattttaaaagtgcacatattttattgaaagatatccagtttcagctttgaagatataggctcaaagtctgttcttggctcttccagaaattctgcttctagagtgttcataatttcaaccaaaacttagaaagtttttctaaaatcagacttttcaacctgctgaacagaactcatgtctatacttcgatgtttaattttggcagcatttgtctctgtgaagcatatccaaaatcactcaaaacatcaaaactgctgatctgatagaatgatttattttcccattacaggtaagtcatgaatggcttgttctgaggtatgtttctgagctatgaaggacacctactagaaagctccacacttgaagggttctcttaaggtggtaacattttatggctggacagtctctgcaggtaccagattccccgttgtatccaactgcatacatttacacgtgcatgcagacacagggcactctgcatggtccctgaaccaactaagcatatgtccagcatgtccaccgtgcctgcaattatgacaccatgtaaaccagttgttaaattgggctaattttttgtccttgctcaagtccactttttcatctgatttggttcctccaggacagctagaaactggtgttcccatattaatgagacaaagcgcacatcgaggaagtggttttcgacagccaggacaacttgtgactttagatttcgttggtgagccactcacaccatactgactaaaacctctgccctgatgaggcacagctgaacagctgtaggagattgacttgccacagaaattgcaactcacaaaaacttgtgctaaaggcttggaactgggatccaacttactcctgtgaatatcaaattcagctcgtttatgccaaaacctccaggcatctaataaatttctataattctcaatccagtactgaaccctttcatctttaagaacatctaaaggtgaaccctgtaacatacagtaacttgctgtttgaacatctccagttctatcaacataactctccattaagtccactccatctttagtaaggcctgtaagcaaaattccttccaaatttccagcctctttcatttcattggtcaacttttcgatgtatctatttaactgagtatcactaaggaatttacaagcaaatgccactctgtcacgtactgcaactttgttttcatacaaaactccatcgtaagatcctgtttcacttgtcagaaatgcaaacatgacacacaaatacgggttatttagctgtaatcgcagtgtgctacacatttctctccaaagggagttcttctcatccgtataacccgataaagccattgctaccacattgagattcagatctcctttttcagaagatgccccttcattcaggatttggattgctcggcgaatatccaagttgaacaatgccacagcagcagctctttcccattccccttcttgtacaagggagttcaaaaatggccccacgtctacatccgttcctttctttatccacccacaaagctgtaaagctaagattctctcttcatttaaattttgaatatcactttgcttatccaacccactccaattatgtctgctgctttccaccattcccaacgatgactttacaattgatttaattcctgcataaaccaatgatcctttgttgcctggagatttgtgatccatatcttctcggacgcgtggg

SEQ ID NO: 76311 - DNA, 595 bp, Homo sapiens; identical to SEQ ID NO: 58838

SEQ ID NO: 76312 - DNA, 2329 bp, Homo sapiens; identical to SEQ ID NO: 58839
  misc_feature (1)...(2329): n = a,t,c or g

SEQ ID NO: 76313 - DNA, 1262 bp, Homo sapiens; identical to SEQ ID NO: 58840

SEQ ID NO: 76314 - DNA, 1665 bp, Homo sapiens; identical to SEQ ID NO: 58841

SEQ ID NO: 76315 - DNA, 955 bp, Homo sapiens; identical to SEQ ID NO: 58842

SEQ ID NO: 76316 - DNA, 2128 bp, Homo sapiens; identical to SEQ ID NO: 58844

SEQ ID NO: 76317 - DNA, 7752 bp, Homo sapiens; identical to SEQ ID NO: 58845

SEQ ID NO: 76318 - DNA, 1647 bp, Homo sapiens
ttttttttttttaaaaagtattattttatgtatattttaccacagtcaaaaattcccaaattatccaaacacaatcagtaattaaatgcctaccatatgtatggcattgggccaaaagataaacgtgtgtttacagtacccacatggctttgttctccatttcccacagatgtaggcaaatgtgtaattaactaacatcatgcctcctatagggccacatgtcacttccaatatcagggaaaatgacctgttctgaagtgctcatccattttccaggcccaaccagaccccaaaatacatcgtttatgcagaggacttggaacacattcaaaacagtacatactttattttcaagcatacaagaaacactaaactcttccagtgccagtacactctccatgaattcttcatatagaattgggtatattggaagcaagttgtttctggtgaaatttctgatgatcaggaatcaagactcagtagccctaaaggaagagagttttgtatccaatatcctcaaaaccaagacatagtatattttactttcaaagtaaactataaacattttaccatatccttcaatccataaagcatctcactgtgaaatgatccatgttgactctgcataattctcagaagtcacttcaagtgatgagggactaactataaaacatgcattatttgaagtacatgagcatgaaacatcgaagtctacaacttatcttaaaagaaagagtaagttccaccagctttttattgtttgaataacagaacacacaaaaccaggcagagaagtccgcaaggaaatgatgatcatatttcactgttttttggccttttggtccttcatctttcaagcacttactgtattttcctttagcgatttaaacatttattttgatcacaaatgcaattcaagtgtgaataaataaacgtattatcttttagcacccttccccgcttgttcctttaaatagaaaaaagtgctaaatgtctctttataggctattggccatagctgtcccacctatggttttaaaaacagactgtaacttgatcttctgaaatccttctcgaaccacaactcgttctgttaaagaaatcctaggaaagaagtcctactgatattgtcgatagtctccaaaaggtgaggaaggtaactgagttgaaggcaactgggaggggtcttctgcaaactgaggaccattgggaaactgtgcagaggcaaatcttgtcaacaagataccagctccttcaattaaagctaggagaatgccacccattgcggctgacccaaccatggccactggtccatttcttgctgccagtatggctcccgttaaggcaccacttgtgatggagttccagggatcttcctttcctctgacttgaaccatactacagtcaatcatggaaaacagccctccccaaactgcaaagctacctcctaactgtggagccctggttttaatagctgtcaaactccctcgtagtctgtggtttactcccactggagaattgcgaaaacctttgattgcttgaaagataccaccaccaatggtacccatcgtaaaggccccaccacagtcatccacaattcgccatgggcaaggctctcgcgcgtactcctccatcttgactccaatg

SEQ ID NO: 76319 - DNA, 2307 bp, Homo sapiens; identical to SEQ ID NO: 58847

SEQ ID NO: 76320 - DNA, 1404 bp, Homo sapiens; identical to SEQ ID NO: 58848

SEQ ID NO: 76321 - DNA, 991 bp, Homo sapiens; identical to SEQ ID NO: 58849

SEQ ID NO: 76322 - DNA, 791 bp, Homo sapiens; identical to SEQ ID NO: 58850

SEQ ID NO: 76323 - DNA, 624 bp, Homo sapiens; identical to SEQ ID NO: 58851

SEQ ID NO: 76324 - DNA, 2902 bp, Homo sapiens
tgggaccaaaacaaaggagcggcggccgggagcggacttaccttaccttctctgccttcggcgcgcttctcagccgggccgccgacccaaaggagccgtccgactatgtctaacatggagaaacacctgttcaacctgaagttcgcggccaaagaactgagtaggagtgccaaaaaatgcgataaggaggaaaaggccgaaaaggccaaaattaaaaaggccattcagaagggcaacatggaagttgcgaggatacacgccgaaaatgccatccgccagaagaaccaggcggtgaatttcttgagaatgagtgcgcgagtcgatgcagtggctgccagggtccagacggcggtgacgatgggcaaggtgaccaagtcgatggctggtgtggttaagtcgatggatgcgacattgaagaccatgaatctggagaagatttctgctttgatggacaaattcgagcaccagtttgagactctggacgtccagacgcagcaaatggaagacacgatgagcagcacgacgacgctcaccactccccagaaccaagtggatatgctgctccaggaaatggcagatgaggcgggcctcgacctcaacatggagctgccgcagggccagaccggctccgtgggcacgagcgtggcttcggcggagcaggatgaactgtctcagagactggcccgccttcgggatcaagtgtgacggcagaacccgctctgaggtttcctggccatagccaccctttgaaatgctctctgtgtgttagagagatactataccctagaaactctgaacacgccagaatgctgaaatgcccttctacctttgggtttacagccccctccacataaattaagaaattcagtatttctgcactcttagctggattctaaagttctgtatagctcgtaatgatggtatttttatagcagccttttaacagaactagttaatttcgtgtatatgaatctttctcgaagatctggtcaaaactgtattcagtttcctgcccagaatgatcagattgaaggtggttggtttttattattatttagtgtgattgatagtatctagaatggcaggtggtgcataaaagttaaagagaggggaaagattacttagtttggttatacagttataaacaccatgcagtgtattcggtggactgtgctatttctgtttatcctttgggttttggtttttgttttttttttttgccttcacagtgagactgcaaatgattgttctcataacgtatattattaataaatgtggtcctataatttatactgaaattaccttaggatatttttgcataatactctcttactgcttacattctataaatttttcacgtgataattgtctttgcgtaactgggaaaaatgccgaataacttcctttattatctggaaaaattaaatttgttcatttatattttctacttactaaattgagtttttaaaaagacttagtgtgacatttgacagtgtctttcaaacgaacttctctaacaagtttatagttattttcctgtttcaacactattagaagtcttataaattatgctaattagcatggcagtcatgttacacactcttaacattgccaaagaactgttgatttcgtttgagaaaaccctgggactgtgtgtgtgtaggttttgttttgattttaacaaccaaaaatagaaataaaattagaactgcgttttaagttctaatttgcatttattaatttgtccaaaagcaagaactcttggaaatccttgaaaatataagctggaatgttttacttagccatgcaagtcatttatgtatacatccagccagctggaaatctgagaagtaaagaggtaggactggaaggaaggagaaagcttgagtctttaaggctagagcccagctgtgctgcctgccatcttctcaggaatggcagtgcgtattttctggctgaaaagtaaagcatgtatccaccgctttctcatagcctcgaaacatggagaaaagcaacttgcttttgccttggcaagcatgctaacctaagttaattcaagttttttttaacttaccctttccttcactggaagatttttccataagagaattccattgtttcagaaaataattataggggcccttccaagttctttgaaagattcataaccaactattcactattataacatgtttcccagtgtaaatgagtaaggaaaaaaaaagtgtaacaggtgcgtgcagatgaggagtgaccctcatatttaagttattttatatttgactggacattgttcagaagtgtgctttaagggacacttgttggttgtctgcccagcatctctcaagaatatccctcctgtcctccacatggttgtgcagggccatgtgtgaagacagcatgagtcttaacccctcttttattttatttttgagacagagtctcgctctgttgcccaggctggagtgctgtggcgcgatctctgctcactgcaacctccacctcccgggttcaagtgattctcctgcctcagcctgccgagtagctggaattacaggtgtgcaccaccatgcccagctagtttttttgtatttttagtagagacagggtttcactatgttggccaggctggtcttgaactcctgacctcaggtgatccgcccacctcagcctcccaaagtgctgggattacaggcatgagccactgcacctggccttaacccctctttagattggaaaaaataattacaactttaaaaatagcttagtgttgaaccctttggtaaactaaagacccttttataatgcacatattcccaacaaaattaatatattttgtgagattaaacaatgcttgtatatgcttgaactttcttaaaatatgtccatgtcatactattat

SEQ ID NO: 76325 - DNA, 1445 bp, Homo sapiens; identical to SEQ ID NO: 58853

SEQ ID NO: 76326 - DNA, 1565 bp, Homo sapiens; identical to SEQ ID NO: 58854

SEQ ID NO: 76327 - DNA, 1826 bp, Homo sapiens
ttttttttttttcctgatttagcagatacgtttattcaacacagtgcatgattcaaagcatcggatattccacagccaacaaggtttcctattccctattacaaaataccggataccctgaatatagctcattcaaggtcctcggttcctttttccctatatctagaattaaacaggtttccccgtttagcgcacatttcacgttcgctgaaggctttggggagagggggaaacagagcttatgactgcccctctgaaccaaaggcacttaatgttaaaagataaagcacagtagagtcaccccacagacattcctatgtgttcaacggctgaacttcagcataccatcaccggccccatgtgggattcatcataacaacgtaaaagacactgatttccttggaaaaacaaagtgcagtacgaatataaaggagtcaccacacccctcttccgaaaataatacataagagaactcttactttacatgattagtatcactcaaggttcacacatggaaaaaatagctaaaaaataatctatcataaattctcacttatgaagtcacaatagaatctgataccctttttagaactggtgagttggagagacacccagaggtcatgctgtccatcccttcatttgataggggagggcacttgaggcccaggaaggtcaagcgtcggacctggggtctaacccctgtggcagagcctgcgtaggacgcgggcctcctgaagcctagctcagggttccctccactccccttcctctttaaagactctcaaaagtaaaatatggcgatgatctccaaagatgcaccacaccataaagcacatgcactgacccaggtcagcaatttggtctcacaaggcggttcctttggccattgggcaggtatgtaacccacctcagggtgggaattctttgcatgggatcgttcaaagttctgagaaaagcccaatgtaggtcagacacgactgctccttggactggggaagactttccttggttgtcagtccatagtgggcaggcggtcggctgcacagcggaatcccagattcgaagcagagctatcaggtgtgttctggctccgagcagcacagcgatacctgtaacaataagacctatggcacatgtaggatccacctttcttcactcggtctttcccagaagggggaccttttgggttaagcgtttcttcaacagaatgatgaacagtccaccagtctgaagtccattcccatgcgttccccactatgttgtataagccataaccattgggagggaaggcatcaacaggcgcagttccttggaagccatcctcaccagtgttggtcaccggaaactcgccctgccaaatgttggcataatgctggcctttgggctgcagtttgttgccccaggggaaaagtctattatgcaggcctcctcgacagctgtattcccactcagcttccgtgggcagccgcttccctgcccaagtgcagtaggcaaccgcatcattccaggacacatggagaactggatgatccggcctgtgcagaatagtagagtcaggcccttctgggtgtctccagttagcgcctttcacaggtaaccaccagggagcagctgcaacctctgtcaaatagccagttgagttcacaaacttctcaaattcagtattactgacttcataggcatccatgtaaaaggcatcaatagtaactctcctcgcaggtgcttccccatcctgctttatctgaggatcatctgtgcccattgtaaatactccagcagggatggggaccatctttgagtgcgcgagttgccgccccacgcgtccg

SEQ ID NO: 76328 - DNA, 1129 bp, Homo sapiens; identical to SEQ ID NO: 58857

SEQ ID NO: 76329 - DNA, 1353 bp, Homo sapiens; identical to SEQ ID NO: 58858

SEQ ID NO: 76330 - DNA, 1502 bp, Homo sapiens; identical to SEQ ID NO: 58859

SEQ ID NO: 76331 - DNA, 766 bp, Homo sapiens
ctcgaccgcctgatgactcccctcaggaaacgcgcccaagacgagattaaccaacgcagatataggaacaccaagcaatcttcagcacattggacatgttggttgggatacaaatacaggctttgatctgaataatttggatccagaattgaagaatcttttcgatatgtgtggaatctcagaggcacaacttacagacagagaaacatcaaaagttatatatgactttattgcaaaaacaggaggcgttgaagctgttaaaaatgaactgcggaggcttgggtgcgttcaagattcaacttcacccgtaacccaccgccatggccgaggaaggcattgctgctggaggtgtaatggacgttaatactgctttacaagaggttctgaagactgccctcatccacgatggcctagcacgtggaattcgcgaagctgccaaagccttagacaagcgccaagcccatctttgtgtgcttgcatccaactgtgatgagcctatgtatgtcaagttggtggaggccctttgtgctgaacaccaaatcaacctaattaaggttgatgacaacaagaaactaggagaatgggtaggcctttgtaaaattgacagagaggggaaaccccgtaaagtggttggttgcagttgtgtagtagttaaggactatggcaaggagtctcaggccaaggatgtcattgaagagtatttcaaatgcaagaaatgaagaaataaatctttggctcacaaaaaacaaaagtcgacgcggccgca

SEQ ID NO: 76332 - DNA, 1339 bp, Homo sapiens; identical to SEQ ID NO: 58862

SEQ ID NO: 76333 - DNA, 3122 bp, Homo sapiens; identical to SEQ ID NO: 58863

SEQ ID NO: 76334 - DNA, 5172 bp, Homo sapiens
ggaagaagtacctacacaggaatcagtgaagtgggaaattaatgttattattaaaaatcctgaaattgtgtttgtagctgacatgacaaaaaatgatgctcctgctttagtcattacaacacaatgtgaaatttgctataaaggtaaccttgaaaatagtacaatgactgctgccattaaagatctccaagtgagagcctgcccgtttcttccagtcaagagaaaaggcaaaatcactactgttttgcagccctgtgacttgttttatcaaactactcagaaaggtacagatccacaagtgatcgatatgtcagtaaaatccctgacactaaaggtttcaccagttattataaatactatgattaccataacttcagcactgtatacaactaaggaaaccatcccagaagaaacggcttcttctactgcacatttatgggaaaagaaggatacaaagactttaaaaatgtggtttcttgaagaatcaaatgaaactgaaaaaatagctcccacaactgaattggtacccaaaggcgagatgataaaaatgaacattgattctatttttatagttcttgaggctggaattggtcatagaacagtacctatgcttctggcaaagtcacgtttttcaggggaaggcaaaaactggagttccctaataaatctgcactgtcagcttgagctagaagtgcattattataatgaaatgtttggtgtatgggagcctttgcttgaacccttagaaattgatcagactgaggattttagaccatggaatcttggtatcaagatgaaaaagaaagcaaaaatggccattgttgagtcagatcctgaagaagaaaactacaaagtgccagaatataaaactgtcatcagtttccattcaaaagaccaattaaacattacattatccaaatgtggtcttgtaatgttaaacaatttagtcaaggcatttacagaagctgccactggatcttcagctgacttcgtaaaggatctagcaccatttatgattttaaattcccttggacttactatttctgtttcgccaagtgattcttttagtgtactcaacattcctatggcaaaatcatatgtattgaaaaatggagaaagtttaagtatggattatatccgaaccaaggacaatgatcatttcaatgcaatgaccagcctaagcagcaaactcttcttcattcttcttacacctgttaaccattctactgctgataagattcctttaacaaaagtgggacgacgtctgtacactgtaagacacagagagtctggcgttgaaagatctattgtttgtcaaattgatacagtagaaggaagtaagaaggtcacaattcgctccccagtgcagataagaaatcatttttcagtcccactgtctgtttacgaaggggataccttattgggaactgcctcacctgaaaatgaattcaacataccattaggatcttaccgatcattcatttttctgaagccagaagatgagaactatcaaatgtgtgaaggaattgactttgaagagattataaaaaatgatggtgctcttctaaagaagaaatgtagatctaaaaacccttctaaggaatcatttctcattaatattgttccagaaaaagataatttaacatctctatcagtgtattcagaagatggttgggatttaccatacataatgcatttgtggccacctatcctgctccgaaatcttcttccttacaaaattgcttattatatagagggaattgaaaattcggtttttactctaagtgaaggacattcagcccagatttgtactgcacagttgggtaaagccaggctacatttaaaattacttgactatctcaatcacgattggaaaagtgaatatcacataaagcctaatcagcaagacattagttttgtcagttttacttgtgttacagaaatggaaaagactgatttagatattgctgtccatatgacttacaatactggtcagacagttgtggcatttcatagtccttattggatggtcaataaaactggccgcatgttacagtacaaagcagacggaattcatcgaaagcatccacctaattataaaaagccagttctcttttcttttcagccaaatcacttttttaataacaataaggttcaacttatggtaactgatagtgagttgtccaatcagttttcaattgatactgttggtagtcatggagctgttaaatgtaaaggcctgaaaatggactatcaagttggtgtcactatagacctgagcagttttaacattactagaattgtgacatttacccctttttatatgattaaaaacaaaagcaaataccatatatcagtggctgaagaaggaaatgataaatggctctctcttgatttggagcagtgtatccccttttggcctgagtatgcttctagtaaacttcttattcaagtcgaaaggagtgaagatcctcccaaaaggatatattttaacaagcaggaaaattgtattctattgcgtctagataacgagcttggaggtattatagcagaagtgaatttggccgagcattctacagttattacatttttagattatcatgatggagcagctacattcctcttaataaatcacacaaagaatgaacttgttcaatacaatcaaagttctctcagtgaaatagaagattccctccctcctggtaaagccgtgttttatacatgggctgatccggtgggctctagaaggctgaagtggagatgtagaaaaagccatggtgaagtaacacagaaggatgatatgatgatgcctatagatttgggggaaaagacaatatatttagtttcattctttgaaggtttacaacgcattattttattcactgaagatccaagggtatttaaagtaacatatgaaagtgagaaagcagagttagcagagcaagaaattgcagtggcattacaagatgttggaatttctcttgtcaacaattacacgaagcaagaagtagcctatataggcattacaagttctgatgtggtttgggaaacaaagcccaagaagaaggcaagatggaagccaatgagtgtaaagcacactgagaagttagagagagaatttaaggaatatactgaatcttctccttcagaagataaggttattcagttggacactaatgttccggttcgcctaacccctactggtcataacatgaaaattctgcagccgcatgtaatagctctacgaagaaattatcttccagcattaaaagtggaatataacacatctgcacatcaatcatcatttagaattcagatttacagaatacagatccaaaatcagatacatggtgctgtatttccctttgtgttttatcctgttaaacctccaaagtcggtcaccatggattcagcaccaaagccctttacagatgtcagtattgtcatgagatctgcaggacattcccagatatcacgtattaagtatttcaaagtattgattcaagaaatggatctcaggttagatcttgggtttatctatgctttaacagaccttatgacagaagctgaggtgactgaaaatacagaggttgagctttttcataaagatatagaagctttcaaagaagaatataaaacagcctcattagtagatcaatcacaagtcagcctctatgaatattttcatatatctcctatcaagttacatttaagtgtttcactgagttccggcagagaagaagctaaagattcaaaacaaaatggaggactgattccagttcattctttaaatcttttgctgaagagtattggtgccacactgacagatgtacaagatgtagtttttaagcttgcattttttgaactcaactatcagttccatacaacatccgatctacagtctgaagtcataagacactattcaaaacaggccattaagcagatgtatgtactcattcttggacttgatgttttgggaaatccatttggcttaattagagaattttctgaaggtgtagaagcatttttttatgaaccttaccagggagccatccagggtcctgaagagtttgtggaaggaatggcactaggacttaaggcactagttggtggagctgttggtggattggctggtgctgcctccaaaatcaccggtgctatggctaagggggtagcagctatgaccatggatgaagactaccaacagaagagaagagaagccatgaataagcaaccagctggttttagagaaggcatcactcgtggaggaaaaggcttagtttctggatttgttagtggcataacaggaattgttacaaaaccaatcaaaggagctcaaaaaggaggagcagctggtttctttaaaggtgttgggaaaggtttagtaggagcggtagcaaggccaactggaggcatcatagacatggctagcagtacatttcagggaataaaaagagctacagagacttctgaagtggagagtctgcgacctcctcggttcttcaatgaagatggagttatcagaccgtacaggttgagggatgggactggaaatcaaatgttacagaaaattcaattctacagggagtggattatgactcacagtagcagtagtgatgatgatgatgatgatgatgatgatgatgagtcagatctaaaccattaaaattcatatgttctttattttacttggaatgtttcattaacatgttttgtatgacttataccataatgcccatatgtccatttatagggaggtaaaacacattttcttttaaaatgttttcctacacattttcataaagcaaaataattgtattatttaagcacagaaaaaaatgtatcttacatccaaagtagggagggcatccaacatattatagatttgcttttatatattttatagctttgtattgcatagtttgtctttaagagttcaagttagacttaaatataattttgatgttcactggttttattttaaattgccttcttatttgttagcaaaatgcctttttttaatggtctctgtaaattttctgggctttaatgtaatgccactgtgtaaaaaaaaaggaagaaaatagtaatagccatttaatgttttatatttatcattttaaagatatttttgtcaaatttcttttaataataataaacatatgtaatcta

SEQ ID NO: 76335 - DNA, 2216 bp, Homo sapiens
ttttttttttttactgattcatacgttttatttgataatagttcattttattaaataatttataaagtcagaccagtgcattgggcttgttaggggaaaccattccttcctactgtcacatagcctggcagattatatcaggtgccaaaacattcccttttattcaatttattaatgagagtgtggaattaaagtagatccttgcatgtcaggaaagctgcaacacatctggtttaagtggagcacaaaggtaagttattccacattcaccaacttccccacttgacctcccaccagttcctgtctgctttttccatcaatcaactctaagatgccctaaacccaaacagttcccattcaactgtgcacaaaggtatagatatggaagacatctcactccaactctcacctttggaattaaataaacctggaacagggaaggtgaactatggctgaaaccaagtgaagatttttaagaagctttgacagaaacattaagaataacacctgaatgcaaatccagaaaaaagcgctactgggggaaaatagtcttagccaatgttctaaaaatgctcataaggaagggttggggaattaccctttagacacaagctctaagaactctggatacaacgggaacttggatggatacagtcgggcctgctgggccagatgttccgagggcggcccggcaagcagcctgtcttgcacattgcaactgactggcttaatctacggcaagagtccttcagctccgtcacagagtactctccaatgtgttatagttatccttaaagctcttcaattcaaggaagtgcttggcacgtttactcttctgactggaggggaggtatgtcacctggatggttgttggggagacctcaggggactgagttaggtctttggctgctgactggtgatgtcgctgagagctcccaattcgtgctttaaccgcagtggccagctcactcagggcctcctgatagcgtaggtactcattctggccaaagacccctgtcccatagcgggctgtttcatagccatccaaaagggtatcaatgagtgctttgcgtacacccttgaaaggcgtactagtgtttcgcagatccagcaggtaggagcggaaattcttgcccattaaggaacggggatgccggccttcagaatgaaatgggatctcagaggtacgaatggcatccagagctttcatcctatacagatagttgtagcaactttgatttccctgggtttccagttgtagtagtctagcatcatcatctgcaaggagctggggctcatacttgatatcctgaaccctggagagtcgaatatcaatctcctctttcaagtccttgggggcattgtgtcccacagggacatgaggtccccttcgagatttcattgcaaagcgcatgatttgcctcttcacaaaaataaatagcagtacaaacaccaggctcccgtaggccatcaccagcacgacattcaccccggagagccagttactgccggacgccatggcctccctacctcgcgcagaattgttcgggtttaccccgctgtcctggctggtcagcccaggctccgccgaagcgacggcgcctgggtcccctggagctccccggccatttccttacgggggaagaccaagccagacccggcctgaaaacatggcggacaggcaggagagctgggaaaggcctacgggagcctggtgtttgtactgctatttatttttgtgaagaggcaaatcatgcgctttgcaatgaaatctcgaaggggacctcatgtccctgtgggacacaaatgcccccaaggacttgaaagaggagattgatattcgactctccagggttcaggatatcaagtatgagccccagctccttgcagatgatgatgctagactactacaactggaaacccagggaaatcaaaagatcccatttcattctgaaggccggcatccccgttccttaatgggcaagaatttccgctcctacctgctggatctgcgaaacactagtacgcctttcaagggtgtacgcaaagcactcattgatacccttttggatggctatgaaacagcccgctatgggacaggggtctttggccagaatgagtacctacgctatcaggaggccctgagtgagctggccactgcggttaaagcacgaattgggagctctcagcgacatcaccagtcagcagccaaagaa

SEQ ID NO: 76336 - DNA, 1321 bp, Homo sapiens; identical to SEQ ID NO: 58865

SEQ ID NO: 76337 - DNA, 1477 bp, Homo sapiens; identical to SEQ ID NO: 58866
  misc_feature (1)...(1477): n = a,t,c or g

SEQ ID NO: 76338 - DNA, 521 bp, Homo sapiens
ttttttttttttggaattacaaagctacttttaatactttggggtgagccccacaggaataaaaaacactgggaaggggtaaccccctcacccccgggagtggcccagggggagagaggctacctgaggggaaggaagcacaaaagggacccgctgcagactcagggcaaagggaatgccatcggtgctgggacctgtgagcactacaggaggaaacgcgagcgtggtgggactggctccaggcacacaggcgaagggcaagagggttggacacgaagccacaaagctacttgggttcctccttcttctcgtttgcctttttctgcttctgctgcatgatctccgagtccctctgcttgcgggcggcagcagaaagcccgtcatctcggcgctttcccttaaccgagtcgctctgctttttcatattcttctggcgggcgagctcacgctggttaccgcgggtcatggcgacggcagcggctccaacctgcctccgttacgtcccctcgttccctcgtgcc

SEQ ID NO: 76339 - DNA, 2384 bp, Homo sapiens; identical to SEQ ID NO: 58868
  misc_feature (1)...(2384): n = a,t,c or g

SEQ ID NO: 76340 - DNA, 1418 bp, Homo sapiens; identical to SEQ ID NO: 60665

SEQ ID NO: 76341 - DNA, 4120 bp, Homo sapiens; identical to SEQ ID NO: 58869

SEQ ID NO: 76342 - DNA, 840 bp, Homo sapiens; identical to SEQ ID NO: 58870

SEQ ID NO: 76343 - DNA, 2126 bp, Homo sapiens
aaatctccccttctacagagttcctccggcgcttcctccaccccgggatacacagaacctcatctcctacggtgctgaagcctgcagcagggcaggatgggcaggagagcagagccgcggagtctgcggcgcgggtgaagagcggcgcgtaattcccgcagcaagattgttccgcgcccgcagcccctggactagcaggatccgaaccccggcggctgcgtgcttataggcgcagacgtcagagagcccgcggcttaaagcgcgtcgcctggctagcgccaccccctagccttcttcaaggcctccagggctgggcccaagcgcccgtcgacggcaccctgggcccagaggactcgcgggcctcatctccaatgattcagaactcacgtccgtcgctgctgcaaccccaagatgtcggagacacggtggaaacgcttatgttacatccggtgatcaaggctttcctgtgtggctccatcagtgggacctgctctaccctccttttccaacctctggatctccttaaaacacgcctgcaaaccctccagccctcagatcatgggtctagacgtgttgggatgttggctgtactcttgaaggtggttcgcacggagagtcttttgggcctttggaaagggatgtccccttccattgtgagatgtgtccctggcgttggaatctactttggcactctctactctttgaagcagtatttcttgcgaggccatcccccaaccgccctggagtcagtcatgctgggggtgggctctcgctctgttgcaggggtctgtatgtcacctatcactgtaatcaagacgcgctatgagagtgggaaatatggctatgagagtatctacgctgccctgaggagcatctatcacagtgaggggcaccggggcctcttcagtggcctgacagcaactctccttcgagatgcgcccttctcaggaatctacctgatgttttacaaccagaccaaaaatatagtgcctcatgaccaggtggatgcaacccttattcctattacaaatttcagctgtgggatatttgctggtattctggcctcactggtaactcaacctgcggatgttatcaaaactcatatgcagctttatccactgaagtttcaatggattggccaagcagtgacacttattttcaaagactatggactacgtggcttcttccaaggtggcatcccccgagccctccgcagaactctaatggcagcaatggcgtggacggtgtatgaagagatgatggccaagatgggcctgaagtcctgaccaagagaggactgggaacgggtgaaatctgttgccctgcttggtttctgccaagggctgctgcttcttactattctgcagtaagatgaagtcctacctggaaaaccaggcagaaattgtgttgcctttgccttcagtaatccccttaaggagaaaatatatggacctgatttcagccttcagaatctccaaaagaggagtcatcaattcatagagcacactagggtgttaggagagagctttgcatactctgagaggctacttggaaaggcattttcccaggagagctctgtcaggtggctgcgcttcagccccacccctacaccacagggtctccttgggtatgttcttgggcaagcaatcacaaagccagagaagctgtaagctgcctgccgggcctgaggagctccaaccagggaagactggatgtgaggagaggagtcactgtcaccaggtcacagactgactgaggtgatggtaggatgaggaggaacagatgcccttctttaattggttctcagttaacttctcagaggctctggagaacgggacagtggctttctagcctctgaatgttccaaataaaattttttggtcttggcccctgtactgttttacctctaaattctggcatttttttttccctgcaattaaagtgctgtactttatttattgaactttatcattgaaagctgtttggaaaacctaaaagatgttgtcacacttctgttttctttacctgtgccttataaaaatggaccaaacccttttctaaaataaaatagttctagggtggctggttattgacctatgtaggtccctaaaacctaaaaaaaaaaa

SEQ ID NO: 76344 - DNA, 2200 bp, Homo sapiens
ttttttttttttgcgctggttagatcaggatttctttttattcctcgttggtttaaaatggctaatcagaataaaaaataaaagggcctctttgtggaggctgggatctcccctatttagaggttagaacccaggtatcccctctacccagcaccatagtgaggtgggctgaggggtaacccccaagggacaatcggaggggcctaggcctgccactccttctctctatcccccgtttttggcatgtgatgaaaaatattgctttttggattcttctctcctggccttggattttaaaatcaagttaactgtgtaagctaggggaggctccaaggggccagtaggagcacactctaatccctctcccccaaggaggggattatccaatattgtttgagctaggccaagttattttcctgatctcccaccaccaccagtgtcttgaagttttgacccctttcctagggaaactaaatgccaatgagcctagaaaactaattctcctctccaagtccttccctcttgtgaccaaaattccagactcacctctccccaggcttcttcctaatcacacttagcaccagcagaggatgctatttccgtagttagtaactgggacaaatgagagggaaccacaggaaaaagactgacgtctcccctcttttcctgctggtctgaggaatgggaagagtaagatccccctccgtatatgtatccctccctcattttcccatcccaggatagatatataatttctttgatatttataatatatatatatatatatattatatgtacacacacacctggtaacgcagaagaggaaaaaaatagaatccgtaacaataataaaaaaaattatttctggtttaaaaatgatctggttccctccagggcgagcaattgcacaaatgtccactgagtctggtccagggatcaaggaagggaaggtcttaaaagataaaagggggggttgctaccccagtctcagggccccaactctccgactccccaagcctactgcattttagaaaacactcctcatcctcttggaatcggtggtttaaaaaatgtccatgcacgggaggggagccccttgagggaaggaaggtggccacctggggccctttggtgtaggcgcagaggcgttggggaggggaggtgccgaaggctcacaccgaaatctcataggtggtaccaccaacccctgacaccttcttgactcctcccctcgtggggctactgagaggtggctggcctgggccaggggaggctgagcctaagctcttgggctgcccgttggatttgctgtaggtggtcttcagctgtacttcatctttgggtgtcagtaatggctgcaaggccacttcttctgtctcagagacaccaggttgggctttttggctgctgtaagacatcgatcggcccaggtatggggctgttgggcctggttcaggggaccctactccccggccccttagcccatctggcttgccaaaacgggggacagctgggcgtcccagtggagtcttgcccaaaggtgatctctttgaatcatctgaggaggaactagtacgaggggcatggcccgagcctggtgttgactgaatgcctgagtcccccaagcctggttcttcctcacggcccgggagtgggggtgactggcgcagcaacttctctcgttcctggagagaggccacaatgtggcgcgacagattgtcgtaacggactggtgagggctctcggtgtgttgggccagttggcaccaaacgtgggtgcctctcagcttcccgttgctgggccagcctggctgacaggaagggagaggtatagcctaaaggtgggtctggctcaggccctgcctgcactgactcaaaatcagggctgtctgaaggtgtgagcaagctgtcataagataggcttccattgcgtgtctggttggccaggctcttataggaggtggaggtggtgccctctgaacgaatggattgcaactggcccagctcaaagcctgtgccctgggctgacttgaggctggaggagcgtgagccactggatagtggatcgaagtgaaaacttttgccaaaggtaggagaacggaagctctctggttccaagctgggctctgagcggtagctggggtgacggctgctctctgcaattgaggttggctccttcaagctgtccccacgctcgtgcc

SEQ ID NO: 76345 - DNA, 2251 bp, Homo sapiens
ccagaaatgcagaggagaaaaagcgtttatctcttcagcgagaaaagattatcgcaagggtgagtattgataacaggacccgggcattagttcaggcattaagaagaacaactgacccaaagctctgcattactagggttgaagaactgacttttcatcttctagaatttcctgaaggaaaaggagtggctgtcaaggaaagaattattccatatttattacgactgagacaaattaaggatgaaactcttcaggctgcagttagagaaattttggccctaattggctatgtggatccagtgaaagggagaggaatccgaattctctcaattgatggtggaggaacaaggggcgtggttgctctccagaccctacgaaaattagttgaacttactcagaagccagttcatcagctctttgattacatttgtggggtaagcacaggtgccatattagctttcatgttggggttgtttcatatgcccttggatgaatgtgaggaactttatcgaaaattaggatcagatgtattttcacaaaatgtcattgttggaacagtaaaaatgagttggagccatgcattttatgacagtcaaacatgggaaaacattcttaaggataggatgggatctgcactgatgattgaaacagcaagaaaccccacatgtcctaaggtagctgctgtaagtaccatagtaaatagagggataacacccaaagcttttgtgttcagaaactatggtcattttcctggaatcaactctcattatttgggaggctgtcagtataaaatgtggcaggccattagagcctcatctgctgctccaggctactttgcagaatatgcattgggaaatgatcttcatcaagatggaggtttgcttctgaataacccttcggcattagctatgcatgagtgtaaatgtctttggccagatgtgccgttagagtgcatagtatccctgggcactggacgttatgagagtgatgtgagaaacacggtaacatacacaagcttgaaaactaaactttctaatgttatcaacagtgctacagatacagaagaagtccatataatgcttgatggcctgttacctcctgacacctattttagattcaatcctgtaatgtgtgaaaacatacctctagatgaaagtcgaaatgaaaagctggatcagctgcagttggaagggttgaaatacatagaaagaaatgaacaaaaaatgaaaaaagttgcaaaaatattaagtcaagaaaaaacaactctgcagaaaattaatgattggataaaattaaaaactgatatgtatgaaggacttccattcttttcaaaattgtgatgagtatatgcttatgttctcataaatgaaggtctgtttagaagatcaaccacattcaataaggaattgtggggttcgacatgagttaactttgaaatacgtatgaattctggagaatcctgaaaaagacggtgcttcaaccagcttgcatagcacagagaatattcttggttacagaattcatatgggaactaggcttttaagatgttaataattagctaagctttagtaacccttactgtgctagtagattttagtagatattggtgttatattgtttgatgtttgaaaatatattaatatatgtgccgaacaagaaaccgaaagctatattgtactgtgtatttttactttagtcctcataatcatgttgaatttatgtgatcattgattttatttcatatggaaaagctaatttcttcttaaatttacattacctaatattctcactagctatgttctccaatccacactgccttttattgtaatatcatctaaatagatgcagaaaaatggaattttctctattaaagtattttacatttgacataaaaaagaaccagatacagttttctattcagatatgtttattttaacattgtttggttaaaaaaggtgaagttccagtcaaccactttttacccctgaaatttcaagataatgctatattaacttttccagatctaacactagcttattcttccctgttataaaatggtttgaacttactgaggagatattcctatcattaacaaaaataaactatttaaataatctgttgttaaaaggctaatgtcattttaaaattaatttttgttcataatgtagctcccctttagcctttgaatacacctggcagcagtatgcttaaaaataagaagttagttgcctggcgcagtagctcacacctg

SEQ ID NO: 76346 - DNA, 4345 bp, Homo sapiens
tcttgaattcccgggtcgacgatttcgtgccgcggctgctgcgggaagtggccagttcaggaggcggaccccccgagggcagcgctgcggggccgttttccggccctcctgacgcgacactgcccctctccgagagctgagaaggaaaagaggagcttgcggaggtgcggctgcaggccgttgttggtcgagctggcgggtcccgcgggccaggccgtggaggtgttacctcattttgaaagtcttgggaaacaggaaaaaattcctaacaaaatgtcagcttttcgaaatcattgtccacatttggattcagttggtgaaataacaaaagaagatttgatacaaaaatcccttggtacttgtcaggattgtaaagtccaaggaccaaatctttgggcatgtctggagaatagatgttcatatgttggctgtggtgaatcacaagtagatcacagcaccatacattctcaggagacaaagcattatctaactgtgaaccttaccactcttcgagtatggtgttatgcttgcagcaaagaagtatttttggataggaaattaggaactcagccttcattgcctcatgtaagacaacctcaccaaatacaagaaaacagtgtccaggattttaaaatacccagtaatacaacattaaaaactcctctggttgccgtatttgatgatctggatatagaagcggatgaagaagatgaacttagggccagaggtcttacaggtttgaaaaatattggaaatacttgttacatgaatgcagctttgcaggctctttctaattgcccacctttgacacagttttttcttgattgtggaggactagctcgaacagataagaaacctgccatttgtaaaagttatctcaaactaatgacagagctgtggtataaaagcaggccaggatctgttgtgcctactactctgtttcaaggaattaaaactgtaaatccaacatttcgggggtattctcagcaggatgctcaagaattccttcgatgtttaatggatttgcttcatgaagaattgaaagagcaagtcatggaagtagaagaagatccgcaaaccataaccactgaggagacaatggaagaagacaagagccagtcggatgtagattttcagtcttgtgaatcttgtagcaacagtgatagagcagaaaatgaaaatggctctagatgcttttctgaagataataatgaaacaacaatgttaattcaggatgatgaaaacaattcagaaatgtcaaaggattggcaaaaagagaagatgtgcaataagattaataaagtaaattctgaaggcgaatttgataaagatagagactctatatctgaaacagtcgacttaaacaaccaggaaactgtcaaagtgcaaatacacagcagagcttcagaatatatcactgatgtccattcgaatgacctgtctacaccacagatccttccatcaaatgaaggtgttaatccacgtttatcggcaagccctcctaaatcaggcaatttgtggccaggattggcaccaccacacaaaaaagctcagtctgcatctccaaagagaaaaaaacagcacaagaaatacagaagtgttatttcagacatatttgatggaacaatcattagttcagtgcagtgtctgacttgtgacagggtgtctgtaaccctcgagacctttcaagatctgtccttgccaattcctggcaaggaagaccttgctaagctgcattcatcaagtcatccaacttctatagtcaaagcaggatcatgtggcgaagcatatgctccacaagggtggatagcttttttcatggaatatgtgaagaggtttgttgtctcatgtgtccctagctggttttggggtccagtagtaaccttgcaagattgtcttgctgccttctttgccagagatgaactaaaaggtgacaatatgtacagttgtgaaaaatgcaaaaagctgagaaatggagtgaagttttgtaaagtacaaaactttcctgagattttgtgcatccaccttaaaagattcagacatgaactaatgttttccaccaaaatcagtacccatgtttcatttccgctagaaggcttggatcttcagccatttcttgctaaggatagtccagctcaaattgtgacatatgatcttctgtcagtcatttgccatcatggaactgcaagtagtggacactatatagcctactgccgaaacaatctaaataatctctggtatgaatttgatgatcagagtgtcactgaagtttcagaatctactgtacaaaatgcagaagcttacgttcttttctataggaagagcagcgaagaggcacaaaaagagaggagaaggatatcaaatttattgaacataatggaaccaagcctccttcagttttatatttctcgacagtggcttaataaatttaagacctttgccgaacctggccctatttcaaataatgactttctttgtattcatggaggtgttcctccaagaaaagctggttatattgaagacctggttttgatgctgcctcagaacatttgggataacctatatagcaggtatggtggaggaccagctgtcaaccatctgtacatttgtcatacttgccaaattgaggcggagaaaattgaaaaaagaagaaaaactgaattggaaatttttattcggcttaacagagcgttccaaaaagaggactctccagctactttttattgcatcagtatgcagtggtttagagaatgggaaagttttgtgaagggtaaagatggagatcctccaggtcctattgacaatactaagattgcagtcactaaatgtggtaatgtgatgcttaggcaaggagcagattctggccagatttctgaagaaacatggaattttctgcagtctatttatggtggagggcctgaagttatcctgcgacctccggttgttcatgttgatccagatatacttcaagcagaagaaaaaattgaagtagaaactcggtctttgtaatttttaggatgtagagagttctaatgaggaatcattttcatgtgccctgacatgtacacatgcgaaaacattcctaaaagcgtgtttatttgctttattttttttcatcatttatcccatttatttcttcttagtgggcattatggaagaatatattaaaatgtgtaatataccacaggttggtatatttagttttaaatacttaccataaagtctttcagtgtaatttttttttgagacagagtcttgctttgtcacccaggctggagtgctgtggtgttacctcagctcactgcagcctccacctcctgggttcaagcgattctcctgcctcagcctctcgagtagctgggattacaggcacctgccaccatgcccggctaatttttgtattttagtagagatggggtttcaccatgttggccaggctagtctcaaactcctgacctcaggtgatccacccacctcggcctcccaaagtgctgggattacaggtgtgagccacagcgcctggcccagtgtaatatttttgaaagaggagggacaattgtgaaatcagtaggttatctttaatctttacactacatgcagatccatagtatcctttgtagtgttgtaaatacttttgctttgaaaactttttcattgtcctaaatcaccctgactctgaccagtctttcagttctccaaaagcccaatttaattgtatagttttgtcatggcttcatataataaagagcctattttaagttgaaagtagtagtcagaaaattgttaatttcctaaagctcaggaaactagggtgtcactttttttgcactgcagcatatacactaactagcttattaaaatttacaaaatgtctttttgaatgtatcaaggatatatttagtttgagtggaatttgtcagcagatatcagtaacttattgccgcttatattgtacaatgttaaacttcaattcctgtaacctggttagtattaatgtcagtgactaaaaaacttagagttagttttagggcactttttattttgagagcatgaagtgtggaatgtgtcactacgattgttgataaagctgaggccacttgcaacttgattttttaaatgaaatagataaagtctttttgaataatatagtatgcactgctatttgcttgattatgtaatgtcaaaagtttaactatattccaagtacaaaaacatactggattacattgaggatgttgaatagcattcatgatggctttgttttggtttggggcagctgtcaccagctaaagcaatgttgttaaaattagctcaataaaaatgtctttaaaatgcaaaaaaaaaa

SEQ ID NO: 76347 - DNA, 1196 bp, Homo sapiens; identical to SEQ ID NO: 58875

SEQ ID NO: 76348 - DNA, 4888 bp, Homo sapiens; identical to SEQ ID NO: 58876

SEQ ID NO: 76349 - DNA, 1497 bp, Homo sapiens; identical to SEQ ID NO: 58877

SEQ ID NO: 76350 - DNA, 1970 bp, Homo sapiens; identical to SEQ ID NO: 58878

SEQ ID NO: 76351 - DNA, 1266 bp, Homo sapiens; identical to SEQ ID NO: 58879

SEQ ID NO: 76352 - DNA, 1761 bp, Homo sapiens; identical to SEQ ID NO: 58880

SEQ ID NO: 76353 - DNA, 5716 bp, Homo sapiens; identical to SEQ ID NO: 58881

SEQ ID NO: 76354 - DNA, 1550 bp, Homo sapiens; identical to SEQ ID NO: 58882

SEQ ID NO: 76355 - DNA, 6742 bp, Homo sapiens
cgcgcgccaatgatgactaaggctgtgccggaggaaccccgaaagccaggaaggctgacccaggccctgaactcacccctcacctgggagcatgtttggatttgcgtccccggcggcactcctgactgtctgacagacaccttcagagtgaagaggccacatctcaggcgctctgccagcaacggtcatgtccctgggactcctgtctacagagaaaaagaagatatgtatgacgagattattgagttaaagaagtcattgcacgtgcagaagagcgacgtggacctgatgagaacgaagctccggcgcctggaggaggaaaacagcaggaaggaccggcagatagagcagctcctggatcccagccgcggcacggattttgttcggactctggcagagaaaaggcccgatgccagttgggtcattaacgggctgaagcagaggatcctgaagctggaacagcagtgcaaggagaaggacggcaccatcagcaaactccagaccgatatgaagactaccaacctggaagagatgcggatcgccatggagacatactacgaggaggtgcatcgtctccagaccctcttggcaagttctgaaaccaccggaaagaagcccctgggggagaagaagacgggcgccaaaaggcagaagaagatgggcagtgccctcctgagcttgtcccggagtgtccaggagctcacggaagagaaccagagcctgaaggaggacctggaccgcgtgctgagcacctccccaaccatctccaagacacagggttatgtggagtggagcaagccccggctgctgaggcgcattgtggagctggagaagaaactaagtgtgatggagagctcaaaatcacacgccgcagagccagtcagatcacacccgccagcctgccttgcatccagctctgcgctgcacagacagccacgaggggaccgcaacaaggaccacgagcgtctccgaggggctgtgagagacctgaaggaagagcggaccgcgctgcaggagcagctgctgcagagagatttggaggtgaagcagctcctgcaggcgaaggccgacctggagaaggagctggagtgcgcgagggagggcgaggaggagaggagagagcgagaggaggttttgagagaggagattcagacacttaccagcaagctccaagaattgcaagaaatgaagaaagaagagaaagaggattgcccggaagttcctcataaggcccaagagctcccagctcccactcccagcagcaggcactgcgagcaagactggccgccggattccagcgaggaggggctcccgcggccccgctccccctgctctgatgggagaagagacgccgcggccagagtcctgcaggcccagtggaaggtgtacaagcacaagaaaaaaaaggctgttctggatgaggcggctgtggtgcttcaggcagctttcaggggacatctcacgcggacaaagctcttagcaagcaaagcacatggctcagagccacccagcgtgccaggcctcccagaccagagctctcctgtgccccgcgttccgagccccatcgcccaggccacgggcagccctgtgcaggaggaggccatcgtcatcatccagtccgctctgcgggcacacctggcccgggccaggcacagtgctaccggtaaaagaaccaccaccgcagcttctaccaggaggagatcggcttcagccacacacggggacgcctcctccccacccttcctcgcagctcttcctgacccctctccctcagggccacaggccgtggcacctctacctggggatgacgtcaactccgatgattccgacgatattgtcattgcaccgtctctgcccacgaagaactttccagtttaggtccccgtcactgtctccacgctgtgatggcagcgctgccgaggacataggaaccacgactggaaagataatttatcgtgttaggagaagaacgatgatacctacttaacacctcagcatctgcgtggtgtctctttgtgcttttgtttgtggaaggagacccaaatgcctttactttattctctggggagggccagcggctcgcatccccctcatctccagctgcagctcggatggtggattttcagtgccaacagacacatctgccgtgaactcgcagatgccagggagccctgtagtgacacgttctctgacagcaccttgccgcctgcccacgaccttgaccgtgaggagctgctatacgcaaccagcgccgacaccatgccccctcttcctggtgacaccctcaacaaccaggatttgctcgatctcagcccagcaggccaggcagacacaccccgctgtgccttaggaaggtgtgagaccggcttcccccatccccacagcaaaacacggcctgtcccaagccagtgaggagctaaagacacccaggtccccaaatgatcttactccatgccccacccgctcacaccgtcctttcccgtcacccttgctatcccctggagcactgccctccagagctgcccttcccaggaaggaatttggttggattctgtcactgtggagaccaagattttttaaaattcccaattacaaaagcagcatcacacttgcttctgagaacagcagggtgatgtctgttcccaagctggtggcgggagccttagcctgtgtggggccacccggggaagaggaggagaggagggtgaggaggcaggctcgccgttccaagggacagcataggctcgtggtggggcgtgttgcatctggtgtctgggacagtccccgtcaccccatgtgtgcggcctctgcactcccaagctccatggctgggctgggctgggctgggctgggctgggccgggcgtgcggagcctgtggagccagcagctgcagaggcctaggagggagttcctgggggaagcgcacagtgtccagtgcccatctcttgcttgtgtgtgagattagcccttgctggggcgtcaagaggaagagccttagacctgggcgggccttcaggggcatctagacccctgcacagcccaggcctggtgtctgcatttccacagcacccctgtggggactcctgccggggctggccgctgtctcaggagagacccaatggttagaaagcccctttttacacagctgacagcttctcccaaggcttccgtccacggggacaggcttaacccctgggcgccttttctgcagcatggcggccttctgagtcacctaagctgagcctgggtcattctctgtggcggtcagaaggccgatggccccaacacagtggcttgtgaaagggagagaggaggctctgcatgtccacctgctctatgggaggaggacacaggtgtccccagcccagcctgttctctcccagtcactcagggatggggccacccaaagtgcaggacccgccccaccctgcggttcgaagcctggcccctgtctccacttagcttctgtttctgcagtgggtggaagcgagtcagcggggggcctggcttgtgtacgtgttttccttatttggtctgtgggttgccaagtccatttttttttccactgaactggctggtaacttgatggactgtgtaactgacacaggccctctttagacccctgccttcaccccacccgcccgggtccactccctggggcgctgtcccaagccatccctgcttgccagctcaaagcttcaggtcctaggagccagtccacctcgaaagccctgagaaagtgagacacctgcacattcgctgggggagaccctccgttctcttgtggcagctgctcccacttgttaaaccaagctgtttctgcgggacgtgctcactcttgggaaccagtggcctagagctttgggttacaggcatggagagggctttcctgcctcaggcttggaggccaatgttccatacataaaccgccatgtcctctggtgcagctgggctgctcttttaaaagccagcatccatcttgaagctcgctgggtaaatggcaatgcattctcaagccagtgtcttcagctgatgcccagtgtccagtgctggtcaccagtcccctttgctgggtacagcctgcctggctgttctgtggtcctggaacgctgcagtgtggttttgttccatggagacagtaccaagcggagaggcctccttgcccacggccccagggcctgggggccaggggttctggccctgcggggacttaggcaggaggggaagagaagcccatggagccatgggaggggtgagctgtgggcggggcctagtcatgggaggggtgagctgtgggcggggcgagctgtgggtggggcctagccatgggagaggtgagctgtgaatggggctagctatgggtggggtgagctgtggacagggcctagccatgggaaaggtgagctgtgggcggggcctagtcacgggagaggtgagctgtgggcggggcctagtcatgggaggggtgagctgtggatggggcctagccatgggaggggtgagctgtgagtggggctgagccatgggagcagcaagctggtggagtgggctgggcggagctgtgggggctgctggcagggcctaggaaagtagacaactcccgggggagacgaagtagagagtgagtccccaagaaagggactcctgccccagcgtcaagtgccaaagcaggccccatctaccacttcagggtcgacgttggtggcaggtgttgttcacggtgtactgattgtcactgcaacacctccacatcaccttgaacttcaagaacagcagcaaagctgtatctgctatcagaggctgttaggtagtccagctttaaaataacacactctttctctatcccatgccctttaaacaagcagccacaggagatgtcagtctccagggcctggccccactgtgttgacagcagtcatgtctgttgagctgacactgctgaggctgaagctggccctgtgcaggtggctggtgagccacaggtgcagtacccggaggtgtgctctcccctagaggcctgtccccaactcctcccctagaggcctattcccgctgctcacagacctcagcagaggcaccagctggagggctccagggacatccttggaaatacaggaggctttcctggcacagggcacagctcttaggaggcctttgtaggacgctgtctccccagcgtgtcctgctcatccaggatggggagaaagaggaggaggccccaggctcagaagccagggacagactgccgacgattaccaaactgaatccaggcagtgccatgaccctgggtgtcccttggttcacatcacccaccagacagctgcggagagagtgcagggaggggctgggaccaaacaggccagaaaccagcagaaaagaggcagaagtgaggtgggtgtgcctggggcacgaagccagcgccggggggatttcagtggagccttacagccaggctccgtgcggactgtgatgccagagaggcgtgcagcctctgggcaagtcgggagagggcttgggtggtccccacaaggcagaagaggtggaagggccagagaagaccaccaagaccaccgttcccgcaggcctggggtgagtgacctgactgagactagcgggcagagccaagcagggctaaactccaacccagggcccggtgttggacaaagtagctttttctttgctcgtttgtctgtgtattaagaagagactaaaatagccaaacgacgctggtcgcatgcgctggctgtggtctgtctgctgaatgtctatttttgtctcctgacgagacgtgaggaccatgcccttgatccctccgatggaccagaaacccccttccttgcaaaaaaaaggcaattgaattaggaaaagatagaccaacctagctcagatccaccaagataagcacagcaaagcttggctgcatttttgaggaataaaaacctgcagaaagcaccgataaccttcaagatctgaatgagattctattataacccgtctaaaccgattgcaaaattcctcctttggttttggaaaacaacgttgcttctcccgtggctcggattctctgaggaccagggagttgacacacaaaccccgccatgggtccgagccagctatttctcaaggctcccacctcgccaagctcccaagggcctgctggcagtgcctacgctgtgccaactaccctgtctggtacagaccacggctgggtaagcacccttaaaagcaacagaaatgacgtctggaagctgaaatgtgaaactgtcaagatggcttaaggagaggaaggagtggacccgctggtctttggcattttgtatttagaattattctaactttatacataatgtataggccgatcttttggaagggataaggttttcattcttgtgcaactcattattctcattattggccttttaaataaaaagttgttttgcagtgtgccttgagtgccccgtgaaaacttctctttaatgacctccaggtgtgttcctgccccacgcactcgggctgaacaaacgatccgcttcaaaaaccccgcttctctgggcttctggcattttgccgtggtcgtaatgcaggcttggggttggagagccagctggagggacgggtcccgccgccagctccctgccacgcatgaactcggatacatctgttgacaccccggtcccccgtcaaatatctattccctctgcctgttgagtatgggtgtatccacggttccgtccccaacac

SEQ ID NO: 76356 - DNA, 1057 bp, Homo sapiens; identical to SEQ ID NO: 58885
  misc_feature (1)...(1057): n = a,t,c or g

SEQ ID NO: 76357 - DNA, 1151 bp, Homo sapiens
ttttttgattttaaatctttaatcaaattccaaaggttatcagccatattacatgccatgattagctttctataagcaattttttttactgtgtacagatcggtgtcaatgaaataaaaaaataaaactgtatactaggcaaagaactttattaatctttgtttcaaacttgattcccaggcttcttcggcttaattagctgcaaagaatgaattgtgtataagcaaaaactgaaaagagctgcagtgtccaaggggcttgggcttaaaaatattagagatctagattttatcagatccataaacaaaaatttcttaaaaagcagtcataatataaaatagcagctcccagctcccagtaacttcttcaggttttatcttcagaagttgactcaattcagtttgcctcattcttggaagcctcatcaaaattctccacaagatctggaacttcatcatcatcatcctctccagtagcaagtggtgcttttccatccacagattgtttgggcagagcttcggccagtctccttaaactagtcagactatccgcaccaagctggtttaagatgctgggtagcatttctgtcagctgctttgtctcagcatggcctgtaatggtgaaagtgttcgctgccagagatgcctgaactttagggttgttaaagtggatcactgttccttggtttgtaaacatattcacctcttcaataccagagatattgtttacccctaacttctttaaggagaactgaagttttttgtcatctgctgtggctgttctatgaaccaccttcttctttctgcgagcagttcctttcccaccaatgcgcacttgtgcctgcagtttggcgagtttttcctggttcatgattgtttctttcatctgaggctcctgtcctcgggttccgccgcgaggtggaggttgagacagcgtcgcctcgcccccagggcagccgcccctggctcgacctcgcccccgagagtcagcctgagcgggtgcgcctgtccgtcgcatcgccttccttctcctcctctgccctgtccctccctgtctcgctccttcagggaacttcccgcccccgctcccgtcctcctaccacgccgccgtccagagcctttttgtaccttgtcggagcgaataaggggccg

SEQ ID NO: 76358 - DNA, 1071 bp, Homo sapiens; identical to SEQ ID NO: 58886

SEQ ID NO: 76359 - DNA, 2118 bp, Homo sapiens; identical to SEQ ID NO: 58887

SEQ ID NO: 76360 - DNA, 6703 bp, Homo sapiens; identical to SEQ ID NO: 58888

SEQ ID NO: 76361 - DNA, 2712 bp, Homo sapiens; identical to SEQ ID NO: 58889

SEQ ID NO: 76362 - DNA, 2895 bp, Homo sapiens; identical to SEQ ID NO: 58890

SEQ ID NO: 76363 - DNA, 2469 bp, Homo sapiens; identical to SEQ ID NO: 58891

SEQ ID NO: 76364 - DNA, 4434 bp, Homo sapiens; identical to SEQ ID NO: 58892

SEQ ID NO: 76365 - DNA, 2957 bp, Homo sapiens; identical to SEQ ID NO: 58893

SEQ ID NO: 76366 - DNA, 3255 bp, Homo sapiens
aacaagataccaaaatgcatgaaatttataaaggaaatattactccccaattgaataaaaacactcttaaaacttctgctgccacggatgtttgggctgtgtacttttctcaattttggatagattatgaagggatgaaaagtggaaaaggacggccaataagttttgtagactcattccctctttccatttggatttgtcaaccaacaagatatgcagagtcacaaaaagagccgcagacttgtaatcaggtatctctaaatacatcacaaagtgaatctagtgatctggctggccgattgaagcggaagaagctcttgaaggagtattatagtacagagtctgagcctttgacaaatggtggtcagaagccttcttcatcagatacatttttcagattttccccttcctcgtcagaggcagatattcatctcctagttcatgttcataaacatgtcagtatgcagattaatcactaccagtatctgcttctacttttcctgcatgagtcacttatcctgctttcagagaacttaaggaaagatgtagaagctgtaactggcagtcctgctagtcagacatccatttgtattggaattttacttagaagtgcagaactggctcttttgctccatccagtggatcaagcaaatactcttaagtctcctgtttctgaaagtgtgagcccagtggtacctgattatttgcctacagaaaatggggattttttgtcttcaaaaagaaaacaaattagtagggatataaatagaattagaagtgtaactgttaatcatatgtcagacaacagatctatgagtgttgaccttagccatatccctttaaaggatcctttgctttttaaatcagctagtgatacaaatctgcaaaaaggcatttcttttatggactatttatcagataaacatttagggaaaataagtgaagatgaaagtagtggacttgtttacaaaagtggctcaggagaaattggatcagaaacaagtgacaaaaaggattcattttatacagattcaagtagtgtcttaaactacagagaagattcgaatatactttcatttgatagtgatggtaatcaaaacatactttcaagtactttaactagtaaaggaaatgaaaccatagagtccatctttaaagctgaagatttgcttccagaagcagcttcactctctgaaaacctggatatcagtaaagaagagacccccccagttagaacacttaaatcacagtcatctttaagtggaaagcctaaggaacgttgcccacccaacctggctcctctctgtgtttcttataagaatatgaaaagaagctcttcacaaatgtcattggataccatttcacttgacagcatgatattggaagaacagttattagaaagtgatggaagtgatagccatatgtttttggaaaaaggaaataaaaagaactcaactacaaattacaggggcacagcagaaagtgtgaatgctggtgcaaacctacagaattatggtgaaacttctccagatgccatcagtacaaattcagagggtgctcaggaaaatcatgatgacctgatgtccgttgtggtatttaaaattactggtgttaatggggaaattgacatccgaggggaagatacagaaatctgtcttcaagtgaaccaggtgacaccagaccaattaggcaatatcagccttcggcattacctttgtaatcgtccagttggttccgatcagaaagctgtaattcattccaaatcctctcctgagatttctctgagatttgaaagtgggcctggtgctgtaatacactctttacttgcagaaaaaaatgggtttctgcagtgccacataaaaaacttcagcactgagtttcttacatcttctcttatgaatattcaacattttttggaagatgaaactgttgcaacagtaatgccaatgaagatacaagtttctaacacgaaaataaatttaaaagatgatagtccccggagtagtacagtatcccttgaaccagctcctgtaactgtacatattgatcatcttgtggtagagagaagtgacgatggctcttttcatatcagagattctcacatgcttaacactggaaatgatttgaaagaaaatgtcaaaagcgattcagtgctgctgaccagtggaaagtatgatctgaagaaacaacgcagtgtcacgcaagccactcagacaagcccaggggttccttggccttctcagtcagctaactttcctgagttctcctttgacttcactagggaacagctcatggaagagaatgaatctcttaaacaggaactggctaaagctaaaatggctcttgcagaggctcacttggaaaaagatgctcttcttcatcatataaagaagatgacagttgaatagcaggagtggcagtcaaaactgaaattatagctctgggagtaggaaggttatatttataatgtggatgttaccagttaggggaagacttttattttcatgaaaagacaataaaacaaaatggaatgtgatgaagtggtgactatttcaaagccagtttagaaagtattagtacgggcattacaatcttttggttgttttgtgttttggggcttaaccctcttttaagctgttgtgatcctagggaagtcaacacatagtgtaaaataattaccatgccctaatgaaaagaagatgtcatttcctaattttgatatctcattttcggcattttttaaaatgtaaaaggaaaacctcttgtgttcacacagattgctgaattgatttctccatatttgttaataatttactattatttacaaagattcaaatgcttttatgactaatgtaaaatgaaaagaggcttacattttaaatgttattaaaattatgtacttaaatctataattatttaattattgtaaaaagtccaagcagatcaataaactatataattaatgggtttggaaaatcatcaccctactgaacttacaaaatatcttgaaaatgtgaaaaatatcattttaaataatgggtacattgtataagtggaagctataattttcaacaaaaagatggtacaaatgtaaaagtaaaaagcacaaactatacaaaagcaaaatctatggccaagtgatttaaaagcattacttgtacattcctttaaacatttgttgttagaagcaaaagagtaatttatcctgctaaatttggcaccatttgtaattataaaaattttgattaatactaa

SEQ ID NO: 76367 - DNA, 5523 bp, Homo sapiens; identical to SEQ ID NO: 58895

SEQ ID NO: 76368 - DNA, 1980 bp, Homo sapiens
tttttttaaactatattaggcaaacatattcctttatttagattttatattcacatttagtttttttatgcacacatttaagactttataaacactaacattagcaattccagaagggtaggtagatttttttaaatataattactcttataaaaggaagaaatagagactttactaatggactgtatttttgacttcacctataatgcaactaatcatctacttagttgctatgttaatctatttgcttcttcagcaaattatcactgactcagtggtttaaaacaacacaaatttaccatcttatggttctgtgggtcagaagtttgacattgatctcactgggctaaaaaggtgccagcaaggctgcattcctttctggggactctaatggagaatctgtttccttgccttttcaatctttttttacaggcccccttcattccttggctcaaggtgtcttcctccttcaaagccaccttttaacttccttcaaaagtagttgtctttcttatacaggatcactctgacctcctcttttgcctccctcttcaacttttaaagatccctacaattatattaggccctccaaagtaattcaggataatctccccatctcaaggcccttaataacattttaaattaatcacttctgcaaaattcttttgcaatgtggcataacatattcacagttcctgagaattaaaaacattggcatccttaggcaaatctgcttaactttttcaatttagcttcatatctttttttactccaagatagaagagtgatgtttaaagtactcaagttacagccagcatttaccaattctttgattcgactttttaaagtacttatgcttgaatccagaacccgaggattttcgattatttgtgaaatgctaatgttttcttccatgaggcagtctattttatcattaaactttttctctgccaagaagatcacatctggatagcttaagacaaacttctgtacctcttcttcagtacatccaagagaaaacagcttctctttgatgtttgcgtagcttcttctggcatagtcattggaaaggtctaggatttcagctcctggaccacatatcagaaccagcagttcctcactgttcaaattgaaagttgaccgtaagaattcaatgttagctttcacccgcttggtgctctgaattaagataaaagggtttttaaaaattatctttctgacaaaatctgcgggatcattgtgacccaatgacaaaccggctgcctgcaaaaattcaaccatctgtttattcagatcaagactattggagaaggtacgaggggcattggtcaacaatcgacaaaggcatttacgggtcaatccaactgagtagaggaactttatattattctctaagtttaggttgttattggaccgaaaaaaggattcaggagaacgttccaaaatatttacaatttcaaggtctgatgtcacaatctttctccacagatcccaccgttttgaaagattctcgggagtacgtgttattgctcgtggatatcttgatatgatgctagcgatcacttctttgctagctcctttggaaagaaggaacatcttcaggtcctgctcattggtaatcatcctatgaaaaactccaggctgtcgtttccttgccatgtcaatatctactcccatagtaagtaagtttttcagtaggtcctcatttttcaaaggctcactgtctgtattatgacacttcacaccaaaaagcctaaatgaaactgatttgaagatgttttctgctgaaaatcgagtcatccaacatcttgaaccaaagagaaagttatttctcatatgccagaggtttcctggtgccataatggttaggtagttcaaaccttttgaaatgcttgtttgtcctaaggaaaggctctgcatccctccagaaaggctggagaacagctatctcctgaactgcacccatccactgtagttcgc

SEQ ID NO: 76369 - DNA, 1176 bp, Homo sapiens; identical to SEQ ID NO: 58897

SEQ ID NO: 76370 - DNA, 1595 bp, Homo sapiens; identical to SEQ ID NO: 58898

SEQ ID NO: 76371 - DNA, 2034 bp, Homo sapiens; identical to SEQ ID NO: 58899
  misc_feature (1)...(2034): n = a,t,c or g

SEQ ID NO: 76372 - DNA, 6077 bp, Homo sapiens; identical to SEQ ID NO: 58900

SEQ ID NO: 76373 - DNA, 2942 bp, Homo sapiens; identical to SEQ ID NO: 58901
  misc_feature (1)...(2942): n = a,t,c or g

SEQ ID NO: 76374 - DNA, 1807 bp, Homo sapiens; identical to SEQ ID NO: 58902

SEQ ID NO: 76375 - DNA, 1212 bp, Homo sapiens; identical to SEQ ID NO: 58903

SEQ ID NO: 76376 - DNA, 3175 bp, Homo sapiens
gaagcatgggtcctttagaacgggcggcccctttttttttttttgctgtccttttaaattttaataaaatagattaatttcatattacatagagagcaagtccatccattcatccgtgataaaattttagaaatattttctataaaatgtttagtatttaattggaaatgaatccagtataacatgacttccacagatacagcattcccatcctcactcccattcctattttgagaaattttaaaaatacagaaaagtacaaaaaataagacaagatatccctataccacaatccagaatcaatcagtatcttcttatatttacttgaagtcttttgaaagagaagtggatgtttatataaaaagctgaagtcccctttaaccaatacccatcccacctcccacactcattattttcccttctccactcttcacaggtgaccactatcaagagtttggtctgtatccttccaatccgtttcaaaaacatgtacatacatatatgcatccattaccaatagatagtactgagttttatgaggaaacttttaattcaaatttacaaaaaagtcattgtactatctgtatcattctgcaacttgatcccccctcaacaattctgggatctttctgttaatacatgtggatttcatttgttgcattttacagatatatagtattacataagaatttcccatattgttcgtgatgggctttctcagttgtttctaatttttggctactacaaatcaagccacagtaaatatcctagtgcgtatttcctgagcattcatactcataagtagaaccgctaagtatttctcaaattgttccaaggaatgtttccctattcccaaggtcatatgcattttagtacatagcttttccatatttctgtttttaatctctggattcacttttgtgtatagttcatggtctatttttcccccttggagaacaaactacctccacttaaaaaaaatagttccattatttcctcatttcctgatgccacttgtatcatattccaaattctaataaatgcataggtctttttttgaaatctcttctgctctgctcaatcaataccacaggagtcttaatattagttgtagatgaccatgtcatctatttttgtctgttcctttccaatatttacaacttaatttttcttgttactggcgaagatctccagatctatggtggtagcaataaaaaacaggcctccattttctgttcccacttttagtgaaaatgtgcctaaactttcaccattatctctgctgcaggtttctctgttggacacagggttttaatcatatgcatgtctttctcttcagtacaaattttctggtgtcccttaagtttttagtacttgttaaagttaacctcattcgtggtgctttgcttcagaaggattatttctggggcatgatgaggtgcaaatttctaatgaaagctttcccactttcaaggctttcatggggtttttagtgagtatgaattttctggtgtctaatgtggtgtgacttctggctgaaagctttcccacattcactgcactgataaggcttcttacctgtgtgtattctcaaatgcagagcaagggttgagaactgagagaaagctttcccacattcattacaaccatagggcttctcccctgtatggcttctcacatgcacagtgagagatgagctctgagagaaggcttttccacaaacattgcattcgtaaggtttatcacctgaatgaatcctcacatgtacaataagtgatgttcgctgagagaaggcttttccacattcgttacattcatagggtttctctccagtgtgaatgttctgatgttttatgaggtacttcttctggccaaaggctgttccacattcactacatttaaaaggcttctctccaatatggattttctcatgctcagtaaggttggatttgccactgaaggtttttccacactccttacatacaaagggcttctctcctgtgtgagttctctggtgtctgatgaggtttgacttctgaatgaaagctttcccgcaatctttacactcaaaaggtttttctccagtgtgaattttctggtgcgtaaggaggttttccttctggctaaatgattttccacattcattacattcgaaaagcttctcgccagtatgggtgttctgatgtttaatgacatactgcttttggctaaaggcttttccacactcgttacattcaaaaggtttctctctcgtgtgaaaatgctcatgctcagtgaggtttgatttgtggctgaagacttttccacataccttacaggcaaaggggttttccccactgtaaattttctgctggctgaggtgtgacatctgaatggaagctttcccacattcacaaggtttctctccagtaaaaatttcttgatgagtgaggatttacttttggctgaagatatttccacatctcttacatttataaggcttctctgtgtatgatctcccaaatgcagagtaagggataaggtttgagaggaaatgttatcatactcagtatattcaatgctttctctctagaaaaattttctaatattcaatgaagtattgctaccttcactagtttctctccagcatgaattttctgcttctcaatgagattgtcatctagctaagggcttgtcaatactccttagaagcacagggtttctcttcagcatgacttgcacgttcgacgaaatgcaacatatgagtaacagttcccccacattcagtaaattcatagggtttctctccagtatgaacactctggtaacagatgaggtacaaacgttttaaaccaaagacatttacacttaaagggggttaataccataaggagtaagctgtggtagagaagctcccaactaagtcccttgatgattctttcctacacaacctccctcatgatttcagtccaggttgtgtttcaaactgaaaacttcaaaaaggtgtggccttaaaacaaatacgatctgagaacagaggaagtattttttcttatattcaacgctctttttctcagtctttcctggagatggatcaacatgcctcccaagtcctggtgcctctcaagtcctggtgcctctctatctgtgcatcatcttctcaggcttcttccgcgcagatccttcccacttcttt

SEQ ID NO: 76377 - DNA, 3950 bp, Homo sapiens
  misc_feature (1)...(3950): n = a,t,c or g
catcgccccacctccggtcgctggacgtgctctcgcgtacctccgcctttcgtaagtccccccgcctcgcatgatggctgcggtgccgccgggcctggagccgtggaaccgtgtgagaatccctaaggcggggaaccgcagcgcagtgacagtgcagaaccccggcgcggcccttgacctttgcattgcagctgtaattaaagaatgccatctcgtcatactgtcgctgaagagccaaaccttagatgcagaaacagatgtgttatgtgcagtcctttacagcaatcacaacagaatgggccgccacaaaccccatttggccctcaaacaggttgagcaatgtttaaagcgtttgaaaaacatgaatttggagggctcaattcaagacctgtttgagttgttttcttccaatgaaaatcagcccttaactaccaaagtatgtgttgtccccagtcagccagtggtggagttggtgttgatgaaggttttgggagcctgcaagttgttgctccgcttgttggactgctgctgcaaaacttttcttttgactgtgaaacatctaggtttgcaagagttcattattttaaaccttgtgatggttgggctggtgagcaggttatgggttctctataaaggtgtcttaaaaaggttgattttgttatatgagcctttgtttggattgcttcaagaggtcgctaggattcaaccaatgccttacttcaaagattttacctttccttctgatatcactgaatttttaggacagccatattttgaagcctttaagaaaaaaatgcctatagcttttgcagctaaaggaataaataaattgctaaataaactgtttttaataaatgagcagtcaccaagagccagtgaagaaaccttgcttggaatttcaaaaaaagctaaacaaatgaagatcaatgtacagaataatgtggatcttggacagccagtaaagaataagagagtcttcaaagaagagtcatcagaatttgatgtgagggctttctgcaaccagctgaaacacaaagctactcaggagaccagttttgattttaaatgttctcaatccagactaaagacaaccaagtattcttctcagaaagtgataggaactcctcatgccaaaagttttgtgcaaagattccgagaggctgagtccttcacacaactttctgaagaaatccagatggcagttgtatggtgcaggagcaaaaaactcaaggctcaggccatttttctgggtaacaaacttcttaaaagcaaccggcttaaacatctggaagctcaaggtactagtttgccaaagaaactagagtgcataaaaacgtctatttgcaaccaccttcttcgtggctcaggtatcaaaacttcaaagcatcatctgagacagagaagatcacagaataaatttttacggagacaaaggaaaccacagagaaagttgcagtcgactcttttaagggaaattcagcagttctctcaagggactcggaagagtgctacagataccagtgctaagtggagactctcacactgtactgtgcatagaactgatctctaccctaacagtaagcagctcttgaatagtggagtttcaatgcctgtcatacaaactaaggagaaaatgattcatgaaaatcttagaggcatccatgaaaatgaaactgattcgtggacggtgatgcaaataaataaaaacagtacatcaggaaccattaaggagacagatgacattgatgatatttttgctttaatgggagtttagatgttcgttcatatgtgagacttttaagtgattaacaaggctagttcagtgttctaagtagaactgctaagatctggaagtaccacctggactcacagaggagctgctttagtgcagcattgcacaggagttcatttcagttcagtctacatttaaagtagcattgtgtcatttcatcaacaagtatttcttttttggcttcaactacatgtcaggtgttaatatgaaaaatctgccacagcctacccttgagaagcagatgtaattccttgagtgaggctagtaagtctctgaaaaactgaataattttatgacttactaggcaatttaataatcgtttgcaaaaaccattgtgtcttgaggtaaatgaggagcgggggtgggagatagcaaggaaacacctgaaaggtcaatttggtcttattggctccattatacataggtccgcctctgaatactaaagtttgtagctcctgacatttatgttttcttgtttatatgttggaattgatcaacaaggtttgccactgcttgtattaccagggactggttacaaccattatttctcttcatttgcttggcttatctcatattaaagtgagtttggagttctccaaaacgttttaattttatttatttgggtaccagtgattgattccaaataaacctttttacaaaaaggcaataaggtggtttatggttacatatgaaatataataggataacaggtagatgagaaagtaaaatgaaaaaatgaggttaggagatacaaagtagacccaggaatgaggctagaacatttataatttggtgttgatgctgtcatctgataggggatgttgctcgtactgttgctctgaggggagtacatcttgagtattttcaaataatgatgtgaagtttgaggtaggtatctttccaatgttctaactttactagaattaggttattaagcttctctagtgcccttaacttttgttacatagagatttaaagaaaaagaaagtagtaccttagtatgtaccgcatccttcttttcctcagccaccctatcataacagaagttatttcccttccattctttatttggctttgttctttccctgtctgccttctccattttctcagttatctctaccagtggttctcaaactttagactttttgagaatcacctggtgggttgctaaaagatgcagattagccctttcccagagactgataaacaggggccagaaacctgcatttttaacatggagcccaagtgattttgatccaggtggcccccaaatccagttatataaacactactttagcttctctcctgaagccttaagtaaactggtttaattcttaatctgtagtcagttttcatattcctttaggctttctaccaagtggtagtatccatttagtgccttaaaatacagacaataccaaggagatttcattctagacaagtctagaaatggccattaacttctaagtgtccttgtgttcaatgaatatcctttacctattgggaaatagaaggtaaattagtaagagaactggtgtatagctttgtggaccatagggcttatttgctgagagttgtctatattcatgcacccagtcccctaagtagcctcttttaatacttcatttagctgattcagaaaaaaactccctgggaattaggagatttaaggttcagtcttgcttctcctacttgtggcttcactgagctagtcagtttcctcaggcttaggtttctggatttgaagtggaattttttcaagaatgaaacttttatagctgaaataaactttggagcttatctttcattggaaaaaccagggtggttcagtgagttaaggacaatatagcatggactgggctgccagtctagcatttgtttccaaattcattcatgttcttttggagtatcttcatctcctctcattttcccatcttctgccctttactattctgggaaaatggcaaaaaagcttcacatgtgtccacaaaatgacaatttgtatgtttataaggaattcagtattctgtatcagttactttttccaaataaatccaaatatttaacatttaaaaaaatgcaatctaaagtataccaaactgtaacttacctagtaaatgagattagaaactattgtcagggtcatcgtantgaatat

SEQ ID NO: 76378 - DNA, 1839 bp, Homo sapiens; identical to SEQ ID NO: 58833

SEQ ID NO: 76379 - DNA, 2006 bp, Homo sapiens
cagtggaacgcgagcaggagattgaccgctggagggtgaagtgtgtgcaggaggtgggggagaagaagcgggagcaggaactcaaagcagccgctgatggcgtactatctgaagtgaggaaaaaacaagcagataccaaaagaatggtggacattctacgggctttggagaaattgaggaaactgaggaaagaggctgcagcgaggaaaggggtctgtcctccagcctcagcagatgagacttttacgcatcatcttcagcgactgagaaaactcattaaaaagcgctctgaactgtatgaagctgaagagagagccctcagagttatgctagaaggagaacaagaggaagagaggaaaagagaattagaaaagaaacaaagaaaagaaaaagagaaaattttacttcagaaacgtgaaattgagtccaagttgtttggggatccagatgagttcccacttgctcacctcttggagcctttccgacagtattatctccaagccgagcactccctgccagcgctcatccagatcaggcatgattgggatcagtacctggtgccatccgatcatcccaaaggcaacttcgttccccaaggatgggtccttcccccgctccccagcaacgacatctgggcaactgctgttaagctgcattagtaaagatgctccaggagtgtggtccagccagcgctctttccagctgtaaatattagcgatggtgccatcttttgctgtagactaaactgcaacttctaaattccatgtggcattcccctaccctgaatttatgctttccttctgtgctctgtgctggccagaggtgcctcttgaatcaaattaatgtggtttttcaggaaaggacttaggtgaactgaggtttttaccacaggcagtgaatgaccttggttcaccaaatttgcctctgttttgaggggcttggtccagagtgacttgttaatttactctaacttccttgtgtgttgatgggtaagtacactcaaacactgaatacaggtgtgtgatgggtagatttcacagcccttctactaatagtgagtgtgaaggcaagcttgatgcaaaacctcctgacctttcctacctgaagagccctttgacttctaggaagaaaggtcaaaaatgttatcttcagttgtgttaatcccagttttagtgcagcttaggaggctgctagttaggaagataacagtggctgtaggctgggttgccagaaaagatggtggcctagtcttattattcagatggagaacttagaaaacctgaagagtacccaaattggattgtattttaatggacaatggctgtattttttccatgttagaaggatcctaatgaaagcacctgttatttttaagtttctaagggtctagttgttcagaatccccaaggatatttccctaacctcactcagtcacattgtaggagccagtgtagctatggaattatcttaggaactcaagcttctaaaactatccatgtagtcaaatctaggggaaaaagcaaataaaaatagtaaaatttggccgggcacagtggctcacgcctgtaatcccaacactttgggaggccgaggcgggccgatcacgaggtcaggagatcaaggccatcctggctaacacggtgaaaccctgtctctactaaaaatacaaaaaaatattagctgggcgtaggtggtgcacacctgtagtcccagctactggggaggctgaggcaggagaatggtgtaaaacccaggaggcagagcttgcagtgagccgagatcgcgccacggcactccagcctgggagacagagcaagactccgtctcaaaaaaaaaaaaagtaaaatttattttttatattcattaataaatgctgttgtgcttggagatgatcactcatataacatgtcatttttttggttctgttttggtttggtttttgccaattattttgttatatttccaaaaaactaaataaaaatcatttttattttttaaaaaaaaaa

SEQ ID NO: 76380 - DNA, 2128 bp, Homo sapiens; identical to SEQ ID NO: 58908

SEQ ID NO: 76381 - DNA, 2503 bp, Homo sapiens
acccaccgcacctacagggcggtcgagtgagggagctgctggcgggtgggtctggcaactctttgggaggccgacgcgggcggaccggcgggtgctgggaaccgagcctcggcttgcggccggcagtttccgtgggtctgtgaagaggtcggcggcccctgcgggcgccagtcagctttaagaaaaagtagagatcacttctgactgtactgaacagcaaaaattaagtgacttgctgccctgcacatcatggcactgccattccgtaaggacttagaaaagtacaaagaccttgatgaagatgagctccttgggaatctgtcagaaacagaactgaaacaactggaaactgttttggatgatcttgaccccgagaatgcccttctgcctgcagggttccggcagaagaaccagacatcaaagtccaccacagggccatttgatagagagcatctcctttcatatctggagaaagaagcattggagcataaagacagggaagactatgtgccctacactggagaaaaaaaagggaaaatatttatccccaaacagaaacctgtacagacttttacagaagaaaaagtgtctcttgatccagaattagaagaagctttgacaagtgcttctgatacagaattgtgtgacctcgcagcaattcttgggatgcacaatttgataacgaatacaaagttctgtaatataatgggaagtagtaatggtgttgaccaagaacatttttcaaatgtggtcaaaggtgaaaagattcttccggtatttgatgagccaccaaatccaaccaatgtagaagagagtttgaagagaactaaagaaaacgatgctcatcttgttgaagttaatttgaataatataaagaatatcccaattccaaccctaaaagattttgcaaaggctttggaaaccaacacacatgtgaaatgtttcagtcttgcagccacccggagcaatgaccctgttgctactgcttttgcagaaatgctgaaagtgaacaaaactttgaagagcttaaatgtggagtccaactttatcacgggagttgggattctggcactgattgatgcgttaagagataatgaaaccctggcagagctcaagattgacaatcagaggcagcagttggggacagctgtagaattggaaatggccaagatgcttgaggaaaatacaaatatccttaaatttggatatcagtttacacagcagggaccacgaaccagagcagctaatgctataacaaaaaacaatgacttagtgcgtaagagacgagttgaaggagatcaccagtaagtctgcaaaggtgtaatctttggaagacttcagaagatcaccaagggctcatgttggtgacatcatgtaaaattttcctgggtagaagggaaaagactggaaaaatttttttagtgacatgcattttttttttagttgttatcaaattgtaaaatcagtaatgtgatattttatattctgaaacatttctactttctgctaaaatccaattttaatttaggtttaattggaatggatttatggatgaatcttgggcaaaaaaatccaactgtaaaaaatttcacaggtcatttgtgtagaataatttgaacattgtgaggaccaatcttttttaaatcaaaagggatgttgctggtatcagaattgatattgcttcatttacacataaaacacttaagtgttttcttcactccgtgacctggagagttttccattttttaaaatacatgaacttggcaagggtgtgatttttctttatcaagagaacaaaatgccagaatgttaaaacagttaactcaaaatctagtcatctgtgtaggagctaaagcaggtctccagggagagagggtggtcgtctgtgcattccaggttactgcacttgtctgatgtgacgtagcaacacccacgtcttcttaaaacaaagtcatcagctttgccaggttacatactttatttaaaagtatagtgaggtcgaagttcattccagtgtttcattttaataatgtgggcattattaaatttttgtggaagctaatagtaaaaaataaaagctgttttcaccacctccctccccaccccccaaaaaaggcgtacagccaactcttagttatttagggtaagagaaaaaagaaaactgttaaacaatgaaatcaaagataataaatatgatagatttccagtatgaggcactttgcaaaacagtcatttaaactgatggttactgtaagtcagttggaagctggcatgtatgtaaaatttacttgggtgttacaccatatccggaagaagttcctatgtggcagtggcaggaattgcattaaacagtatttcaatcactgctacaaatcttccaaccaagaagggaaaactgctattcttcataaatctaatttttagtatatgcttcctttcatcttatacttttatcaatatttataaaagtcatttctataataaaagcagtctttcttgctca

SEQ ID NO: 76382 - DNA, 1458 bp, Homo sapiens
tctgaggcgcgtgcggcggccaccccagcctagtgctcttcttggtgccactggctaactaggttgagaaaccggcgccacaggcggcagcacctggcccggagctggcccgctcctccccgccgagccggcgccccaacaacgcgccctctcccagtcctcacaaaggggcctagtccggcccccggctctggccgtgagggagcgctgtgggggcgcgctgcctttctgcctggaaagtgttggcagggtggtgggagaagcgtcaggcttgaacaacatgattttaaagcacgtgtctgtctgtcgttttttacttttagggttttggccaaattgggcgagggcacaaaataaccacttaccccttctcaccgaggaagagcgggagaaagggtatggcacagtcacaagggtgggtgaaaagatacatcaaggccttttgtaaaggcttctttgtggcggtgcctgtggcagtgactttcttggatcgggtcgcctgtgtggcaagagtagaaggagcatcgatgcagccttctttgaatcctggggggagccagtcatctgatgtggtgcttttgaaccactggaaagtgaggaattttgaagtacaccgtggtgacattgtatcattggtgtctcctaaaaacccagaacagaagatcattaagagagtgattgctcttgaaggagatattgtcagaaccataggacacaaaaaccggtatgtcaaagtcccccgtggtcacatctgggttgaaggtgatcatcatggacacagttttgacagtaattcttttgggccggtttccctaggacttctgcatgcccatgccacacatatcctgtggcccccagagcgctggcagaaattggaatctgttcttcctccagagcgcttaccagtacagagagaagaggaatgactgcatgaatctacctgagttgctggcattgggaggccagttactggaaaggaatggaaaaaagaagcctccaaaagggaaaaacttctgacaatatgatgctgtgcgagaaatatttacagcacattaagacgatctgtattattaaataaataattttcaaatgttaaacagtattaaatggcacctgattttgtgttaaattttagttccctgttgtttaatgcccccaaaatatgcagacctttgggaatataaaaatattgcacccacatgtcttaatggggctgaatttcagattatttgttacatatacttattatattgattgttgggttttgattttggtgcttgctgctgaaataaattgaaaattaatattcaataaaaatgatgtatttgtcacttgctgttaaggtagaacaagaaggaacacatattatacacataatgatgggaattacattgtgatttgtactatctacaaaggagtaactgccagttaggaagaacagtaaacagtgatgttaaa

SEQ ID NO: 76383 - DNA, 3651 bp, Homo sapiens
cgggagcaagtgtgaatcattgccggggctgggaaaggaggaaggcgcatttaaccccctcccacccctctccatgtccgtgtgtcactcggctcggtccacctggcgcggccggtcctggggctgctgctgctgttgacgacgacgacgacgacgggggctgcctctgctgtcccgggagtttcctcctgctccggccacacagctcctggggattgttcctcttcgaaccagaacctcggcctgaccggcactttggctccaaaataactttatttttgggggagaaagcacatcacgaaccagtcaaaatcgtggtttatttctgtaacgtgaagacttctgctcttttttctttgtttgtttttttcgtaaacatctgggtgtatatcaaacggcaagatgtccagtaatgtcccggcggatatgataaatttgcgcctcattttggtaagcggaaaaacaaaagagttcctgttttctcctaacgattctgcttctgacattgcaaagcatgtatatgacaattggccaatggactgggaagaagagcaggtcagcagtccaaatattctacgacttatttatcaaggacgatttctacatggaaatgtcacattaggagcattaaaacttccttttggcaaaacaacagtgatgcatttggtggccagagagacattaccagagccaaactctcaaggtcagaggaatcgtgagaagactggagagagtaattgttgtgtaatcctgtaaacactgtctgcctagtgtgatgtgatatagtctttgtctttcatgctgctgggacagaaaagacccgacattgcttcagaaaccgttcagaacagtctgcctgtaaacacatggaactgaattaccacatgaacactgtcatcttttctcatgaaagtaaaaagaaccaagaacatttttcactctgattttttatttcttggattttttggtgagctgttttaacacatattggtttttgaatgcagtcaatctccaggggaaaagttaacaagttatctttcgtagcagaaaccattttgctgccacaaaattttcatcatcagaactaataaatcaagtgttccaaatacaatttgcactaaaaagattggcattattttcctcatcagcagaatttataacagtgtgtggtatctagaaatacttatatatacaattccacactggaagacactcagcaattaatgaagttaattactgggccaacttgagaggaaaaaatggaaaagaaactaaaatgttgggtgaattctaccaaagtcagccgtggtggctgcactggcacagaatactaaactgagtgtgactattttcactgcaacaaatgaaaaaacaaaatgtgcctgtttaaagcactcagtagagggctgatgaaactaattttttttcctttaagacatgcactcttgagtcctacagtaactgagtgtttgtttagacagcacaagaaggggtgagagtgcgtctcctagccttaatgtgggagggtagtttcagtcactcatcggctttcattattgtgcagaaatattagaaaacctcattgatcaattttatgtatttgaatatcagcaaattgaaattttccataattatcattaatttgtaaccacatccagtgtcatgcttactccttagagttcagatgaattcttaaaattaaaaaaaaactccatagtactaattttgtttctttatatagtttgcgtttgatattagtgcttgcaattgtattaaagtcaaaagctgatttttatggcatacacaagaatgccactttttcttttatttcataccaataatttaaagattgatatgctaaaaacaatttgcacagcactaaagcatgagctactttcatctaaacctgtaaaaatatgaaagatttttatattttttcactgggaagaaattcttcctggatgaaattacaaatatgtgtagaatatatttaataaaagacttataaaatacctaactacaggacttaaaatatagattggcgcgtagtatatagaacaatattccatataaataagtttagcctttataaaaatgaagttgcaggctgacattacattctgtacttactaagtgtcaacagcccttacaaacattaaatgtaaatggtttcaaatggtcagcgttgtttaaatgtaatcatgttattttattcattgttaatgctttgatgaaaaggctttatatgcagtagatctacgaaaatattgttcatactgatcagaattaaatttgtatagagcagagttttaaaatgaatgtaaatagcactaaacgttttctttctgcaacctgtacttacagattcttcctgtaaactaaataaaaaaaaaatgatagtgcattttgggggtaattttaaaggtcttgattaggtcaataattgtttaagcaccgtctcattcatgttttctactttcatttcttaagcttttaaaattcatttaattaatattctgttgttgttttggggagtattcccaatgtatctttgatatttaacctggttaatttgtggacagtcacaacaatggatagaattatgtagtctccgttatcactaaaatgttatcttcaagagatgttaaatatttatatgctttgttgactagctgaaatgtgaattctgttagtgttgactaaagaatctggtagttgcttaattgggcaattaaacaatttatggctctattttgtaaaacaaactactggtaattatttttaatacctattttcattctgattactctttttttaagttaaagactatcagttaattaagattgagtttttatgatggttaaaaataattctctattggtttttcaatatatttttctgtgtgttctcagattatatatttccctcaatttagagtttgctaagtgaaataaactggttcactagtagagaaagaattacgtcgcttaatacctaatatccatagttgtacaatatgaaaaaaaagaataaaaagtagcagtaaaattatatactgaaaacaccaaaaatttagatgccttaatagtatatacgtgaaatactcagctgtccctttaaaaataattccttggactgcctggtggttaaaatacgattcctcatatccaaggctacttttgaagatccctctgccaaaaatatagctcacttatctaaaggtgagagctgcatagatccagtaatgtacataaagcctgaatgatgagcctatgtccctgcctaacgctggtgtctcactcatctcttttacctaaattgtcctgaactttgttaagtgttctggacaaggccaagcttttctttattaaaacctcagcatgtctccctgatctgaactatttgctttctcttcaagataagttgtattttaccatggaaaaatacagtatctaacattaccattcacgttaaatgaagtttcctcgataacgatttatctttagttttatgaagtcatcgtgaccaatgttacagtaatttctggttagctgattgtgggtaaacaatgtttaatgtgaaaagaaattaaaactttcttcatctgttgtagaatatttctcttctttaaaatggcttctattcataaaa

SEQ ID NO: 76384 - DNA, 2668 bp, Homo sapiens; identical to SEQ ID NO: 58912

SEQ ID NO: 76385 - DNA, 2166 bp, Homo sapiens
tttgctctaaaatatatcttgtttttattttgatagttttatatgcatttataaaattattcaggtaatttataaataaatcgtcctaggttatttaaaatatgccattcgtatctaaaacaggcagatcgtttctatatcaaattaattagttgctattgtcagttttaagaataatttctcaatttatctaagatgcctaacactgccaccatgatgtgtagtcaggatacttaataataccttttgtaaaagttagcatttatcttacaccagctctctttttagatagagaacatatataagaaatgagtaagtcgataagccacatttaaccatcactagtgattgttcaatggaaacatataaactcaatgtaaacttgaagttaattccatttaatttacagcttattttataatagtattttattaaggaattaatttacatatagtaaaatcacaaatctaaacatacagcatgaggaatgttgacaaatatatgcagctacataaccatcatccagatcaaaatacaaaaccatttcaatcaccccagaaaatttcctcaggccccttttccattcaatttgaattccctgccctcactctaagcagccactgttctggtatctatcatcaaatattagttttgcctggaagtggctttaatataaaagtaattagatagtatgttatgtttggttttggttttgctcaacttaatgtttttgagattcataccaggttgttgcatgtatcaagcagtcctttttttaaatgaccagtattccactgactatattgtaggtttgtctatccattttcctatggatgggaaatttccactgtttacaattttgtgctattatgaataaagctgctatgagcagtcatttttctggggtatatatctaggaatgaaatggttgaatcacaaggtagtgcaagacagtcctctaggtggccttggacaacctcaattgttccccctttttcacttgtagttttcaagaataactgtactgtgtgctgggaatgcaacatcctggactaagtgactctgagaaacattgtgactttacagatgaaatcatctacaaagaatcatatattttcttgttaatcatatacaatttgccacagatactatattttcagtgacttctatgaagatatttgttgttgaaatgtatgcatgacatcttaaaaaattgatatttattttttgtttatcttaaaaggtatagaggaaaaaatgatcggtatggttatctattactcctatatatcacatttctctattagccacaggtctgattccggttgtttccactcttctccaagcagtgtgttaaaattgaaagacttgaagtattctaggcaatggaaatcaggtttttgtccttgctgcagttcatgctgaggtacagggtaaagagcttcataacttcgtttatcttttgatccatgaattgcaaatgaattgaattttgtcacatttggtggaaaataactccaagggagataagctttgccttcccattttgtctctcctctggacactctgaacgataaaggaagttcttgtttccacacatttcttcttccagaaagtaaaagcactaaatgctgtccgtggggacaaagttcaacttctaaatattgctcagttatatcattcaagaaaaatgcttccacaacttcataatcccacagttcattgaaaggttttcctggttctccaagtggggctggaggatccctgaaaaatggagcactaatgtccatcatcactcctctgtcacctggattcagcctgataaatacgggctcatgcttcactggaaaaccatcccaagtgtgttcaattttaaaatccatctgaagtctcttcttgagatgaccaaatccaaacctagaactcctccagaggtacagccttggtgggagattctgaagacgccagtctggcttctatccctagccgcaggaacctgcatcttttacttagtccagaaaggcttagtatattagtaacccaaagatagtgagggcatttaaactgtgtatttcattctctactcacgtttgcattttggttttttgtttgtttgtttgtttgttttaaagaggttgggcctcactacctggagacactgtcccc

SEQ ID NO: 76386 - DNA, 984 bp, Homo sapiens; identical to SEQ ID NO: 58676
  misc_feature (1)...(984): n = a,t,c or g

SEQ ID NO: 76387 - DNA, 2925 bp, Homo sapiens; identical to SEQ ID NO: 58915

SEQ ID NO: 76388 - DNA, 1410 bp, Homo sapiens
ggaattccgcttttccggtctgggtccccgagaggactgccttgctcacctgtcccctcggcgcggccccggggagctcccgagaggcccccgggatcgctggccctccgaactccacagcaatgagcaagttgggcaagttctttaaagggggcggctcttctaagagccgagccgctcccagtccccaggaggccctggtccgacttcgggagactgaggagatgctgggcaagaaacaagagtacctggaaaatcgaatccagagagaaatcgccctggccaagaagcacggcacgcagaataagcgagctgcattacaggcactaaagagaaagaagaggttcgagaaacagctcactcagattgatggcacactttctaccattgagttccagagagaagccctggagaactcacacaccaacactgaggtgttgaggaacatgggctttgcagcaaaagcgatgaaatctgttcatgaaaacatggatctgaacaaaatagatgatttgatgcaagagatcacagagcaacaggatatcgcccaagaaatctcagaagcattttctcaacgggttggctttggtgatgactttgatgaggatgagttgatggcagaacttgaagaattggaacaggaggaattaaataagaagatgacaaatatccgccttccaaatgtgccttcctcttctctcccagcacagccaaatagaaaaccaggcatgtcgtccactgcacgtcgatcccgagcagcatcttcccagagggcagaagaagaggatgatgatatcaaacaattggcagcttgggctacctaaactaaaacacatttttgatacctaaattaatgagctatagataaaatataaaaaatgtttttaccaagttcagaagttaacaaagactctgctttataattatattgaatgaataattgtgttttaagcctcctaagtaaaagtaaaaaaggagtcatgtgcatacatagaatcagtgatggaggccaggcacggtatctcatgcctataatcccagcactttgggaggctgaggcagttgagaccaggagttcgagtccagcctgaccaacatgaagaaaccctgtctgtactaaaaatacaaaaattagccggacatggtggcaggcacctgtgatcccagctacttgggaggctgagtcaggagaattgcttgagcccaggagatggaggttgcagtgagccaagatcatgccactgcactccagactgggcaacagagggagactccgtctcaaaaactaaaaaaaaaaatacatttagtatagcggggggtgggggggagaaataatgttatttcctatgcgaatgacgtgtatccctgtacccatggtaaatgtaaatatactgtgtctcttttgggagg

SEQ ID NO: 76389 - DNA, 1811 bp, Homo sapiens; identical to SEQ ID NO: 58917

SEQ ID NO: 76390 - DNA, 1464 bp, Homo sapiens; identical to SEQ ID NO: 58918

SEQ ID NO: 76391 - DNA, 696 bp, Homo sapiens
cgagtggctgccccacaaaatgcctgcttctctgcggaatcctactgttcttcacatgctctctaataccatcttttcatatccactttctcttccatgttgaaaaattaaattgacaggctggattctgcaaagatctttggacatttaagtatcttcgaccggtgcgaaaagaggcggcctgaccttggaagtgggacggggtcctgcagcgggtccttccggcgggtgacattcagccggcggttcggggcgacggactctccattccagaaccatggcccaatttgtccgtaaccttgtggagaagaccccggcgctggtgaacgctgctgtgacttactcgaagcctcgattggccacattttggtactacgccaaggttgagctggttcctcccacccctgctgagatccctagagctattcagagcctgaaaaaaatagtcaatagtgctcagactggtagcttcaaacagctcacagttaaggaagctgtgctgaatggtttggtggccactgaggtgttgatgtggttttatgtcggagagattataggcaagcggggcatcattggctatgatgtttgaagaccaatctttaacatctgattatatttgatttattatttgagtgttgttggaccatgtgtgatcagactgctatctgaataaaataagatttgtcaaaaaaaaaa

SEQ ID NO: 76392 - DNA, 988 bp, Homo sapiens
gggaccactacaggagggctttctcctcactgaaatcttgttcatctttaggatttctccagcacctcagttcgaattcccactccttatgtgcaagtggcactcttggctttccaattctgttttttatttaggtgactcaatcagtggctgaacttctgatcctgtggcccctttttgtagcttcagactgaaactggatgcctttgtagaacatattcacgcaaggattctgtatgaacagaaaaggatgcaataaaggaggattcctccaaaatgttttaattatatgtccatacaatatataaaatatatgcatcattttagctggataagaaaagcaagtcaaatgaaatgacacttctcgaaacttaagttaaataatcttgtaggaagaggtatattttgtcttttttaaattattttagcattctgtacactgaccaacgaggtaaaggaaaatgactgaaactctacaagtgaaagaacatttcacaattaaaatccacaatttgtatacatttatcttactcacatcgtcaggtgaaaaatcacccaacttattataaaaggaggacaaattgtatcacaaaagaagcaaaaattagaaaaaattcataaaaaaatatatccaactatgaaaagcgttgctctcttggtgtcttcacatccgtctcttctgtgtactgatgtacaacacattgtttcctcggataaatgcatccccatacttattcttcagttgtccatttacatattcttctgtctgctccagggctatattcatgtagccatccaggcaagccaggacccctcgataatccactccagaatttaattttaccacaactggtcgtccgatgatttgctttaagaagtcactaggggtttgcttccgaagactcattttaacaatcctcgccggcgggaaccagaaccctcactccaggcgccccacgagcccggccgccgcggatgatcccagcca

SEQ ID NO: 76393 - DNA, 790 bp, Homo sapiens; identical to SEQ ID NO: 58921

SEQ ID NO: 76394 - DNA, 6677 bp, Homo sapiens; identical to SEQ ID NO: 58922

SEQ ID NO: 76395 - DNA, 1340 bp, Homo sapiens; identical to SEQ ID NO: 58923

SEQ ID NO: 76396 - DNA, 2435 bp, Homo sapiens; identical to SEQ ID NO: 58924

SEQ ID NO: 76397 - DNA, 2819 bp, Homo sapiens; identical to SEQ ID NO: 58925

SEQ ID NO: 76398 - DNA, 938 bp, Homo sapiens
ttttttttttttgatcaaaaacctttattctggtcctcatcattcaggaagccacttatgcagaacactttctttcatctctgctctaagcagcagcagttgcatccaggcttgatatggaagacagacagaaatagtggaagaccttgcagagaagagctaattgatgagatctctgcttatcccggcataggtgaaggcagaacaggaagagtgtgtgtaagtgcaaagactccgttcttcaaagctgaggcctgtgcagaggggtgaactgaaggcttcagatgaaggctcacaaaactgccccgctcggcaatcaatctaaagtaccttccagaaaagcaaattcatccacagcttctattgcattatccaagtctctcctctgaagggttttcctttttccctgctgagcgcaacagtaggcatcttttgcaatggtctccacaaacagttccgcggctcgtgccagaatgaagatggcttcctgtcccgctagcgtcacgtcgggatctgccttcaccaaggccttcactcgcgccagaggcaacctcgagagacgagccccaggcacactcgttggggcctggggctgcgaggccgctgcctccccagcaggtcccaggcctaaagagcaaccatactgtgggacattctcttctcatggcagacagcagaagatcaagagggacgaaccaaaatatgccttgtctcataaccttgtgcttagaactggcactttgtcgcttccacccatgttccacggatcaaagcaacaattaaggccaagccccacatcagtggagcaggggtgcacgtgtcccttcagggagaatgggcaagtcacaccatgggcagggctgtgtcaccctattacagggggaaactaggagttgggaacaacagttctttctaccacagatttagagtgtactctt

SEQ ID NO: 76399 - DNA, 690 bp, Homo sapiens; identical to SEQ ID NO: 58926

SEQ ID NO: 76400 - DNA, 1775 bp, Homo sapiens; identical to SEQ ID NO: 58927

SEQ ID NO: 76401 - DNA, 1106 bp, Homo sapiens; identical to SEQ ID NO: 58928

SEQ ID NO: 76402 - DNA, 2075 bp, Homo sapiens; identical to SEQ ID NO: 58929

SEQ ID NO: 76403 - DNA, 1489 bp, Homo sapiens; identical to SEQ ID NO: 58930

SEQ ID NO: 76404 - DNA, 949 bp, Homo sapiens; identical to SEQ ID NO: 58766

SEQ ID NO: 76405 - DNA, 1363 bp, Homo sapiens; identical to SEQ ID NO: 58932

SEQ ID NO: 76406 - DNA, 3372 bp, Homo sapiens
aagctcacagcaaagagaagggtcctgaaagcaagttgccagttgcccccttcacagttgaatacaagggtgtaaggcacgaatttctggtggctccaccccatccttccagtgtgcctgtgggcccttagtctgagccactccatattaatttatatcccttgctgtgcatatgttacggaatggaattttccacgtggacatgtttaggcaatcccccctttgcaagttcccttatctgcacaaagcatctcatgctgtggagccagtggcaggttctccgggacccttcccttactgtctgcctaaagcaaactggctaaattctttcacaagtttttctttttcttttttttctttttctttctttttttttttccaatttgcattagaaagcttttattgagaccaggttaaccagtggcctgaaaatattacaggctgaaggaaggctgaggaaaccagtatgaaggcagctcaaatgatgaactaaatatattccaaaggtactatttatacttaaggcagttttaaaagtgaggtcttaaccaaaaagcctttacatggcattcaaaacaaaaacaaaaacaaaaaaaacacggggggggggggggcacttaaatctcttggattgactaaaagagctaaattatgtacccaaaatctgtacagcaggggcctgttttcagcaggaaagcctatgtacaagtaagaacctcttactcttgtaacattgtcctgttttgttttgtcttataagaatatataactcctatcctcacagagttagtccataaggcctcagtgacctcacagaaatatggagttaacctctactacagaactatttacactgcactgtaaatacacatatgtgtgtccaccctcacagctaagctgtcaatgccttgagtgaaggggttacagctcattcgttttgcatctacagtgacaatgaataggcactcaatacatacttttttttgcatgaatgataaatgaaatgattttacattaccaccactatttacattaacattcctaccattagccgtctccaaaataaaaacacaaaattgctgccacatgttcagcagttttcacaatacagtgtgtctggactttttaatgtaaacaaacatgcttgatttaccaattttcagagcaaggacacaaacttagcattcttctaggaatggaaaacttgccaggaagttacttcattctttttttttttttcaaaagtgcatctcgtagtgccaactgtttttctcggaaggaacgcttattttttgaccggacattctggctataccgcatcatcataaagttcttctgttttttcttctctttatttgtcgaactggaaaatggatttgttttggttttcttcctcacaaattcttttcggtctgtctttccagccattgcagttgctagtcttgtctctttgtcagactttggctttttatgaaggcgttcaatgtcccgaagagaaagtaattcacccctgggctcttcatcactgtctatttcaatgtatttcctcttctgggatttcccgggggcagcatcaagttcttttctcatttgggccatgcggattttctggaagtcttcctgagttaaaactcggctagtgctgatggctgcagctttggccttccgctcctccatgggcatgctgttcagcttcttggagatttcttgctgttcttcatcggaagagtgttgcacatcaatccattcaccatcagcatcctcctcctcactgagactggtactttcccatccatcttcatcattttcagcattctcttctttctcaacttccagaacttctgctcctggaatgtaatctttagcatctaattctccatattcttgtactcttgcttctatggaggcctctgtaggcttaccccggaatttcttctgcagcatctgaggattcagtgttcggaagaggtgaatcaaagttctagcagacatcattacattcttatccttgtgtgttttatactgagccaggtcttggagaagttcttcagtcatggccagaggacatcgagctgttatctcctttatagcattgattcctactgtcatgacttctccagagttcttgtcggtaacaaaattgtttgccacagtcataagcaatgattgaataatctctgggggtactaggtgatgagatgcttgtgcagcaaacagaaggatcttggttacttctctttggtggggctgcagaaacctttgcaaaaagggatagaaattgaagaggaaaagctcatgaattcccaccaatctggagataaggttcatgagcatcatcttcacttcaaacctctccttacagcactcaagctgctttagtagtttttccgcaaaatcttggggatcatgaatcaagtgaatggctgaaaagttaaacacctctggttttttcttcttcctgtgtttcttgagcactttcattgccttttccaactttttcttgtttttggaacttttcttccctgtagcatattgtactagcaggtctcttgctgttggtccatcatcctcagattcggagtcactgtcctgtttttcatcttcatctttcccaagaaagaatgtcaaagcggcaactaatatcttggtgaccttagagaaacatgcagttgtgataacattgacagtttttgcatcattccagatgttccttctgtagagttcaatcattacatctaaagacatcttggctgcggttgcattgctatctcttaacatggtgtacatgaaattttgcaatactacattcactttattgttcttgtgttttgcatttatattcttgatatcagtcacaatatgtgtgtataaagtctttcgcagaagtttatcatggcaacgaaaaagttcaaagaagagttctagcaggcttgatggattgatgagattcttatttctcagcaagatcaaagctttgcaaaatgtcattcgcagatctggatccaatacggtatgattgcaggagagaagatctttcacctcttgaggaaaattacttaggtactctgggtagcagtgactaatctgtgccataaacatcaccagctctgctagttctttgctgggtttatttggttgcaatttgaaaatctccacattggatttgtagtgattatactgctgtagaaactcctcgatgtaggccggcgggtctcgcttgattagattctgtaactgcggcaggttgctgggaagcttgttgttgtttctgttggacattttggctgcagacagacttcgcggcgagcagttttaaaaaaactcagacggccggcaccccgcaatccctgccagctgcagcttggactcgtg

SEQ ID NO: 76407 - DNA, 2152 bp, Homo sapiens; identical to SEQ ID NO: 58933

SEQ ID NO: 76408 - DNA, 3928 bp, Homo sapiens; identical to SEQ ID NO: 58935

SEQ ID NO: 76409 - DNA, 3898 bp, Homo sapiens; identical to SEQ ID NO: 58936

SEQ ID NO: 76410 - DNA, 1663 bp, Homo sapiens; identical to SEQ ID NO: 58937

SEQ ID NO: 76411 - DNA, 2426 bp, Homo sapiens; identical to SEQ ID NO: 58938

SEQ ID NO: 76412 - DNA, 1820 bp, Homo sapiens; identical to SEQ ID NO: 58939

SEQ ID NO: 76413 - DNA, 1924 bp, Homo sapiens
cccacgcgtccgcaacaagaacttctggtgagtttggctactgtgatttttgttgcaagtcaaaaggcattgtctgtggaaagtaaggcagtaattaagcagcagcttgaaagtgtctccaatggatggactgtataccgtattgccagacaggcttccagaatgggtaatcatgacatggccaaagagctttatcagagtttgctgactcaggttgcctcaaaacatttctacttctggctaaatagtttgaaggagttttcacatgcagaacagtgtctcactgggttgcaagaggaaaattatagttcagcactttcttgcattgctgaatctttaaaattctatcacaaagggattgcttccttaacagcagctagtacaccactgaatcctttaagctttcagtgtgaatttgtaaaactcaggattgaccttttacaagccttctctcaacttatctgtacttgtaatagcctgaagacaagcccaccacctgcaattgccacaacaattgccatgaccttaggaaatgacctccagaggtgtggtcgcatctccaatcagatgaaacagtccatggaagaatttcgaagccttgcttctcgatatggagatctttaccaggcatcttttgatgctgactcagcaactttgaggaatgttgaactacagcagcagagctgtttactgatatctcatgcaatagaagccctgattttggatccagaatcagcaagtttccaggaatatggatctactggaacagcccatgctgatagtgaatatgaaagaagaatgatgtctgtatataatcatgtcttggaggaggtagaatcactcaatgggaaatatacccctgtttcttatatgcacacagcatgcctctgcaatgccatcattgctttgctgaaagttcccctttctttccagagatattttttccagaaactacagtctaccagcatcaagcttgctctgtcaccatcgccccggaatcctgcagagcccattgctgtccagaataaccagcagctggcgctaaaggtagagggagtggttcagcacggatctaaaccaggactcttccgcaaaattcagtctgtctgtctgaatgtttcttccacactgcagagtaaatctggacaagactacaagatacccattgacaacatgaccaatgagatggagcaaagggttgaacctcataatgattacttcagtactcaatttctgttgaactttgctatccttggaacacacaacattacagtggaatcttctgtgaaagatgccaatggtatagtatggaagactggtcccagaactaccatatttgtaaaatccctggaagacccttattcccagcaaattcgcttacaacagcagcaagcccagcagccattacagcagcagcagcaacgcaatgcctacacacggttttaaccatggaatgaatgcactgcagactctcaagagatcaatcaaattgccagaaacagtttggtttttcatatggaataagtattaaagttacagtgtagttcatttattcattgatttttgtaatgtaatattctggaaaaaattttgttttcttaaaaattttgtctgacagctgggcgtggttgctcacgcctgtaatcccagcactttgggaggctgaggtgggcggctcacgaggagatcaagaccatcctggctaacacagtgaaaccccgtctccactaaaaaatacaaaaaaattagccgagcatggtggcaggcgcctgtagtcccagctacttgggaggctgaggcaggagaatggtgtgaacctgggaggcggagcttgcagtgagccgagactgtgctccagcctgggcgacagagcgagactccgtctcaaaaaaataaataaatacattttgtctgaaaaataaaa

SEQ ID NO: 76414 - DNA, 2124 bp, Homo sapiens
tgtcgtggggctggagcagagcctgccgcgaacccccggagcccacgatccctcgtgccatccctcgaatccaccagcacgagcgtcccacccgcgcctgggaccatggccactgactcatgggccctggcggtggacgagcaggaagctgcggctgagtcgttgagcaacttgcatcttaaggaagagaaaatcaaaccagataccaatggtgctgttgtcaagaccaatgccaatgcagagaagacagatgaagaagagaaagaggacagagctgcccagtccttactcaacaagctgatcagaagcaaccttgttgataacacaaaccaagtggaagtcctgcagcgggatccaaactcccctctgtactcggtgaagtcttttgaagagcttcggctgaaaccacagcttctccaaggagtctatgccatgggtttcaatcgtccatccaagatacaagagaacgcattgccactgatgcttgctgagcccccacagaacttaattgcccaatctcagtctggtactggtaaaacagctgccttcgtgctggccatgcttagccaagtagaacctgcaaacaaatacccccagtgtctatgtctctccccaacgtatgagctcgccctccaaacaggaaaagtgattgaacaaatgggcaaattttaccctgaactgaagctagcttatgctgttcgaggcaataaattggaaagaggccagaagatcagtgagcagattgtcattggcacccctgggactgtgctggactggtgctccaagctcaagttcattgatcccaagaaaatcaaggtgtttgttctggatgaggctgatgtcatgatagccactcagggccaccaagatcagagcatccgcatccagaggatgctgcccaggaactgccagatgctgcttttctccgccacctttgaagactctgtgtggaagtttgcccagaaagtggtcccagacccaaacgttatcaaactgaagcgtgaggaagagaccctggacaccatcaagcagtactatgtcctgtgcagcagcagagacgagaagttccaggccttgtgtaacctctacggggccatcaccattgctcaagccatgatcttctgccatactcgcaaaacagctagttggctggcagcagagctctcaaaagaaggccaccaggtggctctgctgagtggggagatgatggtggagcagagggctgcagtgattgagcgcttccgagagggcaaagagaaggttttggtgaccaccaacgtgtgtgcccgcggcattgatgttgaacaagtgtctgtcgtcatcaactttgatcttcccgtggacaaggacgggaatcctgacaatgagacctacctgcaccggatcgggcgcacgggccgctttggcaagaggggcctggcagtgaacatggtggacagcaagcacagcatgaacatcctgaacagaatccaggagcattttaataagaagatagaaagattggacacagatgatttggacgagattgagaaaatagccaactgagaagctccaccagccactgatgccagccctggcactgcccctgcacaggagacaagtgcgttcagggcacaggccccgacatcaccccaaggacaacggcacaagtagagagaaactacctacctcacttcaaattatgtttggacttgacaaaaatgtatgcaaatgatgggggatggtagaaaaaaattatttacacaaccttggaagattaggcatgaatacacagagatttaccttttggaagtttcatcttttaatttggccagtgtttccttcatgctaatctagatgctgtggctgattacttgcccaggatctcctgtggcagcctctgcttgttctctggcttggagtggatggggcagcctccagctcctgctccatttgcttcccagctcataccctctgctccacctccactattgcaggactttcctcagatgctgggctatgtcatagagaagttggttgtcctgtgacttttcctctccagtttctcagatcttgaggacggtattttctcccccactgcactctgttatcgcgttcctaacagtaggaaattgggcatcatat

SEQ ID NO: 76415 - DNA, 1238 bp, Homo sapiens; identical to SEQ ID NO: 58942

SEQ ID NO: 76416 - DNA, 2529 bp, Homo sapiens; identical to SEQ ID NO: 58944

SEQ ID NO: 76417 - DNA, 1140 bp, Homo sapiens
gttttgggtattaggccccctggcgaaaaggggatgtgctgccaaggcgatttaattggggaaccccccgggttttcccccccccccgttgttaaaccccggcccggggaattgaattttgggggccccataaaaaaaatattaccttgccagcccggggacgtaaacttggatcctttaaaacggcccccccttttttttttttttaagtcacaggcgcatttattattgtctggaacatcaaggcctttcctcccctggcagtggcacaagggagggccaactctcaggaggcggccacgctgccaccagcagcaggcccatggggtggcagggtcatgggcggcagaaacagcgccttcagcttgcctgacaggctggcgatctcaggatcctgggcttcgtaggacttgaccaagcgagcaaacttaaggacaccttccccgtcgcagctgaagccataggctttgataacctcctgctggatctgcgtggccacgggcagcacgaattgcagcatcttacccatgtcgttgcaggcgttatcccgagcctcgtccatgcgcactgcattctccggggcggagaacgcctggatcacctccgcgaggaccacctttgcttgctcagcgctcaaggccgccggttgggtcgaggcggacgccatagggcgtctgaagctctaggttcagcggaggtaaatggaaaactcacgaataaagagccacgtcctacaaccgttcccaacgcccctgggagcggaaaggaaacagcatccggcgcagccggaagcgcccaggcgtggcccaaaccttcataccccaagcttacaactgcatcaagaccaccaaaactacccataatttttgcacagtgaaaacaatctatcattggcaacaaacatcataagaggggctttccggtaaaaagccagaaagcctactagacaaattctaaaagagctgtaacactgctgcgtatgtgtttggagagaagatgggatataaaggaactccacaattgatgagggtgagcttaggtgacttttttcttgttcctattactgtataaacaacgacgcatgtggtaactttcagtaggaaaaataatattctaaggaacttacttaagtcattcaaa

SEQ ID NO: 76418 - DNA, 2340 bp, Homo sapiens; identical to SEQ ID NO: 58946

SEQ ID NO: 76419 - DNA, 1142 bp, Homo sapiens; identical to SEQ ID NO: 58947

SEQ ID NO: 76420 - DNA, 709 bp, Homo sapiens; identical to SEQ ID NO: 58948

SEQ ID NO: 76421 - DNA, 732 bp, Homo sapiens
cccacgcgtccgcccacgcgtccgcccacgcgtccggcttcctgcttcgcctccgcgcctcgcgctatgggacagagcccccgatccgccagcaccacctgaggatccagaaaccgccccagcgatggaagaggatcaggagctggagagaaaaatatctggattgaagacctcaatggctgaaggcgagaggaagacagccctggaaatggtccaggcagctggaacagatagacactgtgtgacatttgtattgcacgaggaagaccataccctaggaaattctctacgttacatgatcatgaagaacccggaagtggaattttgtggttacactacgacccatccttcagagagcaaaattaatttacgcattcagactcgaggtacccttccagctgttgagccatttcagagaggcctgaatgagctcatgaatgtctgccaacatgtgcttgacaagtttgaggccagcataaaggactataaggatcaaaaagcaagcagaaatgaatccacattctagtcctttatgcagtatacaaggagaactgtcctgtaggatattctcttcttgatggtgcagaacccagaattagaagtttgtggttacagcatactctgtccttcagaaaggcgtgattctagctgttgaccccttgcagctgttggaatctctgcaagaacctctgtattcttctaataaattccctcttttatttaaaaaaaaaa

SEQ ID NO: 76422 - DNA, 2155 bp, Homo sapiens; identical to SEQ ID NO: 58950

SEQ ID NO: 76423 - DNA, 1785 bp, Homo sapiens; identical to SEQ ID NO: 58951
  misc_feature (1)...(1785): n = a,t,c or g

SEQ ID NO: 76424 - DNA, 2687 bp, Homo sapiens; identical to SEQ ID NO: 58952

SEQ ID NO: 76425 - DNA, 2155 bp, Homo sapiens; identical to SEQ ID NO: 58953

SEQ ID NO: 76426 - DNA, 2119 bp, Homo sapiens
tttcaaagggtttaaattggggaacccccgggtttttcccccccccccgtttttaaaagccggccccggaatttaattttggggccccctaaaaaaaattttaactctcccacccccgggaattaaaattggttcttttaaaagggccccccctttttttttttttgagagaaataaaacaatttaatgatggcttccttgatttacacacaactctaagacaagaggacaaaattttctctccatgcactggtacaacgaagttcagggacaagaggcaacccaagtacaggggctgtggtgttcagatccacgctcagcctcgagtctcatgttccaaccgaccgtctggctcagtgactgtggacactggggagaggagggactgcccagacccctcaagtgcaggtgaggggaccggcagcagagtatgcatgggcactccatgccccagtgcgagaagtgcacaggggacagcgaacaccagcttccagtgcaccctgaagacccagtgggctcagggggcccagctctcccatcagagctgtcctcagggctggagctgggggctggggctgaggcgctggggctgggagggaggtggtgataaagaaccactgcagaaaggaacacatgctgaatgctgggccatgctttcctcccagacactgagttcctgaagacccagctttatcttccaagggtaacaacattcccaagactcagagctggaaggcggcaagagtggagccaggagagacagatcgcatccactcctgaggccgcctcgaatgtctccattcccttctggcctgccttccccctcccttcaaccccaaagacccaagaagacaacagagatcagagaccacatccctcttccctaatcaaaatagccaagtacaacatttctaaagttagggagaaggaggaaaaatgccacaggcttttaaagggaagactggaaccgagggaagggagaagtagccccctgctttgtccagcctggaagctggcagccatggtgttggggccttgacccaaccacaccagcccatctagctgagcatcttgtgccgatcgaagactgtcttccgctgctcctgcacctgcagcttccaccgctgctgggcaccttccacacgctccaggactgtgtttgctcggggtcccccgagggatgcagcagctgctgccatagagcgagcatcctcattctcctcctcattgtgcagttgctcagtgtatgcatccggctttcggatcagagggtccaccagcatcaggaaggccatgtagagcaacagggcacccaccacggacaggtagatgacaatgatgaccttgatggtggtggtgctgcgctcctcgtacctgcactcgcacagcaggcagtaggcctccacgtcatggccaggcactggcatgggctccaccacgtgcaggcagttgcagtccttctgggatacattctggttgtaaatgtgcccactgatgtttctataaggtggacagatgcatttgcaccggatatcttcagaactctccctcaccttgttggcttcagctgggggcaccagcaaacacccgaccacagccaccaaagataagagcttcatgcttatcaggcttgctgggccagcaaagccggacacctggaaaaagagatacggagtcggagaaggggaaggtggccacaccgcagccagcacgctaggcccttaaccatccggccaagtgggaatggggttgggggctgggctccaggattccaaggcctgctaaacctggtcgccaaaccctgcttccctcccgcccaactctccggctctccgccagccacctggtgagcccggcagaggggtcctcgaggggacaccgctgccaggggcctccagttccttctcaaggcccggctctgacccgcgcatcacgtcccaccgccctccgccatctccgcctctgcccgccccgcagctcctccccgctcgggcccgacgggaacttttgggtgcgagtctgggacccctgctccgacggcgaaggccggtgcccaccacgcccagaggtcttaagccggactgggacccccaatagccccgcgacccccgtcccctcc

SEQ ID NO: 76427 - DNA, 1295 bp, Homo sapiens; identical to SEQ ID NO: 58955

SEQ ID NO: 76428 - DNA, 4422 bp, Homo sapiens; identical to SEQ ID NO: 58956

SEQ ID NO: 76429 - DNA, 2776 bp, Homo sapiens
cccacgcgtccgctccaagatggctgcctccatagtgcggcgcgggatgctcctggcgcggcaagtggttcttcctcagctctctcctgcaggtaaaagatacctgctttcttcagcctatgtagacagccacaaatgggaagcaagagaaaaagaacattactgtcttgctgatcttgcatctttaatggataaaacatttgagagaaagttgcctgttagttctttaacaatatcacggcttatagacaacatttcctctcgggaagagatagatcatgcagagtattacctttacaagtttcgacacagccccaactgctggtacctgagaaactggactatccacacctggattaggcagtgtctaaaatatgatgcacaagacaaagccctatatacccttgtaaataaggttcaatatggaatttttccagataactttacattcaatttactgatggattctttcataaagaaagaaaattacaaagatgctttatctgtggtttttgaggtcatgatgcaagaagcctttgaagtgccttccacccaacttctctccctctatgttttatttcattgcctggcaaagaagacagacttcagttgggaagaggagaggaactttggtgcatcccttttgcttccaggcctaaaacaaaagaactcagtgggtttcagttcccagttgtatggctatgcacttcttgggaaggtggagttgcagcaagggctacgggctgtgtaccacaacatgcctctgatatggaaaccaggctaccttgacagagcccttcaagtgatggagaaagtggctgcctccccagaagacataaagctgtgtagagaagcgctcgatgtgctggatgcagtgctgaaggctctgacttcagctgatggggcttcagaggagcagtcccaaaatgatgaagacaaccaggggtcagaaaaactggtggagcagttagacatcgaggaaacagagcagtccaagcttcctcaatacctggaacgatttaaggccttacattctaagcttcaagctctgggcaaaattgagtcagaaggtcttttaagtctgaccacccagcttgtcaaggaaaaactctccacctgtgaagcagaggacatcgccacctatgagcagaatctgcagcagtggcatctagaccttgtacagttgatccagagagaacagcaacagagggagcaagcgaagcaggagtaccaggctcagaaagcagcaaaggcatctgcctaaatagggtcccccagggccccacctgttttcacaagaacttcactcaaccccgtgccagggacttcagcagtggcctggacaacagcctcagcttcctctacccatcttcttttcttaaagcaggctatgtgccctacatggcaaggcaccatgactgcccatcgagatgccaagaagggctatggaactatgcaggtggctagtggtcagacaaaagaaaaccagctgaataccttaaggaggactcttgaggctcataatggagttcctggggcacagggattagttatgagcattaaagttcctaagacccagtgacagtactgggagaaaccaaggcttgaagagtcaggttgaagcacaggcttttgttttttgttgtttttgttttttgagacagagtctcattctgtcacccaggctggagtgcagtggcgcaatcttggctcactgcaacctccgactcccaggttcaagcaattctcctgcctcggcctcctttagtaggtgggattacaggtgcataccaccacacctttctaatttttgcatttttagtagagatggggtttcaccatgttggtcaggctggtctcaacctcctgacctcaagtgatctgcccgcctcagcctcccaaagtgctgggatgataggcgtgagccaccacacccggccaagcacaggcttttgaatggtctccctctccccagcccaggtacatgaggccaaggtgaactgtgcatcctgagaccttgtgtccctgagtctcctttctgagtgcaagctgcactgtgagctggctgtgggatactcacacattcccacattctcctttctgccacatctcgcccttctggacctgcactgggagaaattcaggacaggagtgaactcaaggccatgaactcactggatttccatttttaggcacccatagggatgtttttaggatgtaagtttctgaggagaaagctagctctagcatgaagcttttttggattggcttctccatcgtgttggggtaacattttttttccaattttttttttcccaaaacatcgtctcagctcatttatcaagtaggtaaaatgagccttttgtgtacacacagaggcacatgtgcacgcacacacaacttgtgaacacacatttctgttaaagaagttagaaaatgagagatgggttggggcttgaagtgcatcaaaggtatgaatgttgtaaaactgtcaggagatgtaaaattcctttctgaagtgtctcttctgtgaaagggttcagagcagattttgcttactatgtagtgttgcccttaagtacagtggtgtaattttattcaagattgtgctcttctatcaaaagcctctggaaataaatgttccgggatcatgttagtgtactctttatctttggggaaagggaggagggagagggactcattattgttactatgattttgaggagtgtactttaaaccctcccccattaaactatgggatttattgtaataatga

SEQ ID NO: 76430 - DNA, 1228 bp, Homo sapiens; identical to SEQ ID NO: 58958

SEQ ID NO: 76431 - DNA, 2113 bp, Homo sapiens; identical to SEQ ID NO: 58959
  misc_feature (1)...(2113): n = a,t,c or g

SEQ ID NO: 76432 - DNA, 1569 bp, Homo sapiens; identical to SEQ ID NO: 58960

SEQ ID NO: 76433 - DNA, 1690 bp, Homo sapiens; identical to SEQ ID NO: 58961

SEQ ID NO: 76434 - DNA, 2423 bp, Homo sapiens
acagttatgaccatcattacgccagcttggcacgaggcctcgtgccacagccggcgacccggagccgagagcgggcggcggagcctgagctggacgcggccacgccggcgcggcgggatatgtggtgcctgtcataagctccagagagctgccttccacaagaccagcagaagagtgggcaaacatgaaatccaatcctgctatccaggctgccattgacctcacagcgggggctgcaggaggtacagcatgtgtactgaccgggcagccctttgacacaatgaaagtgaagatgcagacgttccctgacctgtaccggggcctcaccgactgctgcctgaagacttactcccaggtgggcttccgtggcttctacaagggtaccagtccagcactaatcgccaacatcgctgagaactcagtcctcttcatgtgctacggcttctgccagcaggtggtgcggaaagtggctggattggacaagcaggcaaagctgagtgatctgcagaatgcagccgccggttccttcgcctctgcctttgctgcactggtgctctgccccacggagctcgtgaagtgccggctgcagaccatgtatgagatggagacatcagggaagatagccaagagccagaatacagtgtggtctgtcatcaaaagtattcttaggaaagatggccccttggggttctaccatggactctcaagcactttacttcgagaagtaccaggctatttcttcttcttcggtggctatgaactgagccggtccttttttgcatcagggagatcaaaagatgaattaggccctgtacctttgatgttaagtggtggagttggtgggatttgcctctggcttgcggtatacccagtggattgtatcaaatccagaattcaagttctttccatgtctggaaaacaggcaggatttatcagaacctttataaatgttgtgaaaaatgaaggaataacggccttatattctggactgaaacctactatgattcgagcattccctgccaatggagcactctttttggcctacgaatatagcaggaagttgatgatgaaccagttggaagcatactgaagtgtcttggtgggcctgagccaagcacaggtgtttgaggactacagttcatctcagggtttcttggagtacaagaccagtgtgaagttattctgatttcttgggaattttgctttttgtcttcccttctaccctacatcttaaactttatggaagaacctctattttgcatcatatcatttcctgtcccataattgtactggaatagaaagagtgacccgctcttgctcttggtaaaaatatagagtggtcagtagccttatgcacctaattccaaaggtggaatatagttctgtcagggcttttacgtaaacctccacttgtacatgcaatttggacagttatgtgttgagggaaatacagtttgagtaccttgtttatttcaaatatcagaaaaacccagaggtgatcatttctcatgaagatgcttataaatggttgcttaacccattctagatgtagggtctgcttaatgtgtgtacttttctaagtggttgattattttttatttttttgatacggagtctcactctgcactccagactgggtgacacagcgagacttcatctcaaaaaaaaaaagaaaagcaattgtacttcactatgccatatgtatgtattcactgaccaaaaattcactgaccaaccaaccaaactccacacttcatctgatcccccatagacttggggatggacagctgttctttggccatatggtataagaggatcattcttgtcactacttaagttagcctcatcattttgtgctgctccaacaccagcagggtatctcccaataaagtgttcctaagcagcctgtatactgagtgcaagcaggctatcaattttaataatagtccataccatgtatgtgtttctgtcagcagaatgtacatgttgtacaaaacctccaggttccttaagctttttgctgtccatgaatcctctgtggcaactgtaatcacagagccagaagccagagggccagggatatgagaggctgacaaacatcaggggacatctggggaggagatccctgtcatgtctcttgtgccatggagctattatggctggtcttccatttgctttttctttaagtgaaaaccatttttctactttgcttttctctccatacttaaatggtcagtagctactgagtggtgctttatctgaataggcctggatcgaagtaaaatagaaatgggactggctttccacaggaagtaaacttgctttcaggagcccacaagtcccctgctcagtgtccggaaagaagtcagtcatccctgttgggcagtgaaatcttcccacaggcccgtccaattagagaattt

SEQ ID NO: 76435 - DNA, 1585 bp, Homo sapiens
tttttttttttttttttttgcctctaacagaagcatcaagccactgacttaatatcccatgagctcctactatgatgacataacatgtcacatttattgctcttacctacttcctaagttactgcttgcctaataaggaaaagggcaagaaataagagtccaaaagacactcagaacaccagcagcagctttcaagtaaggactcagggtcagggtctcacaactcctccatttcatgtttcatttacattgtcttcgtgctccagcagcaaggctgacatgtgctttggggtaggagcctggagtatttctgccagatggtctgaggtgacgtatactcctagagcccaagtgaccaccagaagggacatgtgagacagcaggcagaggccatacatggaggatcacactccctcagacgtcatcagccccatgctttatcctttgactccccctgatcctcaaggccaggtggggtgcccctgctgcatgctccagagaactgtgggcctctcctaccatggctctcaatgcactgttccataactggcttctcccctggacagagccaccctggtctccttgtaagctttagttgggcttgtccctgagtgtgtggggtaggaataggagtgtgttcttgtgtatgttgcaatctttaggctcaggagacaaggagttagacctgagtcctgacatgtgcactcatttgtactcaccattacattctatttaattgctttgagccagacaggctgttttctttaccatgaaatatactaatcattcaaaaaagccttgtgtttaagaagacagcaaaaaacatcacttcaaaaaggcaactttttttttttcttggcatcaatgaatatgcacttcagaaatctacagagaacttttttcactttgtatttgttccacagcattctagccaggagtacaaaataggagctcttcaagcagcacatgaagatggcccaggagccttcagccatccagagcagcagagcagcacctaaatctccacacacttcccagtataaccactaagaacacactagacccttggcattaggggatttatcatttccagttctattatctgggaatgactccaagggtttgtgacaagcttttgaaacgtaagtgctaagacgagtgtggacaagtcactgagctaatgaagaatagacccactgtctgcttggctctgctattttgtacctgtcttcacatgtggggaaacttcataactgtgcccacaaatcagagaaattcgcaaaggactagacaatgtattgcctgtgaacttcagaggcaactggaaatagtgcaactggaaatcaactagcttcatacataggcggatttgtttccagggaccaaaagcacagaagataagaaaacttttcaggtgatggccatattctcatcatatcctctctgtgtggagtctgcctgttgtcacaaaaaccttgaccctacatcaagttacacccttaacaaagggaagatacaggcatccagataaaaggtacttgtttgaaaggcagcccataagggagaactgaacttaaaaaaaaaa

SEQ ID NO: 76436 - DNA, 1663 bp, Homo sapiens; identical to SEQ ID NO: 58964

SEQ ID NO: 76437 - DNA, 2712 bp, Homo sapiens; identical to SEQ ID NO: 58965

SEQ ID NO: 76438 - DNA, 1776 bp, Homo sapiens; identical to SEQ ID NO: 58966
  misc_feature (1)...(1776): n = a,t,c or g

SEQ ID NO: 76439 - DNA, 1588 bp, Homo sapiens
  misc_feature (1)...(1588): n = a,t,c or g
ttttttttttttgcatttcaaatattttaatagttttatttcgcaaagagaagcctaagaatttttttaaaaacatttccagagagaacactttataccataaaataaacttgtataatttgggaggacaaatcatctcaaatgtatatttttgaattatgtgccaattttataattagtacaaaaatgacagctgaaatattttaaaaatgtaaaaaccagtccaggcaacataactataccatcttgctgtaaaagtacttatatcgaattccgcacaaaatatttttgcaatatgctaaatttagttcttcaagtcactcttcactgccggctggcttttccattttctgttgtctccatcccattttcctctttaagatgttgatatagttcagctctgttattaacagagttcaaacgtccagcaaattcctgatgttttctggaattggcagtattgattctattactccacaaggataataacgacactggcccttttgatttttccacttgtggagtttcatccatttcaacaaggggttttttgtttggaggttctggggaatcaggcgaatcttttataatctcagcttcagccaattcttcttttccacgctctaagattccttttaatctctctgagtcttgccaagacttttcctgttcataatctttcactgctttctctgacttgtcctctttgtcttccctctttcttcctcgtttctttcgttcttcctcttctgggggtttgctcctgcatgccatcagacattccaagactctttgatgtttctctgagttgttgatatgggctctgacaagggtttctaattcattccacatgatacggtattgttcatctcttttagggccctttcctcttgtaccaactgtggaaataggtagaggatcattttttctttccatatcaactaagttgtatattgttttttgacagtttaacacatcttcttctgtcagagattctttcacaataacactggctaatggaactaccgcttgcatgttaaaaatggtggtttgtgaaatgatcataggccagtaacgggtatgtttttctaactgatcttttgctcgttccaaagggacctcaagacttccatcgattttatatctggggtctagaaaaggagttaatctgttttccctcataaattcaccaaaatcctaatgataaccaaataagataaaattagaaactatgtctaatgtttcagtatggattacatgtactagtctgtttccctgatgtcttctgtcctgtgatgtgcaacaaaacattttttctaacagtatcccttaactccactacttttttatcctttctgaacttgaaacctatcagcctttatatgatgaaaatgaagaaagcctcaaacataaatgcattcatggtatgttttccccaccttttgtaaaaaccaaggaacactttttttccccttctgtaatttaacttttctatcacacacagataaaagagtcagttaatcacattagaagacccatttgcttatataaaaactacattgagcgnacgcgtgggcggacgcgtggg

SEQ ID NO: 76440 - DNA, 1213 bp, Homo sapiens; identical to SEQ ID NO: 58968

SEQ ID NO: 76441 - DNA, 971 bp, Homo sapiens; identical to SEQ ID NO: 58969

SEQ ID NO: 76442 - DNA, 2683 bp, Homo sapiens; identical to SEQ ID NO: 58970

SEQ ID NO: 76443 - DNA, 1260 bp, Homo sapiens; identical to SEQ ID NO: 58971

SEQ ID NO: 76444 - DNA, 1682 bp, Homo sapiens; identical to SEQ ID NO: 58972

SEQ ID NO: 76445 - DNA, 6911 bp, Homo sapiens
ttttttttttttaactttttttctcttttattgccaagtttaaatttacaaggaagttccagttttcatttccaccctcgtgttcagtacccacgaagcatgagtcatgctgggcgaaagcaggtacttccctagagcggtccccgaggccccagaggccaccgaggttttcctaacccctcggttcctcactgggacaaaaattattttacattatttttagctcaaggaaacataaggaactccgtaacagtgtaggccccaatgtcaaagttgactaacattaaatgcttcatgatttatttattggcatctaggacaaggaagatcaaaatcaggttcaccccacgcgcttttttaaaaaacgggtgcatctcaggggaccttaggagggaatttaggcgcgttctgggcaggggcttgcggtttctgtcacctgccccttaggttgcttgtgaacgcaagtgtctgggttgtgggaggctgccaaggctccgggagagggactgggctgggacagcggcagaggaggggctgctcacggaggcccctcctcccaatcccacgcgatggtgaaggctggcccttcctgcctgggggagcgcctcagctggccccatctgacctgctgggacaggtaccttgcacgtccagaaagggacgagcacacctccacaacaatattcaaagccaaggtttgggagttcctgcggccagccctgctccctgacttggcaaacccagccggaggtgcacaggggaagggtggaccagggcctgggccataactctaagtgctctctgcagggacttggggggcgggccggatgggtctgtgggggctgacctcagacctctgaggctatgacctgagtgtcagaagccacagcccccactgtgggccttcccacactcctggctcttcctctggatgccaggggcccagcgtgtcctgtctggactggcctgtctgggagcgccccagctatgaggtttgacgggagctcctgaagacatagctgtgcccactgccgctgagacctgggtgaggtggggtcctttgaagccaaaatggctggtggcctccaatgggctggctcccagacctccttacataagcaaagcttctgggagccctggttataggaaatcctcaccccacacacctggaggtgtcccccagacgcaagttgccagccccagctgaaagaggcccctgagagtgaccctgcaagcccacatggggactgcccttttcttggccagggatgcagggtagaagccctgccctgagcagtgtcttttatcctccgctggtcctcccagtcacctttaatcctctgctggtcctcccgggcatgctgtccagccctgaccaagacctctctccttcagtgctcagtggttacaagaccagttggagcccagagacttctgacagcaggctggtggcccacccgtgtggcatggagtgagctgcaggctgttcctcctggtcacgccttggggtggggcagccacttgccttctctagtttctgctgccccacagacagagtcatttcaaaaccagaagtgcatgtctcaggggctagccatctccagccagggccagcttgatcctctctacccctcttgctcttaaaaaattaagcaacacacaggctgcctgctgggtgtggcgtgtcccgtctcctgatgctgtggtccttctctccatgatggtcttccccccgctccaccctgccttccttctcttccagggattctgcagatggccacggtggtcgtggtttgtccttcctttgggtttctgcccatgtggccccctttctgagctgtgcgttttctctatggaagcaaaggtccttgtacctgcagccatgaaggctgggtgggcacagctacccagagggcttctaaggactgaggcctgtccccatgggcgccactccccctccttggcaggactgtgtttccttcatgaggttgaaaactgccctcggcaggccttgccgggacagctggctgggccgaggagacagagaccatgttcttctaaaatgcaggtggcaaaagatctcagcgcggctcccgagactaccctatggccaggctccggcggatacctaatgcccctggtgggcacatctgctggcaggtctggaggaaagttgtggaaggtctcaccagtgaccagagaggtgaggggccgctggccctggtggacttggggagggtggatcacggcctgggctgtgagtgctgtgtctggctcccgagctggccgagtagaaaggaacatcttgggggctgtgtctgatgcatctgggtccttgcttgtacacacccagtccgaatggggaagggaaccatggggtttccatattcagatcagcagcagtagcagagggagagtgacagactcagagctctggggacaccatgcccttgcagctggaggggaactggctctgggccatctctcggcacatgtgggcacacacagtcgagggcaggtgacgtagagggtgtcttcctttgatttccatcatggccacagggtcgggagtcttcacggtcccaactggttccttcttagagatggtaacactgaagaaggtgctggaagctgtctctgtttggttttggtgaagagaaatgaggaagcgtcctgagtggggagctggctacattcctccttttcctggagaaatctttccatgatgggaggcctctcggctgctatagcagaaaaccattcagccctctcagctctgtgtgtacctgagaatacatgtatctcccttgtttttgtttaaaaaataatccaaactttccaggaaggtacttcattattccacaggcttgcagagttagtgagtaacaaagaatcacttaaataaatggaaaaagccacactaagaactctgaaacaaaatatcaggaaaggtccagtgaaaatgatcatgaaatcttaactgttattattacacttttcacatgacatcaaaccttagtgttgatgtttttggacttcttttaaatagaagttttaaaaataaatgttcacctgctgccaaaagcggaaataaatatccaaaggagatgtttatctaagtctgcttttctacaaatttctacgtacagtgacctggtccaattcttctgtgcacactggggctggtgacagaggagccatatgacagaggaagaaagaggtgccggtgggtcctgccacccggggctcagagacacggagcccaggcagctccctgagtggccggtgcagtcatctgcattcgccgcggtgtctccgctggtcccagcctgcacgtgaagagatgcaaagtgaaaaaggaattcaaggacaacgtggggcttcttcccattcaagggagcgcagggataggtggttgagatggctgctgggggccgcacagaatggtgggtgctcccagtgtgtcttgccagtcagcggcactggggtccctaccagcggggccacacacacaaagggaggccccggcactgactcagtcctcagcggtgcccacaggctcagcacatgcagcctcttcgcccacgggctctgtgcaggcggcagccggcgtggacagcgggggcatgccggtgaggctgcggaggctgtgggggtcaactggggggacaagggtcagggaaatggtgggctgccgggcagggacgaggctgggggacaggctggctgtctccacggctgcgctcctggccacgttcttgctgggcttagagtctgcttccgtttcgttgacgattaccaactggtcaggaaggtgaggcttaggcagttctggactcatgggggcatctgaattgactgtgcgtgaggtgccgtggcagctgccgttcggagcactaaacccagtggccgccatgactgtcggcctccgacaggctgaacactcgtcggcgtcctttcctgccactcctgactgctggactctgggctgtggagggggtggaggacgagctggtgcctccagagtcgcagtggctggtgctcccgctgccgctggggctcccgctggcggagggtggggactgtgaggacagggacggggagctgtgctcgtttatgcactgggccacggcgaagcctggcaccttgtccaccgatgcaaacacggagcgctgcactgtggggtcgctgctgccccggcgcccctggtcgtagaagcggaaaggcaggtgctgagtggaggtggaggagccgagtccaaaccccaggacttcagtggtgggctggattgggaggtccaggagggcagctattctctgcatcttcatgcgccttgcctggatgcggcctttggccaggcgctgcttggcgatgatgcagcggatgtggtctgagaagatgaaggtggcctggaggatggggaagggcttggaatgggggctggacgcaggcttgtggatggtgatgttcagggcacggctgtcgtcctccacgccagtcacctgcatgtcctgcaataggcctgcaaacttgaccactccccagccaagcctggacacatcaggctccaccaaactcatctggtaaatatccacagccagggatcgctggaccatgccgccatccttggtgatcactgtacatgcaatcaagtcgctgttattcagatccaggacatcatcagtcttgatcaggtcctcctcccgagtcagcggcaactgtgtctcaggctcccctcgcaattgcagtgacagggaacgcagcatgaagaacacccggatggcccgccgggtcttctccacatcgccacacggcagccgcttcacgaagtcaatgcccgtcagtggcgtgcctgttgggggcagcaggatggaggcgtccatcatgagatattccacgttcatgggcttcattgtcatgctcctatactcatcttcaaacatgtccaaaaaaatgtcttctcccttataaaaatgtcgtacaaggtgaacactttcttctctcgcaccctccaggcaggccaggtgcacgtccttcatgatgcagccagcactcatcaggacttgctgcttcagaagcaggcagctcagctccagcgtcgccagccggatcttcccatctggctgggcagcgttgttcatgatcctgatgagtctttcagctagcgggtggttgtaggtggtcttctcggccgcatttggcacggggagctggattcgctctaatttttcaggatccatgcctttattatgagacatggcatagaggaggcagagcacgaacagggcatggtaatcatcatccgggctgtccagcgcgtggtacaccatatccaggaagggtctgctccattgcgtgctctcagagcaggtggcggcggcgcttttctcctcgtccgtggtgttctgctcctgcacggaggtgctggcggccagctctgagagcttgctacgctccatgatcaccatctcgatctcttcactctccccactcgtcttgatgccttttgaaccaccctctgtacctttagccttctcggcgtcttcttgggcatcctcggtgggccctttctcctcatcttcttcttccccaacgtttttgtagttgggtctcttttgcacccgcctcttgcccttgtgcttgttcatctcaagggaccgctcgagtgtctcggtgggtttaatgaagcaccgaatgctgggcttggcagaacttctctgaatatcctgttcagtcttagcgtacatctcagacagatcaccattcagaatgacttcagctaacgagttcaccagcggtgcatgatgtataattaagaagacctgtgacagaagataaagagacaccggcaggctaattttcggccgttctcctcccttgtcctggttctccagtgagtacacgtagaggggcaggaagagcctgttgagcaggtggtcagtgagcacatcgttgaggaactcacagttgatgatcaggatgtcattgagatagtgcaggtggtctaggtgctctgccaccagatcactcagtttaccccgattccgatgctcctcatcagtctgcacgcagtcatcgagttcgatcacatggctcccaatgaaccagaccaaattggagaagtaaggaacagcagttttatctcggatgtagtgcagcatggcctggttatccaatgacactttatagacattcaaagttatggttcttacagcaattctaaccatgctttcagggtggttgaaaaacttgatggcttctgtgtacagggcaaagtcattggtgtgctcattataaaagaaatggacagtgtggttgttgagttttaacgaaagtgttttcaggaacgatatataataggccataatctcctcatcagaaaagtcaaatttatgaacgatgatagaatttacgtagttatttgagagcaaataataaagtgaggtctcgtgactgatgttctcaaagaggatgttcaaggtctgcagcagctgaacgcacacgtaacggcccgacttttgccgcaagatgttcaagaagaaaacaaacatattcttctccaggaagaagtcaaatacagagctgtcattttgatctccccagatcaggatctcagtgatggaacggatggtctccactagcaggttccggttctgttctgtgactgtggtgtttttggtcaaaacgtggtacagatacttgaggtggtccaaggagtggatgttgcgggaagtcttgccatggcccccgcccacccagctccgcgagcggccaaacatgtcggcggccccgacccgtctctcgtctcacggtctcatgccggaccagcagagcggcccagcgcccgcggcggtagcacaagcggaggatgcggcggcggaggcggtggaggaaccgcgagccgcacgaaa

SEQ ID NO: 76446 - DNA, 1624 bp, Homo sapiens; identical to SEQ ID NO: 58974

SEQ ID NO: 76447 - DNA, 2520 bp, Homo sapiens
aattgttttatttatttattgagacaggatctcagttatccaggccggagtacagtggcacaatcatagctcactacagcctgaaattcctgggctcaagcaatcctcccacctcagccttcctagtagctgggatcacagataagagccactgcacttggcccaaaaacatatttaaaatgttaatactttagattggtttcagtcatgttatagggaataatggaacgtatttataccagagtattaacaatgtagaaggacccttgaaacgaagccaaaaagataggagctgtggcaattaaggagacttccaagaagtctaatactaagtagggcatccctgcttaatcaataacacttcatttcgtgaccatgagacaagaaaactacagagacttcatccctaacatccttcagctccagaaccaatgccaaatcacctaactccaggttatatgacaaaaaaaaacatctgtttaggacattctttagtgggatttgtttttctggtcacagtcacaatgacggatttaaaaaaaaaagagtatctcaacttcctattgggagtacatgttttcccctgattttaaactcatgggacaaaaagaaagtgttgactggcatctggcaagataattaaatatctgaaacaccctgaaggaaacaaagagggtactgtggtcaagagtaaggtggacaggataccatagaagatatatccagtgtatataatgataactgctaaaacaccctcaaaactcactagcagaatgtaatcaagtttattttcttgttcaaagtccaatatggatgtttttggtcaagtagctattatgccctaaatagtaactcaggtattcagacttcttctatgctatgactccatcaccgtcaaaacatgtgcttcaaggttaccttgaagaggaaggaggaagagaataatggaaatggctcagccaccctttaactgccttggtctagtattgaaacatcacttccactcattttccactgttgagaactactcacataggcctagatgcatggagctgggaaatgcagtttacctgtgtccagaaagaggacatttgggtgagcatctggccagtttcttccacagaagcaaaggtaatagtggtatgaattcaggaagatgaaaatgagctcactggggaaagagtattcaaggaagatggagcatgtgcaaagactctcagtagaaacagtttggaaagcttgaggaataaaaagcaagtctgtgtggctggagttttgtgaaaggggaggagtgggttaagatgcagatggtgatggtgacggaggcctgggcaagatcacacggggcctgaaaagtttgtcttttgttctcgaggcagtgagaatccattgaaggattttaagcagagaagtgacataagctgatttacattttaaaaagatcacatggctgtgtggaaaattaattgctttagggacacgagtagaagcaattagaccaccagtaaggcagttactgcaggagttgggtatcctaaaaccagatggctggtcagagaattcacctgggaaggaggatgaccaggggatgaaaggttctaattactggtctctgtgaaaagctgtagagagttttgtgcagttacataaatggttgggtttggagctgagcggtgtctctgccaagatcatgttgtttcttttagaactgtgttcccttaggactggactatattatgggaacagaagctggagcacaccaataactgcagaagcagtaactatttatttggagaactctcaaagggatgctgaacaagcatgaggcacggataaccaaacccaattttattcttgtctcttaccaccctccaaattttattcactgggaggtactctccctgctatggagaaaagctgcagcgaggttgtgatgttcttaatagatagtcctgtgatcagtttaaggaacaaacataatctcaattaattagaatgtctaatcctgtgtaacaataatctgcacctgttgcagttttaaatccctttttcctctcccagctctgccccagctaagtctaggagcctgcactgggaaagggaggagtgattggtatgctcttccctctcctcggctcctctctacctaatcactgctgattgctctgggcccaagtgatgaggagaggtaaacagataaatcattttgccctgactgggtatttctatgcactgtgggcctgaaagatatttcctctcccctattctcactctcaaatgataaactggcttcctgctcccctgaaaaaaaatcaaagcaatcagaaatgaacttctggggccctatcaggaactctggaagagggctttcataatggagcaacctcttaccactgccatttacctcaaacaggccctccacattactcagcaatccttacccccctgcattgtgagttctctctcatctcaatagcactcgacagctaacaacctgcccatcctcccataaaaaaaaaa

SEQ ID NO: 76448 - DNA, 3219 bp, Homo sapiens; identical to SEQ ID NO: 58976

SEQ ID NO: 76449 - DNA, 5054 bp, Homo sapiens; identical to SEQ ID NO: 58977

SEQ ID NO: 76450 - DNA, 3179 bp, Homo sapiens; identical to SEQ ID NO: 58978

SEQ ID NO: 76451 - DNA, 1438 bp, Homo sapiens
cgactccgccgactacgcgccttggggtccgggtcgctttccccgggacctggccggaaactgagccgttcacttccgccaccagccggaagttttctgtcactggacgccaaggagttttcggtggctcagctgggtaaccggggatcaccatggcggcctcattggtggggaagaagatcgtgtttgtaacggggaacgccaagaagctggaggaggtcgttcagattctaggagataagtttccatgcactttggtggcacagaaaattgacctgccggagtaccaaggggagccggatgagatttccatacagaaatgtcaggaggcagttcgccaggtacaggggcccgtgctggttgaggacacttgtctgtgcttcaatgcccttggagggctccccggcccctacataaagtggtttctggagaagttaaagcctgaaggtctccaccagctcctggccgggttcgaggacaagtcagcctatgcgctctgcacgtttgcactcagcaccggggacccaagccagcccgtgcgcctgttcaggggccggacctcgggccggatcgtggcacccagaggctgccaggactttggctgggacccctgctttcagcctgatggatatgagcagacgtacgcagagatgcctaaggcggagaagaacgctgtctcccatcgcttccgggccctgctggagctgcaggagtactttggcagtttggcagcttgacttctgcagctggaggaggcccctcaggccggggatctggggagggctagcccaaaacctcccgcatcgggcaggcaccccctgaagtacttccttcagggtttcccctttgtgagggtgtcgagtagcctcaccggcctgtctggaggagcagctggctctgctctgagaaactctggcaagtggacgccattctcttgcccttaggattcactgctctctcctacagccgccaggcctggggtcctgaaaggaccttgggtggtaaagctgtacttggtgggagtgagggcgtggggaggaaccatgcaaatcgccttccatggtttttaaatgcagtaaataacatttctggatgagacttgtttccaaaataaaccagctatatctgttttgaaaaaaaaaaaaaagggggggcccgttttaaagaacccttggggggcccaaatttaacccgggctggcaaggaaaaatttttttccttatggggggcctttttaaaccctacttgggaatttttggaaagaaccttttttttggggggggaacatattggcccaacctccctccaaaatttaaaggctttagggaaaaaaaaaatttttaaggggaaaagggggaaaaacaacctcaatatccttgctgttgaaaagttttttttccggggtttgttttaaaaaaattttttccccgggacttgg

SEQ ID NO: 76452 - DNA, 2392 bp, Homo sapiens; identical to SEQ ID NO: 58980

SEQ ID NO: 76453 - DNA, 1430 bp, Homo sapiens; identical to SEQ ID NO: 58981

SEQ ID NO: 76454 - DNA, 2305 bp, Homo sapiens
ttttttttttttctttcaaacaagacaggctttatttagatcaccaaaaataacattttacagaaagggaaccataacattacacaacaaagtatagctgtaaaatctcaaataagaaaggcaatgctttctttagatcaccaaaaataatgtttcacagagagggaaccgttagaagcaaatgcatagctgcaaattttcttttgccatcaatatcgattccctctaaaatactttgagactactttgtggtttccgagtacaaactaaacctttttggacagagttgctcggcttcatcaaaaaaataaaaccaatttgcaaaaaaaaatttgtttaatgctaacaaataaagagacaatgtggttcttgctaactaactgcaatgtctactgaaatggcctaacctattccacgaatatttcactgtgaacatagttgctttttccttgccatcacagatggcctgcaaagtaacaagtgtcgtgtcagagcactttcaggcacccagggaatcattcctaacagaataactgcagtatgtgggcaactcaaacaacagagccccaaggtgggcattgtgtttgcgctgtgggtaaagacccaccaccttgttagttattcacctggaacccagagcgccaaactagacagagcagttgctcttacagaaccaacaacattttaataaattgcccgggggttcttggtgctgtaatgtgcctcacaggcagcgacataagccgactctgggaagaagtcatcgtggtattctgctaaaaacctcaaaaagagatcaaagtgcttcaataaagccttcagattcttctcagaaaaggacatctttccaaggatttctggaagtttcacaaacaatcgcagcaaatgttgtgccccataaatgtaagagggtggaggcggctggtcacctggggggtaattgtcaggcacaagcttccaggagaggacctcgtttatttcattagttcttctcccttcaaagccagcaaacacagcactcccttccttgctaggagtcagaggaataggtgaagatgatctgctatgcacaggtgtcttcttttccaggtgcaggaagagcttgggcatgctggcggatgtgtcctgctgccggcgcttgggctgaggtgaagcgctgctctcagaaagcctgtcacagttggcactgtggcgcgtggaccgcctcagagactgcaatgcttctggctcagctttgcgccttttgggggtggctggttcaccggtggtcggctgactctctgtggactgtggcgtggatggattcaacaaaggcggactgggagagagttcctcctggctcctgttagtgcttgtggcactttccttaattggaagaaaaaatttagacgaagtcacctttttatactgagcttgttcatatggatagagtaaaaccaacgggagagtgtaatcaaaggttattcttaatccatccaccatctccttacaaaggtcaacattcttttctgctgggatataatgcacgttcatgttggcatgtggcataacgtgatggtgacgaggcctctcattggctgaaaaggctgcattgatagcaaaatgcttcacataggattccaaaatcgttatgatgttggtctggcatggaagtttcactaaccgtttcctcctgttaatgtagtaacaatcatcctccagctgcttcttcagaacttcagggatttctatagttattgttctttcttccatttcccttcttgtttgaagctctggttcttctttcacttcagtcttttcttcaatatcactttcttcacttatttcttcatccttgttttcactacagtcagaggaactgcttaatgagttttcatcattttcatctttttcttcagtggggaggccttttaagacagagtccacaccaggcaacctgcagcgcttcttctttcttcctgtgctcctcaggcgagctacagcttttcttgccaatttacgctgtaatctacgattttcatcggtatcacgaagcacatgatcttctgctgcccatctatcccagcttctgttccaaccattaaaatggatcagatattctgggatctttctgcctttttcgtctttcccaacaataacatcaacaatctgaaacgaagaaatatttcccacaaatggcagaacatacagaaaattagaagttagatcaggaaaactaattcacagacccttttttaaagaaagcattctctcctcttttagaccgacagccgggttgaaatatttttcctttcatcctcgtgcc

SEQ ID NO: 76455 - DNA, 2425 bp, Homo sapiens; identical to SEQ ID NO: 58983

SEQ ID NO: 76456 - DNA, 791 bp, Homo sapiens; identical to SEQ ID NO: 58984

SEQ ID NO: 76457 - DNA, 2352 bp, Homo sapiens; identical to SEQ ID NO: 58985
  misc_feature (1)...(2352): n = a,t,c or g

SEQ ID NO: 76458 - DNA, 5078 bp, Homo sapiens; identical to SEQ ID NO: 58986

SEQ ID NO: 76459 - DNA, 1803 bp, Homo sapiens
acccctccaaatctcatgttgaaatttaatcctcagtgttggaggtagggcctaatggggggtgtttgggtcatgggggcagacccctcatgaatagattaatgtcctccctggagagtgagagtgactgagttctcactctgttctttcctgagaaagctgattgttaaaaagatcctggcatctcccttctctctcttacttcctctctcaccatgtgatctctgcatacactggctccccttctccttctgccatgagtggaagcagcctgaggctctcatcagaagcagatgctggtgccatgcttcttgtacagtctgcagaaccggaaaccatctttgtatggcagcctgacttgtcaaggaattggcctagatggcatcccagaggttacagcttcagaaggatttactgtgaatgaaataaacaagaaaagcattcatatttcatgtccaaaggaaaatgcatcttctaagtttttggcaccatatactactttttccagaattcatacaaagagtataacatgcctggacatttccagcagaggaggtcttggtgtgtcttctagtactgacgggaccatgaaaatctggcaggcttccaatggagaactcaggagagtattggaaggacatgtgtttgatgtgaattgttgcaggtttttcccatcaggccttgtggtcctgagtgggggaatggatgcccagctgaagatatggtcagctgaagatgctagctgcgtggtgaccttcaaaggtcacaaaggaggtatcctggatacagccatcgttgatcgggggaggaatgtggtgtctgcttctcgagatgggacagcacgactttgggattgtgggcgctcagcctgcttgggagtccttgcagattgtggttcttctatcaatggagtggcggtgggtgctgctgacaactccataaaccttggctcccctgagcagatgcccagtgaacgggaggttggaacagaggccaaaatgctgctcttggcccgggaagataagaaacttcagtgcttgggactacagagcaggcagctggtgttcctctttattggctcagacgctttcaactgctgtacttttctctctggcttcttgctattggctgggactcaagatggaaacatttatcagctggatgtgaggagtccaagggctccggtacaagtcatccacagatcaggagcaccagttctatccctgctaagtgtcagagatggattcattgctagccaaggtgatggaagctgttttattgtccagcaagacttagactatgtcactgagctcactggggctgactgtgaccctgtgtacaaggtagccacatgggagaagcagatctacacatgctgtcgagacggtcttgtacgacgctaccagctttctgacctctgacttcttggaaagagcagtcccggttagtgaaaaggtttgaccctgatcaacaatgagcagaaacatcatcagtccttcccaaggaccatggcgtttaatgtcttgggcaccccttggaaatcacagaaagtcagctgtactggccgtgtggaactctcatcccaagacctactttgaactgagtaagaaggtcattgtgcccactgcatttgttccaacttctccttgtataaactcaccccagcaacacagggcaaggatatagatgcttttagtttgttcttaaaccagttttgttaaatgtttacaaggacctcagtactaaagcctgttctctggaggaaataaagaaaatatgtttggaggtgcctgaaaaaaaaaa

SEQ ID NO: 76460 - DNA, 1831 bp, Homo sapiens; identical to SEQ ID NO: 58988
  misc_feature (1)...(1831): n = a,t,c or g

SEQ ID NO: 76461 - DNA, 733 bp, Homo sapiens; identical to SEQ ID NO: 58989

SEQ ID NO: 76462 - DNA, 827 bp, Homo sapiens; identical to SEQ ID NO: 58990
  misc_feature (1)...(827): n = a,t,c or g

SEQ ID NO: 76463 - DNA, 1803 bp, Homo sapiens; identical to SEQ ID NO: 58991

SEQ ID NO: 76464 - DNA, 3529 bp, Homo sapiens; identical to SEQ ID NO: 58992

SEQ ID NO: 76465 - DNA, 2856 bp, Homo sapiens; identical to SEQ ID NO: 58993

SEQ ID NO: 76466 - DNA, 2884 bp, Homo sapiens; identical to SEQ ID NO: 58994

SEQ ID NO: 76467 - DNA, 1924 bp, Homo sapiens
cgtcacagcccgacgcgccacccagctgtttttgtgctcacaagctctagcgaaaagccgccggtatttctccatctggctctcctctacctccaggcaggctcacccgagatccccgccccgaaccccccctgcacactcggcccagcgctgttgcccccggagcggacgtttctgcagctattctgagcacaccttgacgtcggctgagggagcgggacagggtcagcggcgaaggaggcaggccccgcgcggggatctcggaagccctgcggtgcatcatgaagttccagtacaaggaggaccatccctttgagtatcggaaaaaggaaggagaaaagatccggaagaaatatccggacagggtccccgtgattgtagagaaggctccaaaagccagggtgcctgatctggacaagaggaagtacctagtgccctctgaccttactgttggccagttctacttcttaatccggaagagaatccacctgagacctgaggacgccttattcttctttgtcaacaacaccatccctcccaccagtgctaccatgggccaactgtatgaggacaatcatgaggaagactattttctgtatgtggcctacagtgatgagagtgtctatgggaaatgagtggttggaagcccagcagatggggagcacctggacttgggggtaggggaggggtgtgtgtgcgcgacatggggaaagagggtggctcccaccgcaaggagacagaaggtgaagacatctagaaacattacaccacacacaccgtcatcacattttcacatgctcaattgatattttttgctgcttcctcggcccagggagaaagcatgtcaggacagagctgttggattggctttgatagaggaatggggatgatgtaagtttacagtattcctggggtttaattgttgtgcagtttcatagatgggtcaggaggtggacaagttggggccagagatgatggcagtccagcagcaactccctgtgctcccttctctttgggcagagattctatttttgacatttgcacaagacaggtagggaaaggggacttgtggtagtggaccatacctggggaccaaaagagacccactgtaattgatgcattgtggcccctgatcttccctgtctcacacttcttttctcccatcccggttgcaatctcactcagacatcacagtaccaccccaggggtggcagtagacaacaacccagaaatttagacagggatctcttacctttggaaaataggggttaggcatgaaggtggttgtgattaagaagatggttttgttattaaatagcattaaactggaattgacaagagtgttgagcatccctgtctaacctgctctttctctttggtgccccttatctcaccccttccttggaatttaataagtctcaggcatttccaattgtagactaaaaccactcttagcatctcctctagtattttccatgtatcaggaaagaggtgtcttatgtagggagggggcaagtatgaagtaaggtaattatatactactctcattcaggattcttgctcccatgctgctgtcccttcaggctcacatgcacaggaatgctacatgatggccagctgcttccctccttggttatcatccactgcagctgctagttagaaaggtttggagggatgacttttagtaaatcatggggattttattgatttattttcacttttgggattttgtggggtgggagtggggagcaggaattgcactcagacatgacatttcaattcatctctgctaatgaaaagggttctttctcttgggggaaatgtgtgtgtcagttctgtcagctgcaagttcttgtataatgaagtcaatgccatcaggccaaggaaataaaataattgcttaccttaaaaatcaaaaaaaaaa

SEQ ID NO: 76468 - DNA, 2079 bp, Homo sapiens; identical to SEQ ID NO: 58996

SEQ ID NO: 76469 - DNA, 3600 bp, Homo sapiens; identical to SEQ ID NO: 58997

SEQ ID NO: 76470 - DNA, 965 bp, Homo sapiens
aagacggtgatttctgcatttccatctgagatgcagtcgaagccctgtggctccaccccgagggtccagcccttaccactgctaagaactacaactcccagcccgagggaggtctctgcgcctgcggcctgacgccctacgcctacacttcccagagaacctagcggttacgccaacgcgcgcgtgcgcccttgcgcgtttctctcttcccactcgggtttgacctacagccgcccgggagaagatggctgccccagcagtgtccgggctctcccggcaggtgcgatgcttcagtacctctgtggtcagaccatttgccaagcttgtgaggcctcctgttcaggtatacggtattgaaggtcgctatgccacagctctttattctgctgcatcaaaacagaataagctggagcaagtagaaaaggagttgttgagagtagcacaaatcctgaaggaacccaaagtggctgcttctgttttgaatccctatgtgaagcgttccattaaagtgaaaagcctaaatgacatcacagcaaaagagaggttctctcccctcactaccaacctgatcaatttgcttgctgaaaatggtcgattaagcaatacccaaggagtcgtttctgccttttctaccatgatgagtgtccatcgcggagaggtaccttgcacagtgacctctgcatctcctttagaagaagccacactctctgaattaaaaactgtcctcaagagcttcctaagtcaaggccaagtattgaaattggaggctaagactgatccgtcaatcttgggtggaatgattgtgcgcattggcgagaaatatgttgacatgtctgtcaagaccaagattcagaagctgggcagggctatgcgggagattgtctaaaagtgttggttttctgccatcagtgaaaattcttaaacttggagcaacaataaaaagcttccagaacagaaaaaaaaaa

SEQ ID NO: 76471 - DNA, 1491 bp, Homo sapiens; identical to SEQ ID NO: 58999

SEQ ID NO: 76472 - DNA, 1926 bp, Homo sapiens; identical to SEQ ID NO: 59000

SEQ ID NO: 76473 - DNA, 1090 bp, Homo sapiens; identical to SEQ ID NO: 59002

SEQ ID NO: 76474 - DNA, 1969 bp, Homo sapiens; identical to SEQ ID NO: 59003
  misc_feature (1)...(1969): n = a,t,c or g

SEQ ID NO: 76475 - DNA, 2041 bp, Homo sapiens; identical to SEQ ID NO: 59004

SEQ ID NO: 76476 - DNA, 660 bp, Homo sapiens; identical to SEQ ID NO: 59005

SEQ ID NO: 76477 - DNA, 1146 bp, Homo sapiens
tgttgttgttgttttttaaatcacccctccattactcaacattctcgttcccagatgaattttaaactgggagttgcaccaactgtgagacagcctcaaccccaatgttaaatactaccagttttatatatatatatatatatatatatatataaagactgaaaacagttctctctggaaaacgatccaccaacctttttatgggaagaaggtcttctctaacactttaacttaagggaagaagtgatggagaggaagaaggaaagtacactggccaatactctggaaactgactgacttggggtatctgtggtccaaagaggatcccgaaagacagtgactctgtctcaatgattattcccatcccaattaaaagtcataatgacagcatttacattcacacagggtctctttccaagaagtttgtgagtcacctacatgtcttcaattctcaaggcaacagtgggggcaacaaggaggttgacagccaggtcctgtgagagctgtttgtcaaagcccactctcagtgagtcagtccctggaagttgggttcagtgcacggaggcagggccactgactggcttagcaacgtgtccatcatgctgattttagcatcttgcttctcaatgtcctcatacggagtccaggacaagtcatgctgtagtttgtaggcaccaaggaagtcatgtggacaacttgtcccccattcctttggagaaatgatggaaaaatactgctgaccactctcccgtttatagagatagtaaatgttgccaggttttttcactatattacaagctacatggtgcaggttggcatctctgtgagcatcttccagtaccttcctggcttgttcttgcaaatgttggatttgctcagctatgactgtcagcttgttggtggcatttgctcggatgaattcatcagccttctgcacctgctctgcgagcgccacgaggtctaaggggtccccggcccggtgggtgtggtaggggctcaccagggccaggccgccgggggtcggggtgagctccaccagggctcctccctggcctgcagctggcggcgctccttgcctttcaaggaccccctcggtccgccccggcgcggcggcgtcctccatgacagcgccttatccctcgtgcc

SEQ ID NO: 76478 - DNA, 1571 bp, Homo sapiens; identical to SEQ ID NO: 59006

SEQ ID NO: 76479 - DNA, 1947 bp, Homo sapiens; identical to SEQ ID NO: 59007

SEQ ID NO: 76480 - DNA, 2660 bp, Homo sapiens; identical to SEQ ID NO: 59008

SEQ ID NO: 76481 - DNA, 1074 bp, Homo sapiens; identical to SEQ ID NO: 59009

SEQ ID NO: 76482 - DNA, 1111 bp, Homo sapiens; identical to SEQ ID NO: 59010

SEQ ID NO: 76483 - DNA, 1108 bp, Homo sapiens; identical to SEQ ID NO: 59011

SEQ ID NO: 76484 - DNA, 1224 bp, Homo sapiens
ttttttttttttatacaacattttcagcctttattgagagtacagtcatcatgccaaaattcatccatcaacatacaaccttatttcccatctaaagttaatgagaatgtattttattttaaatgggacatagaggcaacatgccaagaattaaagtacaaccataaagttttagtttcacactttgaatatcaacaaagcagtaattcctaaaatcatgaaaacatgataaagtatctatacagaaaaaaatgaacatttaagtcatttcacgctttcttaatatcatatagtgaaaacagatgtacctataatttcagcctacagatagcatacttcataaggtcattattcatttaaaatagtacaaatgtttacaaagaacatttcacttaaatttcacagctgcttataaaatggtacttgcaagactgacctatataaagaaataagagtctcatcaagagatggtaaattataaatatataatatatcacaatgttaaaatcctcagtgctaatcaataagataatgatctttggagaggaaagtatttagctttacatatttactgtgaatttacatattaataagaaacacatttaaaccttgccctgccacagaattattttgcgggggggggggggggggdagatgtactttttgaatatgtgtacatcaaaaccaaaaagttaacttttactttttcctttattggcaacttttgatgcatttttcgattttggttcccagagggcattttttacaaatcttgaagctgcacctctgtccagcttgccagcctttttcttgtctgttatttccttgactctgttcatatatactctgattctttccaattcctgttttactggatgttccttaggattaactccttgggttgccaaataaacccaaaacattgaatttaatgtgtatgcagaaaccaaatccacttttgcttgttcaagtggatccaacttctgcaacaactcatttctagaaacagacatcatggtcttcagcatctcatccacagcaccaatggaattctcaaacgctgacaaatactcgtgaatttctactggatagtcttcattaatttcttcacctgccattatggctgaccagctctgctcctcaccctcctccggggttctataggtactccttgcccttccacatactccttctaaaacactggctcacggccttcgactccag

SEQ ID NO: 76485 - DNA, 1699 bp, Homo sapiens; identical to SEQ ID NO: 59014
  misc_feature (1)...(1699): n = a,t,c or g

SEQ ID NO: 76486 - DNA, 1568 bp, Homo sapiens; identical to SEQ ID NO: 59015

SEQ ID NO: 76487 - DNA, 1524 bp, Homo sapiens; identical to SEQ ID NO: 59018

SEQ ID NO: 76488 - DNA, 1463 bp, Homo sapiens; identical to SEQ ID NO: 59019

SEQ ID NO: 76489 - DNA, 1166 bp, Homo sapiens; identical to SEQ ID NO: 59020

SEQ ID NO: 76490 - DNA, 1080 bp, Homo sapiens; identical to SEQ ID NO: 59021

SEQ ID NO: 76491 - DNA, 4698 bp, Homo sapiens
ttttttttttttctcattactcatgattttttttaatttaacatatatagtacatgtaaacaactggcataaaattcataaaaatacaatactcctatgcaatatcactttattcctgatacatactttcattttctcattaatatcactggcctattttaacactatattttttttgccaagcatttttagagggcttatctttttaaaggaaatacaggcccccaactttgttttcggaaaatgttgtaggcaataggctattttggatcggcttctttggccccatccttaattttcctcatactaaaggcaaaaatatttggtaaatggctaacaatatgcaaaaacactgaacctttaatactgttttgtacgccctatgggaacctgctaccaatcctgcattgcccatcaaagggtggtgggatgctcccacagtggcttggggctgcggaggctgtgggccacgggctggcatagggggggggaccttcaggcctctggctccaaactggctcccctaatatatagccatattttgctgggggttacattcataaacactgctacaaaaggatccttctggaaaaagctaatttatattacttttaatggttcccagcaaatgaagcagttataatagtatttttaatgcttttttcctatacagaatttctacttattacatgtgaacttctttggaaggaaattactgggggtgagaaaaatataaaataaatgtaaaagtataatttttaaaaattgtaactgctggatgtacacaatcagccacactcaggtgagcaacaatcacagataagcagcgcgcacctccctctccctgctcatgtcaactcccatcctcagcctcaagtgtccaccgcccattttcctggactgttgtgcatcatcgctcaaatgttgcttttaatccacaaatcaagggctgcttccctattttctaaaactagcaaaagcctaagaaataaaaacagtcaaccagcaaatgagaaacagtggccacaaatctgaagaacgctgccagagtccctctcctgggctgcctccagggaaggagcatccctgggagctgcggctctaggcgctggcacaagactggggggcggtgcttctctgagggcacactcctcagcctttgcagctgacttatgtcagcaagctgctgcttccccgggaccaggcctgcccttgggctctggtaagaaggtagaaagggaacagcggcttccaggagtgggcaccagaaaccatgcctgaggactaaggtctgaaggacaatccacaatgaggttaatctgcctgtggttaagaaagagaagctgtataattaaatgtgtagtctgtcagccatagtcacgctttgcttagaatttaaaaccctaaaaccttttctcagagctatgaggtttcatcgttttgaagaatctcatttcacacaaattaacttctaagaaacaaaaattcatacaaggaattcaaagaaggtgtagaaatttttcaaaataaaaataaataggaagaaaaaaactaaagaggaggacgaaatatacttattccttatactgaaatgatggtttttagaaccaaaattataacataaggcttaaggctttgtcttattaaagacaggcaatcttaaaagtaaaatataaaaactccatttatcattattctttacatttttgacagcaaaattagtcatgttttattgtatcttaatagtaaaagaaaaattaccatgtactacagtctactgttccactataaatgatgtctaatcaaatatacattagtttctagatgcactatatttggggttgttcaaaatagtttttcttaaaactataattaaacatgaaaaaactttaaagtggtttaaaggtattaaaatataaacatttgaataatgctaaaaatgagaaaaatacagttaccattaattttttttaaaaccaagaataagtacttgataagcaactaaatgagtaaacagtacttatttgacagaaaatatggggaagaggagaagagagagagcaagagagagagagaaagagacacgataatgccatatggctggaagttaagggaatttcctaaccacaaggtccaagagtttggattaataatgggcaggaaaagcttcattaacaagagaacagagaacaaaaagcgcacaaggaagtaaaacaaacagatagttctatatagcaaacactccatgtctgccccatctactgtaactcaagttgatgacaggggctgacatgaccgaagaacttacaatcactgaaatgtccaaaagacaagagcaagaggcagaaaaaagaagcaaggggcattaatagttcttacactataaaatcagcccctacattgtcagaattgtcctgtattttcatgtcatccttgtcacaacccactgtgttttctttatacaggtagctttgctcactttagcacaaatattaaagtcaagtacaagcatatactcatttgcatagcaaattttaaagggtgcattgaaatagtaaccaattgataaaggtgtaagtcatttttataattagaatgacattcaaattgaccaaataacacgttttctatttgaaaacagttacctataaaagtttttgggatatgaacaacacatgacttagcaaaacattaaaaccattacagatgtagttctccgtaggcagcaggtcatgtagcagtcattcttttacaacttctaggactttgtaaacactgttctggaatacagtggtgaagtgaggtttggaatccttcaccaagaggttacataagggagttttcccagcattggcaggatcttctacatcccaaatttcaggcatactgcaaccaggcttggatcttcttacacaccatgactcttctagaatgtaatagttcacttttaactttatcagttctcgcttcacttcttcggctgctttccgactatacattgagtatactatttttgttctggctctcaagcctgcgtcttcataatgtggatgattcacaatgggccgaagtgcagagagcttaacacttgccatcgtgggcatggcacccgcaaacactgcatctggtttagtactatatttgatccattctataagttcttcttggggcaaattgctgaactcccctacaatattccactgggtttgcagatttgctgaaccttgtattgacattgctgctaatatagcaaacacaatagcaccaggatgtactttgcaaaagagccatccaaatagctgtcttgagcagatcagtgatgccataacacacatgtgtggtgtcaagaagagttttagtctcataattaaaataccaagggctgtatatgctaacaattgcaatgcatggtaaaccagctctccatgatcaaactggtgttttcttacatgtgtctgttgtttagctaagacaccccacatatcactaataatctttctaacaatagcaacaaaccctacaagaacaactggaagcaataatgtctttgtgtatctcagtggagtctctttttccataaagtcaaactccgctgcacaggtatacaataaagtatcaaaatccttataactaaagaattttgatgttagtaagttgccaatatgagcgtcatttgcaataccaaaaattttagatgtcaagtatttaagtatgacagttccaaataaccaaaaacatccttgaataacccataaactaagttcagatacatttattttcaggaaatgtggtttcattgccagaataccccaaataattaccaaagaagaagcataataagaagttaataacattgagttcccaaacatcaaaacaaaacaaagtgcaagagaaatcatgtgtatataaatgatcttccgtaatttacatatatcaatgtacccgacaacatatactgcaaataatgatgcaatctgagtaagaagtacaaactgagcaaactgccaaggaagcatgaaaaatacattggaaatgcagagtgcaatcaagcttcctctataaagttttgtagccctgagaatatgagtcactagcaacatctgaagaacaagaaatggatatgagaagctttcacggagaggtggtgtccacattacacgggtacactctccatgattgaaaaagaagcacaacactgtaaccaggcctcctaatcggctgccacttaaatatgtgccatatatgaagaataatgccatcattagtccatttaaaataaaaattacagcaacatagaagcaagcaggatctcccaatccttcacagctttcagtaggactgagtccttctcctatggtaaccgtccaacatatcttggtttgaataccaatcaagtccattattttggtataaatccggtaccaactggccaaaattacctcagggtaaagattgaatctttttaatgtattaatgacaagggggtattcagtcagtttatcattcataatcatccatactccattcaaaaatgagggtgcttccacaatagtcttgaaataggaataatatagtcccatttcagtgcgaaaagccatctactatgtttattatttatcttctgtcttccctctttcccccactctgttagaatgtagtaatatgaatgctggtgtattccacatgccttgacagttg

SEQ ID NO: 76492 - DNA, 444 bp, Homo sapiens
cggacgcgtgggcggacgcgtgggtagcgccatttttttggaaacctctgcgccatgagagccaagtggaggaagaagcgaatgcgcaggctgaagcgcaaaagaagaaagatgaggcagaggtccaagtaaaccgctagcttgttgcaccgtggaggccacaggagcagaaacatggaatgccagacgctggggatgctggtacaagttgtgggactgcatgctactgtctagagcttgtctcaatggatctagaacttcatcgccctctgatcgccgatcacctctgagacccaccttgctcataaacaaaatgcccatgttggtcctctgccctggacctgtgacattctggactatttctgtgtttatttgtggccgagtgtaacaaccatataataaatcacctcttccgctgttttagctgaagaattaaaaaaaaaa

SEQ ID NO: 76493 - DNA, 1649 bp, Homo sapiens
ctattttgtttcgtctggtactcttgtctctcgtttatttgcttaactctgtagccacagaagaaaggaaaccagctgaagttcttattgtcgagggacaacagtatgcagttgttggaaccgtattgctgttaataagaattatccttgaatattgccagggtgtggataacatcccatctgttactactgacatgcttactcgtctgtcagatttattgaagtacttcaattcaagaagttgccagttagttcttggagctggtgcactgcaagttgttggactaaaaacgataactacaaaaaatttggctctttcttcacgatgtttgcagttaattgtgcactacattcctgtgatccgggctcattttgaagctcgactaccacctaagcaatatagcatgcttaggcattttgatcatatcactaaggactaccatgatcacatagctgaaatatcagctaagcttgtagcgataatggatagcttatttgacaagctgttatctaagtatgaagtgaaggctcctgttccttctgcctgtttcaggaatatttgtaagcaaatgacaaaaatgcacgaagctatatttgatctccttccagaagaacaaacacagatgttatttttaagaattaatgcaagttataaactccacttgaaaaagcagttatctcacttaaatgtgataaatgatggaggacctcaaaatgggttggtcacagcagatgtagctttttacactggaaatcttcaagccttaaaaggccttaaagatttggacctaaatatggccgaaatttgggagcagaagaggtgatgtcatcctggaaaactgggtagttcatctgaccatgggatgtgtttgttatgaagaaaatctggatgcctgtgattcgagaattgaacctgaaacccaaagtgaactggggtgggggaagggaaaaaggaaagtatcaagtgttgggaaactggattcagtgggatctacaaggaatgtcatttttgtgcatcctacagtgaggagtaactgatcaggtgtctataacatttttcattctctctggaaacagactcaggtttctttggaccaaatccaaaagaacacatagctgtaacacagctgtagttgactagaatgctctgtatactttatattaaaaaatgctttgcatttcttccagtgcaatgaaattcatatggtgtcccaccttatttaatgatggtacaatttaaaatcttagtcaacttctgtagaaagttttctctatgaaagtaaagctgtttgaaaaattattatttttttacagatctttctataaaaaataaacatcttttgattgcttggatttaggaattcaattcttgtttcagtgaccaatgtcaagttgcaggctttgtgtgttgcatatttaatatttctactaccaccgtatgtcaactgggtaaagccttccagagctctctaaatacctgaaagacttaagcctttttttaagtaattaatacttaaaaaaaaaagatcctggcatctatttatgcaactaaatacttttcagaaatggtatataaaaggctacagtttaatatctgtatttttataaaagtatgatgaagggtttggggtgtttttatttgtagcatg

SEQ ID NO: 76494 - DNA, 1671 bp, Homo sapiens; identical to SEQ ID NO: 59025

SEQ ID NO: 76495 - DNA, 1991 bp, Homo sapiens
ttttttttttttctcaaatgacttagatttaatcatcggaagcaaactaaatggaaaccttacaatagagaagaattacatgtcagtgtcttttggaaaactgagctgggacagaaagggactgggggctgccccccaacctgatcccttctgaacaaagacgtccacagtgttcctggcactctggctcaggaaaaggggagactctgctggttctgtgcattgaagtagccttgcctagcactcactcctggccagcatcaggagccccgccttgccggctctggtcatcgcctttctttttgtggcctgaaacgatgtcatcaattcgcagtagcagaactgccgtctccactgctgtcttataagtctgcagcttcacagccaatggctcccatatgcccagttccttcatgtccaccaaagtacccgtctcaccatttacaccccaggtctcacagttctcctgggtgtgcttggcccgaagggaggtaagtagacggatggtgctggccccacagttctggatcagggtacgaggaatgacctctagggcctgggcaacagccctgtatggccattgttccacaccagtcatggccttggatttttctgtcaaggcatgggccacagccatctcggaggccccaccccctggcaccagctgagggtccaggagaacattgcgacacacttgcatggcatcctgaaagttgcgttctacttccgagagaatctctttgctagccccccggaggagaatggtgcaggccttggggtctttgcagtcagtgatgaaagtaaagtattcatctccaattttcttgatttccaacaggcctgctcctgttccaacatcatcttctctcagttcctctggtcggctgactatccgggccccacaggctctagcaatgcgattattgtctgtcttccggactctgcggatggctgtgatattggcccgcataaggtagtgctgagctaaatctgagatgcccttttcagtgatgaccacatcgggcttcagttggataatgtcctcacagagctgctggatgtactcttcctccatctggagaattcgggtgaagtcctcctctcgtgtaatctcaatgtcagtctggctttctcctttcttgtattccagagaagaatccagcagcacaatgcgagggttcttgatatagcgccgcatacgtggatgggtcacatccttgttaatcatgactccacgcaagacacaggagtcttcaatgatgcctccaggtatcttttccactcttgcatatttttttatgtcaatctctttccgaccattctcctcaaactgtaccatcttgacagcatccagggcaatgttgcaagccaaagatgaccaccgactgatggctttggtagtaatagagctgttgatgatgttcagcatcatatcactgtcactgatgtcgactgggatacttattttctttagggtgctgatcatatcatccaatgccttgcggtaagcactgatcaccactgttgggtgcatctgctgctccaggaagtgctcagctacagacagcatttcccctgcaagaataattactgatgtggtcccatctccaacctcttcatcctgggtccggctaatttcgatcatggacttggccgctggatgctggacttgaatctctcgaagaatggcattgccatcattggtcatcacaatgcctcccattgggtccaaaagcatcttcatcatggacttgggtcccaaacatgttcggatgatatctgcaatagtcttggcagcattgatgtttccagattgaacttttcttccggattcacgctttgtgttctggctgagcacgagcactggacgatggcccatcatggcgacgcgatgcagagccgggtacccagagctgggggaaccggcagaaccttctggagagagagaaccagacagaagcccagaaaacgctgcctcctcagggcttacc

SEQ ID NO: 76496 - DNA, 1463 bp, Homo sapiens; identical to SEQ ID NO: 59027

SEQ ID NO: 76497 - DNA, 859 bp, Homo sapiens; identical to SEQ ID NO: 59028

SEQ ID NO: 76498 - DNA, 2210 bp, Homo sapiens; identical to SEQ ID NO: 59029

SEQ ID NO: 76499 - DNA, 3745 bp, Homo sapiens
aagagcttctcggctctaggctctggagtcccgggagcagtgaggggccacccggggcacaggaaagggccgctaggggagggccgggtgcactcggggtgtctgggccgcgggtctgagggatgaggaggggccatggccagcgacggggccaggaagcaattctggaagcgcagcaacagcaagctcccgggcagcatccagcacgtgtatggtgcccagcaccccccctttgatccactgttacatggcactttgctcaggtccacggccaagatgccgaccacaccagtgaaggccaagagggtcagcaccttccaggagtttgagagcaataccagcgatgcctgggacgctggggaggacgacgatgagctcctggccatggcggcggagagcctgaactccgaggtggtcatggagacggccaaccgtgtgctgcgtaaccacagccagcggcaggggcggcccacgctgcaggaggggccagggcttcagcagaagcccaggcccgaggcagagccgccctcaccccccagcggcgacctccggctggtgaagtcggtcagtgagagccacacgtcctgtcctgcagaaagtgccagcgatgccgcccctctgcagaggtcccagtctctcccacactcggccaccgtcacgctgggtggcacatctgaccccagcactctcagcagctcagcgctgagcgaaagagaggcctcccggctcgacaagttcaagcagctgcttgccggccccaacacggaccttgaggaattacggaggttgagctggtccggaatccctaagccagtgcgtccaatgacgtggaagctcctctcaggttaccttcccgccaatgtagaccggagaccagccactctccagagaaaacaaaaagaatattttgcatttattgagcactattacgattctaggaacgacgaagttcaccaggacacatacaggcagatccacatagacatccctcgcatgagccctgaagcgttgatcctgcagcccaaggtgacggagatttttgaaaggatcttgttcatatgggcgatccgccacccagccagtggatacgttcagggtataaatgatctcgtcactcctttctttgtggtcttcatttgtgaatacatagaggcagaggaggtggacacggtggacgtctccggcgtgcccgcagaggtgctgtgcaacatcgaggccgacacctactggtgcatgagcaagctgctggatggcattcaggacaactacacctttgcccaacctgggattcaaatgaaagtgaaaatgttagaagaactcgtgagccggattgatgagcaagtgcaccggcacctggaccaacacgaagtgagatacctgcagtttgccttccgctggatgaacaacctgctgatgagggaggtgcccctgcgttgtaccatccgcctgtgggacacctaccagtctgaaccggacggcttttctcatttccacttgtacgtgtgcgctgcttttctcgtgagatggaggaaggaaatactagaagaaaaagattttcaagagctgctgctcttcctccagaacctgcccacagcccactgggatgatgaggacatcagcctgttgctggccgaggcctaccgcctcaagtttgcttttgccgacgcccccaatcactacaagaaatgagcccaggcccacccgcagctggcctcactgtcccgggtggcgcgccccacctgcctggctggtggtaggcccctgtgagctggtcccgggctgctaaaaggccttgtgaggtggccccaccctccaggggagctggtgaagatgggccacagacctggtctagggctgacaaagacagggacagcctttgttttctgagataccaaagagagccaggggagggccccgggttcggcggccagaggcaggtcaggggtcccctctccctctccctgcaatgtccttgccaaatgactgcctcgtgctgcccctagtccggggcagcctaggaggccgaccctctttggagtcctgctgtctgggtgccagggccggaacgaggtagtggccatctcatacctactctgaaatgcaaaacttctattctgttgagtgaaagaataaaatgtagacaaaatctagaccgagacgttgcgctgacccggggtctctgtgccgcgaggtcccctcacagctgtatttcactgctgctggccctttccctccgtgtgttttcctgcttgcttggtttaaacgtggctgggaagctgaaggctggagtccaagccgtgagcccgccgagtgcctgggaggccgtgggaccaaaggctgggagcagagggaggcctcgccatcgccttactttccaccttgaacctcttttacaagagagaaacccccacctccctgaggtccagggccaagtggccccgccacgcaggtaggcgccggcctcagccagagcccctggaggcccacccaggctgtcgggccatgttgggctggcagacgggcagggggtcgcgtccctgtcatcaaagccctgaaccacagtgctcttctcaccgcagcctggaagcggaatgagcttttggagacttcctgggacttgctgtccttgtccaggtctgccaggtgtaggggaggtgtgactggttccatcatggaccggttcctccgtggaccggttccgccatggaccggttccgccatggaccactcctgccctggaccactcctgccctggaccggttctgccgtggactggttcccgccgtggaccagttcccgctgtatactggttctgccctggactggttcccgctgtggactggttccttggggctctaagtgcggaagggcccagagctggtccctgcccagcgccctgctagggctgtgtccttggctccaggggccttgggactggcttcccagcgttccctcggtgtgtcacaggctgcatgacccctggaatgcgggcagggccacagccacagtctgtctgatccctgagcccaggacaggctcacgtcctcagcgacccactggtgactgacttcccagactctcctctgtccctcaggagcagccgtgtcctctcccaggccctaggacactgccagagactgtgggacatacaggcataagtgatgtgtgtgtttctgcttctgttttaaaaatccagggtcattacacacagcatggaaattagcacaaaatgctgtgcaaacgtcagatgctcccaaaccagcaaagggatgggcttgcttcacatcagatgcgggcacgccttacccctgccttccgtgtccccaccccagggtcaagggttcctcagaccagccatgcctcctcctcctgccgcctccttttctagatggggaggggattccgtcacaagaagagccgcccctcggccgtgtgcaggaagcccacatgtcgctttgccgagatcagccctgggaggatccccttctctagctcagatcatgccgtgtggcccagaaggctgcggacacaactgacctgcttctcgaggtggttgatgttttaaacaggaagctccacggagttcagccctgtgtgcatttcctcatgtatgtaaacgccaagactgaatgtgagaggtgtctgccgcgggccttaagtctgagcagatccatctggaatgttcggggtgtgctgtctggatgtggtgcgctaaaaacacggaataaagatcagtgacaaagcc

SEQ ID NO: 76500 - DNA, 3420 bp, Homo sapiens
cacttactcctccccagcaagagctaacagccctccttgggtgtgcactttctcctcccctgaggcacctcgcgcattctgccgcctacctatcaatcatcgtgctccgctgtccagatggctggccaagggggcggggccgtcgtgtgacgtttgcagcccgccggccaggaagccgcgagatgcttgacgagcgaagcgcgtgacagaagagcggttggccaacgcagtggcggcagtcggtgtaaacaaggcctcgcgccgctgcgggtcctgcgaccgctcctggctggtgggtggtctcgcgtggggcggttaccgccggcttcagtgggaggtgcttctcggcttcctccccctcatggcgtacacacccccggcgcaccacgtgggcgtgaggcgaggaaggaggggtgttaggccaaattctattttcattggctgtcactgctgccggcctttgtaagggggcgctctgattggtcgataaggtgggggcgtcgagggtctttgagtcctaaggcttctaattggttagatgagataagctagtgaagcgctttcttccgagagggatttcgattggtcggtcagagaggttacctggaaatccaacaccgcccaacacccctcccgctccccagtccggggacttcgataggattggagaaggtttgtgttcccgacgccttggtagttggcataggctaaagaaaagggatctcagccccgaggaagggtcaccctcctagagatagctactaccccgtctcaggagaccctggtatttctagagcacgctttgctttcaccaaacccaaggaggtgacaggaggagcccccgcacaggacctaagaatgctgtgaccagaagatgggatcgcggaacagcagcagtgcaggatccgggtccggagacccctccgagggcttgccccgaagaggggctggcctgcgtcggagtgaggaagaggaagaagaggatgaagatgtggatctggcccaggtactggcctatctcctccgcagaggccaagtgaggttggtgcagggaggaggtgcagcaaatttacaattcattcaggccctcttggactcagaggaagagaatgacagagcttgggatggtcgtcttggggatcgatacaacccacctgtggatgctacccctgacacccgggagctggaattcaatgagatcaagacacaagtggaactggccacagggcagctggggcttaggcgggccgcccagaagcacagctttcctcgaatgttgcaccagagagaacggggcctctgccatcggggaagcttctcccttggagaacagtctcgagtgatatctcacttcttgcccaatgatctgggcttcactgatagctactctcagaaggctttctgtggcatctacagcaaagatggtcaaatattcatgtctgcttgccaagaccagacaatccgactctatgactgccgatatggccgtttccgtaaattcaagagcatcaaggcccgcgacgtaggctggagcgtcttggatgtggccttcacccctgatgggaaccacttcctctactctagctggtctgattacattcatatctgcaatatctatggtgagggagatacacacactgccctggatctcaggccagatgagcgtcgctttgctgtcttctccattgctgtctcctcagatggacgagaagtactaggaggggccaatgatggctgcctgtatgtctttgaccgagaacagaaccggcgcacccttcagattgagtcccatgaggatgatgtgaatgcagtggcctttgctgatataagctcccaaatcctgttctctgggggagatgatgccatctgcaaagtgtgggatcgacgcaccatgcgggaggatgaccccaagcctgtgggtgcactggctggacaccaggatggcatcaccttcattgacagcaagggtgatgcccggtatctgatctccaactctaaagaccagaccatcaaactctgggatatccgacgcttttccagccgggaaggcatggaagcttcacgccaggctgccacacagcaaaactgggactatcggtggcagcaagtgcccaaaaaagcctggcggaagctgaagctcccaggggacagctccttgatgacctaccggggccacggagtgctgcacaccctcatccgctgccggttctcccccattcatagcactggccagcagttcatctacagtggctgctccactggcaaagtggttgtgtacgaccttctaagtggccacattgtgaagaagctgaccaaccacaaggcctgtgtgcgtgacgtcagttggcacccctttgaagagaagattgtcagcagttcgtgggacgggaacctgcgtctgtggcagtaccgccaggctgagtacttccaggatgacatgccagaatctgaggaatgtgccagcgcccctgccccagtgccccaatcctctacacccttttcctcaccccagtagatccaacctccagccccatatagggtgaacctcttgataagctctctgcctcctcctccctttctcccttgtggggaatgtttggaggaatcactggcatttgatggggaataacataagcctgggctctgagcctcagctgagccctggaagattctccccatggggcagagtggtctccttacgtgctcacacccagtcagcttgggtccctatctctggccagagtttggcaggactgccattatctggggtgtggcctctgccagcaagagaagtgtcctgggtgtttttaatcatgtttgaatgttaggggttggatcctagagtagatgcctgaggccacatctgaacagacctgtcagccaggcctgccaggtcttcacgttgaggattcaactggccaatcacaggacaggtgtcctggcctttcttcctgaggtctctaggggaggggcatgggtaagggtgtttcctcagcaccctcctggggtggggattatgtctgctgtcatgtctgggtctttagggtaggacaggctgtggtatgagaggcaggagtctccacaaggcttcatgtggccccttatagggcaggccctgccctctgggaaggtcccttcatgctggaggcacacagctttaaggaagtaggttgaagtaggactccttcgtcctctcactggctttggctccctcaataaactgtgtgggaacctggctcagtgtctgtctctctctctcactctctgtttttcctatctgaggtctttcatctcctcacttcaggaaaacacagttcagcaaagtcttcagatgcgatcctgtggaggagaaaatacccttctggtgccccatgaaaaagggaaataccaaaaccatttgttcactgagccttgcaatag

SEQ ID NO: 76501 - DNA, 996 bp, Homo sapiens; identical to SEQ ID NO: 59032

SEQ ID NO: 76502 - DNA, 822 bp, Homo sapiens; identical to SEQ ID NO: 59033

SEQ ID NO: 76503 - DNA, 1964 bp, Homo sapiens; identical to SEQ ID NO: 59034

SEQ ID NO: 76504 - DNA, 1987 bp, Homo sapiens; identical to SEQ ID NO: 59035

SEQ ID NO: 76505 - DNA, 3119 bp, Homo sapiens; identical to SEQ ID NO: 59036

SEQ ID NO: 76506 - DNA, 2445 bp, Homo sapiens
caagctccagagactacaataattcacttgccctaggttccaaagccagcaagtggaaaacggagactggaattccgcccgcaggactccaaagcctgtgcagcaacaccccactcccccggcaggatcaccagcaggacgcgcgggagccagaaagtaagatccgtacctccaaggctcccatgggcccaagcctccgcatcaacagactgggagggattacgtggggtcccagggccggctctgaggcgggaaaactttctggaggcggcggcctcaggccggagcgggcgcacaccgactggaggggtcggattcagggatgtgggtggaccgcatttccccatcttccccgccgcgcacttcctctggtgcaatctccacaccccgcgccggcccgcctgcaacgcgccctggcactcaccggtgggcgaaatttccccgcctccacgtgagagccagctccgccgtgacccggaagtccacttcgagtcgccggcccaccctctcgggttccggcttcttccgggtcgcggccttccggcgaacgcggttaccgtggaaaccgcggccatggcggcaccgcggcaaatccccagccacatagtgcgcctcaagcccagctgctctacagactcgtcgttcacccggacgccggtgcccaccgtgtctctcgcgtcccgcgagctgcctgtctcgtcgtggcaggtcaccgagccgtcaagcaagaatctgtgggagcagatctgcaaggagtatgaagctgagcagcctccctttccagaaggatataaagtcaaacaggagcctgtgattacggttgcgccagtagaggaaatgctttttcatggcttcagtgcagagcactattttccggtttcccatttcaccatgatctcacgtacaccctgtcctcaagataaatcggaaacaatcaacccaaaaacatgttctcccaaagaatatttggaaactttcatctttcctgttctgcttcccggaatggctagcctgcttcaccaagcgaagaaagaaaaatgttttgaggttcgctgtgatcctgagattcaagaactgcgtcagtggcagaagaaacttcgcgaggccaagcacattcaccagcaagtcaaaattttctgggccaagcaagaacaaaaagtgaaatgcaaaatggaggacgatgcagtacctgcagccaagatgaaaattccatcatcttaaccatagctaagacgtatctttgcccattcgagcacaagttaccttgtgcaaggaaaatgtccaaatgatgctctctctcttgtgatttctttaacaagacttgggaacatgtgcaaatggaatcttttctgtacaagataggattcatttgcaaacaagctttaatgcaaatagtttagaaaagaaaaggaccagtcttcacttttctgcattatccccacattttattcattcatccagattacttctttcagtgctcaaaggagtatttcttctacaccagcttgctggtaaaatggtacaatgaactctagtcccagaggaatacagaagtgctcttattaccagttttcccacttgtggccgcctttgcaaagatccatattctaattttaagtccccaacctctgaatttggttttaagtttacctagtgactgactactctctttataaaaaagaccttatacttaatgatcatttccaaaggagaccactccttaacttttactgcaaacccaacaagatgagacacttaaaccccagacagatgtaacaaaggatttttgttgtctaagtcccaaagtattatatagaaagttcctgcttttatgggtaaacttattaccttaatatgttctgtggtttgctgttaaccaagattctcccatttaaaatgccacagaccgaccctcaaggcagatccgaaagcctagtagttagttgcactgggttgttttgacaagctaccacacgtcttaagtaaatagtaaagcctttatttttgtgttaagaacagcattttgaaaataaaacctatctgcccatgctttacagccttttaaatttgtaatatttatatagtcgtttatggtacatattgattgtcttgaaatttctttaacttcttttttataagtatgcaacagtcagccgggggaagataaaggtacattataaaacacacattaatgcatttaataaatatatattatctatcaaaagtgagccttagctcttcatcagttaataaaaagcacctgctgagaactcctgtaagctggtatcatcattgcatcattggattataaaagccacaatgctccctttcaacttggggtttgggcctgaggcgttccaactcagcccttgggcaaccgagaccaccacccgagttcacccttgtttcagtgggtcctgacgggcatctgggctaaaaaaaaaa

SEQ ID NO: 76507 - DNA, 844 bp, Homo sapiens; identical to SEQ ID NO: 59038

SEQ ID NO: 76508 - DNA, 3318 bp, Homo sapiens; identical to SEQ ID NO: 59039

SEQ ID NO: 76509 - DNA, 1612 bp, Homo sapiens; identical to SEQ ID NO: 59040

SEQ ID NO: 76510 - DNA, 3067 bp, Homo sapiens
ggactcctccctgaaactgcacgaggtcacctctcctatccccgtattccgtttggatccttatgccaacgtgttaggaaggccccctctggtgggttttgtactgtctctagcatttgacacttaatatttaaacaccaccaatgaggtggacgtcctactcacgggactgagtttccaaacgggccagagagcagcacgtgagcattttgcaggtgcacaaagcagggtcatcagaagcctctcgattcaaaagatgataataccgaaaaacactgcccagtgacagtgaatccttggcatatgaagaaagctttcaaagtcatgaacgaattaagaagtcaaaatttgctgtgcgatgtcacaattgtggcagaagacatggaaatttctgctcatagagtggtgctggccgcctgtagtccttattttcatgccatgtttacaggtgagatgagtgagagccgagcaaagagagttagaataaaagaggtagatggctggaccctgaggatgctaattgattatgtttacactgcagaaattcaggttacagaagaaaatgtacaggtacttctcccagcagctggtctcttacagttacaggatgtgaagaagacttgttgtgaatttttggaatcccagcttcaccctgtcaactgcttaggaatccgggcttttgctgatatgcatgcatgtaccgaccttctgaacaaggccaacacctatgcagagcaacattttgcagatgttgtacttagtgaagaatttctcaatcttggcatcgaacaagtgtgcagcttaatctcaagtgacaaacttaccatttcttcagaagagaaggtatttgaagcagtaatagcatgggtgaaccatgacaaggatgtgaggcaagagtttatggcccgactgatggaacatgtacggttacctttgcttcctcgggaatatttagttcagagggttgaagaggaagcattggtcaagaatagcagtgcttgcaaaaattacctgattgaagcaatgaagtaccatttgctgccaacagagcagcgtatattaatgaagaggggccggacccggctgaggacacccatgaaccttcccaaattgatggtggtggttgggggccaagcaccaaaggctatccggagtgtggaatgctatgactttaaagaagaaaggtggcaccaagtagcagagttgccttccaggaggtgcagagcaggcatggtctacatggctggacttgtttttgctgttggtggctttaatggctcattaagagttcgcactgtagattcctacgaccctgtgaaggaccagtggaccagcgttgctaacatgagagaccggagaagcactttgggagctgctgtgttaaatggattattatacgctgtgggaggctttgatgggagtacaggtttgtcatctgtggaagcatacaacataaagtctaatgagtggtttcatgtagctcccatgaatacaaggaggagcagtgttggtgtgggtgttgttggaggtttgctctatgctgtaggaggttatgatggagcatcacgtcagtatcttagcacagtagaatgctataatgctacaacaaatgagtggacctatatagcagaaatgagcaccaggcggagtggagcaggtgttggtgtgttaaacaatttattgtatgctgtaggaggtcatgatggccctttagtacgaaaaagtgttgaagtatatgatcccaccactaacgcatggagacaggttgcagatatgaacatgtgcagaagaaatgcaggagtttgtgcagttaatggtctgttatatgttgttggaggggatgatggttcctgtaacttggcgtcagtagaatattataacccaacaaccgataaatggacagttgtgtcatcgtgtatgagcacagggagaagttatgcaggggtcacagttattgataaaccattatgagcctgaaggacattttcagcatatttatacatgagaaacagccttcaacaagtatttgtgaagtgactgagaatctagcacttctccacttgtagctgcactttaagtctcagcagaagatacgatcgtctgcctttataggcctcagatactgaagattatttttggtagaagcaccgtgtaggctttttctgcaatgagcagcagctgactgaattttcataagaaacttggactgcaggacttaatctgtagtctttagacaacagttgctttcataaagactagttcttatcaaccttgaatgactacagattattttgtgaaggaggatgaagtaatgtgtgttcttgtaaaattaaattttatctttatttcttctaaaaatctgtataccaggaactgaaaatctttgaacagatattaaaatctacgtaagtatacaaactagttgagggatacactgtttgcttttataaaataactttgattacatgaatataataaattatgtgcatataaatgtgtgtctatatgctttcctttaaatatgtttgaaaagatgtttgaaacttgattatactatttataattggcacagtactttgaattatgccagtactacattgtaaaacagagttgtattttttgatatttaacaatgcttaacactttaaatgccacttctgaggaatggacctggtgtaacacacttgaatatgtgtgatgccaaactttttaaaatacaatataaattatgcttatttattattttctttagtttaatcttggtcatgttttggtgtgtatttttaatttttttcttaaattaacactttggcatgaacattactgcaggtttttgatgaatataatgaatgtatggaattcaattgaatttgcatggtcttcggaattttttctgtgtgtataaatttagctgctattaacagaagagagaactttctgtgagtagccatgtgtgttgatcagatacagtttttctgagatcttcaattaatctcactttaaaaatgaccaaaacatgtctttcttgaattaactttgaataaaagtttgtatatcaaaaaaaaaa

SEQ ID NO: 76511 - DNA, 2366 bp, Homo sapiens; identical to SEQ ID NO: 59042

SEQ ID NO: 76512 - DNA, 1770 bp, Homo sapiens
  misc_feature (1)...(1770): n = a,t,c or g
ttttttttttttacctttaaagagaaatgtaaaactcagtttaatttcaagtttgtatagagaatgtatgccacagtttgtattttataaacacaacctatcttattataaatacaaaataagaaaaagtgatacgttagctgttatgaagggtgaaaacattatataaacttcaaaaggctgctttctgcatctgcatctatgtaatttcatggttctctaccaatttcatttacagaaataatctctatagtcaaattattgttcactttcatgccccaacatgggaagtggtaggtgaatatctgtaggaatacaatttattgtctgctcctccactcagaagtagccctgtgtctgtccagtctacactcagaactttgtcttcatgagcagccagatcatagagaggagccttacaacttcttgtatcccacagcttaacaatgttatctaaagatcctgaaatcagctgctgttcatgggtaggagaccattttactgatgtcacccaaccagtatgtgacgttagggacagcgacaccaaagaaccatctttagttcggggatcccacagtctgatatgcctatctgtgcttccagatgctaaacgtttacaaagtggagaataggaaatacaattaaacactttatttcctgtcaaagttgacttaagactgccagactcaacatcccacactctaattgtatggtcccaagatgcactgcagatttcttcagcatctgaccacagaactgaggaaactgcctccatgtggccagagagggtcactatgggagtccttgttagtcccaactgttctgtcttctgtttctttcttggtcgatttgtggactcctccatttcatcttcttcatctgtagggactgtagaccagatctttagcatcttatcccaggagccactgcaaaatttagttcctgagccatcaacagctatagaatctacacttccagcatgacctctacagcagtgtagggctttcactttgtttctctctacattccactcccataagagaatagtctgatccatagaagcactcaataataagcaggacaaactatcttttttcacccaggccacatcttttacaacatccgtatgtcccacaattgtcattattgactttccttccaaggaccagatccgagaagtcttatcataagaaccagtcaagatccattcctctgcccctttaattgaactgatccagtcatcatggaacatgcattgctctggctggggtgcagtatacttctccacgtattctatttccacaacttcttctgatgagatgttctccatttccatgtgtttgtccaagggcattcgcagaaactggcccttaataaggaaatcaaactccacatgtttgtggaactcatttttgtcctttagtagtttattgatgatgttactaaggtcggcaatttcagaggcagcagggattgagaagggaacatcatctacggcatatttcttgttatcagtgtagaagcgtgtttggagctgagccatggcgaggagtacacacgacttgcccacggaaacgtacgggttagcagacccacaacacgaagctcctgccttttaagactacaaagaggcagctcaaaattagactgcacaggtaagcgaggaactgcagtctaagcctggactctgccttctgccctccggtctcctctgcagaaagcacgaggttgcccttctacagacgacgaaatgtggncctgcgcagcctc

SEQ ID NO: 76513 - DNA, 4656 bp, Homo sapiens
ggtttatgtactaatgatcgcaaatatcatgctggctttttaaaaaactacagacttaactgataagcttgcaaattccggcagagtaaataaaactgtcaaatactacttttggctctagttcataacttgcccaaaaatgtgcatatcatagccaacagagtttttctgtagaattttattttgaaaatatttcacttcaagattgatctaaaaaacattttaagatatgaaaatgttatacaacttatctattacaaattaatcagataattctgcaattaggtacactgtgttagctcgcctacataaaaaatattgcacattttattttgtctccagatgtgatcgatgtctaaactatatagaatttcaaactattttaaagttattctgtgaaatgtcatctttataaatatcagaactaaatgcactgtaaacagccattttggtaaacatgcatttattcacagttgatttatttcctttagataaatgtgtaactgctcaaaattatataataatctatgtagaggtacaagagcacactatacaaatctatttctatcttcatgttgaggaaacactgatcttggcaaaaatctggcatgatttttaaaatgaactattgctggtaagaaggcatactttaaaacttttctgtggcctgcacctgttttctttttaaattaaaatgtaaaagcatttgttttcagagattcatttatcactgagtaagtgattacataaaaaaatggaccctaaagcaactgagttaaaatgctttgagagccccattctacttgtaagttatcaatgccttaaactgttagaccactcactaatcataattttaagaaacggacaaaatcagacaattttaatgtcatgaaattgacacaaacctgcataatacagcattcctccattgatttgaggtcatattatactttaaaaatataaataaatatattgaatcatgagtcttatttctataaccccaaaaagtgtttcaaaatgcttctaaaacagaagtgggtgactgtagaatatagttccagacttgactattactgtcaaacacaatcgttccttacaaataactctactggtgcactggcttgattgattccagcaatttcattttacaggagtgaaccacacgttatacacacagagaatatattacttgaaaatccccaaaataggaagaaaagtttagaaagttgtcaaatacttccaaatgaaaagtaaaggtctatttctagccctctttcatacccttaaagttggaatctggcaaaagtccatgggtacaatttacaaactttgacaaactattaagtaaaaaccattttctttgggggaggtgagagaaggtacctttaaaacctgttatacaaaattccagctgcctttttataaaagtacgttccttagattaaaaccataaaattaaggtgcaagagtttaacaaaaatgaactaaagagctttattgacatcacagtacattcaagaataattttaagaacattacagctgaaagagaatggcatgtttatagtcttattatgcactatattttttgaaaaaaacgtaatacaaagaaatcctattaagtaacttggagcagcattggaaaaagtacccctatttacagattaaaaaaaaaaaagattctggtttcacctacacagccacaatgtgcctctataatgagacaagcccttaaaactcatggaatttttttaaagaacatcatggcattcttgccacatcattcctcagcgtttacgacggggaggggttgttgatctgaaaaaaaagggaaaagacaaaatttaaaaataaaaatgtattttaaattaaaaatctgcaatttttaataaataatattatataggatttctaacatttaagactatgattatttatcaagtaccaaactgagtttattaaagagagagagaaaggacactttcaactttgaataaattcagtcaattttttttaaaaatcagacaaaatactttaaaaagtatactaccttgatcgggacttagacttgtgtttgcggcttgccttcttaccagacctttgagatttctccacggatcgcgatcgactatgtttaggcttcttagccttcttttctttgctacttcctggagactcagaactgctccttccactagaatcagagcctgaatgttttttactatctttggtagtacttttcttactatcctgtctagaatcatgtcttatgattttaacagatatagaaccactcctagaaaatgttctttcactttctcgtttcctttttaatctatcatcctgactactgaacttaaaatctttttcttcccttttttgtttctcttttcttttatcctgttcacgttccctttctttgtctttctttttcctatctttatctatacttcgactcctctcctttttcctctcttgttctttagcctcacctttatgcttatgactgttcccactaagatttccacgttgatcatcaattttacgcctatctcgactcctactgcgactggcacgattggttcgtctatcccttgagcgacttctacttctacgtctctctcgggaaggactccgatttcgtcgtctttctctttcaatgctatttctattagatctccttctatctctaatctttaccctagccctattgctctctattttaattctgcgagaatagcttctactcctgctacgtctagctttgattgttggagatctactcctactgtgtctctttttccttttaggagaagaagaccgagaagaagtacgactactacctgagctagaactgtatgaagagctagagacagtactactagtactactagttctgctattgctactggaactaccactactagaacttcccgacctactccttccttgtttttctttttctttatgctctttttttggttctaaaactgatgtggtttcatttggagttctcttcttttcattaaccacatcaccgtctgcttctcttgcttctagtagtgataaactattttgctctttatggataaattcattcatctcttttgtaaccctttctgtttgctgcttttcttcttccatctgtttatcatgtaatagctgctgttctttttcttttctccaaaaagcttcctgtttttgccggattcgatgccgtaattcttcatcatcagtgtcagatgactcagatcctctgtcactcctctcatcttcactgtctcctgatccataaccacccagtccaccgagtccagtgagggaagccagtgcactggactgtgccagctgttttgcaggagctttcgttgctttgcggtgtgcatctttggctacgtaataaatttcttcatctgtgacatccagcagaatttctgttagaagcatttttgtcagcaacatcatttgatactctttctcctcttcagtcatctcagggtcactgtgctcttcttgaggaactggggatggacttctggtgactttcccactacttgcagcctcaacattttcagtgtcttcttcttcctcatcactatcaaatttacttctctgaggtaaacgagggccatcccctccttcagcatcttctgtggcctttttttcttttttggacaattgtgaacgttgttgttccattctttctttctccaatttcttctgcttttcacgttccattttttcaagaccttcgcgaatccaagcgggaagagtcctgcgttttactgcgtcaatttgtggaggctcctgcttcacaggaagtgcaataggtgcaacgctgacgatccctgaatgatgatggcctttctcttcgattctggggaggtgctggaagtccctggagttcctggttgccaataaggaggatgaaatccaccttgcgggggaccaaaagcagccccatgctgatagtcaaactggttcactggccccactgcaaaattatcggggtggtccaccaaagttgtgattgttctggttaaatatatgcctgttgtcaggggcaaattccccactgtcctgactgttgctgtcttcagaaggaggaacaatgtccattgggcctggtgttggtggcatccatggctgatctggaggggggtgtgggggttgctgatgcattccccattctggttgccacattctgttgaagtttgaatccccttggaaattcccatgattgtttggaccagattccattgtagacatatcttgtccatttggcatcattcctggtggttgttctaccatgctttgctgtcctgaagcttctctttgggcaatccaagcttgggccaatgcagcccaatcaatctggcttggatcctgttggtgctggaatgactgcatccattgttgctggttcaagggccactgctgccaaggctgtcctccttgatcccacatcccttcttttaaaatatacttgattttctatctcagaggttcaccttctgtttaaaacttaggttgattcagactacagcttcgaagcatagcagcaagattatgtatgccccactctagttcgggaacacccttgtcgccgccgttccggtaacacctctccaacgctttccggacgcgtgggtcgacc

SEQ ID NO: 76514 - DNA, 2731 bp, Homo sapiens; identical to SEQ ID NO: 59046

SEQ ID NO: 76515 - DNA, 2981 bp, Homo sapiens; identical to SEQ ID NO: 59047

SEQ ID NO: 76516 - DNA, 2831 bp, Homo sapiens
gtgacgctctatccttgccggggactcgtgggtaacttgcttttgggagccagcggtatggcgtcgggctgcaagattggcccgtccatcctcaacagcgacctggccaatttaggggccgagtgcctccggatgctagactctggggccgattatctgcacctggacgtaatggacgggcattttgttcccaacatcacctttggtcaccctgtggtagaaagccttcgaaagcagctaggccaggaccctttctttgacatgcacatgatggtgtccaagccagaacagtgggtaaagccaatggctgtagcaggagccaatcagtacacctttcatctcgaggctactgagaacccaggggctttgattaaagacattcgggagaatgggatgaaggttggccttgccatcaaaccaggaacctcagttgagtatttggcaccatgggctaatcagatagatatggccttggttatgacagtggaaccggggtttggagggcagaaattcatggaagatatgatgccaaaggttcactggttgaggacccagttcccatctttggatatagaggtcgatggtggagtaggtcctgacactgtccataaatgtgcagaggcaggagctaacatgattgtgtctggcagtgctattatgaggagtgaagaccccagatctgtgatcaatctattaagaaatgtttgctcagaagctgctcagaaacgttctcttgatcggtgaaaccataaggagcccagtgttccccgttccatggaatctccccttttacttgggaaaacaggaatattgactaccaaatcacaatgcaattgaagccgtactgcttttttgagcagttattcattccagtgattaaaactgattgtgcagaatattctaagaggtcagaaattggtgtgtataactacatttttagtgatgcaatttattgattagtgagtaagatactgtttttattgagagatttgatttttataaagtaaaaatacggctgcattagggttacaaacagaaaagtgtcttaatgtctaaggagggcatattagctacactacaaaaacaaattttgtctgtacttctgaaaagaattttgttgtttctcagctgttttccaaaagcaaaggaagtcttaatgtttttttctatttcgtgttatgtgtgatttgtttataagtttgggtggggtgcataccatattcttggttcttaaaatctatcacttttcaccttacacttgatgtgtgaaaactataaaaacaatgtgtgaaacccaggggttctaaaatacaagcatagattttatcagggtgttttgtcaaagcaggttattcagtgattcctccccaccattcttaagaacgttaaataatgctgttgtgttagctctgagtagaaaggaaaaagtaaaacctctgtttggaggtaatattgggttgaattctgactgcccctttctagctggacctttaacaaatcacccaatcttttttgtgtttctctaaagtcatttatacattaaatgtaattatagcaactgtggggttctgttgagaattaagagctaacactatatatgtaaagtttccagtactagtcccagaatttagaatatgctcaacacaaagtaaacagcattatataagtttatatttttgtgagttataaagtactttgatatattctcattaaatctgtaaatcacctctataagtaagtggtaataataaagcagatatttttgtccccatttaaaaaatgaagaaattaatgcttaatagggtggtaccctggaaaggatctgggaaggggtaaaatttctggtctgtacttttacaaatggagcccttgggaggtgggttaggtaaaagaagctttttacttaacgttgtcttatttccagtctaattttacgctgtagcagaaccagatggctgagaaaattctggaactatggatcttgaccccaaggatatattattttattccaagaaagatcaggtaggcgaaaagatgacaggatacagagtcaatccataaactaaatatttataactgttctgaattatacagagtctaaaaatatgtgtcagctacttcattcctgtaaatactcttgctgtgttataaatatggcaagaaataaacatgaccaatatcaatagacttcttgaggctactataagttttgagaaataaggttcaaaaaataagaatgctaacacttaagcacagactagagcttgcttgggtttcttcctgcattacaaggtaaaaatttgttaatgtttgtttttattcagcttgggaaagctttgtgccatgaatacgtcgcatttaataacaagcaacacacggcatatagaaataactttaattaaaaaacttacatagaagattataatatcagacgtgacaaagatttgagtttatttgcctggacaacttgggtttgtctggcttttgttttctttttctttaaaaataaatgtacagtaaaactacaagcaaaagtttgtcagtattgaattgaattttttaccccttaaavaggactagtataatttccahatctctaacaaaaacttagtgtcaaatctcacagataaggccaaatggccaatattttcagttatgtgggtagtacaacttgagtaaccttttttacatgacaaaaagtgagttatataaattgtcctcaactttcacataggaaaaaaatggtttaatagcttcaaaaggaattttctttcatgtatactcttcagtatccaatattgaagctttgttctttgaaaaattttaatttc

SEQ ID NO: 76517 - DNA, 5352 bp, Homo sapiens; identical to SEQ ID NO: 59050

SEQ ID NO: 76518 - DNA, 1731 bp, Homo sapiens; identical to SEQ ID NO: 59051

SEQ ID NO: 76519 - DNA, 1444 bp, Homo sapiens; identical to SEQ ID NO: 59052

SEQ ID NO: 76520 - DNA, 1957 bp, Homo sapiens
  misc_feature (1)...(1957): n = a,t,c or g
ttttttttttttggatgtgggcaaaccttgttttaattgcaaacgacttaatttacagcacattcaataatgaaccaacaggagagttgctgactttgtaacatatgaatatataaaaatcccttgcaattcaggtagtcaaggtaaaaagcgcatacaaggaaggcaatcctcatttttctgaaaatgtttacattttaaaaggtgactagacatacttggaagttcaaagcagtaggatgtagcttgcagggaaaagaaaacccttttccatgttgttaggcagaagtatatcaaatatatcccaattccacttgataaaagtcagttggatgacctccttgaaccaatctagggcagaacacttagtaaaagcgggccctgggtggggatgtgaatccaggagaagaggggcaccagatcccatgcagcgccaaacacatccattccaccctctaacacatacgaggcatgtcaccccatgtccctggacacaagatccacaagaacagtcagcagatggtcactgctcccacggcctggtgctttctaatggtcttaattcaggccatggagaaaatcctttaccaccaaacacaaactgtcattgaacttcagtcataaaggatgttgtgggggaaattcttgtaacacatacataaggacttctatttacctaattagaacaatgattacacaattgacattcctgtttccataaggttttgttctctatgctggaatggctgaagaaaaagttgtctatttttggttttattttacattttcaaaagagagggaacagagagaaaaatgcccaactttggggcccagcaggtacaaaagcagacttctaggtccatcagatttgggggaagtttcaatgcctagggaaggttagtgaagcccattatatccccaatcgtacaggaagaattctacagttaatctatcacagtgttccagcaaagcatatgttgaaaactacagttttcaatctaacatctaaattttaaaaagtagcatttcagcaacaaacaagctcagagaggctcatggcaaaagtgaaataacagaactattgctcagatgtctgcaaagtcaagctgctgccctcagctccgcccacttgaaggcttaggcagacacgtaaggtggcggtggctccttggcagcaccattcacagtggcatcatcatacgggggtagcagcaccgtagtgtcattgctggtaacataaaccaggacatcagaggagttcctaccattgatgtatcggtagcagttccaaacacagctaatcaagtaacccttaaaagtcaagataatgctaataaacagaagaataataaggaccaaacaggtaggattcactgacatgacatcatctctgtagggaaaattaggaggcagttgccgtatgtattcctgaatggagtttggataaataagcacagtgattgcaaccaacatgttcagggcaaagtcaaagatctggtaacagaagaatgggatgatccaggctgcgcgttgcttgtacgctccgtaagtagccatagcacatatcaggatcatgagaagagaaatcgcaatggcaatgcacatgttggcatcatccatgaactcaaagtcacctcccagttcagaacttgaaaagttatactgatccggatcagccagggcactcaataaaatcaacagtaccacagcattgatgatcagataccagacgccgagcaggatggtgccggtgcggacatggcagcacaagcagcagctgttggagtagaaccgcgtccagggcgcgaccatcttcatcgctccggggcatgtgncgagngcgcgcaagttttcaggagagtcnacccctcgtctggagcncgncgcccgctgctgccggctccntccgcgctccggctncncgccgctcgcccgctgcnccgcgggcctgcctcct

SEQ ID NO: 76521 - DNA, 2380 bp, Homo sapiens
ttttttttttttcaagcaagcagggggtttaatttctcacacacagagtctggggagcccagtgaggttgcaatggcagctagatgtgtcctccagctctgtcatccttgtcttgagggttctgtgttcacggcccctccaggcatggtttcttcatttaggtaggaacaaaaggccaaaagaacatacaagcccagctctctagaggctccaatcagaactggaccctttaactacaaaggaatcttggatgaattatttttagcggggcttcaggagcaggtagcagagccaaagtgcacactcaggccatcttcctcccaatgtcctccccgggggcatttcctttaggaaatgggagtcagtcctcacaaacacagaaagcagctcaaggccaccacacaggtcgccaaaatccacatcctggtcactgcttcttagctgccgagacaagctgggtccccaacatccctggggagctaggaggagcagaggaccaacacatgaggctgagaggcattctgcttggtgaatttttgaggcagaggctgcccccaccacacaactcactgtcaggggaccttatcctgctcagagagctgctctagaacttaatttacatgactcgttcaggcagacagagttcactgtcttgtattccacagtgtgacagtggtggccccatccctggcaactgagggccgtggcgggtcggggggaggccatcttaaggaagagcaggcagctagcgttccagctttgggaactctggctggaaaaggtggttcacagacgagttctggggcctcaggcggcccgtcatatagacctttccacaggggagggcagaagcaacaggcgggtcccaggagaccccagcaggtcctccaccgtccagccttcacagcaccgggcagaatttacacagagaggatcagtctccaagccaaagtcaggtggaggcatggtggtggtggtagagaaacgctgggctggcttccagctagaagccaggctggaggcaggaaggctcagtcgtctgtttcctgcttgatgttctcgacggagacaggcagctctggacttgaagccttgtcgggcgaggccacgtctagatgctcttccttcacacgcacagcaatgatctcgccaggaacaggctccgacgagatcttcctggcaccctgagggtcgtcctccagcaggggcttcttggacccctgtctgaggggtcgcgtcttagtgggcgggattcttttccttttcttcccaaactgtttctttttcttctttgtggcctctttggccttcagcggtgtggccggttctgcggccacaggaggctggagctggtagccggtgagctcacaccagccgacggggtagatgtctggggactcgcagtccacccactggtcgtactcgctgtcccagccgtcaaagtggatgctgaggagccgatgcaccactcgtttcaccgtggccacacagatgagccggggctccatcaggtccacggcctccagcttcatgcccaccttgaagccatggtttgggcaatccatgttaaagagtctcgatggagcggctttcgacttggtcttctccaagtagttctcccagttgaaagtctgtgcctcataaccttttggcggtgtgagctcaatgtcattcttctgacagaaggtggccgggaagatggcgtgggaagaggcatggtagcagaaccagtccaagccatctgtggagggccccccgtccacacagatcatcaggtatccatccaggagaaccttacagacagttgccacgcagatgttgcccagattcagggggtcaatggcctccagcttcatcccttcctcaaaccaaccgccttctgtgtagactgctcgtaccttcttgaagaggtaaggaacggcatcacagtagatcttccggaaggtggggtgatgggccatgtcacttcgcctctctgacatcttgatgccgtggcccacacgtcgtgaccaacccactgggtggatcagggggctccacatgtggcaccagaagtcgtcgtcactgtcaccatcctcgtagaggagccgtaggcgacccccgattactgtgtccaccacagccatgcgagtgcgtgacacctgggacttgtccaccacttccagccgcatgccctgcctaaaggggtacttcatgctctccaccatcttgatgtggaaatccacgggaagcgtcctggagcccaccagccgtttcatgaggtagcccttccagtcggtgaacttggcatggatggtccgtgggggcactaggatcttgctgttgatggcacaccagccaatggggtggacatccactgttcccagggtgcaccagaagg

SEQ ID NO: 76522 - DNA, 5517 bp, Homo sapiens; identical to SEQ ID NO: 59055

SEQ ID NO: 76523 - DNA, 928 bp, Homo sapiens
ttttttttttttcctgttttcattttattgggaacttcaaagaaaagaaagagagacggattggttcccaagacaagccgtgacgtagactcccaacaagctggggaattctggacagcgaaggggtggacagtgagactcagcacagcccaaagtcaaaggcattagggttgttctgaaaatagagattcaagaagccctggaaaatgctcttatccatgagaagagcacagactgtggggtcccacttcatggctgatatccagagccgcagggctggcgtgtggctcacacagtccagtatcccatacacatccagccgctcaaaccagggccagaggaggtaatcaatcatggatatacaggttccaccaaagaaggtggtgttctgatactcaagaatctcttccaggttgctgaattcctgacgcagggctgccttcagattagtgcattctctcccacatctcaacgctaccaggcactccttggtcaaatgtgggaccttacaaaatagctccaataacatcttttggcgagctcgttcataagggtcatatggaaacagcttccttcctggataagcatcatccaggtactcacaagcaataacagattcatagatcagttgacattggctggtctccaggacaggaatgtggccaaaagggtgctttgtatagtaccattcaggcttgtttctcaggttaatgttgaccacttcatgtctgatgtctttggccttgaggacgaggcgggtcctgtgagaataggggcagaacctcatgctgtagatgcggatcagcccctccgggactggccctgggggctggcttcctgcagagcagcgatggagggggacagggaaaggagaggctagcggacgcgtgggtcggcccgggaaaacgggtccaaccgagggcgtcaa

SEQ ID NO: 76524 - DNA, 2812 bp, Homo sapiens; identical to SEQ ID NO: 59057

SEQ ID NO: 76525 - DNA, 863 bp, Homo sapiens; identical to SEQ ID NO: 59058
  misc_feature (1)...(863): n = a,t,c or g

SEQ ID NO: 76526 - DNA, 1871 bp, Homo sapiens; identical to SEQ ID NO: 59059

SEQ ID NO: 76527 - DNA, 1093 bp, Homo sapiens; identical to SEQ ID NO: 59060

SEQ ID NO: 76528 - DNA, 1999 bp, Homo sapiens; identical to SEQ ID NO: 59061

SEQ ID NO: 76529 - DNA, 1847 bp, Homo sapiens; identical to SEQ ID NO: 59062

SEQ ID NO: 76530 - DNA, 1113 bp, Homo sapiens; identical to SEQ ID NO: 59063

SEQ ID NO: 76531 - DNA, 2608 bp, Homo sapiens; identical to SEQ ID NO: 59064

SEQ ID NO: 76532 - DNA, 2012 bp, Homo sapiens; identical to SEQ ID NO: 59065

SEQ ID NO: 76533 - DNA, 1409 bp, Homo sapiens; identical to SEQ ID NO: 59066

SEQ ID NO: 76534 - DNA, 2208 bp, Homo sapiens; identical to SEQ ID NO: 59067
  misc_feature (1)...(2208): n = a,t,c or g

SEQ ID NO: 76535 - DNA, 2249 bp, Homo sapiens; identical to SEQ ID NO: 59068

SEQ ID NO: 76536 - DNA, 2222 bp, Homo sapiens; identical to SEQ ID NO: 59069

SEQ ID NO: 76537 - DNA, 1366 bp, Homo sapiens
aatgagaccctgtagacattagtcagtgcggtggaattctgccatctcatcttccccctaaaaacccttttatgtacacctgcgcagagaagagggctgcctggcctccctgggccgctggtacagatcacacacacacacagattaaacgcagcccgtttaatgatggggcccagactgcagtggctcaagacaggacactgcggaaagccgccatgtgccgccgcacactgtctgagatctgctcagccgatctgctccggccgtagtaatccgtgaagaggccgtcagggttgagcaggtagatggcaatggagtggtccacgatgtagtcctggtcctcatccttggggccggcattgtagtacacgcggtaactgtgactagcctgggcaacctgtttggtggagccggtcagacccaacagtcttgggtggaagtcctggacgtagcgggccatggcttcaacgtcgtcccgctcggggtccacagtgatgaagacaggctgcactggaggcaaaccaggctctgcttccagctgccgcaccacctgcaccagcttctccagctcgtctgggcagatgtcagggcagtgagtgaagccaaagtacatcagcacccactggccccggaagtcagccttgcagcgagcccggcctctgtgatccagcaggtggaagtcgccctggcccacagctgcctggcgcagggcttctgttcgcttttgctgctgcagcctctccttctcagccctcagggccagccaggccccaccgagtccagccccgaacaggcctgtgatcagcagccgggttcgaagcccagggccctggggctggccctgcccacctgtctctgcagggccctgccttgacaaaagccaggacctcagatgcagggcctggcctcccagggtcccagggaggaccggaggcttgagctgagagagcctgtgccaagctgtggggctccgagtcagcagcagcatggatctgatgctcctggaaacaagcacaggcgtcaggagccagaagggaaggcccaggacagtgcctgggctgcccctgcgacttgagaccagccacccatctgaaggacccagcccacgttcaggcttaacaggcatttgcagctgctcacctgagctcagaactccacctccaccaaacatccacacctgggcaaccacacctgtcactcctgtcctctacctgggatcaccagcctgtcaccgcaccctgccctgcacctgcacctcagcaaggtgaacctcttgctgacggaaagcattccaagtgcatgccttgcctgaactaaccacgttatctatttgcaataaacccatttcttaaaaggaaaaaaaaaa

SEQ ID NO: 76538 - DNA, 1570 bp, Homo sapiens; identical to SEQ ID NO: 59071

SEQ ID NO: 76539 - DNA, 506 bp, Homo sapiens; identical to SEQ ID NO: 59072

SEQ ID NO: 76540 - DNA, 602 bp, Homo sapiens; identical to SEQ ID NO: 59073
  misc_feature (1)...(602): n = a,t,c or g

SEQ ID NO: 76541 - DNA, 4377 bp, Homo sapiens; identical to SEQ ID NO: 59074

SEQ ID NO: 76542 - DNA, 1053 bp, Homo sapiens; identical to SEQ ID NO: 59075

SEQ ID NO: 76543 - DNA, 467 bp, Homo sapiens; identical to SEQ ID NO: 59076

SEQ ID NO: 76544 - DNA, 1086 bp, Homo sapiens
ttttttttacagtttaccacacaaatttatttgggagaaacatccagggactaggggacaagagaggaaacctggtgggcagtagggctgggggtacagagtagcagtaagtgtgctgaagggcgtcaaccaagaggaagagccaaggctggggtccagtggctggagggaggcaaggagggctggtatgagggactagaagtcctggccaagcccagatagaagtcaggaaggtggctggaaactggtggaattttacaccaaagtttgctgcagtcacactaaggagtatagagccctctgttttgagggtcattgcagaaatccaggaagcagtattgagagaatatccagaagccagacaccggagaagttcgggtatttgaacaatcactcatctgctccttacttcggcagtcactcaccatgacgtcagaaccgctgctgttctttttgtggagagtgatgcagctgctgccagctggggtgaggcagatgtcagatcccagaaggcaccctaactccttggtctccaagaggcatcggtagcagcgcaggtatttggggaatggaagtggttgagggggttcccaattgacaggaacaaacttacctcatcctttttcctgccccgcctgtgctcagctgcggctcagtgggcctgaactccggagcccacagaatctggcgctgggcgtccgctctccgcgcctgaccgcacctcagaactccggtaggacgggggggtggccccccgctcaagctctgttccctggggaagaaacctggaaagtgcgaaccgcgcgtcgggacccaagcgtcgggccccagcggacatccggagcccgaagcggctccccaggaaggcggcgccgtagcgccactctccctcccaggcgaattctggagaccgcggccccaggcgtctcacccattttctccgctggggaccgctgggctccccatccacgcctactcggtccccaccccaccagctcagtcttgactcagaaactcagggtttttacttttaggatcgttgggctgtgcgttaggggaggaggtggtcctcagcgtcctggaacg

SEQ ID NO: 76545 - DNA, 1036 bp, Homo sapiens; identical to SEQ ID NO: 59078

SEQ ID NO: 76546 - DNA, 2179 bp, Homo sapiens
gtattggaatgaatatggaggaggactattgtggcaaagttggcaagaaaaacatccgggtcaagcactatcttctgaaccttggaactttcctgatacaaaggaagaatgggagcaacattatagtcaactttattggtattatttggaacaatttcagtattgggaagctcagggttggacttttgatgcctcgcaaagctgtgatacagatacttacacatctaaaacagaagctgatgacaagaacgatgaaaaatgcatgaaagttgacttagtatcttttctatcttcacctattatgggtgataatgatagctctggtacaagtgataaggatcatagtgaaatacttgatggaattagtaacataaaactgaattcagaggaagtaacacagagccaattagattcctgtacaagtcatgatggtcatcaacagctaagtgaagttagtagcaaaagagagtgccctgcttccggccaaagtgaaccacgtaatggaggaaccaatgaggaaagcaactcatcggggaatacaaacacagacccaccagctgaggattcacagaagtcttcaggagcaaacacaagcaaagacagaccacatgccagtggtactgatggagatgaaagtgaggaagacccacctgagcataagccaagcaaactgaagaggagccatgaactggacattgatgaaaacccagcttcagactttgatgacagtggttcccttctaggattcaagtatggctcaggacaaaaatatggtggaatcccaaatttcagtcatcggcaggtcaggtatttagagaagaatgtgaagcttaagtctaagtacctagacatgcgcagacaaataaagatgaaaaacaaacacatcttctttaccaaagagtcagaaaaaccatttttcaagaaaagcaaaattctgagtaaggtagaaaaattcctcacatgggttaataaaccaatggatgaagaagcatcacaggaatcatcttctcatgacaatgggcacgacgcttccacaagttgtgattcagaggaacaagacatgtctgttaaaaaaggtgatgacctactggagactaataatccagaacctgaaaagtgtcagagcgtatcttcagctggtgaacttgaaacagaaaactatgaaagagacagcttgctagcaactgttccagatgagcaggattgtgttactcaagaagtgccagactcccgccaggcagaaactgaagctgaagtgaaaaagaagaagaacaagaagaagaacaaaaaggtgaatggtctgcctcctgaaatagctgctgttcctgagctggcaaaatactgggcccagaggtacaggctcttctcccgttttgatgatgggattaagttggacagagagggctggttttcagttacacccgagaagattgctgaacacattgctggccgtgttagtcagtccttcaagtgtgacgttgtagtagacgcattctgtggagttggaggaaataccattcagtttgccttaacaggaatgagagtgattgccattgatatcgatcctgttaagattgcccttgctcgcaataatgcagaagtttatgggatagcagataaaatagagttcatctgtggagatttcttgctgctggcttcttttttaaaggctgatgttgtgttcctcagcccaccttggggagggccagactatgccactgcagagacctttgacattagaacaatgatgtctcctgatggctttgaaattttcagactttctaagaagatcactaataatattgtttattttcttccaagaaatgctgatattgaccaggtggcatccttagctgggcctggagggcaagtggaaatagaacagaacttccttaacaacaaattgaagacaatcactgcatattttggtgacctaattcgaagaccagcctctgaaacctaactatgcagcagtgcgaggacaaaagatcatggagtggtcaaaatattcagatgagacatttggcatgtcttcctttattcactgatattttctacccatggtcttatatcaccgtatgaaatggaaacttacaggacttaaatatcagtgaaatattttgagatctttgaataattcctttagaggaattatacaaaattaatatatatgagtcct

SEQ ID NO: 76547 - DNA, 631 bp, Homo sapiens; identical to SEQ ID NO: 59080

SEQ ID NO: 76548 - DNA, 1855 bp, Homo sapiens; identical to SEQ ID NO: 59081

SEQ ID NO: 76549 - DNA, 1083 bp, Homo sapiens; identical to SEQ ID NO: 59082

SEQ ID NO: 76550 - DNA, 1667 bp, Homo sapiens; identical to SEQ ID NO: 59083

SEQ ID NO: 76551 - DNA, 532 bp, Homo sapiens; identical to SEQ ID NO: 59084

SEQ ID NO: 76552 - DNA, 1116 bp, Homo sapiens; identical to SEQ ID NO: 59085

SEQ ID NO: 76553 - DNA, 2093 bp, Homo sapiens; identical to SEQ ID NO: 59086

SEQ ID NO: 76554 - DNA, 1621 bp, Homo sapiens; identical to SEQ ID NO: 59087

SEQ ID NO: 76555 - DNA, 2136 bp, Homo sapiens
tttcgtctctctggaggaggctgggctgccgggcctgtcctccaaggaagaagcagcaccaacttgaagctggatgcagccttgcatgtgttctcaggtcttctgcctcagtttccctgcctgacaatccaggggagcaatgcctgtggggctgctcactgcccccagaccttctgcacatgtgtgactcctgtgacatcatctgtctccaggtttccagacttctcagccccacccttgcagcagcaggtcagcctggcttttagaaagagaattttatttggaatgaaaatatagagcccaccctcccgcctcctctggggagggagcagagggctgggcagtggtcggggagatggtccctcagaggtcgaggagctcgcctgggcgtagacatcctccacaggaacagtgaggaaagctgggcgctggcttcggcctgggcctgggacgggtgggggtgggaactgacccctgcgctgcctcagaggctctgggcagccagctagcccggtgcgacccgctggcagaagctgagtgggaagggggcggcggaggagatgaaggtggcgtgtggctgtggccctacgcatccccgttctccatgcggcccagctgctcctccaggcggcagatgcggtcgccctgctccttgaccagcgccctcagggcccgcagctcctgcatcacctcctccagcttcccagcctccccggctctggccaggctgccgctgggggtggcatcagcagcagtggtggtggaggcgggggcccctaggtgggaggagcccggggccatggcgggccggctgtcagacaacacgttgcgccggctgatcttcaggtcccgctgcttgctgggcacgtaggcctcccgcagtgagatgaggatcgggtcggcatcccgcccgctcacccactcctcagcctccagggctgcctcgggcccggctgtgtcggggtacagatcatcctggaagaggtccgactttcttggcacagtcatgacgatgggctcacacttgcgctcatgcagtttgtagaaccgggcgatctcgcacttgctgacctccaggccccgcttgggcatgctgcccataccccgctgcggctccttgctggtgaacgtgttcaggaagtggatgtagggaggctcctctgtgatctcaaagtaccggatgctggagtcacccttgccgcagacgtagaccacactggtgtcggggtcgtagaagggcagcagggccccgttgctcgagtccagttcctgcagggccatgggttcctcgaggttttctgggtcccagagcgccagctgccgctcgctcattcggctgaagcctgtggtgaacaccttgccatctgccaggaagatggcccgcatgggccgggccccctcatgagccttctcccgctctgccaccagggtgccccgacgggggtcgatgatgcgcacgctcttgtccttgcatgctgagcaaaacaggctgccattgtggttccagctgacattgtagatgaggtcagggtgcaggctgtccaggcggtacagctcctccgctgtgcccacattccagatgagtaccacgttgtcgcagcctgcactgagcagcacgtttcgggccgtggggtgccaggcgatgatgcccactcgcttggtgtgcccctccagtaccaccaccggctctgtcagcggggaggtcagcccgttctctgggatctgccacaccatgaccgtgcagtcctccgagccgctggctatgacttcgtcgttgtgaggacaccagtcgatgtccaggacaggtcccgtgtgcccacacaccgtcgggtaggccttgtcaatgcggcccgtcttgcttagggggagcaccagaaaggcaccccctccactggcctccacaatcaccgccaggaacttggggttgacggcgcagaaggtgctgtcccaggtaacacgggacacgcgaatgtcctcatagcactggtcgttcttgaccggctgcccgaacacatgccggaatttgctctgccggaccactttgcggaaggacatgtcgggggcaccgggggcgcagggggctgcggcaccggcttcgggcggctccggatcccggcctctgggaagcaggaagca

SEQ ID NO: 76556 - DNA, 1856 bp, Homo sapiens; identical to SEQ ID NO: 59089

SEQ ID NO: 76557 - DNA, 2887 bp, Homo sapiens
tggtcgacccacgcgtccggagaagatgctgctgtccctggtgctccacacgtactccatgcgctacctgctgcccagcgtcgtgctcctgggcacggcgcccacctacgtgttggcctggggggtctggcggctgctctccgccttcctgcccgcccgcttctaccaagcgctggacgaccggctctactgcgtctaccagagcatggtgctcttcttcttcgagaattacaccggggtccagatattgctatatggagatttgccaaaaaataaagaaaatataatatatttagcaaatcatcaaagcacagttgactggattgttgctgacatcttggccatcaggcagaatgcgctaggacatgtgcgctacgtgctgaaagaagggttaaaatggctgccattgtatgggtgttactttgctcagcatggaggaatctatgtaaagcgcagtgccaaatttaacgagaaagagatgcgaaacaagttgcagagctacgtggacgcaggaactccaatgtatcttgtgatttttccagaaggtacaaggtataatccagagcaaacaaaagtcctttcagctagtcaggcatttgctgcccaacgtggccttgcagtattaaaacatgtgctaacaccacgaataaaggcaactcacgttgcttttgattgcatgaagaattatttagatgcaatttatgatgttacggtggtttatgaagggaaagacgatggagggcagcgaagagagtcaccgaccatgacggaatttctctgcaaagaatgtccaaaaattcatattcacattgatcgtatcgacaaaaaagatgtcccagaagaacaagaacatatgagaagatggctgcatgaacgtttcgaaatcaaagataagatgcttatagaattttatgagtcaccagatccagaaagaagaaaaagatttcctgggaaaagtgttaattccaaattaagtatcaagaagactttaccatcaatgttgatcttaagtggtttgactgcaggcatgcttatgaccgatgctggaaggaagctgtatgtgaacacctggatatatggaaccctacttggctgcctgtgggttactattaaagcatagacaagtagctgtctccagacagtgggatgtgctacattgtctatttttggcggctgcacatgacatcaaattgtttcctgaatttattaaggagtgtaaataaagccttgttgattgaagattggataatagaatttgtgacgaaagctgatatgcaatggtcttgggcaaacatacctggttgtacaactttagcatcggggctgctggaagggtaaaagctaaatgggagtttctcctgctctgtcccaatttcctatgaactaatgacaacttggagaaggctgggaggattgtgctattttgcaaagtcagatggctgcatttttgagccattaatttgccagcgtatttcactttttctgttattttcaatttattacaacttgacagctccaagctcttattactaaagtatttagtatcttgcagctagttaatatttcatcttttgcttatttctacaagtcagtgaaataaattgtatttaggaagtgtcaggatgttcaaaggaaagggtaaaaagtgttcatggggaaaaagctctgtttagcacatgattttattgtattgcgttattagctgattttactcattttatatttgcaaaataaatttctaatatttattgaaattgcttaatttgcacaccctgtacacacagaaaatggtataaaatatgagaacgaagtttaaaattgtgactctgattcattatagcagaactttaaatttcccagctttttgaagatttaagctacgctattagtacttccctttgtctgtgccataagtgcttgaaaacgttaaggttttctgttttgttttgtttttttaatatcaaaagagtcggtgtgaaccttggttggaccccaagttcacaagatttttaaggtgatgagagcctgcagacattctgcctagatttactagcgtgtgccttttgcctgcttctctttgatttcacagaatattcattcagaagtcgcgtttctgtagtgtggtggattcccactgggctctggtccttcccttggatcccgtcagtggtgctgctcagcggcttgcacgtagacttgctaggaagaaatgcagagccagcctgtgctgcccactttcagagttgaactctttaagcccttgtgagtgggcttcaccagctactgcagaggcattttgcatttgtctgtgtcaagaagttcaccttctcaagccagtgaaatacagacttaattcgtcatgactgaacgaatttgtttatttcccattaggtttagtggagctacacattaatatgtatcgccttagagcaagagctgtgttccaggaaccagatcacgatttttagccatggaacaatatatcccatgggagaagacctttcagtgtgaactgttctatttttgtgttataatttaaacttcgatttcctcatagtcctttaagttgacatttctgcttactgctactggatttttgctgcagaaatatatcagtggcccacattaaacataccagttggatcatgataagcaaaatgaaagaaataatgattaagggaaaattaagtgactgtgttacactgcttctcccatgccagagaataaactctttcaagcatcatctttgaagagtcgtgtggtgtgaattggtttgtgtacattagaatgtatgcacacatccatggacactcaggatatagttggcctaataatcggggcatgggtaaaacttatgaaaatttcctcatgctgaattgtaattttc

SEQ ID NO: 76558 - DNA, 2450 bp, Homo sapiens; identical to SEQ ID NO: 59091

SEQ ID NO: 76559 - DNA, 4651 bp, Homo sapiens; identical to SEQ ID NO: 59093

SEQ ID NO: 76560 - DNA, 1598 bp, Homo sapiens; identical to SEQ ID NO: 59095

SEQ ID NO: 76561 - DNA, 1121 bp, Homo sapiens; identical to SEQ ID NO: 59097

SEQ ID NO: 76562 - DNA, 2329 bp, Homo sapiens
ggagccggggcagtgcggctctgggctggccgaaggggtggcgctgcgatcccgcagggcagcgacgcgactctggtgcgggccgtcttcttccccccgagctgggcgtgcgcggccgcaatgaactgggagctgctgctgtggctgctggtgctgtgcgcgctgctcctgctcttggtgcagctgctgcgcttcctgagggctgacggcgacctgacgctactatgggccgagtggcagggacgacgcccagaatgggagctgactgatatggtggtgtgggtgactggagcctcgagtggaattggtgaggagctggcttaccagttgtctaaactaggagtttctcttgtgctgtcagccagaagagtgcatgagctggaaagggtgaaaagaagatgcctagagaatggcaatttaaaagaaaaagatatacttgttttgccccttgacctgaccgacactggttcccatgaagcggctaccaaagctgttctccaggagtttggtagaatcgacattctggtcaacaatggtggaatgtcccagcgttctctgtgcatggataccagcttggatgtctacagaaagctaatagagcttaactacttagggacggtgtccttgacaaaatgtgttctgcctcacatgatcgagaggaagcaaggaaagattgttactgtgaatagcatcctgggtatcatatctgtacctctttccattggatactgtgctagcaagcatgctctccggggtttttttaatggccttcgaacagaacttgccacatacccaggtataatagtttctaacatttgcccaggacctgtgcaatcaaatattgtggagaattccctagctggagaagtcacaaagactataggcaataatggagaccagtcccacaagatgacaaccagtcgttgtgtgcggctgatgttaatcagcatggccaatgatttgaaagaagtttggatctcagaacaacctttcttgttagtaacatatttgtggcaatacatgccaacctgggcctggtggataaccaacaagatggggaagaaaaggattgagaactttaagagtggtgtggatgcagactcttcttattttaaaatctttaagacaaaacatgactgaaaagagcacctgtacttttcaagccactggagggagaaatggaaaacatgaaaacagcaatcttcttatgcttctgaataatcaaagactaatttgtgattttactttttaatagatatgactttgcttccaacatggaatgaaataaaaaataaataataaaagattgccatgaatcttgcaaaaaaggtattaactcatactatattcttggataaaataaccttttaaaatactttagcacatatgcttaaaatctaagttaacagatttgtcttagtccatttgtgttgctataacaaaataccacagatttggtaatttataaacaacagaaatctgtttttcctggctcttgaggctgggaattccaagaccaatgcaccagcagaattagtgtctggtgaaggctgatctctgcttccaagatggcacctcattgctgcatcctccacagtggaggaatgtatgtcctcacatggtggaagggacagaagggaaagaggagcaaaatgctttcaaaagagcatttaatctcattcattactcagtcacctcttaaaggcccacatccctttaatactgttgcctttggggattaagtttcgacatgaattttggaggggacaaaaacatccaaaccatagcaacataaatgtatagaatatttcacacaaagcagagtgcctgggtaatgaccagatataaagaagtatttgaaatgaccttacctccaagatgcttatactcttagaaaagttgacaggtacagatggctgtaatttgaagcagcaggtaggattcattgcacctattattcattaaacacctgttgtatgtcttctactgtactggagtgcttagtattagttaattaactcattcctcataacagcccactaagatagatggtattacctaccttgatagatgaagaaagaccaacaaggttttacttttccaaggtcaaggtcacaaagctagtaaggggtaaagccatgattagattcagctcaggaagattccactggcaactccttacttctactattattaattttactttaacatttaacaccttacagcagaaaacatgcacaggcactaataggaaatcagcaggagtaacaggtaaagaaaaacatggtccttatctacaagcagttcacaattgagctggagccaaagg

SEQ ID NO: 76563 - DNA, 1004 bp, Homo sapiens
gcacgagaaggaagtgcttttgaatgaggtactgagggccaaggtgttggaagttcctaattctttcctcggttaactgtgaaactctgcgtattgggaaggcctggcctcagtcatcaggccaggagaggtactggacgccgcgcacgcactcgtctgccagcgaggcccaaaggggaagcctagcggagctcaatgtggcagctgctggcctctgggccgactgtgatcaaccactctatgattgtcctatgtgtgggctcatatgtacaaattaccatattcttcaggaacatgttgacttgcatttggaagaaaacagctttcagcaaggcatggatagagtccagtgttctggtgatctacaattggctcaccagcttcagcaagaagaagacagaaagaggagatctgaagaatcaagacaagaaatagaagaatttcagaagctgcagagacaatatggtttagataattctggaggatacaaacaacaacaactacgaaatatggagatagaagtaaataggggaagaatgcctccatctgaatttcataggagaaaagctgatatgatggaatcattagctcttggttttgacgatggaaaaacaaaaacttccggaattattgaagcacttcataggtattatcagaatgctgccacagatgtgagacgggtgtggctttcttcagtggtggatcactttcattcatctttaggcgacaaaggttggggttgtggttacagaaatttccaaatgctactttcatcattattacaaaatgatgcttacaacgattgcttaaaaggtatgttgattccttgcattccaaaaattcaatctatgattgaagatgcatggaaggaaggttttgatcctcagggggcctctcaacttattatcaggttacagggaacaaaggcctggattggagcatgtgaagtatatatactcctgacctctctaagggtttagtgtcatatttgttgattttcactg

SEQ ID NO: 76564 - DNA, 1112 bp, Homo sapiens; identical to SEQ ID NO: 59100

SEQ ID NO: 76565 - DNA, 1551 bp, Homo sapiens
caaataacaatatgattaacttcatatttattatttcaacgatcttttttataaccgagtttaatttttaaattaaatttctaaaatagattaccaatattaaaataccttaagatatttatctttagcaataataggcaatattaaagttgtattaacttttaaattaagtaagagtatttggtggatgccttgggtctgaaagtcgatgaaggacgcgattacctgcgataagcttcgtggagttggaaataaactatgatacggagatttccgaatggggtaacctaactgagcaaacctcagttgcattttgatgaatccatagtcaaattagcgagacacgttgcgaattgaaacatcttagtagcaacaggaaaaaaaaaaaaataatgatttcgtcagtagcggcgagcgaaggagaaaagtgcccaagatcctttcaggatatttggttttttgggcgcgacacaaatcgaggtgagggaagagagaggaaaatcccctgaatccctgcaggattaatttattcaaaaaggaaataaaaaatactcaatatgcaaaagtcttgtgaagaaaatgagggaaaaccacagaacatgccaaaggccgaggaagatcgccctttggaggatgtaccacaggaggcagaaggaaatcctcaaccttccgaagaaggcgtaagccaggaagcagaaggaaaccccagaggagggccgaatcagcctggccagggatttaaagaggacacacccgttaggcatttggaccctgaagaaatgataagaggagtagatgagcttgaaaggcttagggaagagataagaagagtaagaaacaagtttgtgatgatgcattggaagcaaagacattcacgcagccgtccttatcctgtgtgctttaggccttgaattcatttttgcctaatattaaaatctggccccagctttctttctgttagcattttctgatgtatctttgacctccattttacttttaatcatctgatgaaattttgttttaggtaatttccttggtaccagcatctcattggattttggattttgacccattttccaggtctatttttcaattggaaactttcacacatttgcatgggaatatgttcattccatgttgtaaagtaaaacataacaggttatggcaaagcagcatatttaatatcagctcacatatgtaggataaaattccaaactttgtgtgtgtgcgtgtgtgtatacatacatccatataacatatatcacaaacttaaccaagcttatttctgtgtggtgtgaaattttatttgttttcttctttttgttctttttgcttatatgtactttttaatgaacacgtgtctcacacacaaaaagaattaaggattttttttacaagtaagagtcaaataatttgcaaccagcttatgagggcaatgggggcacctaaactcttgatgaaagaactttaaaaagaaatgtaaacctcaaattacctctggatctcttagccagaggaataaactggcaattattacagataaaaaaaaaa

SEQ ID NO: 76566 - DNA, 1850 bp, Homo sapiens; identical to SEQ ID NO: 59102

SEQ ID NO: 76567 - DNA, 1944 bp, Homo sapiens; identical to SEQ ID NO: 58757

SEQ ID NO: 76568 - DNA, 453 bp, Homo sapiens; identical to SEQ ID NO: 59104

SEQ ID NO: 76569 - DNA, 1610 bp, Homo sapiens
tttcgtggtgcgcctgcagggatcggaagccggttggggtgtgagaggttttctcgctctaggtaagcgaaacaagccgggggactgcgagccagggactcgggccgcggggcgggaagaagtggggcagcgcttggccaggccgaaaggactttgggggtgggggctgggagtccgtgtctcgaatgagggaggagaggtggagttgccggggctcaggcccggcctcgagcatgggcggatgagaggagtcgggagccgaggcctatggtccttcgggtgaggggagacggagccagcgaggagatggagcacaagcttgtggaggagattcttcaagcaatcactatgtcaacagacacaggtgtttcccttccttcatatgaggaagatcagggatcaaaactcattcgaaaagctaaagaggcaccattcgtacccgttggaatagcgggttttgcagcaattgttgcatatggattatataaactgaagagcaggggaaatactaaaatgtccattcatctgatccacatgcgtgtggcagcccaaggctttgttgtaggagcaatgactgttggtatgggctattccatgtatcgggaattctgggcaaaacctaagccttagaagaagagatgctgtcttggtcttgttggaggagcttgctttagttagatgtcttattattaaagttacctattattgttggaaataaactaatttgtatgggtttagatggtaacatggcattttgaatattggcttcctttcttgcaggcttgatttgcttggtgaccgaattactagtgactagtttactaactaggtcattcaaggaagtcaagttaacttaaacatgtcacctaaatgcacttgatggtgttgaaatgtccaccttcttaaatttttaagatgaacttagttctaaagaagataacaggccaatcctgaaggtactccctgtttgctgcagaatgtcagatattttggatgttgcataagagtcctatttgccccagttaattcaacttttgtctgcctgttttgtggactggctggctctgttagaactctgtccaaaaagtgcatggaatataacttgtaaagcttcccacaattgacaatatatatgcatgtgtttaaaccaaatccagaaagcttaaacaatagagctgcataatagtatttattaaagaatcacaactgtaaacatgagaataacttaaggattctagtttagttttttgtaattgcaaattatatttttgctgctgatatattagaataatttttaaatgtcatcttgaaatagaaatatgtattttaagcactcacgcaaaggtaaatgaacacgttttaaatgtgtgtgttgctaattttttccataagaattgtaaacattgaactgaacaaattacctataatggatttggttaatgacttatgagcaagctggtttggccagacagtatacccaaacttttatataatatacagaaggctatcacacttgtgaaattctcttgtctaatctgaatttgcattccatggtgttaacatggtatatgtattgttattaaagtaagtgacccatgtcaaaaaaaaaa

SEQ ID NO: 76570 - DNA, 390 bp, Homo sapiens; identical to SEQ ID NO: 59106

SEQ ID NO: 76571 - DNA, 1124 bp, Homo sapiens; identical to SEQ ID NO: 59107

SEQ ID NO: 76572 - DNA, 3073 bp, Homo sapiens; identical to SEQ ID NO: 59108

SEQ ID NO: 76573 - DNA, 2594 bp, Homo sapiens; identical to SEQ ID NO: 59109

SEQ ID NO: 76574 - DNA, 1938 bp, Homo sapiens; identical to SEQ ID NO: 59111

SEQ ID NO: 76575 - DNA, 2031 bp, Homo sapiens; identical to SEQ ID NO: 59112

SEQ ID NO: 76576 - DNA, 2667 bp, Homo sapiens
tcaacgctccggggccgctcggctcgcctttcttccctcgcctttctctcctgcttgcgttcaccgctcccccctgtcttttcacggttgctggttttattttgttgttgtatttatgcctttaggggttttgttccatcggcgtcgagctcatgggtgtacattatcatgctcttcttttgtagagcagccgacggccatggaggctgaagagacgatggaatgccttcaggagttccctgaacatcataaaatgatcctcgaccgattgaatgaacagcgagagcaggaccggtttactgacatcaccctaattgtcgacggacaccattttaaggctcacaaggctgttttggctgcttgtagtaagttcttctacaaattctttcaggagtttacccaagaaccattggtggagatagaaggtgttagtaaaatggcctttcgccatttaattgagttcacatatacagcaaaattaatgatacaaggagaagaagaagccaatgatgtatggaaagcagcagagtttctacaaatgctagaagctatcaaagcccttgaagtcaggaacaaagaaaactcagctcccttagaggaaaataccacaggaaaaaatgaggccaaaaaaaggaagattgcagaaacttcaaatgttatcactgagtcattgccatctgcagaatcagaacctgttgaaattgaggtagagattgccgaaggcaccattgaagtggaagatgaaggcatcgaaacattagaggaagtggcttctgccaagcagtccgtaaagtacatacagagcacaggttcctctgatgattctgctctagcactgttggcagatattaccagcaagtaccgtcaaggtgacagaaaagggcagattaaagaagatggctgtccatctgaccccacgagcaaacaggtagaaggtattgaaattgtggaacttcagctgtcacatgtgaaggacttgttccattgtgagaaatgtaaccgttcatttaaattgttttaccattttaaggagcacatgaaatcacactccactgagagtttcaagtgtgaaatatgcaataaacgatatcttcgagagagcgcatggaaacagcacctaaattgttaccaccttgaagaaggtggagtcagtaagaagcaaagaactgggaaaaaaattcatgtatgtcagtactgtgagaaacagtttgaccattttggacattttaaagaacatcttcgaaaacatacaggtgaaaaaccttttgaatgtccaaattgtcatgaacgatttgctagaaatagcactctgaaatgtcacctcactgcatgccaaactggagtaggggcaaaaaaaggaaggaagaagctctacgaatgccaggtctgcaacagtgtgtttaacagctgggaccagttcaaagatcacttggtaatacacactggagataaacccaaccattgtactttatgtgatttgtggtttatgcaaggaaatgaattaaggaggcatctcagtgatgctcacaatatttcagagcgtctagtaacggaagaagttctttcagtagaaacacgtgtgcaaactgaacctgtaacatcaatgactattatagaacaagttgggaaggtgcatgtgctaccattgcttcaggttcaggtggattcagcacaagtgactgtggaacaagtccatccagatctgctccaggacagccaggtgcacgattcacacatgagtgagcttccagagcaggtccaagtgagttatctagaagtgggccgaattcagactgaagaaggtactgaagtacatgtagaggagctgcatgttgaacgggtcaatcaaatgccagtggaagtacaaactgaacttctagaagcagatttggaccacgtgaccccagaaatcatgaaccaagaggagagagagtctagccaagcagatgctgctgaggctgccagggaagatcacgaagatgctgaggatttagagaccaagccaacagtggattctgaagcagaaaaggcagagaatgaggacagaacagctctgccagttttagaatgaaattacacatgaatatatttttaaatttacttgttgggtttttgaactgattatgggcagtttgactgtccttaattaagcctaacagacaagtggaccaaagttaagctgtttcctgttgtgctgaactgttgtccgttgaaacacattgattcccctccccctacttattgccacagaggagggatcttttccataactgaaggggagttttgagaagtatatttctggaaacttaaatggattatattcttattatatagttgggtacgaatgtatctattttcattgtggtaaaagttcttccttttctctttcccaggtcatgttcttcctcaaattttttccatattgtaaaatcaaacttaaatcattagaatacaagtttatgtattctaatgcatgttagaaaattgaataatataggaaacacaaggctgcatgatgaaaagtgcattgttactgtgcagttaaattttggcttctggctttctttagtttgaacaaacgttcttgtctaccccagtagtcacagatgccatctttgcaacagaaagagtggtggtggcaaaatttctagaatgttaaaaaaaaaa

SEQ ID NO: 76577 - DNA, 1714 bp, Homo sapiens; identical to SEQ ID NO: 59113

SEQ ID NO: 76578 - DNA, 1211 bp, Homo sapiens; identical to SEQ ID NO: 59114

SEQ ID NO: 76579 - DNA, 1630 bp, Homo sapiens
ttttttttttttttgccagtctttgtcagaaaatatatttattattgatagtgagtgaagtaaagatgtgagtattcactatagaggttttatcagccaaggttgccttcatattgataaaaataccttatctcacttgtaatcataaacattattccagtagaagaggtacattttctctcctttttgtcttcttgcctgtataatcaccataataagttataatgaaatagctcttacataatcaaaggagaaaagaaagacaaaaccaacatgccacagcctagacaattccatccagcactgctgcctccagatctgttttctggctctctccacccagcactgctgccctcggatctatgttttctggctctctcctcgccccactccaattaatttagcccccaaccccatcctactttgttagggtggaggttcaccaaatgatggggcttgttcagaagagaaacattttatggtcagtgcaagttgaatagaaagtaccaaaaggtggagagggctgcccttctcttttaatcatcataagagggtttactaatactcaagagtgtcctttaatgactgatccctgatcaaggctttggcccttcaaactgctgctgttcaaaacgtgaaatgattctgctgaatccattcttgatgtctctctttagtggtcttctcattagtggtcttctcttcaaatgggttgttttctcactaggaaaaaaaatgttccatctctggaattaacgttgatggtgttttgctcattctgaaagtttttatcctcccttctcaagcatgctctgtttggcatgattgacacagtgcatatactgggtggccagagcggagcatttgagggtctggtgggtgttctcacggtaacactgaagaattttggcctgcagatcagcacagactggatgagactcatatcgcttgaactttgcttccacctcttcagcagctttctgatattgttcagtggtgactctgtagaactctgagctcctctcctccagtctagccagctgttctttgtagaatgcatcctgcttctttagcactcggtctttctcttccagctgcctagccaggtgctttgccttagcgcgttcctcctcgctacatatcctctcccgaaggatggctctggttaactgctcattggcagcagccctctctcggtccagctctttggcttgctttagtcgtttctgatcttcggattctttcttggcttgctccaatgccagctcctcagctactcttcttttcaattcttcatcagaaactgaggcaccataagcaccagaataccgctgagacttcgaaccagatggagaggattccttcattcgatcaatcacattttccgaaagccggatgcccttcaccacggtgatgttctcattctcgtccgcctcgaaggtgacccggcgggtgctggtggtcccacccatgattccggttcctgccccagcggagacctagcggggaaccacgagcacttcggggcccccgcacccacacgcgcgtggaagggcctggattcttttcccgcacagcgggagcaaggccacgacccccagaagcaaggagaaggcgccggtccacgaaa

SEQ ID NO: 76580 - DNA, 969 bp, Homo sapiens; identical to SEQ ID NO: 59116

SEQ ID NO: 76581 - DNA, 1984 bp, Homo sapiens; identical to SEQ ID NO: 59117

SEQ ID NO: 76582 - DNA, 1286 bp, Homo sapiens; identical to SEQ ID NO: 59118

SEQ ID NO: 76583 - DNA, 1987 bp, Homo sapiens; identical to SEQ ID NO: 59119

SEQ ID NO: 76584 - DNA, 1931 bp, Homo sapiens
tttcgtcgcagctggaacctccggctgtcagtgcgcttacagttcctaaccccgaccctgcgcgcagcccgcactatggcagccccgccgcagctaagggctctgctcgtagtcgtcaacgcactgctgcgcaagcgccgctaccacgctgcgttggccgtgcttaagggcttccggaacggggctgtctatggagccaaaatccgggcccctcacgcgctggtcatgacctttctcttccggaatggcagcctccaggagaagctgtgggccatactgcaggccacatatatccactcctggaacctggcacggtttgtgttcacctacaagggtctccgtgccctgcagtcctacatacaaggcaagacctacccagcacacgcattcctggcggccttcctcgggggtatcctggtgtttggagaaaacaataacatcaacagccagatcaacatgtacctgttgtcacgcgtcctgtttgccctgagccgcctggctgtagagaagggctacatccctgaacccaggtgggacccgttcccgctgctcactgcggtggtgtgggggctggtgctgtggctctttgagtatcaccgatccaccctgcagccctcgctgcagtcctccatgacctacctctatgaggacagcaatgtatggcacgacatctcagacttcctcatctataacaagagccgtccctccaattaatgcagccctgaggtgtctggctgtggctcaagatttggccccatgcagaccctcccaaaggatactgccttctcaagatcataggcctcagactccaactggtgttatcccagggttctgtttgctgaagtaaaaacactgattttaaaatcccagtgggtacctttgtatggtggcacaagtggccgaatcaggctgaggaatctacggcttggttccagctgtgcagctgacttctgtgagactggggccagccacactactctctaggcctcaggggtcaaggagctcagaggagggccctgaggtctctttccgggtgggtatgttcattccttcaactgttccttatgtcacagagggctccttgcctggtgggcagtgggttgtaaatactttttaaaaaacactaagttccttatcctcagatgctgttctactggagaagttcctagattcccactgtcccaatagaaacacgtgagcccatatatgtaattaaaatgtttctagtagctgcattacaaaaaagaagcctgggcactgtggctcactccctgtaatctcagaactttgggaggtctgaggcaggtggatgcacttgagctcaggagcttgagaccagcctgggcaacatggtgaaacccagtttctacaaaaaatacaaaaaattagccgggttccatcacctgtggttccagctgaggtgggaggatcacttgagcctatgaggtcgaggctacagtgagcaaagatcacgccactgcactccagcctgggcgacagtgagaccctgtctcaccaaagaaaaaaaaaaggggagattaatcttcactatatattttaacacaaatttctaaaagttatttcaacatataattaacatcattagatattttgtactcttttttgtattaagtattcaaaattgggtgtatattttgccacccacattttcaggacccagtagccacatgtggctagtggctgctgtgacgggcaacacagatatggaacacttgtatcctcacagattattctagtggacagtgcagatctagagctagaggacatgggtttgagtccccactcccccactgtgtaaccttggggaaggttctggacctctcagagcctcaatttatcataaaatgaggataatcataatgccgtggtcctcactggacttgtgcaactaccactgatgtgctactaat

SEQ ID NO: 76585 - DNA, 1401 bp, Homo sapiens; identical to SEQ ID NO: 59121

SEQ ID NO: 76586 - DNA, 3032 bp, Homo sapiens; identical to SEQ ID NO: 59122

SEQ ID NO: 76587 - DNA, 1431 bp, Homo sapiens
ttttttttttttccatatagtaaaatgcctttatttaaaaaagaagaggtacagtacattataattccaaggaaattttcgtattttaaaaatgccaatttttggctaaaaactcaaaagatttcatttaatacttgaataacaaggaaattcacaattaaggctgaaatactgttcatattattgtgtatttctaagcatgttattttaagcttgtgtattttaaaccatggttacagaattgtataggaatatattgaaggcataaccttatatttattggaattttggtttaattgtttagaatttcaaaatagtattgggatgtgaaacaggatgattatcactctgataacaacaagactgaactgagtccttcactgtatttttctaaagaactcacttctagtgagtaagtgttcaataacataaagttaggaaatctttatgttattaaaatttgaatttttctttcactgtatcccaatattttaaatatgcgcttcaggacatttccagttaaaataaaagtttaaataatatcctcactacattaaaaataagatctttaagtaaacgtatttccaaatcatattgtcattgtgcactgaagttaattctctgaagactaaattatatgcaattgaggttctgtttcccttctaaacgttcctttactaatttttccaaagcgaaaagatgctcatctgcttcttctggcacaaggttcctaatagaatttgcaagttcaaaaagatattctgtatttcttccacttggaccagctgcattaaaaatttgttcagcaatgtcttccagaggtgcaggaccaagataatcaggattatcacatgttccaatatatagcaatacactgaatggttttgttgtgggatcttttggataaaaaatgactgttgtggttctgtagcctcctttttctctgaagtcaaggtatgcttttacttcttcttcctttcctactggcaatctgtaagcaacaccccatacacatcccgcaggatcttcaacaagagtcacaactcttccaggcttgccggggaccccgcggtggtccgtgctgccctgccagaagcgcctgctgtagttggtgatgtatccgaccagcttgtcctgataggggaaatccaccttccagatcagggacccgtaaccaaaaacccacatcttctcgcggctcctctgccccagtggccgtgaaccctagctgtcgccgcgccgccggggactgaagcctccggtaagcgagtaaccggccgcgcggggcgcaggcgcgatggccacttggggcgcaaagcgcactgggagtttagatccagaaagattttccgagcggatctcagtcagctttattttatttccttgattagggtgtcaagaggcattgaccttcggtgtagtaagcaatgg

SEQ ID NO: 76588 - DNA, 1702 bp, Homo sapiens; identical to SEQ ID NO: 59124

SEQ ID NO: 76589 - DNA, 3018 bp, Homo sapiens; identical to SEQ ID NO: 59125

SEQ ID NO: 76590 - DNA, 812 bp, Homo sapiens; identical to SEQ ID NO: 59126

SEQ ID NO: 76591 - DNA, 760 bp, Homo sapiens; identical to SEQ ID NO: 59127

SEQ ID NO: 76592 - DNA, 2045 bp, Homo sapiens
tcgcgatctagaactagtccggacgcgtgggtactgttagaaatggctgttgtcaattatgaggaaatccagtagttctctgggagagatctgaattagtagcgttgagaggctattcctgaaccccatattagaatccttcacaaactactgcagtttgctgcttggtcctgaaataagagacaatggatgaaaccaaataattttcaacccttattgtgaatttacatttctttaaataatatttaatcaatgaatcacaaatatttaacctgtcattatgtcaccccgctggacaataatggagagagtggggtatcactgctgtcttataacttttaaccccacaaactttatttgcatccccattaaaggacaaggccatgctccatttctgatctgttcctgggtcactcagaaactgaggctttcagacagatctgtgcagtgatgagaaggaccacttttttgaaatgtggagaaaaaaatatgacatcttttaatgtcaggcttcttatctgagcaaaaaaacatgtatcatcttttctttttgtcagtgtgacagctggatgacaagaagacctacaactgagtagaaggctgtgacttctttccttctcctccatgctatcaacatgagtctttaaatgtcctgtaagattctgagattttaattttgaatacaacctcctaaaaagtgaggtaaaaaactatcttcaacttctatattgcaaatttgttgatactaccaatgcacgtgtttaactgagatgcataaaagcctttctcctcaaaaggcttatgtttaactaaaattgtcacttttaaaagaaagtttatggctaaaatgtatatcatcattatcagcaggagtatgattgtgtctgggagcccatttcactagatagcccaaagtcttctatcaaatgggttataatgtgtttcttctattctggtgattaaacagtaagctcttgggagtgatttgtttttatttttacagtgatcacctatcaaactgttctgctgtgttatagttcccaaactggagttcaacagtcttagaaattcagtggtctaagaactgcagttcttgagtccaacctcctggaaaagtgaagtataaaactctggctccagctgcttgttccggtacttgttgacaatgtcggtgattttctgtttccggcggacatgggggggactgtaggagtcactttccagtctctttcttctacaaatgttaattacagtctgcctcaccagaaagccaagagctcgcctgctgacaatcatcccatccacaagagggatgaccatattaaattttccagtggctccttgaatttttatccggaataatccagtgtttaaagggtggatgaagatgacaggaacttctttttcaagagttgtagatctcagtgaagtgctactatttgcagtagtttccacaccagtactgatctctgtcatcagctctgagaggggaaagttttctatatcatcatagcgttccacccagactacagaaactcttgtctcaggtccaaggggaggaacagggcgaccctgaggcagcttcctcattctggaactgggactgagcctctgtgaggaattaagattgtctgtatgattggggaaaagctcaagtgtcagggatggctgtttcagaattcctggcataagatccatatttgaatcactatcttggtccgagatgttactttccaatgaatcagttaaggactccacaggagaaggaaccacaaaagcaatttctgtaagggcatcagcataatacagcaccttcttctgtccattgaaaatgctagctccaatatcttcagaggaaatcacttcttcttgttgagatccttcaccatcatcacaacaattaatagaccaactggtagaaacatgcccagtccaaccagggtgtctgcccacatctactgaccagccaagggaaagcaaaaattctaggaaatgtggctgaacagttctggaagactccacattctttaaaatctcttggttcg

SEQ ID NO: 76593 - DNA, 1827 bp, Homo sapiens; identical to SEQ ID NO: 59129

SEQ ID NO: 76594 - DNA, 1031 bp, Homo sapiens; identical to SEQ ID NO: 59130

SEQ ID NO: 76595 - DNA, 1497 bp, Homo sapiens; identical to SEQ ID NO: 59131

SEQ ID NO: 76596 - DNA, 2007 bp, Homo sapiens; identical to SEQ ID NO: 59133
  misc_feature (1)...(2007): n = a,t,c or g

SEQ ID NO: 76597 - DNA, 839 bp, Homo sapiens; identical to SEQ ID NO: 59134

SEQ ID NO: 76598 - DNA, 728 bp, Homo sapiens; identical to SEQ ID NO: 59135

SEQ ID NO: 76599 - DNA, 1293 bp, Homo sapiens; identical to SEQ ID NO: 59137

SEQ ID NO: 76600 - DNA, 2450 bp, Homo sapiens; identical to SEQ ID NO: 59138

SEQ ID NO: 76601 - DNA, 1514 bp, Homo sapiens; identical to SEQ ID NO: 59139

SEQ ID NO: 76602 - DNA, 3372 bp, Homo sapiens; identical to SEQ ID NO: 59140

SEQ ID NO: 76603 - DNA, 1941 bp, Homo sapiens; identical to SEQ ID NO: 59141
  misc_feature (1)...(1941): n = a,t,c or g

SEQ ID NO: 76604 - DNA, 1476 bp, Homo sapiens
  misc_feature (1)...(1476): n = a,t,c or g
ttttttttttttgaaagagaaatgagacttttattagctccaagagcatttttcaatactaagggcaaaaagtaaaaagaaggacaaggaaaaccaaggcacaaagaagggacctaggcgcaccccagaactcaccacggacacacagcagagggcttctcttcatatcaagggtatgggtaaacaagaaaggctgctgtttcactgagacaggacaaaccaccaagtccaaatgagaagacaagcagagacgtagtgtcagaccaggagggttagaacttgctagtgtagagggcaataatccacttgggcacacggaggaaggagggcaggtaggaggccagccagcccaggccggacacgtgtgagagaacagagctcaaagacaaatagtcttggacggggcggccgtccacatcccgaaggccatagcgtcgagcaaggtcacaggatggcagcaccttaccactcaggctcaggatattgggatctgttgccaaagccaccacacatttgccactcaattctgtggtttccgcagatgagaaggctgatttgaactgcttcaacacaggatcctgcaggacctcctcctttgccatatgctccttcagcagttctgtctgcacaatccccggccacagagacacacagctgaccccatggcgccgcagctcgtgggcacagtcagcagccagcttgtcacacgcagctttgcccacaccataggggacattgaacatatactgcaggcttcctggggaggagatgaccacgatgagcccctggccagctggtaccatcagccgtgccccatacactgagcaaaagtagtggcctctgagtccgacgttgttgatatcatcccacatggaggcaggggtttcccagaatgccttattcctggtgttcaggatcgtctggacccctgcataagcattgttgaccagcacatctagacgcccttgctgttcccgatccacttgctcaaacaggcttcgcacttcactctcctggcttgaatcgcacaccacaggcacacattggcccccgagggattgtgcctcctgagcaacaacgcgaagggtgtccagatggcggccagtgatgtaaactgtggcgcctgctttgcagagctgcaaggcaatgccacggccaatacccctggaggcaccagtcaccacacacacttggccattcatgggagctgccatgactcacaggcaaaggaggcaggtctgccacctgcgctgccgctgaggtctgcagattgcggggctgcggtggaagtctgggttctcgcccagattgagccggcgacgtggaggcagtgttcaaggattgattctgtagtaggacccggggcgattctgtgctgaggtagaggggcagagtcccagcccaagttagaacctgcggatgggggcggagcgatctgggtgncgaattccnccgcntgggctatgctactcagtg

SEQ ID NO: 76605 - DNA, 2714 bp, Homo sapiens; identical to SEQ ID NO: 59143

SEQ ID NO: 76606 - DNA, 2750 bp, Homo sapiens; identical to SEQ ID NO: 59144

SEQ ID NO: 76607 - DNA, 607 bp, Homo sapiens; identical to SEQ ID NO: 59145

SEQ ID NO: 76608 - DNA, 1009 bp, Homo sapiens; identical to SEQ ID NO: 59146

SEQ ID NO: 76609 - DNA, 710 bp, Homo sapiens
ttttttttttttgagtgtttgagtttcattcacacaaaacatggacatcatctttgaggctctgtcccagagagacagggccatccctcatgtctgttattgggttgtagataaacaaaagtataaatcaaacaaactgcaaattactctgtctcttttcctaatcaatacagcaacagtcctcagtggtactgcaccactctggaaaaaatgccttcaggttccttcccatcccccaaggcagcagcaaatccttcgtgtcgcctcctactggccaaggcagccaaagatttgaaagtctttggctcgtagatggccagatccgctaggactttcctgttgagctccacctggcacttaactaaattcccaatgagcgctggatacttcagtccatgttcctggctagcagctgtaattcgattaatccagagggtcctcatgttctttttcttcaggtatcgggctttggtgcatttcacaaaggctcgaatcacggttctgaccgccaacctgtagcagcgatttttccttccccggaagtgcctggcgtgcttcagcacctcctggatccgaaagtagcggtcggtgacgcgattccgcagccagagctgcgcggtgaggaagaccatggcgcctgcaggccggcgtcccgaacactcaacaacgcacgcgcagcgccgctgccatcttgcccgcccacgcgtccg

SEQ ID NO: 76610 - DNA, 3246 bp, Homo sapiens; identical to SEQ ID NO: 59148
  misc_feature (1)...(3246): n = a,t,c or g

SEQ ID NO: 76611 - DNA, 2343 bp, Homo sapiens; identical to SEQ ID NO: 59149

SEQ ID NO: 76612 - DNA, 1322 bp, Homo sapiens; identical to SEQ ID NO: 59150

SEQ ID NO: 76613 - DNA, 1682 bp, Homo sapiens
tccctggctcgcctcgcgcctgccggcggatccgtggtcatgccaacccagcagccggctgcgccgagtactcgtgcccccaaaccctcccggagtctctctggctcactttgtgccctgttttctgatgcagactcgggatccgggatgaaggcggagcttccccctgggcctggggcagtggggagggaaatgaccaaagaagaaaagctgcagcttcggaaggaaaagaaacagcagaagaagaaacggaaggaagaaaagggggcagaaccagagactggctctgctgtatctgcagcccaatgtcaaggcccaaccagagaactgccagaatcgggcattcagttgggcactcctcgggagaaagttccagctggtcggagtaaggccgaacttcgggctgagcgtcgagccaagcaggaggccgagcgggccctgaaacaggcaagaaaaggggaacaaggaggaccacctcctaaggccagccccagcacagctggagaaaccccctcaggagtgaagcgtctccctgagtaccctcaggttgatgacctacttctgagaaggcttgttaaaaaaccagagcgtcaacaggttcctacacgaaaggattatggatccaaagtcagtctcttctctcacctaccccagtacagcagacaaaactctctgacccagtttatgagcatcccatcctctgtgatccacccagccatggtgcgactcggcctgcagtactcccagggcctggtcagaggctccaatgcccggtgtattgccctgcttcgtgccttgcagcaggtgattcaggattacacaacaccgcctaatgaagaactctccagggatctagtgaataaactaaaaccctacatgagcttcctgactcagtgccgtcccctgtcagcgagcatgcacaacgccatcaagttccttaacaaggaaatcaccagtgtgggcagttccaagcgggaagaggaggccaagtcagaacttcgagcagccattgatcggtatgtgcaagagaagattgtgctagcagctcaggcaatttcacgctttgcttaccagaagatcagtaatggagatgtgatcctggtatatggatgctcatctctggtatcacgaattcttcaggaggcttggacagagggccggcggtttcgggtggtagtggtggacagccggccatggctggaaggaaggcacacactacgttctctagtccatgctggtgtcccagcctcctacctgctgattcctgcagcctcctatgtgctcccagaggtaagtacagaggaaaaggactccaaagttggcggtgaaaaggtgtagtagtatagacataatctcaccttcccaaagttacagttttgtttttgttttgagataaggatggagtgcagcgacgtgatcacagctcgctgcagtcttgacctcctgggctcgggtgatcttcccacctccgcctctgagtggctgggactgctggtgtgtgccaccatgcccagctagttttttatttttcttgtagagatgggatatcgctacattgcccaggctggaactcctgggctcaagcagttccccctgtctcggcctcccaaagtgctgggatcataggcatgagccactgtgcccagccacaattattttaacatattagaattatatagccc

SEQ ID NO: 76614 - DNA, 1136 bp, Homo sapiens
ggcggcgcccatgtaacccggtccgtgccgcaaagcgaacgggggccgcggcgcgggccccgcgggggttagaggtcaccatgctgagggtcgcgtggaggacgctgagtttgattcggacccgggcagttacccaggtcctagtacccgggctgccgggcggtgggagcgccaagtttcctttcaaccagtggggcctgcagcctcgaagtctcctcctccaggccgcgcgcggatatgtcgtccggaaaccagcccagtctaggctggatgatgacccacctccttctacgctgctcaaagactaccagaatgtccctggaattgagaaggttgatgatgtcgtgaaaagactcttgtctttggaaatggccaacaagaaggagatgctaaaaatcaagcaagaacagtttatgaagaagattgttgcaaacccagaggacaccagatccctggaggctcgaattattgccttgtctgtcaagatccgcagttatgaagaacacttggagaaacatcgaaaggacaaagcccacaaacgctatctgctaatgagcattgaccagaggaaaaagatgctcaaaaacctccgtaacaccaactatgatgtctttgagaagatatgctgggggctgggaattgagtacaccttcccccctctgtattaccgaagagcccaccgccgattcgtgaccaagaaggctctgtgcattcgggttttccaggagactcaaaagctgaagaagcgaagaagagccttaaaggctgcagcagcagcccaaaaacaagcaaagcggaggaacccagacagccctgccaaagccataccaaagacactcaaagacagccaataaattctgttcaatcatttctttctgtcttgaagaatgataggagagatgatggggctctttttggcctgaagaggagaaggaatttattctttcattcagctctgagatcccagagttttctgaggcagagtccctgcctcacccaccagaggatacacactcatgacatgcctcccacacactcatacaaacaagtacctgtcatccaggtgatgtgtgtcagtggaggcaagacagagcatgtgacagcacagtggaagtgtggccggctgggtaggaaga

SEQ ID NO: 76615 - DNA, 1028 bp, Homo sapiens; identical to SEQ ID NO: 59152

SEQ ID NO: 76616 - DNA, 2618 bp, Homo sapiens; identical to SEQ ID NO: 59153
  misc_feature (1)...(2618): n = a,t,c or g

SEQ ID NO: 76617 - DNA, 1887 bp, Homo sapiens; identical to SEQ ID NO: 59154

SEQ ID NO: 76618 - DNA, 2811 bp, Homo sapiens; identical to SEQ ID NO: 59155

SEQ ID NO: 76619 - DNA, 826 bp, Homo sapiens; identical to SEQ ID NO: 59156
  misc_feature (1)...(826): n = a,t,c or g

SEQ ID NO: 76620 - DNA, 2393 bp, Homo sapiens; identical to SEQ ID NO: 59157

SEQ ID NO: 76621 - DNA, 1689 bp, Homo sapiens
ctggggtttgggggaccgagccgctccgggttcgggatgctgaggagaccgcgggcccgcgccagcctcccacacacacacactctcccggcgcctcggccggccgggcgcggtgtgcaggggtgaggcggtgtctccaggctgaggagggacgcggaggagggtccggcgcggccccgggactggagggtgagtccctcacaaagggcggagcggggctgtcacctggagatcacggagggaagttcatccatgagctcggatttcccacattacaacttcaggatgcctaatattggattccagaatctgcctctcaacatatatattgtggtttttggtactgctatatttgtcttcatccttagtttactcttctgttgctacttgattaggctaagacatcaagcacacaaagaattttatgcctacaaacaggttatattaaaagagaaagtaaaagaattgaatttacatgagctctgtgcagtgtgcctagaagacttcaagcctcgagatgagttggggatttgcccatgtaagcacgccttccacagaaagtgccttattaagtggctggaggttcgtaaagtgtgtcccctgtgcaacatgccagttctacagctggcccagttgcacagtaagcaggaccgtggaccccctcaggggccccttcctggggcagagaacattgtatagcttaccgcaaggatcagactgttgctggacacgacgtctgtgtggagccaggaggaacacatgtggtgtctgtatggctgctctctacctaggacaccagctgccacttcttttgcctcatgaagaactcttgggccagccaaactgggaacctaggtgtctgggtcttgtgacaaccaaagcacttttgacactaccccctgcccgagagaagaggagtgggatgagcctgcgggttttgcctcaaggaaacttcatgagggtctcttactaactccattacactctctctcctggagcctcatctccatgtcaagcaggagggtaaagaagggaactaagagcaggtctttcaagccacacccccacctgcggatggatgggtttctctgtaggccatgcaggcctttgtcgcagcaaaccttcccagcagcccttgagccaagtaaaaccagcacaaccagccaccagtggttggtgaggcagtgcccacaaggctcatgttgtatgcctttgataaggccatcttggctttgagtagcagtgttcctcgtcacccatttccccctcaggattacaacacctgctatcaaatcatctaagctgaaaacatgagatgcgcttggaaaggcctagtcagaagccatttcctcttatcatttccctctcctatgcaccagtaaggcccgtccagagccccagcagggagtgggccctgagtccacactgtccctgagtgatccaggaggctgcccacatccccacatgtgcactgtggttccagtgtagctgctgtgagcccactgccactgcctcagaagggagccactgtgaacctctcgagtggctccaaagagcagtggctttttgagaatggcccatacttctggcccggctggatgaagggaatgccgaccctttggcctctccccctccttccatctcttctctctcttgccctatctctctttctacttcagaaaaaaaaaa

SEQ ID NO: 76622 - DNA, 2483 bp, Homo sapiens; identical to SEQ ID NO: 59159

SEQ ID NO: 76623 - DNA, 3568 bp, Homo sapiens; identical to SEQ ID NO: 59160

SEQ ID NO: 76624 - DNA, 1941 bp, Homo sapiens; identical to SEQ ID NO: 59161

SEQ ID NO: 76625 - DNA, 2909 bp, Homo sapiens; identical to SEQ ID NO: 59162

SEQ ID NO: 76626 - DNA, 1359 bp, Homo sapiens; identical to SEQ ID NO: 59163
  misc_feature (1)...(1359): n = a,t,c or g

SEQ ID NO: 76627 - DNA, 1084 bp, Homo sapiens
tgcagcaggggcagcgcgtgcggacccggggccggcgcgcatgcgccagcgcgacgcccttggaggggtgcgtggacctcagctacccccgcacccacgcggccctgctgaaagtggcgcaaatggtcaccctgctgattgccttcatctgtgtgcggagctccctgtggaccaactacagcgcctacagctactttgaagtggtcaccatttgcgacttgataatgatcctcgccttttacctggtccacctcttccgcttctaccgcgtgctcacctgtatcagctggcccctgtcggaacttctgcactatttaatcggtaccctgctcctcctcatcgcctccattgtggcagcttccaagagttacaaccagagcggactggtagccggagcgatctttggtttcatggccaccttcctctgcatggcaagcatatggctgtcctataagatctcgtgtgtaacccagtccacagatgcagccgtctgatgaggccacaacccctaggcccctcaggagctttgcagagaggaggacgtgtactccaggcgaggcctctggacctgtgttcctgtgccaaagtcctgtcaggctggtgggcaccaggaaaggcctgcaccctcttcctgctctcccaggaagccagctccctgagctcctgagccagccggaaactcttcctccagccttccggggagaacatccctcccattctgggaaaggaaagcagcctccagggaaatgttttctgccttcctgcttctagaaccacctcaggtactgatgaaccccacttagcacagctgaaggggtttgtgaatactcccgcctaaatcccttctacttcactcctcaggggagtgaagtgccttaagaaacaaagccctgtcctaatttatctagcttgtcagtccggtcttagagataccctctttcctgaagtgaggcgtgcctgtagaaacactatgtggtcagcctgtccccaaggagatcttgtgtctcctctccatctctgcctttgttaccagtgtgcatgtgtttgtgtgttttttaataaaatattgactcggccagttaaa

SEQ ID NO: 76628 - DNA, 3478 bp, Homo sapiens
ttttttttttttattgaatatatacaatttatttaataaattaatgtcattcaaaatacagtgccagaacatggtgcagttgaacatgctagtaatgtttgtcatgaagcacctgtgctcatgttagattggcggcgccccactactgctagtggttcccgggaataaatgccagagcagcgctagtgtatctgctcttctgcacagctagtgcagagaattcctgaacagttccccttattaatcctaacccccacacgcacacaacaggttaaaaaaaacacaccctggacaggcttaacagatctatacacaatcactctacagtaatgcttgttattaaattaagatgtaatgacctggttaacccactctaaatcttgaagatggagaactacatcagcagcagatagttatatgcatgaggccaatgttaacataatacagaaagtggaggctttttctgattaaagctccacgcagacccgcacaatgagtggctggcaattcttactgcaagcccagcaacttaagtccacacctggtaaatgaccagctgactggaagacctgtattctagatagacaagtataagttagtgaaaagagaatacatgcacctaatagtatagttagactgatcctgcagtcatagctttccctgtgtaataccataaaattatggaagatcttcctcaactagagtataggatttagacatttctataccaacacggacattagtgttaagtgcagttgaattaattacactgaaaactgtattccaggacttcagaacagaagcacgggaatgaaacacacatactaaaataacctcagcacaatttgtgatacatcacactaggaacaggaaactacttttataaatgaactttttgaactgtacatacacagggctaacaatgttagataatccagattcttatactctcatgattacacataaagtttctcaattattgaataatctatttcatattatggaagcatatctttctgtaagactcactgatatatattatactgatgcaaatattaagtagggcataaaaataaaatttatcaaagatagaattttatgtactcatatttagttctttcatagcctcttttgtttagcaaagaaaatgacaaagcacataactcaggcgtgcactccctgaacttccccactatacaggtggtagtgcaaccatttctccatccagttcaaactcttctgtcccatccgttgaaaaaagataagttggtggtttccatggagactcttcaaggcaggatggatagagtttccccacagtgcatcgaaaatctctccccaagtcccacagtacacgttcagatatatgctgccgcagagaccaccggtcaagttccaggtcatattggtaggtgacgtatttagctcgctcatttaagtgggtttctcgcataaacacacatagagaatttgagatcacaacagctctaacacaggggtcagagtacctcttagcagggatgttggctgccattttccactcatttttattcacatcataaatttccacagttactgaagacccatctacagtgccagaggggagtcttatgccggaattggtagcaatatgcaaccctccaatatagaaaattttatcaccaaaagctgcagctgaagcaaaggacctactagtctgtctcatggccatttctacccatgagtcagaccttggaaaataacagtacatgaggttcagtgtcatcacataaatgcagtcatgaaccacaactgctgcactccattgccaagcacaaggtaaagggcttaccatcgtccactcatctttctcagtgtcgtatctttctacggtcctccgattaagttctccacctacgctatctcctccaattgcatagatatagccttcacagcaaaccaaagatggctttatgcggacaaaaagcattggggtctttggaaaccaggtattttgctgtgcatcaaaccaataaaagcaattcacagttctgaaggcagtctgaagtttgcttgttttactgtgatttgtttttgtgtttttcagaggaacttgaccccctgctatgtagatatcattatcaggagttacaacggtcccaaccttatgcaaatcagctggtgggctacataacttgtaaactttttctgcttgggggctgtaacagacagaagagtaaagactacaaggattttctgaagatgcttcaatgaaaatcatcatttcctctttagtcatcccaagtcttggtttgaaaaacttgggcatggacttatacagaccttgaaccaccactgacttatcattgggtggcagaccttgaaaccaagctctctgtgttacttctgaaagtgcatcaattctgatttggctaagaacagaagacaaatactgggatcgtgattctgtgttatactctagccacagcatagcagcttctcgaacggtttcttccttttctacatttaaattgtcgctgctgagaatatctatcagtaggtcatgtgacagctgcatgaacgcgtcctgatgatacacagcagtgaacttgtgctccaccattcttttagccctctgttttaattcctcccaactgaagagatcagcaaaactcaacaatcgtacacaattctctgcatttatttttttaattaaatattctcgacaacgttgtaacacatcttctacctgtaggaagcaagctgtttcataaagctgttctacagtgctgtcattcattgccaagttacccgtgtatgcataagttattattatctgtaaggtggcagcatcgacattcctcaggtgtacatgggtttgtttgctttcacttagtccactcataaacatggccctgaaataagagctacatgttgcaagaaccatcttatgacaagggaattcagtgccctcaacaattaacactatgtcagtaaacaactgctgttcataaaacagtttcaactgttccaacaatgacacagcatattcagtattgatctgcctctcgtcttgagtggacatgactgtattccattaatatctccaggaacagattagaaaagtccgtcttactgatggaaggtcaagtgaatacttcagaaataaaggagaacctacttgctgttatctgcagcattcagtaccaagactgacacattcactaatgagtaatatcttgttacacagacttagaatcactcctaggtcatcctgtgttaattaggttcttcagagtttttcaacacagtctgcagacattgtgctcaaatctgcaattgtgcagctcatgagtgaaagagaaaaatacacgaggtagattttgtggcaacatcctatgttcagcggatcctgtggagtaaccgcgtccctcggtccggaggtgtgggatccgctccagccggtggccccgtccacactgggcccctccggacgaaa

SEQ ID NO: 76629 - DNA, 908 bp, Homo sapiens; identical to SEQ ID NO: 59166

SEQ ID NO: 76630 - DNA, 1631 bp, Homo sapiens; identical to SEQ ID NO: 59167
  misc_feature (1)...(1631): n = a,t,c or g

SEQ ID NO: 76631 - DNA, 1618 bp, Homo sapiens
gagcgccggcgcgggaccgagctggcggcgggcggcgcgcgcttccgaggcttcctgctgcttctgcccgagcccgcggcctcacgcgcgccctctcccgtgccatggcctgcaggcaggagccgcagccgcagggcccgccgcccgctgctggcgccgtggcctcctatgactacctggtgatcgggggcggctcgggcgggctggccagcgcgcgcagggcggccgagctgggtgccagggccgccgtggtggagagccacaagctgggtggcacttgcgtgaatgttggatgtgtacccaaaaaggtaatgtggaacacagctgtccactctgaattcatgcatgatcatgctgattatggctttccaagttgtgagggtaaattcaattggcgtgttattaaggaaaagcgggatgcctatgtgagccgcctgaatgccatctatcaaaacaatctcaccaagtcccatatagaaatcatccgtggccatgcagccttcacgagtgatcccaagcccacaatagaggtcagtgggaaaaagtacaccgccccacacatcctgatcgccacaggtggtatgccctccacccctcatgagagccagatccccggtgccagcttaggaataaccagcgatggattttttcagctggaagaattgcccggccgcagcgtcattgttggtgcaggttacattgctgtggagatggcagggatcctgtcagccctgggttctaagacatcactgatgatacggcatgataaggtacttagaagttttgattcaatgatcagcaccaactgcacggaggagctggagaacgctggcgtggaggtgctgaagttctcccaggtcaaggaggttaaaaagactttgtcgggcttggaagtcagcatggttactgcagttcccggtaggctaccagtcatgaccatgattccagatgttgactgcctgctctgggccattgggcgggtcccgaataccaaggacctgagtttaaacaaactggggattcaaaccgatgacaagggtcatatcatcgtagacgaattccagaataccaacgtcaaaggcatctatgcagttggggatgtatgtggaaaagctcttcttactccagttgcaatagctgctggccgaaaacttgcccatcgactttttgaatataaggaagattccaaattagattataacaacatcccaactgtggtcttcagccacccccctattgggacagtgggactcacggaagatgaagccattcataaatatggaatagaaaatgtgaagacctattcaacgagctttaccccgatgtatcacgcagttaccaaaaggaaaacaaaatgtgtgatgaaaatggtctgtgctaacaaggaagaaaaggtggttgggatccatatgcagggacttgggtgtgatgaaatgctgcagggttttgctgttgcagtgaagatgggagcaacgaaggcagactttgacaacacagtcgccattcaccctacctcttcagaagagctggtcacacttcgttgagaaccaggagacacgtgtggcgggcagtgggacccatagatcttctgaaatgaaacaaataatcacattgactt

SEQ ID NO: 76632 - DNA, 2356 bp, Homo sapiens; identical to SEQ ID NO: 59169

SEQ ID NO: 76633 - DNA, 1392 bp, Homo sapiens; identical to SEQ ID NO: 59170

SEQ ID NO: 76634 - DNA, 1181 bp, Homo sapiens
ccccccccaaaataagggttctttccaaaaattcccaggtaggtttttatacggccccctataaggaaaaaagtattaccttgcaagcccgggtaaactttggcccccccaaggattctttaaaacggcccccccttttttttttttttccgtcctccaccaatttatttgcccatccgcaggaggtgacagctcctgtggtgtctgaccacccccaactccgaagtccagacaagctgtccgcccagaatatgaggctgacttgggcacactaggggaataccccaaaggcctgaaggaggtgccactgggctgccagcacttcaggaaggcacagggccccacacccccgagatccaagctgcactggctggcagggggcagggcggggggtggcgaggacacagtcccgtgtgtcccagcaccggtgccaccctcctaagccccgggcaggcagtacgtacatgcggaccccgcctctcaaagcacgtttatggaaatgaacagggtggggtggcccgcgctcgccggtcacatgttggctcgttcccgctgcagccgcgagttgtaggcgcgagacacggtgttccaggcgtccatgtagcggtccatgcacatggcgatgcacttctgctcggagttgtccagggagcccccaggtttccctatacacttccggaaacacttgtccgtcatcctctgcagcagctcctgcgcgttggccacggcgatctgcactttcacctgctccattatgagccctgggtccagcttcccgctgccggagcccccgaaatcggagccgaagccgccctccatggctccgcaaagtcaaccggaccgaggccgcgtgcgccgactcgtaactaactgcgccggaagcgggccgcccggggcaccacgggaaacggagtccgcgcggacggggacggaggactacaactcccacacgaccgcgcgcgcccgggccattcaaggtcgcgcggggggccctccgctcatgcggaggcctggacctgccgttacctacacgagctacccgtggttgcgactccgcgggaagagggaggccctgacttggccggggagtaggggggctactacgtgcggccgaggccgatcactttgtactcacgctctgcctccagctcgtcccgaagggcctgccgcgcatgcgcacg

SEQ ID NO: 76635 - DNA, 3432 bp, Homo sapiens
ttttttttttttgggtgaccattgtttttaatttatgaaatcaagtttaacacacaagaagcctataaacactgcaatacagaaaaattaagctgctgcattgaattcttactccaaaacaatgcaaatctgcatgaggtctctcccgctatgggtgtgagtggaagagagggagacttttttacctggggttggtggtggagtgaaacacaagggtgggagaggttttgcaaatagccagagaacagaaaccaatgtgcagtcactgacacacttgaccagttaatttgcacttgtacttggctgtggctgttccggctgtggctccttcggcttctttgtcttcttcttcttctgcttggagagacagctcaaagcagactcgctcttacttggggggcagacacaagcagggggcgggcttgccagactgagtggaagagagggagacttttttacctggggttggtggtggagtgaaacacaagggtgggagaggttttgcaaatagccagagaacagaaaccaatgtgcagtcactgacacacttgaccagggcagttaatttgcacttgtacttggctgtggctgttccggctgtggctccttcggcttctttgtcttcttcttcttctgcttggagagacagctcaaagcagactcgctcttacttggggcagacacaagcaggggcggcttgccagactgagtgggatacttggttttctggctctccgtaaacagtggctgggacagcaggtggcgcagctccttcttcagaaccttcatctgcttttgtctccgacgttcttcttgctggtcagcttttcctcccttatacatgtcttcttccagctcaatctccagggcagctgctgcctgctcaatccaagagttgtgcaggcaagcctggaagttccgatactcagatttctcaatctgtcgagctaaacggattcgctccttgaccacatccatgtattttgtctgcacggggaacagtgggatatcctcatctttcttgagcgttttgtaaatcttcttaaagttgatcacatcctcaggcccaatgagcatcagactgaggccttcattggtagctcgagcagttcgaccacttcggtggacataaatctccgaggtacgtgggacctggtaatggatgacatgctggactttaggaatatccagaccccgagctgccacatctgttgccaagagaacacagtcttccagacgggcaaactgctccaggtttctgagcctctgcttctggtgcatacaggcatgcagggtcaagggcatgatatcaaggactttgaggagcccagagaggcgtttgatgcaggagatactgttggcaaacactaagctgcggcctggatactgcatcaggaagtagtacaagtagaagtctttctcatcagtctcacaatggatcttggtctctgttagcgtctccaccgtggcctcattccttgtgaggtcaatgaccttgggcttgcccctcatgccaattttctgcataaggaggtcaagtttggctgttttatccattttcttggtgtgcttcttatgaaggattcgagcaggagcctgatgcaccagggtgagtgtggcagaaaaaacaagcgtttgtctctttgggttgtattgggagtcattgagcatctctagcagctgtgagagctcagcaaaatggcctttctcaaccatccggtcagcctcatccactaccaggcacctgagctgccgaaggttcctcaaatgataatgcttttctttaattaattcccacagccggcctggagtagcaaccacaatctcaggacgacggttcagcatcctctgctgtttctgcgtggacattccaccaaccaaaatagcagttttaattcctgtaaacctggccacagcatcaatgtgctgtttgacctggacggccagctctcgagtgggagtcagaaccagtccaagcagaggacgctttggatatgccttacaggtggcgcttttgtcatccaactcctgttttagatttccagtctgctctttatcaagattttcctcctcattctcattctgtttgggaacaggtttctccctgatcagggaagaaggcccttcaccagcatcatcgtcaccaaagagcaacgcctggtctgagacagtgcctccagtcttggctctggcctcggctgcaatatcactgggcagtgcttcactctcaattacagtatcgtcaggcaatgcatcagactcagcttcagccttgcctggtgatctagtctcagctccggcctcagttctggtctctccaggtggtgcttcggtgttacttggaggaggggcagcattcctcttctgccactgcaacaccgcatgaatcattgggatggcaaaggcaagagttttcccacttcctgtctcagcagccccaaggatgtccagtttgtcacggatggcaggtgccaaggtcagggcttggattggtgtgggtgcagagaagcctagaaagctgagtgctcggagaaccggcctgggaacaaacaggtccttccaagctgacacatctgctttctgatcatgaacttcaggaatccatgtcttcgcttttttgggcaccttggcagcagtgctctgagaaggctccaacccttttttccctttatttttcttcttttttggagcagtttggaccaggttttctgatgtcatctccccagcctccggatcatcacaaaccatgtcatctccctgggcctccagctcaggatctttcacttcaaattctttctgggtactggttccttcagttgctacatttttacttttcttcaacttgatctttttctttggtgagctagactttccctcctcctcctcctcttcttctgaaacagcttgtgcctttctcttgggtgcttcctttgagaagagactggagggattcttggcaggggagaccaactggtaatctgtcaattcctcaaagcacaccaagtcatccatctgtccatctgcaaacatatttgggtcaatcttcacttccttccattttcccacaactttgattccctttgtctgaaatttgccacagcttgactgctttggccttgattttgtgtccttcaacttcatggttgctgaaaaggagatacatgttctattaggttggtgtctgagaagcagagggttctgatgtaacaaatattttctaagcaactaggccctacaaagaactgaggatacaaagatggctatcacacagttgctcccacctagagaagaacaaagaataccacagaacagacagctttgcctggaacacagggtacacatgtgatggaacaaagacatatgagctagacctggtttgaattccaaatccaacacttactgcctgtgtgaccttggatagtgccacccact

SEQ ID NO: 76636 - DNA, 1297 bp, Homo sapiens; identical to SEQ ID NO: 59174

SEQ ID NO: 76637 - DNA, 722 bp, Homo sapiens; identical to SEQ ID NO: 59175

SEQ ID NO: 76638 - DNA, 2560 bp, Homo sapiens; identical to SEQ ID NO: 59176

SEQ ID NO: 76639 - DNA, 1465 bp, Homo sapiens; identical to SEQ ID NO: 59177

SEQ ID NO: 76640 - DNA, 1048 bp, Homo sapiens; identical to SEQ ID NO: 59179

SEQ ID NO: 76641 - DNA, 495 bp, Homo sapiens; identical to SEQ ID NO: 59180

SEQ ID NO: 76642 - DNA, 1574 bp, Homo sapiens; identical to SEQ ID NO: 59181

SEQ ID NO: 76643 - DNA, 1421 bp, Homo sapiens; identical to SEQ ID NO: 59182

SEQ ID NO: 76644 - DNA, 883 bp, Homo sapiens
ggggctcctggctgtgggtgtggtactgaggcttcagcgggtgccgcccgcctagagggagtggagcggtgagcacgtcaggggtggggggcgcaggtcaagctttcaccagtttttaattctttgatggggtaaatttgagcaattttctcgacttgtcgacattcgttattaactgagcaggaatcaggagaggaacccggtcctctccacacagcccagcagagagcctacgactagatttgcatctttacgtcctgcgcggaggctgctacacacatgcagaagtcatgctggtggcctggacagtgaagggagagaagtggatttgggagacatttaggagatggcaccaaaagcgaagaaggaagctcctgcccctcctaaagctgaagccaaagcgaaggctttaaaggccaagaaggcagtgttgaaaggtgtccacagccacaaaaagaagaagatccgcacgtcacccaccttccggcggccgaagacactgcgactccggagacagcccaaatatcctcggaagagcgctcccaggagaaacaagcttgaccactatgctatcatcaagtttccgctgaccactgagtctgccatgaagaagatagaagacaacaacacacttgtgttcattgtggatgttaaagccaacaagcaccagattaaacaggctgtgaagaagctgtatgacattgatgtggccaaggtcaacaccctgattcggcctgatggagagaagaaggcatatgttcgactggctcctgattacgatgctttggatgttgccaacaaaattgggatcatctaaactgagtccagctgcctaattctgaatatatatatatatatatatcttttcaccataaaaaaaaaa

SEQ ID NO: 76645 - DNA, 1827 bp, Homo sapiens; identical to SEQ ID NO: 59184

SEQ ID NO: 76646 - DNA, 1393 bp, Homo sapiens
aggggcgctccggccagtgattggctggaggtttgttaactattcatgagggggcgggccgagcggggcggcctttgttaagcagcgagggcgcgaccgggggtactctgctgccggcttctcggagcggcgctgggcgaccagagcagggtcgagatgtcctacatcccgggccagccggtcaccgccgtggtgcaaagagttgaaattcacaagctgcgtcaaggtgagaacttaatcctgggtttcagcattggaggtggaatcgaccaggatccttcccagaatcccttctctgaagacaagacggacaagggtatttatgtcacacgggtgtctgaaggaggccctgctgaaatcgctgggctgcagattggagacaagatcatgcaggtgaacggctgggacatgaccatggtcacacacgaccaggcccgcaagcggctcaccaagcgctcggaggaggtggtgcgtctgctggtgacgcggcagtcgctgcagaaggccgtgcagcagtccatgctgtcctagcagccaccaccatctgcgactcctgcctgccgcctctctgtacagtaacgccacttccacactctgtccccatctggcttctgctgaccgctgggccccagctcagaagggctatagctggtcccagaggcctggcctggccttccttcccttctcccatccctggcctggggcctctgggaccagctttctctcctggacaccgaggattggaaataagggcctggagctgagtagtagccagtctgctgtgaccacaggctcaggtccgaccctgctgcttggccacagcagtggctgggcaagtgggaaccactatctcttgggagcccccaaaagctgggaaatgctggaggaaccaggcctttcccgcttttgcctggctgcagggttcggctccgcccctgccccccagccctcgtgtgtccacaccgcagtgcctctgcccctcgggggactggacacacatcctgccagaggcgctacgaagctttgcccagatgaagccaggtgggctccgcgttcactcccactctcccgaggggtgctggcctccccagggtttgccttcttacggatttagacgaggttcgaggctcacctatcagggcagctctcaggattgtcattttcctctttgcctgtgggtttaacttttgtatttttttaatcacaagtttgatacaaaatgtttttatcgtactctttggagatgcccattctacttttgaatttagcttttactaattcgcatctggaagctcagcaagtgcacaagccttactttggttaccgtggaaaccactgccgcccctccccgatgtggtgcgctcaataaaaatgctggaattcaaaaaaaaaa

SEQ ID NO: 76647 - DNA, 3398 bp, Homo sapiens
ttttttttttttgtatttcttagtgcttttgattttaattcttttggcatatctaaatgtcagaaagtgaatatatacatacagaattcaaaacaccttcctaaaatggttattattggccagtcatttacatctttattttgaaagtctgaattgtcaaatagttctaaagtgcattcttgcagctaataaatagcagcatttgtttataaaaccttaagaaattcagaccagggctggagaagtcacaataaaaaatcagacatgatctagatatagtcttccttaatcatctaagacaaacacttgtgtgaattagtttataagtatacatgaaatatattttaaaaaaacattataaaaaattcatacagtgatgaaaaaaggagtcttcctctgctattaatattaaatatggcaaaacatacactatacaaggtttgttgaatactagttgtctttggaaccatagggaaagctttgctctgggtcagtgtatgatgtagctgaggtccgtgattttcaacaaagctggagttctacaagatgacctggaagactgcttctggcatggctttcgagaaatcatccacacaaatgaaaatgttctttcagtactgggactgtcagttcatggctttttgcgcttgggttgtgcgtgatgctgatatccaggtcccagctgggatcctgctctcatctccacagccacagaacaccttgtttctacatcggtccattcagactctgcaccatctggttgggcaggtgctactgtggaagatcttcgttttcgactaccatttggtgattcttgctttaaagtctcaatatcagtaaactgaacagattgtccaccaccccttgttttataaatatcacccttaattagtttagtttcaatctccccatcggaggctagttcctggtgggtcagcatgtacttctcacacttagctagtgccttttcatttgcaacagatactgtgatggcatgagggacatgtggctgcatgactgtttcagtttgcatgttagaggcgggcttatgatctacccatctgtctcctgcagagcgtgatcgtctgtgtcggagacgaattggtggtgcgttctgatcaggttgaaagagtaaaggcacaggtgatggagaaacagatctttgagtaactttttctcgatctcgctcccgagagggtctctctggcttctcagttttaggttcagtaacaatagccttcagttgtttcagcttttcatctttaacccagagtttattctgcatctccagctgtttggctgccactctacgctcacattctttctcccacttcattgtcgtttctgtcaccatgccttgcaacctggcttctaatctgcgtttgtcagaaaactgtcgctgaagtttctggttctgagtttcaagttcctgttgcaaattgcgtttatcttcctcatagatagtagttgttttctctaaaatctcaatcttatattctaaagttttgtttttcttttccagtcgttctatttccaatttctgtcctgagatcatcttctccttttcatttagtttcccttgcatgtggttttctttacttaaaacagcattgtcaaattcttgtaacaaagctttaaaagcattagattgtttgttaaactcatcaatcatcatttgtcgtaagttatgtcgtttctctaaggcttcaatcagccttggaagtgtctgctcatcgttgatatccaaaatttcgcatgacggcaaaggtggaaaactctgcaaaaccacgtcagtaaccaatggttcatttccaagtgggacctcgaggctggtttctgtatctcctcccaggcgttaaaccacatattgccttgtctacaggtcttgctacttcaacttcttgagtcacttccgcaaatctcatgacttgcaagttttcttcataatcttcagccttggggttcacacacacgatcatccgcacttttccttccccatcaaagtagttcttgaacagatgggttaactttgaatctcgatatggaaccatcttgttagttccatacatttggttctctcttaggacatccatacatgttcttagcgtcattagtgactgattaatattaccagcttcacgtaatctgttcccttctgctctggtccggttagttctttcacttccagcaagatctaccaaggacaactgacttatagtgatttgttctttttcctgtaagacattgtctccatctgcatccaagggagcctgaactaatttaatgttgaacacgctatgggaacggctggactcacgattcaaatgggtattagcaatacgtctctttttctggcctctccagaaaacttcaaaagcctcctcagtagatttcacttcaacttctgtacatcctgcaacatacatgttatggttcttaatcttcacgaagcaatttagattgtggaggtttgggtttatgggatcaaacggcacctcttccaatagatcatatatgtaattattatatatttcaatataagagacaaatacaccatagacactatcttcatcaacctcttctgctttgcagaattcttgtacagttatcatatctgcaaactctggatctacttgtcgtttgctagaagaagtctttggattgggcatagcttctcttttctgacgttctaataaggcatcaacctcacactgtatatccatactattcctatcattagatttgaaaacatatcgtttagcttgaaatgaccctatactgttaaagatcatgtccaaacaacgaggaagcagccctccttcccctggagaaccagtcattgtgtgagtttttccacttcccgtcacaccatatgtaaaaagaagaccatttttgccatgaatgaggtcattgaccaagggattagccacaacatcaaagagttccttctgggtggtgtgagtgccaaatacttgtttaaatgaatactgagtctccttatagtctccatttcggttgagtctgtagccctcaggagtatgaagctgaacagttgtattattgatcacttctatgcaacactcttgatcaggaaagcccagtgggcgcaccctacagtataccccaactgggtctttaaggttcgtttgggacccttttttcacggtaggtttccggggtgtcttagctctcgctgacttcatggcagcaggctccacgccgcccaaacgcgcatgcgggacggctggctggcgaagactgcgggacgttaggaccggcagcaagaactagaacttcgcggctaaggcgcggtgctctgcgaagccggcggcgacgctaagagcccaggtgagctcccgcctgggcgcattttcaaacgggccaatcagcgcccgtcc

SEQ ID NO: 76648 - DNA, 1001 bp, Homo sapiens
tcccaagcactcatctctaggagaccagatgtcaaaacacaaccacctctggcaacatttggaattataggatgcattcccatgtaaactggcattaagaaaaacaaaattgcactaaccaaaaataacccaaatttaaggaccagaagcataagccatgaatttactatctcaggtagactgagcatttggataattctcattctccagaaatcccacaggaaggaaaaaataaataaatttatatatattcatataaagacttttatctattgtgcaaagagagggtcatctggctccccagaaggttctcaaccccatcaagactgtccattttacatctctagctccagttcttctcagagagtaaaagtgctccaaaggcctgtgatcatgggtactgattaagggctgcagactcttcagatccagttaaatccctggtgtttgagctgtgtgggagctgtggttgcttgcttcctggctttgcctgaggtcctgccgcaaaccctgcagcagctggtttaggagtgtaaggtggctgtctctgcgaggcagaggcaggggtgggaggcaattccctttatactcgatcactgccatcttggcccgatccaaactccgatttgggatctgcagcattcttgtgtagcccccagtttgatctttgtaccgaggggccagtacttgaaacagctttgggatcaaatccttctctgtgagccagaagtcagccatgcgcatggctcgttcgttagtgtctcccagcttcccatagtcgatgagcttctccgcgtagcccctcatttcgtccacacgcgcccatggtgcctcgatgcgttcgtgccgcaccagccctgtgagcaagttccgcaacagatggatgcgggactcgggaccgaggcccatacggcgaaatacgcggccatgggagatcgctgcagcgaccgacagccgcatgtttccaacttctgcccgccccttggaggccggctcgtgcc

SEQ ID NO: 76649 - DNA, 1656 bp, Homo sapiens; identical to SEQ ID NO: 59187

SEQ ID NO: 76650 - DNA, 545 bp, Homo sapiens; identical to SEQ ID NO: 59188

SEQ ID NO: 76651 - DNA, 1110 bp, Homo sapiens; identical to SEQ ID NO: 59189

SEQ ID NO: 76652 - DNA, 1589 bp, Homo sapiens; identical to SEQ ID NO: 59190
  misc_feature (1)...(1589): n = a,t,c or g

SEQ ID NO: 76653 - DNA, 1994 bp, Homo sapiens; identical to SEQ ID NO: 59191

SEQ ID NO: 76654 - DNA, 1491 bp, Homo sapiens; identical to SEQ ID NO: 59192

SEQ ID NO: 76655 - DNA, 1725 bp, Homo sapiens; identical to SEQ ID NO: 59194

SEQ ID NO: 76656 - DNA, 1032 bp, Homo sapiens; identical to SEQ ID NO: 59196

SEQ ID NO: 76657 - DNA, 1503 bp, Homo sapiens; identical to SEQ ID NO: 59197

SEQ ID NO: 76658 - DNA, 1622 bp, Homo sapiens; identical to SEQ ID NO: 59198

SEQ ID NO: 76659 - DNA, 819 bp, Homo sapiens
ttttttttttttataaaaacttcctctttaatcaaggcttttaaacatgaacagatttcttgaaataaaatggaaagtttccagtacactgaaacataaatcccgcaagtcaccacacatacaacacccggcaggaaaaaacaaaaacagcaagtttacatgatccctgtaacagccatggtctcaaactcagatgcttcctccatctgccaagtgtgttctggatacagagcacatcgtggcttctggggtcacactcagcttagcgctgtgcggtccacagagcactcatctggctgggctatgggtggtggtggctctacttaagaagcaaagcagttaccagcacattcaaacagtgtattgaacatcttttaaatatcaaagtgagaaacaagaaggcaacataataatgttatcagaaagatgttaggaagtaaggacagctgtgtaaagcttgaggctgaaaagtagcttgccagcttcatttctttggtttcttgggtagtgggcgccggaacagcaagatgtgaggttctggttcatggatcatataatggacccatccctgactctgctgaacgccaagattcctccattcagattcagacatcagatgggttttagggaccagcttggctatgtccttgggcagcatgacatgtcgatactcaaactcctcgtcgtcgtatttgtccgaatagtaaatttgtttgtgcgacatgatcgctcggtttgctagccttcagccccgcgccgccaacctccaagcaactccctatagcaccccctctaccccctctagagccaaaaaaaaaa

SEQ ID NO: 76660 - DNA, 1460 bp, Homo sapiens; identical to SEQ ID NO: 59200

SEQ ID NO: 76661 - DNA, 3407 bp, Homo sapiens; identical to SEQ ID NO: 59202

SEQ ID NO: 76662 - DNA, 2571 bp, Homo sapiens; identical to SEQ ID NO: 59203

SEQ ID NO: 76663 - DNA, 1872 bp, Homo sapiens; identical to SEQ ID NO: 59204

SEQ ID NO: 76664 - DNA, 1103 bp, Homo sapiens; identical to SEQ ID NO: 59205

SEQ ID NO: 76665 - DNA, 1258 bp, Homo sapiens; identical to SEQ ID NO: 59206

SEQ ID NO: 76666 - DNA, 791 bp, Homo sapiens; identical to SEQ ID NO: 59207
  misc_feature (1)...(791): n = a,t,c or g

SEQ ID NO: 76667 - DNA, 1770 bp, Homo sapiens
tcagatcgcccagagtggcgcggtatcgccacttggagaccaccgcgaatgaagtttgcattttcctctgttcttgagcccagcttcttctcgtctcccaccccagcttcccggcattggaagaagggaccgtcctcttccttgtcttggccacccaaatcctggtatcgaaagggttgaacggaccggaagtgtgcagcagcgacgggtccccagctaatcgacgccggaagtagcaattactagacaagcattccgccgccggcttcgctatggcggcaattcccccagattcctggcagccacccaacgtttacttggagaccagcatgggaatcattgtgctggagctgtactggaagcatgctccaaagacctgtaagaactttgctgagttggctcgtcgaggttactacaatggcacaaaattccacagaattatcaaagacttcatgatccaaggaggtgacccaacagggacaggtcgaggtggtgcatctatctatggcaaacaatttgaagatgaacttcatccagacttgaaattcacgggggctggaattctcgcaatggccaatgcggggccagataccaatggcagccagttctttgtgaccctcgcccccacccagtggcttgacggcaaacacaccatttttggccgagtgtgtcagggcataggaatggtgaatcgcgtgggaatggtagaaacaaactcccaggaccgccctgtggacgacgtgaagatcattaaggcatacccttctgggtagacttgctaccctcttgagcagctcttctgagatggccccagtgaaccagcttctagatgacatagaatgacatgtaatgctaaattcattttggctttgcaagtcatgaagcttaggaggcctggcatcttgggtgagttagagatggaagtacattttaataggatgcttcttttctcttcccccagtgcctaggttgccagagcatttgcacaaatgcccctgtttatcaataggtgactacttactacacatgaaccataatgctgcttcttgtgcatgtctgctctgatatacgtcgaacaatgtagcagccactgtcatttctcagtggttttgcctaaccaaacttcttcctaaggagatttatattctggcctacacagcagtccttgatggctgacagccacagaattccaaaccaagtagtgtctgtcagccctcttaactctgtgcacgccctatttcagtcttttacatttgttcttctagggaatgtatgcatctctatatatattttccctctcaaaaccagaacatcaacagtgctgtttctgacacttcagacatcccacgcaaagccacattgaatttttgccaaatgaaaaacacatccaacaatcaaggtttctaagaaggtgtcaagtggggaataataataatgtataataatcaagaaattagtttattaaaaggaagcagaagcattgaccattttttcccagagaagaggagaaatctgtagtgagcaaaggacagaccatgaatcctccttgagaagtagtactctcagaaaggagaagcgccactcaagttcttttaacccaagactttagagaaattaggtccaagatttttatatgttcagttgtttatgtataaaaataactttctggattttgtggggaggagcaggagaggaaggaagttaatacctatgtaatacatagaaacttccacaataaaatgccattgatggttgaaattaaaaaaaaaa

SEQ ID NO: 76668 - DNA, 2061 bp, Homo sapiens; identical to SEQ ID NO: 59209

SEQ ID NO: 76669 - DNA, 3446 bp, Homo sapiens
agggcagttccggcccaggggcggggattatgttattttcccaaaagccccacctcgcctcatccgggcgggagagagggaggtctcgcgctttccccggggttgcgtcccgccccgcaggctgcgcgcaggcgctgacgagccgctcgcattctacgtaacggacggcggaggctacgtgaagagaggcgcggcgtgactgagctacggttctggctgcgtcctagaggcatccggggcagtaaaaccgctgcgatcgcggaggcggcggccaggccgagaggcaggccgggcaggggtgtcggacgcagggcgctgggccgggtttcggcttcggccacagctttttttctcaaggtgcaatgaaagccttccacactttctgtgttgtccttctggtgtttgggagtgtctctgaagccaagtttgatgattttgaggatgaggaggacatagtagagtatgatgataatgacttcgctgaatttgaggatgtcatggaagactctgttactgaatctcctcaacgggtcataatcactgaagatgatgaagatgagaccactgtggagttggaagggcaggatgaaaaccaagaaggagattttgaagatgcagatacccaggagggagatactgagagtgaaccatatgatgatgaagaatttgaaggttatgaagacaaaccagatacttcttctagcaaaaataaagacccaataacgattgttgatgttcctgcacacctccagaacagctgggagagttattatctagaaattttgatggtgactggtctgcttgcttatatcatgaattacatcattgggaagaataaaaacagtcgccttgcacaggcctggtttaacactcatagggagcttttggagagcaactttactttagtgggggatgatggaactaacaaagaagccacaagcacaggaaagttgaaccaggagaatgagcacatctataacctgtggtgttctggtcgagtgtgctgtgagggcatgcttatccagctgaggttcctcaagagacaagacttactgaatgtcctggcccggatgatgaggccagtgagtgatcaagtgcaaataaaagtaaccatgaatgatgaagacatggatacctacgtatttgctgttggcacacggaaagccttggtgcgactacagaaagagatgcaggatttgagtgagttttgtagtgataaacctaagtctggagcaaagtatggactgccggactctttggccatcctgtcagagatgggagaagtcacagacggaatgatggatacaaagatggttcactttcttacacactatgctgacaagattgaatctgttcatttttcagaccagttctctggtccaaaaattatgcaagaggaaggtcagcctttaaagctacctgacactaagaggacactgttgcttacatttaatgtgcctggctcaggtaacacttacccaaaggatatggaggcactgctacccctgatgaacatggtgatttattctattgataaagccaaaaagttccgactcaacagagaaggcaaacaaaaagcagataagaaccgtgcccgagtagaagagaacttcttgaaactgacacatgtgcaaagacaggaagcagcacagtctcggcgggaggagaaaaaaagagcagagaaggagcgaatcatgaatgaggaagatcctgagaaacagcgcaggctggaggaggctgcattgaggcgtgagcaaaagaagttggaaaagaagcaaatgaaaatgaaacaaatcaaagtgaaagccatgtaaagccatcccagagatttgagttctgatgccacctgtaagctctgaattcacaggaaacatgaaaaacgccagtccatttctcaaccttaaatttcagacagtcttgggcaactgagaaatccttatttcatcatctactctgtttggggtttggggttttacagagattgaagatacctggaaagggctctgtttcaagaatttttttttccagataatcaaattattttgattattttataaaaggaatgatctatgaaatctgtgtaggttttaaatattttaaaaattataatacaaatcatcagtgcttttagtacttcagtgtttaaagaaataccatgaaatttataggtagataaccagattgttgctttttgtttaaaccaagcagttgaaatggctataaagactgactctaaaccaagattctgcaaataatgattggaattgcacaataaacattgcttgatgttttcttgtatgtctacattaaacttgagaaaaagtaaaaattagaacactgtatgtagtaatgaaatttcagggacccagaacataatgtagtatatgtttttaggtgggagatgctgataacaaaattaataggaagtctgtaggcattaggatactgacatgtacatggaaaattctagggacaggagcatcattttttccttacctgataccacgaaccagtgacaacgtgaatgctgtattttaagtggttgtatgtttattttcttgagtaacaaatgcatgaaaaattaatgcttcacctaggtaagatcattggtctgtgtgaaatcacaaatgttttttccttcttggttgctgcagcctggtggatgttcatggagaagctctgttctctatattatggctgtgtgccgttgcttctccctctgcttttatcttttccacagttgaggctgggtatgttctttcaaagaaatggccatgaatatgtgtaagtatacttttgaaaatgagctttcctaaactattgagagttctttccacctcttgcggaaccaactcttggaggagaggcccatgtatctgcacgagcacttagcttgttcagatctctgcattttataaatgcttcttaccaagaaagcatttttaggtcattgcttgtaccaggtaatttttgccggggatgggtaagggttgggttttctggtgggagtggggtggtgggtattttttgttgatgctttagtgcaggcctgttctgaggcaataacaagttgctgtgaaaacagcatgtgctgctgcctttgtaactgcatggaaacttttcacatgggtttttctccaagttaatacagaaatatgtaaactgagagatgcaaatgtaatatttttaacagttcatgaagttgttattaaaataactaacataaaacttaattactttaatattatataattatagtagtggccttgttttacaaacctttaaattacattttagaaatcaaagttgatagtcttagttatcttttgagtaagaaaagctttcctaaagtcccatacatttggaccatggcagctaattttgtaacttaagcattcatatgaactacctatggacatctattaaagtgattgacaaaaaaaaaa

SEQ ID NO: 76670 - DNA, 2142 bp, Homo sapiens; identical to SEQ ID NO: 59211

SEQ ID NO: 76671 - DNA, 752 bp, Homo sapiens; identical to SEQ ID NO: 59212

SEQ ID NO: 76672 - DNA, 1241 bp, Homo sapiens; identical to SEQ ID NO: 59213

SEQ ID NO: 76673 - DNA, 1481 bp, Homo sapiens; identical to SEQ ID NO: 59214

SEQ ID NO: 76674 - DNA, 2303 bp, Homo sapiens; identical to SEQ ID NO: 59216
  misc_feature (1)...(2303): n = a,t,c or g

SEQ ID NO: 76675 - DNA, 741 bp, Homo sapiens; identical to SEQ ID NO: 59217

SEQ ID NO: 76676 - DNA, 2459 bp, Homo sapiens; identical to SEQ ID NO: 59218
  misc_feature (1)...(2459): n = a,t,c or g

SEQ ID NO: 76677 - DNA, 4540 bp, Homo sapiens; identical to SEQ ID NO: 59219

SEQ ID NO: 76678 - DNA, 2332 bp, Homo sapiens
ttttttttgtgatgcagcatcaggtgcttttaaatcagattaattcacaataagtgatattgcaaagggtctgggggctgtacatgggcaggggcttggggagctttgtacatggggctgggaaacaagggaccctccaggtggaagggtattttttaataaaaaaaataatggagctacaaccaccccctcccccctccccgattaaaaagacacaaaaatagacgtctctgaggtaaacggggagcctggggcttaagggtgtttaaagggcttcacaggtgccagagcttagaggtgtcacaggcaccggggtggctcctgcatcagttggtagaacagcacgtagccctcgctggatgccacctggttttcactgacaggggagacacgagagtcattgtagacatgccaaccagtctggcaccggcacagggctgtgtagtggccatagtggacgctgcctgagtggttgcaaagggcatacagctggtatacaggacttccggctttgtcactggcaaagtcccctaggctcagtcgctgcagtggaaagtctacacctactgaactttttttgatggagcctcgggaggcagaaaatcgattcagatggagcacgaggattcgagggaatctttgtactgtcaactttttggtacttcgagttttctgccgacatcggtcacacactggggcattctccgactctagctcttcttccttagtgaaaaggttgaaacaatcccgcagagacaccttgcccccagcaaatcctttcttggggatgggcagggacaggtcacaaaaaacctcgaaggtcgtggagcgatacccacaggcctggcacttgagacaacttttcaactggcccacaaacaggtccacaatcttgctgtcctctcgctccaggtaacgtttccacattaggttggctcggtcatcatcacttaactcaggttcttctagcagagcccctcctcggcggggtggagagggaactggaccattggcaagtatcggtggagcccggcggcctcggcggttgatttcaaggtgtagccgctccatgaggagcttcaggaactcttgggcatcctgctggctgtatccagagaaggagggaacatatttctggaagacagctcggaatcgagtaggattcacagcttcgcaggagtcagggtgccagagggcaccaatcacatctgcaaaggcttcagtgagctcttgggctcggcctcctccaggcacctcttgccggaagtcccttctcagacagaagtcccgaagaggtcgagtgctgctcagacactgcagcacagcattcaggaagcacgtgtttcccaggtttcgaaggccaacatgaccagagcccagaaggagtgtgtgatgagccatcttgtcatcagagtagaaaggctcagaggaccgggcggatatcatgtggaaggagccatgggaagcagggggctctgtccgtatgctgaacagggtagggggtccaggaaagccccctaggcggcggagagaagtgctacgtctcaaagtgggtggctcaggccggagggccaagcggctcagtgcagccccaagctctccggtgccacggtgccctcccaaggcaatccccattggacgcaagtccccactgctcacagacttggaacgggctaagttggtccgagatgggagaggcaaagccactgttgggggtggtgagccaggcaggggaaccccatgatctgctcgaagggggcctctgggacgagggcctgaggtccgtccccgtcccagctccagtttcttgagccgttcatcaggcagacctggccggggaggcagaggtcgtaacatggggtttggcccagaggctgggtttctgcgctccttgctgcgggccctgggggcaaatggtagcttggatcccactcggggctggatattaacaggtggctctcgggtacggcccaggcggtgctcagaggcctggggcattgtggacaccacaggctggacccacaatcttgctgtcctctcatttccacattaggtggttggctcagtcatcaccactaccacatcaacgaaagtggggagcagtatacgcactgagggcaggaaccagatctatcgaatcagccatcgtatccccagtacctgtcccccagtgaggcggcgggagaggccagccagggccaggccccagttcagggccaccccctactacccccgtgcagcccccccgtgggcccggctgcagctttagccgcagccgttgcccagatcgctccagccgcaggggccgccgccatctttgcggacgcgtggg

SEQ ID NO: 76679 - DNA, 895 bp, Homo sapiens; identical to SEQ ID NO: 59221

SEQ ID NO: 76680 - DNA, 1591 bp, Homo sapiens; identical to SEQ ID NO: 59222

SEQ ID NO: 76681 - DNA, 2506 bp, Homo sapiens
ttttttttttttgcacagccaaactaccttgttttattggattttgagtaaaaacatgaaccatgtcaaagtttccaggcagactcctaaaaagcattagcagatctggacccaggcaggccagggacagggaggtccctctatcaggttttgaggcgggttgagcgccgaggtagtgggggctgggagggtcgagccgtcaccttgctgggtgttttgtcctgggtgttgggctgggagggtgggcggccgctggaggtgaacagggctgtcaaagcgttccgggcgttgattgcgcaccggcggctcacaggtcgggtggtggggctggggttcttggccgccttgtatttctgcaggttctcaaagtggcccagggacttgcagtgggagagctgtgcccctgagttgctgtgatagaacttgtggcagatgcggcagatatagcccatcacgggcaccaggaagtccacaccatatgcagtattggggctgtaggtctccgagcccttccactcctctctggatatatctctggacctcacctgcttgcagagttcctcctcaacctcgatctcttcttcatcctcatcatcctcttcctcttcttcatcaccctcgaagcaacccacagcgtccactgtaatgaagtggtcctcatcttggccagcaatttctttctcaagcgacttcagctccttggctttgtccttatgcccctgggacttcacgtgctccacaaacttgcgaggggttttgaagtagcggttgcaaacggtgcagaagggtcgcaaggattgtttggcaatcttgtggtcctgtgtcctgcggtgttggatcaggtcccccatgtagtagagctggcaggtgttgcaccagcgccttggtggaggctcctcatcctctgtctccaggacgtcccggggcacgggcagcagggacaggaggcaggcttggctcatgtgctggatctcccctagccgctgctggtgctgaggctccgacatgtggtcctggaactcctgctggctggagcagctggccttgcagatgtagcagaagaactggagggcctgcttagagggagtgctggtagccgcaggggtggaggagacggagtcactggggcgggggacaggtgtcaggggtacagtgctaaaggcccggctgtcactgctctgcagaatggtgaccttcagggagcccccggcgccccatacccctggcatctctctcgctctgttttcacattctcccacatctaggccacaggccgactcattctgaatctcttccatgctgacttgggtgcccacaggctctggcaaggtcttttccatgcctccaccagcttctactgcatcaggtggcatctccagcccgcagacatgaaccacaactggtgtttgctctggagccagcaacgacacctgcggctgggtgtgaggctgctcatgggtctgctctggtggctgtactgacacctgcgctggaggatgctcctgtggctggacgcttggctgtgcctgtgtgtggacctgtggatatgtctgtgtctggacctgcttctgcagctgcagctgcacctgccttgggggctgtgaatgtgcctggggctgcacctgtggctgcacctgcttcagcggctctgcctcctgctgcagctgcacctgccttgggccctgtgaatgtgcctgtggctgtacctgtggctgcacctgcttctgtggctctgcctcctgctgcagctgtggctgcacctgcttctgttgcagcactaagtgctctggagaggtctgtgtttgcgcctgcttctgcagctttggctgcacctgggtgtctgtggatggtatccgcggctgagtctgtgactgcacctgggcctggacctgcaggacccgtggctggaatcgtggcagcacttgggcttccagggcctcaggcagcaggtctggtgtctgtgtctgtttcggtactgtcatccgggcctgcggctgggccttcacctgtaactgccctggaggttccttctctgtgggctcttctgagctcctcaatctctttgctggcagctcggacgcctcacaaggctcaggctcaggtgctggagtgcgtttttccttggcgatgtcctctgggcagggcggtaaatcttggtcttctggtgtgtccatccggggctctgcggcttcctcagacccctctggggggtctgacttgtcttccacaggcattgtttgagaagaagaatcctttcgattgggggtggtagaggaggaggtccgggcctgtttctgggggttccgtcctgaaaggttgaactgggaagggttcatggggaccccaacaggaggaggtcccagcaaggactggcgagtggcctggggaaagaactgttgcaaatttggagtggccagttgtgggggtgtgaggctgggggctgcgaggcctggggatgccatgccatagcctcggaggttacccagtgttgctgtgggcatggtcc

SEQ ID NO: 76682 - DNA, 2061 bp, Homo sapiens; identical to SEQ ID NO: 59224

SEQ ID NO: 76683 - DNA, 4874 bp, Homo sapiens; identical to SEQ ID NO: 59225

SEQ ID NO: 76684 - DNA, 1848 bp, Homo sapiens; identical to SEQ ID NO: 59226

SEQ ID NO: 76685 - DNA, 2737 bp, Homo sapiens; identical to SEQ ID NO: 59227

SEQ ID NO: 76686 - DNA, 639 bp, Homo sapiens; identical to SEQ ID NO: 59228

SEQ ID NO: 76687 - DNA, 1628 bp, Homo sapiens; identical to SEQ ID NO: 59229

SEQ ID NO: 76688 - DNA, 2090 bp, Homo sapiens; identical to SEQ ID NO: 59230

SEQ ID NO: 76689 - DNA, 1335 bp, Homo sapiens; identical to SEQ ID NO: 59231

SEQ ID NO: 76690 - DNA, 2832 bp, Homo sapiens; identical to SEQ ID NO: 59232

SEQ ID NO: 76691 - DNA, 3028 bp, Homo sapiens; identical to SEQ ID NO: 59233

SEQ ID NO: 76692 - DNA, 1927 bp, Homo sapiens; identical to SEQ ID NO: 59234

SEQ ID NO: 76693 - DNA, 4697 bp, Homo sapiens
cgacgcatcgcgcgatggcgcgggcgggacagtgcttgtgaaactgaacacaacaaaagtatggatatgggaaaccaacatccttctattagtaggcttcaggaaatccaaaaggaagtaaaaagtgtagaacagcaagttatcggcttcagtggtctgtcagatgacaagaattacaagaaactggagaggattctaacaaaacagctttttgaaatagactctgtagatactgaaggaaaaggagatattcagcaagctaggaagcgggcagcacaggagacagaacgtcttctcaaagagttggagcagaatgcaaaccacccacaccggattgaaatacagaacatttttgaggaagcccagtccctcgtgagagagaaaattgtgccattttataatggaggcaactgcgtaactgatgagtttgaagaaggcatccaagatatcattctgaggctgacacatgttaaaactggaggaaaaatctccttgcggaaagcaaggtatcacactttaaccaaaatctgtgcggtgcaagagataatcgaagactgcatgaaaaagcagccttccctgccgctttccgaggatgcacatccttccgttgccaaaatcaacttcgtgatgtgtgaggtgaacaaggcccgaggggtcctgattgcacttctgatgggtgtgaacaacaatgagacctgcaggcacttatcctgtgtgctctcggggctgatcgctgacctggatgctctagatgtgtgcggccggacagaaatcagaaattatcggagggaggtagtagaagatatcaacaaattattgaaatatctggatttggaagaggaagcagacacaactaaagcatttgacctgagacagaatcattccattttaaaaatagaaaaggtcctcaagagaatgagagaaataaaaaatgaacttctccaagcacaaaacccttctgaattgtacctgagctccaaaacagaattgcagggtttaattggacagttggatgaggtaagtcttgaaaaaaacccctgcatccgggaagccaggagaagagcagtgatcgaggtgcaaactctgatcacatatattgacttgaaggaggcccttgagaaaagaaagctgtttgcttgtgaggagcacccatcccataaagccgtctggaacgtccttggaaacttgtctgagatccagggagaagttctttcatttgatggaaatcgaaccgataagaactacatccggctggaagagctgctcaccaagcagctgctatccctggatgctgttgatccgcagggagaagagaagtgtaaggctgccaggaaacaagctgtgaggcttgcgcagaatattctcagctatctcgacctgaaatctgatgaatgggagtactgaaataccagagatctcacttttgatactgttttgcacttcatatgtgcttctatgtatagagagctttcagttcattgatttatacgtgcatatttcagtctcagtatttatgattgaagcaaattctattcagtatctgctgcttttgatgttgcaagacaaatatcattacagcacgttaacttttccattcggatcattatctgtatgatgtggtgtggtttgtttggtttgtccttttttttgcgtttttaatcagaaaacgaaatagaggcagcttttgtagattttaaatgggttgtgcaagcattaaaatgcaggtctttcagaatctagaactaggcataaccttacataatactaggaaaattatgagaaaggggaaatttttggttaaataagagtaaggttcaaacacaagcagtacatgttctgtttcattatgctcgatagaaggcttttttttcacttataaggcctgattggtcctacccagcttaacggggtggggtttttttgtttgttcagacagtctgttcttttgtaaacatttttagttggaaaaacagcatctgcattttccccatcctctacgttttagagaggaatcttgtttttgtgtgcaacataagaaaattatgaaaactaatagccaaaaaacctttgagattgcattaaagagaagggataaaggaccagcaataataccttgtaagttgcttttgtttgtaaaatctgagcttatagttttccttagtgagtaaattcataaggatgggaacatttaaattaagttaatgggcctttaaaaaaaaaaaaaggaaacactcatacctgtagttggaggatgaatactggagacgggttaccaatgtcaggttatactaaaactaaatcagaaagtctgaatgtagcacataatggttctcttctgttgtccaaggctgtaaaatggacagccttgtcacacctccccggtgctgttttacaacgtgagggtagacgctgtcagtaacccagagggaccaggccttcctaggttttctaggcagtcagctgttaaccactcacttagtaaatgtcataactacacctgctccaggaccaatcagtgaaacctgctcggaattaaaggcttcctctgggtgcctgctgaacaactgagctcatgtcatgggcatgtggtggtttctctgttgcctgaaagagccattaaagtcagtcgtgcgtgaagcatctctcttctaaaggatgtgtatttccataaatgctttctgaggatccggtacaaaatgatttcccaaagttctgaagtgccttgagaacatgtgggtccgagtgttataacagactcctcccccgggtcaccttttgcctggtcatcctgttagagtacatctttggaaatccagggtaatattctctttcagagatgctcattgtgtaactctgtgtagggagatagtcactttaaacagctcaaagtagctagctaaaggagtagccttaaatacctaaaagatgacagaagcatagcccttaacaaatcttcagcttgtctctcagtatttcccaatcatgaaaatcccttgctatgtctttcctactagaaatgttctagaatcgctggacggtggggtcagagggcagtcggtatttaggccgtgagcttcccatactactgcaggtccaactcctggcaaccgcgggctcaaggcaggtcattggaatccacgttttggccacagtagttgtaggattgcttttctgtatcataattttagaatgctcttaaaatcttgaggaagagtttttattttttatttatttttgagatggagtctctgttgcccaggctgcagtgcagtggtgccatctcagctcactgcaacctccacctcccaggttcaagcgattctcctgcctcagccacctgagtagctgggagtacaggcatgtggcaccatgcctggctaatttttgtatttttaatagagttgagatttcaccatgatggtcaggctggtctcgaactcctgacctcgtgatccgcccgcctcggccccccaaagtgctgggattaacgggtgtgagccacggcgcccagcccaggaagagtttttaaattagagctctgtttaattataccactgggaaatcatggttacgcttcaggcatattcttccccagagtactacttacattttaaatttcattttgtaaagttaaatgtcagcattccctttaaaagtgtccattgttctttgaaagtagacgtttcagtcattcttttcaaacaagtgtttgtgtaccttttgccaagctgtgggcatcgtgtgtgagtacagggtgctcagctcttccaccgtcattttgaattgttcacatgggtaattggtcatggaaatgatcagattgaccttgattgactgtcaggcatggctttgtttctggtttcaatctgttctcgttccttgtaccggattattctactcctgcaatgaaccctgttgacaccggatttagctcttgtcggccttcgtggggagctgtttgtgttaatatgagctactgcatgtaattcttaaactgggcttgtcacattgtattgtatttttgtgatctgtaatgaaaagaatctgtactgcaagtaaaacctactccccaaaaatgtgtggctttgggtctgcattaaacgctgtagtccatgttcatgccaaaaatggctgggaacgtttgctttatttacattcagtcagcgttgctttcagatcacactttatccacacaggaaagccagtcagcctataatgaagtagttattaaaataaatgtaatgaatatgtctacaaagtatagtttagtggtttattttgctaaaatgcacatatatttgatataatttagtttgagaagttcagctagtttttctcctttgtttgactttgtcaatttctatctggtttttaagggtctgagcttagcttgtgcatgcaaggttttgggtttttttattttttttttgagcacagcttttcaccgttttaatttgttgggtatttttctcttaataagagaaatattggccatccgatttttacatataatacaaagtgtgtttttccaagtacattggttcctgtcccctccctgtgaaactggttttgaagtattggaacaagtaatgtccttcaataattcaatgttactttgagatacatgtgttaatatacccttagttattcttgaaataaaaccagtctcttacgcttgcagtggaaaaaaaaaaaaa

SEQ ID NO: 76694 - DNA, 1065 bp, Homo sapiens; identical to SEQ ID NO: 59236

SEQ ID NO: 76695 - DNA, 3395 bp, Homo sapiens; identical to SEQ ID NO: 59237

SEQ ID NO: 76696 - DNA, 1665 bp, Homo sapiens; identical to SEQ ID NO: 59238
  misc_feature (1)...(1665): n = a,t,c or g

SEQ ID NO: 76697 - DNA, 621 bp, Homo sapiens; identical to SEQ ID NO: 59239
  misc_feature (1)...(621): n = a,t,c or g

SEQ ID NO: 76698 - DNA, 6012 bp, Homo sapiens; identical to SEQ ID NO: 59240

SEQ ID NO: 76699 - DNA, 754 bp, Homo sapiens; identical to SEQ ID NO: 59241

SEQ ID NO: 76700 - DNA, 2065 bp, Homo sapiens; identical to SEQ ID NO: 59242

SEQ ID NO: 76701 - DNA, 982 bp, Homo sapiens; identical to SEQ ID NO: 59243
  misc_feature (1)...(982): n = a,t,c or g

SEQ ID NO: 76702 - DNA, 1329 bp, Homo sapiens; identical to SEQ ID NO: 59244

SEQ ID NO: 76703 - DNA, 4586 bp, Homo sapiens; identical to SEQ ID NO: 59245

SEQ ID NO: 76704 - DNA, 2321 bp, Homo sapiens; identical to SEQ ID NO: 59246

SEQ ID NO: 76705 - DNA, 2276 bp, Homo sapiens; identical to SEQ ID NO: 59247

SEQ ID NO: 76706 - DNA, 1727 bp, Homo sapiens; identical to SEQ ID NO: 59248

SEQ ID NO: 76707 - DNA, 1357 bp, Homo sapiens; identical to SEQ ID NO: 59249

SEQ ID NO: 76708 - DNA, 2003 bp, Homo sapiens; identical to SEQ ID NO: 59250

SEQ ID NO: 76709 - DNA, 1328 bp, Homo sapiens; identical to SEQ ID NO: 59251

SEQ ID NO: 76710 - DNA, 1297 bp, Homo sapiens; identical to SEQ ID NO: 59252

SEQ ID NO: 76711 - DNA, 940 bp, Homo sapiens
ttttttttttttgcaaagaccacagtgctttactttttgtcttagcagaggagataacttgagggacagcccccaaggcgccaggtagccttcaggggcgggcagggttgggggaggtaggagactcggaccggcagccctggctccagcttcatcatctgtgtcttccctctctggccaggctcttcgaggggatgcaggaggctgggcacggtgagctggcagggggcttggtcttcgggtgcccagcaggttgtcagctcctgtttctgatggactcacctgcaatgattccggcataaccgggacagctgcctgcacttgccactggtgaggatgatgatgcctgtgatgaacagcacagctgcgaccaacagcccccgtttccggagggtgtgttcatcatagaagaaggggtcatcctcatgaaaaccagatggcttgagggtctgggggtctgtctggacgtctgtgcttggggatggtctctcagagagcgtcgtggtgtcatcagtgggatgagctgctttggtgctcttgtgtgtctctggatctgtcactagaggcccatccgttccttccagttgctgggtctgggtctggggttgtggtgtttcatcagcaggccaggttggggttggagaggtgggctggagttctgtgtagactgcatctggggctcgtgtcgggacctgaatgtccatgatagttgcgtctgctgaagaactggacgtggtatctttcaacgtctgtcctctggtggggagaatcaggccaacgatggtgagaagacacaggcgaccagagggcgacatctgagcccggcccgtgggcagaggggcagcggatggaggtggcgcgcgagagggacttacgtcggagctgggggtcctaagccggcagcctcgtggagagagggacgcggcggtggctgctgcgt

SEQ ID NO: 76712 - DNA, 1407 bp, Homo sapiens; identical to SEQ ID NO: 59254

SEQ ID NO: 76713 - DNA, 1329 bp, Homo sapiens; identical to SEQ ID NO: 59255

SEQ ID NO: 76714 - DNA, 1999 bp, Homo sapiens; identical to SEQ ID NO: 59256

SEQ ID NO: 76715 - DNA, 5824 bp, Homo sapiens; identical to SEQ ID NO: 59258

SEQ ID NO: 76716 - DNA, 1695 bp, Homo sapiens; identical to SEQ ID NO: 59259

SEQ ID NO: 76717 - DNA, 926 bp, Homo sapiens; identical to SEQ ID NO: 59260

SEQ ID NO: 76718 - DNA, 2872 bp, Homo sapiens; identical to SEQ ID NO: 59261

SEQ ID NO: 76719 - DNA, 739 bp, Homo sapiens; identical to SEQ ID NO: 59262

SEQ ID NO: 76720 - DNA, 997 bp, Homo sapiens; identical to SEQ ID NO: 59263

SEQ ID NO: 76721 - DNA, 3764 bp, Homo sapiens
gagggctggggctgggagatcccggcgggagccccggcagagcagtcgcccgtgagcccccgcaactcagacgcgctcggcctcgcgctccggggctgggaccaccgagggcgagctgcagccttcgccacccggtccgccgccggactccgcctcccacaaacagcccggcaaggcccttttccgccgctccctcatccagcgaagcctccttcccagcttccccggcggcggcgccgtgacgtcacttccgttctccagcgcgcacgtgggaggaagtgctggtgccctctgccgctgctcccgtctctttggttacgctcgtcagccgctggctcagccgcaagtacccgtccatcatagtcaactgcgtggaagagaaggtgaggaggcgccagccgtgtgccgctatgggagtcccggcgttcttccgctggctcagccgcaagtacccgtccatcatagtcaactgcgtggaagagaagccaaaagaattcaatggtgtaaagattccagttgatgccagtaaacctaatccaaatgatgtggagtttgataatctgtatttggatatgaatggaatcatccatccctgtactcatcctgaagacaaaccagcaccaaaaaatgaagatgaaatgatggttgcaatttttgagtacattgacagacttttcagtattgtaagaccaagaagacttctctacatggcaatagatggagtggcaccacgtgctaaaatgaaccagcagcgttcaaggaggttcagggcatcaaaagaaggaatggaagcagcagtcgagaagcagcgagtcagggaagaaatattggcaaaaggtggctttcttcctccagaagaaataaaagaaagatttgacagcaactgtattacaccaggaactgaattcatggacaatcttgctaaatgccttcgctattacatagctgatcgtttaaataatgaccctgggtggaaaaatttgacagttattttatctgatgctagtgctcctggtgaaggagaacataaaatcatggattacattagaaggcaaagagcccagcctaaccatgacccaaatactcatcattgtttatgtggagcagatgctgatctcattatgcttggccttgccacacatgaaccgaactttaccattattagagaagaattcaaaccaaacaagcccaaaccatgtggtctttgtaatcagtttggacatgaggtcaaagattgtgaaggtttgccaagagaaaagaagggaaagcatgatgaacttgccgatagtcttccttgtgcagaaggagagtttatcttccttcggcttaatgttcttcgtgagtatttggaaagagaactcacaatggccagcctaccattcacatttgatgttgagaggagcattgatgactgggttttcatgtgcttctttgtgggaaatgacttcctccctcatttgccatcgttagagattagggaaaatgcaattgaccgtttggttaacatatacaaaaatgtggtacacaaaactgggggttaccttacagaaagtggttatgtcaatctgcaaagagtacagatgatcatgttagcagttggtgaagttgaggatagcatttttaaaaagagaaaggatgatgaggacagttttagaagacgacagaaagaaaaaagaaagagaatgaagagagatcaaccagctttcactcctagtggaatattaactcctcatgccttgggttcaagaaattcaccaggttctcaagtagccagtaatccgagacaagcagcctatgaaatgaggatgcagaataactctagtccttcgatatctcctaatacgagtttcacatctgatggctccccgtctccattaggaggaattaagcgaaaagcagaagacagtgacagtgaacctgagccagaggataatgtcaggttatgggaagctggctggaagcagcggtactacaagaacaaatttgatgtggatgcagctgatgagaaattccgtcggaaagttgtgcagtcgtacgttgaaggactttgctgggttcttagatattattaccagggctgtgcttcctggaagtggtattatccatttcattatgcaccatttgcttcagactttgaaggcattgcagacatgccatctgattttgagaagggtacgaaaccgtttaaaccactagaacaacttatgggggtatttccagctgcaagtggtaattttctacctccatcatggcggaagctcatgagtgatcctgattctagtataattgacttctatcctgaagattttgctattgatttgaatgggaagaaatatgcatggcaaggtgttgctctcttgccattcgtggatgagcgaaggctacgagctgccctagaagaggtatacccagacctcactccagaagagaccagaagaaacagccttggaggtgatgtcttatttgtggggaaacatcacccactccatgacttcattttagagctgtaccagacaggttccacagagccagtggaggtaccccctgaactatgtcatgggattcaaggaaagttttctttggatgaagaagccattcttccagatcaaatagtatgttctcctgttcctatgttaagggatctgacacagaacactgtagtcagtattaattttaaagacccacagtttgctgaagattacatttttaaagctgtaatgcttccaggagcaagaaagccagcagcagtactgaaacctagtgactgggaaaaatccagcaatggacggcagtggaagcctcagcttggctttaaccgtgaccggaggcctgtgcacctggatcaggcagccttcaggactttgggccatgtgatgccaagaggctcaggaactggcatttacagcaatgctgcaccaccacctgtgacttaccagggaaacttatacaggccgcttttgagaggacaagcccagattccaaaacttatgtcaaatatgaggccccaggattcctggcgaggtcctcctccccttttccagcagcaaaggtttgacagaggcgttggggctgaacctctgctcccatggaaccggatgctgcaaacccagaatgcagccttccagccaaaccagtaccagatgctagctgggcctggtgggtatccacccagacgagatgatcgtggagggagacagggatatcccagagaaggaaggaaataccctttgccaccaccctcaggaagatacaattggaattaagcttttgtaaagctttcccaaatcctttcatcattctacagttttatgctatttgtggaaagatttctttctcaagtagtagtttttaataaaactacagtactttgtgtatttcttttaactgtgtatatttctactgatctgatctcactgtttatgttgctttccaaagatgtatgttgcataatacagtggatctgaatttattattgcttataaaacacatttgatggaataggagtactggtttttcataatggttaaaaatgaaaccagctgtggatttcaaaacacagtgtattctagatcatctaagatccatgctgatttttattgcacaagaattaggtttgaactcttgagctggaacctcagcaaactagagtatatattgttcagtatttctttggaaacatttcattaatgtacttgtcttacagaaatttctgaactttagtaaaaaaaaataaagttaaacttttaaaaaaaaaaaaaaggggg

SEQ ID NO: 76722 - DNA, 3217 bp, Homo sapiens
  misc_feature (1)...(3217): n = a,t,c or g
ttttttttttttactgattaagagcttaaatgtttatttaaaacagaaatgccaaaccactccactctcaacctttcaagcaacctggctaacaataaactagttcttctgcaacaatgttagagcagaggagtaactcaggttatactgtaactcaaaagcaatactactagaaaacttaaaacacctagcactgcataaagaaaaaaagcaggacaaaatttaaagagaattagctacagaaaaccattcaaaggcatttctactgcctcatcttttactccatccccctttgaactggtttctgtttgcatacttgtttggtgggaaaaaaaatcatatggctgtcccaggcacaatatgggaaagtgcaaactgtctctaaggcacagaacttagattctcagccagattaatagcaaatctagacttcccaagggaatatgctagagaaaatgaccacagcgttccactgctagggaaaggctcccctatgaacaagaccagggcactcacccacccccggcactcactttcaccccaccttctcagcaacctgcccatgtccatcagctccatggcagaagcaatcctcatgatgaacaccccaaactgaccccagcctcctcaggccctgcctgagatgatgagcattaagaatacaggaacatgacaggtcaatcggtccctcaagaaaatcaaagttgcatttacatgctgaaccaaaacccactgttacagtttatgacaacccccgcaagtccccagaacttgcaactttaatcaaagtttggctgcttcccttatttcaagaaaaggtttcagtgattacattagtactaatgtactaggcttcccagaactgagaaaacaatgggaacatcaaaccaaagaagatcccattgaacagagttgcctgtcccgagcaatggggttctccccaagcatcagcctttatgccaccagttttggagaaatggcaaaatttccattgcacaagacctcccacaatgttgataagattatcaaacattttggtctggggaagatgaaacaaaattaatttagctgtttaataggaaggtggggatgtgagactcatccaaaggtaggatgtgtgacaccaaaataccacaggaaccattttacaaggcctaggtggaaatacaaagctcacatccttaaggaaaccatcaaatacttgccctagaactttctatatgaagttttgttcttctatgacactatttctctttggtaaagctagcttgtttctatctacaaagacacagtgagtacaggattagaagtgagctctcagccaaattccttttgcaagttctacctgttctgttaggcttcagggactcccagggtttggtgctggctttgggccactcaggtaggaaaaatgatacagattcattcgttaccacatggcttcataaaacaccaaaaggggaaaaatactgactagacattcagaaagaaagtggttggggctgctgatatcaagatcagaaccctaagagccatgaaggcagaggctcaaagaagtcttttcatgggcagaagactgagagccctctaagccctctctaagataccaagtagaggcagctaaaggaggacctcttctccttcatgattttctcttaaggctattctgactgccccatggactcaattctctgagacacctcatccctcagagacacctcatcccctcatccacagttaggaaatcccaccctgcattggtcacagcctgaaacaccagctgtgtgatgaggagggtcctgccctttctctattcctcactgaagaaatttcaatcaaccctcagaggaaaagcaacctaagcctacctttcctcctaaagcatttagctgcacagagtaactgaactttttcgaaacaagccctagattgactccatcagacatattttcctggactcagggctcccaagagggccagactacttcaccactctgcagaggacactgggcgggccacacctgattccagcccactccaactttacacttctccctctcccacccagaggggtaatgcctggtactgaattcccaaggcagcttccaatcaatggtgaaaatgatacatgggatataagctgctaccagcgcaattaaggtgagcactgtgtctcctcttcaaaggtgggatcaacagatgaggtacagagctgctgttgctatggcagtcactgatgacaaagccagggccatgggggcccttccattctccaaaacaataaaatcactcctagatcctatctaaaaggcaatgccactctccaaatgtacaaggaaagtgcttcagagcctctgccttgcgctccttttctgcaagtgaacaaagccaggaaagctgctctctgcattcggtaagtgtgctgtgaagttctttgggtcccagtctcctgggggctctataggctcaggagactagaggctgggtctacaggagtctgttcccaggaggcaccaggaatctgaatctaagtcaggctttggatccatttccatctcttcctttgctgtctgagttcctttggaatgcatccccacctgctgccctccttctaatttcttgttcaacttctgcagttgggtaaaaatctggaggttttcttgctgtagcttctgttgttcagccagacactttaacaccagaccctgcaatctctcaacctccacctgcagagagctgcacgcacacgcaggaggagtcagtggtgttcccttcccagcacaggttactgcaggattcagccgaggtgacgaggcttctacttggggtttgtgttccaaaggagcttcagaggccactttgagtccttgcagctcttcatagggcagggtatctttctcagattctgaaaacgctgcactgagaggagatgggctgtcaggcatggggataaattctgcattttccagctcctttcgaagccagccaggacaggagctgctggccccattactgttccccatggcctctgtgggactgattaaaccttccattcctcggtctgcttccattgttcctcggaagcctccacttgggtcaggagtttcagattcctgctgactgtcctcttcttcaccaccgccgcccccgccgcccgnncgcntgggtcgncgcgggtgcgaagacccacctacaggactctcattagggagcggcg

SEQ ID NO: 76723 - DNA, 1427 bp, Homo sapiens; identical to SEQ ID NO: 59266

SEQ ID NO: 76724 - DNA, 1077 bp, Homo sapiens
ttttttttttttgattataaagcaagtttattctgaagagggattgtcttatgtttacgcacagggaagaaataagaggaaaccctcttttcaacctcttttccccctcacagaaccgagtccccaagttctcagcaacatcatgcagtgcttcagcgcctttactggggaccaaagatgttaggatcgtgaagggtcagactggtcaccagctgttcaaagtcacccaggctccagggtgcaggtgacagattttcggggccaagagatgacctgttgtcagggcttggggtgggggaacagatggagacagaacatcatccaggcctgaggtttggaaattgccaattcctgttccccagaggacctgggtatcagttaccccaaacctctggcccactcctgcttccttggaggatcccaccagtgagtctccctgttctgtccctcccagcccgattctcctgggaacccagtcatgagatacccgcccgttccttcctccttacgggggctgattgaaggtaagcaagagatcagtctggtactggggcagcctcagcaaggcctgatgaagtgtcacgtcctttgctacctgctggttttccttagctatctgctgcttgccagagaggacccaggcttcttgacagcggcccctcagggccaggttctccaaactgagaggctgaacagactccacatggacagccctagccccctgcacgccaccaacatcctcaaagtggtaccgcgcagccgcttcgccccgtacgtgggcctgcagctcgagaagttccactatcaggctctggtccgtcacgggatggcagaaaacttcttgattgtccgggaccggtcggaggtcgcttacgtcaatggcccccatggggaggatggcggaaaaggcgcccccgaacagcgggcagtctctcgtgggctccatgggtctgaggctgggttatgggcattagaaaggtttaaaagaagtccacattgggtcacgtggcatcggctccctgggtttcgcagctgccaccgccacccgggtctggcttagctcccggatcctttaag

SEQ ID NO: 76725 - DNA, 1792 bp, Homo sapiens
attgatgccttcggaccgcccgttgagcccgtcgacccacgcgtccgccggatctcattgccacgcgcccccgacgaccgcccgacgtgcattcccgattccttttggttccaagtccaatatggcaactctaaaggatcagctgatttataatcttctaaaggaagaacagaccccccagaataagattacagttgttggggttggtgctgttggcatggcctgtgccatcagtatcttaatgaaggacttggcagatgaacttgctcttgttgatgtcatcgaagacaaattgaagggagagatgatggatctccaacatggcagccttttccttagaacaccaaagattgtctctggcaaagactataatgtaactgcaaactccaagctggtcattatcacggctggggcacgtcagcaagagggagaaagccgtcttaatttggtccagcgtaacgtgaacatctttaaattcatcattcctaatgttgtaaaatacagcccgaactgcaagttgcttattgtttcaaatccagtggatatcttgacctacgtggcttggaagataagtggttttcccaaaaaccgtgttattggaagtggttgcaatctggattcagcccgattccgttacctgatgggggaaaggctgggagttcacccattaagctgtcatgggtgggtccttggggaacatggagattccagtgtgcctgtatggagtggaatgaatgttgctggtgtctctctgaagactctgcacccagatttagggactgataaagataaggaacagtggaaagaggttcacaagcaggtggttgagagtgcttatgaggtgatcaaactcaaaggctacacatcctgggctattggactctctgtagcagatttggcagagagtataatgaagaatcttaggcgggtgcacccagtttccaccatgattaagggtctttacggaataaaggatgatgtcttccttagtgttccttgcattttgggacagaatggaatctcagaccttgtgaaggtgactctgacttctgaggaagaggcccgtttgaagaagagtgcagatacactttgggggatccaaaaggagctgcaattttaaagtcttctgatgtcatatcatttcactgtctaggctacaacaggattctaggtggaggttgtgcatgttgtcctttttatctgatctgtgattaaagcagtaatattttaagatggactgggaaaaacatcaactcctgaagttagaaataagaatggtttgtaaaatccacagctatatcctgatgctggatggtattaatcttgtgtagtcttcaactggttagtgtgaaatagttctgccacctctgacgcaccactgccaatgctgtacgtactgcatttgccccttgagccaggtggatgtttaccgtgtgttatataacttcctggctccttcactgaacatgcctagtccaacattttttcccagtgagtcacatcctgggatccagtgtataaatccaatatcatgtcttgtgcataattcttccaaaggatcttattttgtgaactatatcagtagtgtacattaccatataatgtaaaaagatctacatacaaacaatgcaaccaactatccaagtgttataccaactaaaacccccaataaaccttgaacagtgaaaaaaaaaaaaaaggggcggccgttttaaaggatccttgggggggcccaagtttacgcgggcatgcaaggtaatagctttttccttatagggagccgtattataac

SEQ ID NO: 76726 - DNA, 2271 bp, Homo sapiens; identical to SEQ ID NO: 59270

SEQ ID NO: 76727 - DNA, 2108 bp, Homo sapiens; identical to SEQ ID NO: 59271

SEQ ID NO: 76728 - DNA, 1464 bp, Homo sapiens; identical to SEQ ID NO: 59272

SEQ ID NO: 76729 - DNA, 937 bp, Homo sapiens; identical to SEQ ID NO: 59273

SEQ ID NO: 76730 - DNA, 1609 bp, Homo sapiens; identical to SEQ ID NO: 59274

SEQ ID NO: 76731 - DNA, 1945 bp, Homo sapiens; identical to SEQ ID NO: 59275

SEQ ID NO: 76732 - DNA, 2288 bp, Homo sapiens
ggggttattgaggaacatggcgttgctggtgcgagtccttaggaaccagactagcatttctcagtgggttccagtatgcagccgattgatacctgtgtctcctacccaaggacagggggacagggctctgtctcgcacttcccagtggccccagatgagccagtcccaagcatgtggtggatcagaacagattcctggaatagacatacagctgaataggaagtatcacaccacacgtaagctttctactaccaaagattccccacagcctgttgaggagaaggttggtgctttcacaaagataatagaagccatgggattcacgggacctttgaaatacagtaaatggaagattaagattgcggccctgcgcatgtatactagctgtgtggagaaaactgacttcgaggaattctttctaaggtgtcagatgcctgatacattcaattcatggtttcttataaccctactccacgtctggatgtgtctagtccgaatgaagcaggaaggccggagtgggaagtacatgtgtcgtatcatagttcattttatgtgggaggatgttcagcagcgcggcagagtcatgggggttaatccctatatcctgaagaagaacatgatcctcatgacaaatcatttctatgcagcgatcttgggatatgatgaggggatcctttcagatgatcatgggctggccgctgccctctggagaaccttcttcaaccggaaatgtgaagaccctcgacatcttgaattgctggtagagtatgtgaggaaacagatacagtacctggactccatgaacggggaggatctgcttctgacaggggaggtgagctggcgccctctagtggagaagaatcctcagagcatcctgaagccccattctccgacttacaacgacgagggactttgatgggctgggccctccgcacggcccgccagctggcttcgaggaacctccaggagagaagtgcctgttggtccaggaccctgcagaaagtggcctgaactgacctctgaacagcatctgtcaaatacctggccccatttgtgttgagtttcctcttagtgtgcccaggagtctgatctgctggggtacagggctgggagaacccctagctctcccggggggtcctctcccttaggggaagccccgagcagagagtcccccagcacacactcccccaaccccctccaacaactacatgtgactgatagcttttcccaaaggccaaggaaggggatggggtaggtttcaaaagggaaaccccccaggggcctgctgtgggcttagggagcagattgtaatgctgccgagtccggtcggtgaccacgcgttgtccctcggctttcagccatggggttgagttggccattaaaagaaacagagacttctctctgccatggcccttctttattccagggacttagaaacttgcctgagatggtggacgcagtaatgagggcaccgcgcagctcagttagagacggagaaagggaagaggctgggatggtctctgctgctcttgcctctagttcatggagatgtgtctctgttcaggccaagatacagccagccaggcctgtcgtctgggacccaggaggcctctgatgaccaagggctttcacatcctaagtcatttggaaggaggccttgagaacaaagtcacctttgtcactcccagtgaactgaatgaggaacatgctgtctcctgtcttggcctcccctttcatgagatactggggagaagagaacattcctcctggcttagttgtagcagacccagacctgtgcccagctttggtcccccttcccaacttctgaagcacgtgctgcagagccaccttggtctgagcacctgaggaccagcccctcctccctcagtgcgggtcatctcttgggggattttcttaaagtgaagaaagggggtggggaaccatattgcccctccctcccccatcaaacttccttcatttaacttgctataaaatgagtcatataaagaaactctatatgggtgaggtatatcccacttctgtgaaaacattacaaatcaaaccgcttctctcagtttatttaagatgcttttgttgcgagcggagctctagagtgaagcctcctgtgtgtgtgtgagataataacaccttgtaactcattacagctgggcactatttacataaaccagagctgagccaggcaggaatttgctgattaatttatttttaatggagtgaagtataccatgcaccaaaataaactttactgtgtgtacctaaaaaaaaaa

SEQ ID NO: 76733 - DNA, 2035 bp, Homo sapiens
gaggaacgcagggtgtcacgcctgtttcagtttccccaagattcacgctgaaaacgcccctctcccaagtgatggcgttgggaagtgggggtctttgggagtcatgaggcctcatggatgggatcagtgcccttacagaaaggactccagagagcaccctggcctcatccatcatctgaggacacacagggagaaggcgccatctagaagccaggaactgggtactcaccagagactgaatctaccataccttggttttctgggacctccagcctccagagctgagacatgagatcatacaaatgctctcagagagggtacagtaagtgcaggtgccctggggtcctccagcatttatcagggagcccggctacacttctgccagccttggtttctaccccccacctcttcccagctgtgaccctgccctctgtgccccaggggtgctggggaggaggcagcactgcagaccaggaacgtgggccagccacgggcagagcgtggccccatctgcgtcccgtgggcccagcgcccatctccagaccccaggccgccctgtgggagaggtgcgtggccaggcaggaggacctctgcgtcctctgtttattgttttgcagcaggaggcccaacatagaacatactcgccagtactcggctgtgcaaaacaggggctagcgctgaagtacaaatgggaaaacgtgattcttttgttttaaataaatacttagaacacgacttggctcctacaagcatctggactctaggtctcagtactggagtgtctcacccatgggccccacgcagggacgccacggttccctcccaccccgtgatcaagacacggaatcggctgccgatggttggatcgcaatgcgccccttttctagagccttccccggccatctacaggcaggatgcggctgggaaaaagacaactggaatttctcgaaggttgatggtccgcacggttgaggattctacgtggttctcttggttcccctggtgtgtgtgtgtgtgtggaggaggccgcggcccttagatcaccttcttgagctcgtcgtacaggaccagcacgaaggcgccccccatgccccgcaggacgttggaccacgcacccttgaagaaggccttgcccccctcatctctgaagatcttcctccaacagtcgacggtgcccgtgtacatgatgtcagctcctttgcgcccggactgcatcatcatgcgccgccgcaccgtgtcgaaggggtaggacaccacgccggccacggccgtcacggtctgcgcgatcatccagctcaccacgatgtgcgtgttcttggggtcggggagcatgcccttggccgtatcgtacacgccgaagtaggccgcccggtagatgatgatgccctgcacggagacactgaagccctggtacaggccccggatgccgtcggacttggtgatcttcaccaggcagtctcccaggcctcggaactcgcgctctgtgcctgactttcccacgtccgctgccaggcgggttctggcgaaatccagcgggtacacgaagcagagggaggtcgcgccggccgcaccgccggaggccaggttgcccgcaaagtacctccagaactgcgtgtgcttgtccacgccccccaggaagatctgcttgtacttatccttgaaggcgaagttgagggcttgagtggggaagtagcgaatgacgttggcaaggttgcccctccagaaggacagcacgccctgctccttggggatgcggacaatgcagtccacgatgcccttgtactgcttgtcggcggcgatctgcttgctggcgtgctggacctgcagcagcagcttgacccgctcgatcggagccacggccgtcttggagatggcggcggcgatgcctccggccaagaagtctttggcgaaggagatggcctgttccgtcatggtggcagggcgggcagcggaacgggaggacagccggagaacgggcgcggagagtgaatggagggcgtcgctggctcagccctgccgccgccggacgcgtggg

SEQ ID NO: 76734 - DNA, 1704 bp, Homo sapiens
ttgacgctgctgaatccgccgagcacccctggcgtaacaccgcgggccgtcaggggctgcggccccgggctgcgccctcccccgcggccaggctctggagggacccaggagctgccgccggcctcagcccatggcccggaggtatgatgagctgccgcactacccaggcatcgtggatggccccgcagccctggctagcttcccagagacagtgcccgcagtaccagggccctatggcccgcaccggcctccccagcccctgcccccaggcttggacagcgacggcctgaagagggagaaggatgagatctatggacacccgctcttccccctcttggccctggtctttgagaaatgtgaactggctacatgctctccccgtgacggggccggagctgggctggggacaccccctggaggtgacgtctgctcctctgattccttcaacgaggacatcgctgcctttgccaagcaggttcgctctgagaggcccctcttctcctccaacccagaactggacaatctggtgatccaggccatccaggtgctgcggttccacctgctggagctggagaaggtccacgacctgtgcgacaacttctgtcaccgctacatcacctgcctcaagggaaagatgcccatcgacctggtcatcgaggatcgggacggcggctgcagggaggacttcgaggactacccagcctcctgccccagcctcccagaccagaataatatgtggattcgagaccatgaggatagtgggtctgtacatttggggaccccaggtccatccagtgggggcctggcctcccagagtggggacaactccagtgaccaaggagacgggctggacaccagcgtggcctctcccagttctggtggagaagatgaggacttggaccaggagcgacggcgaaacaagaagagggggatcttccccaaggtggccaccaacatcatgcgagcctggttgttccagcacctctcgcacccgtacccctcggaggagcagaagaaacagctggcgcaggacacggggctcaccatcctgcaagtcaacaactggttcattaacgcccggagacgcatcgtgcaacctatgatcgatcaatccaaccgcacagggcagggtgcagccttcagcccagagggccagcccatcgggggctataccgagacgcagccacacgtggccgtccggcctccgggatcagtggggatgagtttgaacttggaaggagaatggcattatctatagaggctgatgcaggagagacccagcctccggctgtgacccccagcctcacacctgcctctggttcccgcctggtcctccagcttcaggaccccacctccaaaggcccctctgctcaatgcctacctccctagggccctgctgggacatgggggcctgagtgcccatccaagggctctcaaggacaccggcaaggcctccaggccctgagccccacttctgccttcacctctgcctgggacccgagctgggctcctgggccttggtccccagaagatggcggctagggcctcgccgccaggacagagaagggacggggtggctgggcagtcagggaaggagggtcgcccggatccgacattttggagagattccttcactctcctgtcccccctacctcccttctctaatttcttcttttttttaatgataaagtcttaaaaacacgg

SEQ ID NO: 76735 - DNA, 1440 bp, Homo sapiens
cctgcggtccccggtgtgtccgtctcggaacggttcgattccctccagagccggggaagggacggggggggcccagagaagggggcctcgggcgccccgcctgcgcctgctgcccccgccccggcggtaatgcgctcctgcccgtgacccccgctgggggcgggggccggggtccatgcgcggagtccccacccggcccggcgcctgccgctaacgacggcgggggtgggggggcgcgcgcctgacctcctgcccacaccctggcgtcaacaccgcgggccgtcaggggctgcggccccgggctgcgccctcccccgcggccaggctctggagggacccaggagctgccgccggcctcagcccatggcccggaggtatgatgagctgccgcactacccaggcatcgtggatggccccgcagccctggctagcttcccagagacagtgcccgcagtaccagggccctatggcccgcaccggcctccccagcccctgcccccaggcttggacagcgacggcctgaagagggagaaggatgagatctatggacacccgctcttccccctcttggccctggtctttgagaaatgtgaactggctacatgctctccccgtgacggggccggagctgggctggggacaccccctggaggtgacgtctgctcctctgattccttcaacgaggacaacactgcctttgccaagcaggttcgctctgagaggcccctcttctcctccaacccagaactggacaatctgatgatccaggccatccaagtgctgcggttccacctgctggagctggagaagggaaagatgcccatcgacctggtcatcgaggatcgggatggcggctgcagggaggacttcgaggactacccagcctcctgccccagcctcccagaccagaataatatatggattcgagaccatgaggatagcgggtctgtacatttggggaccccaggtccatccagcggggggctggcctcccagagtggggacaactccagtgaccaaggagtcgggctggacaccagcgtggcctctcccagttctggtggagaagatgaggacttggaccaggagccacggcgaaacaagaagagggggatcttccccaaggtggccaccaacatcatgcgagcctggttgttccagcacctctcacacccgtacccctcggaggagcagaagaaacagctggcgcaggacacggggcttaccatcctgcaagtcaacaactggttcattaatgcccggagacgcatcgtgcaacctatgatcgatcaatccaaccgcacagggcagggtgcagccttcagcccagagggccagcccatcgggggctataccgagacagagccacacgtggccttccgggctccagcatcagtgggggatgagtttggaactcggaaggaggaatggcattatcta

SEQ ID NO: 76736 - DNA, 2404 bp, Homo sapiens
ttttttttttttatgtacttggcctctctcctgacgcctcacaccattaagcatggagaaaagggaaaaagggcaaaggaagtcaaaaaactgaactaggattcgggcaacagcctcaggctgcccaacagaacaggcttttagggaactggacacacagaccagctgtgaccctgactttcacattgatgggtgaatggcaagtaggaggtaatgaaatctggaaatgacaggggagagaaggcaaagctgcctggagtgtcagtcccggaggcatttgcccctctcccccgggggccagccagggacttcccagttcaggaaggccacaacacttgtggcacattaattccgagcttggcccggcttctttcctgtgccctctgcctctgtgggcaggggaaggaggaagggtgtggtcccttaggatctccaagtgctcttccagctcccaggagcagggctgagatcccagagtcagtgcaatgaactgtccattccagtgaggaaaagggagggtgtggcttcgggactgcacatcacacacaagcccactgcagcgtggggagggtgggcatgggacacaaaagggtctggggctgtctccagacagagaagtccttgtggggagctgaaccgggcccaggtcctgctcaggagtcaggtcatgtagcgggtgatggcacggagggcgtacagcagagcggcttgcatgcgcgcctccaggagcagcaagttcacgtggaccttctctgagtggcggaagtgcctccagaagaggttgtacattcttcgggtggtcttctctgggtagcaggccactgtcttgatatagaccttgaggttccgctccaggagctggttcacctccccataatcatagtcatcatatctgatgccaaagacgcagtggatatagttccagatggccctgcggagcacggaggtgtccacaccactgtgcatggcgatggtattgtaggtgaggctataggctgcctggaacttctcatccagcagctgcccaccctcagggtaaagccgctggatcagcgagtagccatggtcttcccaggtataatcctgggcccggaaggtagggggtgcctgagcccctctccgagtgaagtcctcatatccgaaagtagggtcttccacaaagcacagcatgtctgggtgtggagagggctccaggatgtcagctgagggggtcaccagcaggctctctgacttctccagctcaaagcggctctccatctcctcctgggacgtcccctcatcccgcagcaggctctcctgcagctgctgcatgcgctccatcagcgcctccacgtcgcgggcagactcaaagcccccagagttgttcaacgggtccctgcttggggggctgctctgttcactagggggtgtaggtgcctggggggcagggctgccatctgcatccccctcagggaggatgccacagccaaacacgaaggaggagagcgagtggcagtgggtgagcaggaccagagcctgaatgagctcggccagggaccaagtgtgctcgccggtcttcagcaaggcctggatgtgttccttggtgatgagccatggccgatgcgccagcaacttgttgatctcgctgagtttgcgcagcttctcgggggcccggtggaggcccagcagccactcagggtcaccaccagtctgcagaaactcggccatgtgggagcctaccaggtaagaacactgatggcgggcggcagccatgatggcaatgtagtggcgccaggagctggccaagggaccatccgtgtgcagcagcaggtagtgcaggcgccagaagctggtaaagtagtcagggtgcaggcccatcaccactgccaggttgtctactcgcccagaggacatcagtgcctccagccccaggtgctgctcgaggctctcagccccctcccgaaggacctcctccacggggatgaaggcgctgggccctcgagggcctcgccgagcccggctctccctctgctcctctccggggcccgagtcgccgacgccgcccggggcgaaccgcaggtagtccttgagctctgcgcggcactcggagtccgccacgatcatggtgcgcgccaggacccggtcgcggctcgccgacgacccgtgcacccgagtgggtttcggagggaccgcccgaaatgaagccgggactgggcgccgccggggagcttctagaaccccggggcgtctctcggggctccagaacgctccggaatccgagaacggccgctttggtgctggactcttcccccagtcgggcttcgggaacggcgaaacgcctcgggggcctgggaagggccgcagcgcaggggttttcacggcctcggaagtccgcaggggccagggctgctcccggacccagcgc

SEQ ID NO: 76737 - DNA, 3797 bp, Homo sapiens
cagcagtgagtcggagctctatggaggtggcagcgggtaccgagtggcggctgcagcagcgactcctctgagctgagtttgaggccgtccccgactccttcctcccccttccctcccccttttttttgttttccgttcccctttcccctcccttccctatccccgacgaccggatcctgaggaggcagctgcggtggcagctgctgagtttctcggtgaaggtatttcatttctactgtcccctcccctccccaccccatctattaatattattcttttgaagattcttcgttgtcaagccgccaaagtggagagtgcgattgcagaagggggtgcttctcgtttcagtgcttcttcgggcggaggaggaagtaggggtgcacctcagcactatcccaagactgctggcaacagcgagttcctggggaaaaccccagggcaaaacgctcagaaatggattcctgcgcgaagcactagacgagatgacaactccgcagcaaacaactccgcaaacgaaaaagaacgacatgatgcaatcttcaggaaagtaagaggcatactaaataagcttactcctgaaaagtttgacaagctatgccttgagctcctcaatgtgggtgtagagtctaaactcatccttaaaggggtcatactgctgattgtggacaaagccctagaggagccaaagtatagctcactgtatgctcagctatgtctgcgattggcagaagatgcaccaaactttgatggcccagcagcagagggtcaaccaggacagaagcaaagcaccacattcagacgcctcctaattcccaaattacaagatgaatttgaaaaccgaactagaaatgttgatgtctatgataagcgtgaaaatcccctcctccccgaggaggaggaacagagagccattgctaagatcaagatgttgggaaacatcaaattcattggagagcttggcaagcttgatcttattcacgaatctatccttcataagtgcatccaaacacttttggaaaagaagaagagagtccaactccaagatatgggagaggatttggagtgcctctgtcagataatgaggacagtgggacctagattagaccatgaacgagccaagtccttaatggatcagtactttgcccgaatgtgctccttgatgttaagtaaggaattgccagcaaggattcgtttcctgctgcaggataccgtagagttgcgagaacaccattgggttcctcgcaaggcttttcttgacaatggaccaaagacgatcaatcaaattcgtcaagatgcagtaaaagatctaggggtgtttattcctgctcctatggctcaagggatgagaagtgacttccttctggagggaccgttcatgccacccaggatgaaaatggatagggacccacttggaggacttgctgatatgtttggacaaatgccaggtagcggaattggtactggtccaggagttatccaggatagattttcacccaccatgggacgtcatcgttcaaatcaactcttcaatggccatgggggacacatcatgcctcccacacaatcgcagtttggagagatgggaggcaagtttatgaaaagccaggggctaagccagctctaccataaccagagtcagggactcttatcccagctgcaaggacagtcgaaggatatgccacctcggttttctaagaaaggacagcttaatgcagatgagattagcctgaggcctgctcagtcgttcctaatgaataaaaatcaagtgccaaagcttcagccccagataactatgattcctcctagtgcacaaccaccacgcactcaaacaccacctctgggacagacacctcagcttggtctcaaaactaatccaccacttatccaggaaaagcctggcaagaccagcaaaaagccaccaccgtcaaaggaagaactccttaaactaactgaaactgttgtgactgaatatctaaatagtggaaatgcaaatgaggctgtcaatggtgtaagagaaatgagggctcctaaacactttcttcctgagatgttaagcaaagtaatcatcctgtcactagatagaagcgatgaagataaagaaaaagcaagttctttgatcagtttactcaaacaggaagggataggcacaagtgacaacttcatgcaggctttcctgaatgtattggaccagtgtcccaaactggaggttgacatccctttggtgaaatcctatttagcacagtttgcagctcgtgccatcatttcagagctggtgagcatttcagaactagctcaaccactagaaagtggcacccattttcctctcttcctactttgtcttcagcagttagctaaattacaagatcgagaatggttaacagaactttttcaacaaagcaaggtcaatatgcagaaaatgctcccagaaattgatcagaataaggaccgcatgttggagattttggaaggaaagggactgagtttcttattcccactcctcaaattggagaaggaactgttgaagcaaataaagttggatccatcccctcaaaccatatataaatggattaaagataacatctctcccaaacttcatgtagataaaggatttgtgaacatcttaatgactagcttcttacagtacatttctagtgaagtaaacccccccagcgatgaaacagattcatcctctgctccttccaaagaacagttagagcaggaaaaacaactactactatctttcaagccagtaatgcagaaatttcttcatgatcacgttgatctacaagtcagtgccctgtatgctctccaggtgcactgctataacagcaacttcccaaaaggcatgttacttcgcttttttgtgcacttctatgacatggaaattattgaagaagaagctttcttggcttggaaagaagatataacccaagagtttccgggaaaaggcaaggctttgttccaggtgaatcagtggctaacctggttagaaactgctgaagaagaagaatcagaggaagaagctgactaaagaaccagccaaagccttaaattgtgcaaaacatactgttgctatgatgtaactgcatttgacctaaccactgcgaaaattcattccgctgtaatgttttcacaatatttaaagcagaagcacgtcagttaggatttccttctgcataaggtttttttgtagtgtaatgtcttaatcatagtctaccatcaaatattttaggagtatctttaatgtttaagatagtatattagcagcatgcaattaattaccatcataagttctcaagcagaggcagtctattgcaaggaccttctttgctgccagttatcataggctggttttaagttagaaaactgaatagcaacactgaatactgtaggaaatgcactttgctcagtaatacttgagttgttgcaatatttgattatccatttggttgttacagaaaaattcttaactgtaattgatggttgttgccgtaatagtatattgcctgtatttctacctctagtaatgggctttatgtgctagattttaatatccttgagcctgggcaagtgcacaagtctttttaaaagaaacatggtttacttgcacaaaactgatcagttttgagagatcgttaatgcccttgaagtggtttttgtgggtgtgaaacaaatggtgagaatttgaattggtccctcctattatagtattgaaattaagtctacttaatttatcaagtcatgttcatgccctgattttatatacttgtatctatcaataaacattgtgatacttg

SEQ ID NO: 76738 - DNA, 5800 bp, Homo sapiens; identical to SEQ ID NO: 59278

SEQ ID NO: 76739 - DNA, 1729 bp, Homo sapiens; identical to SEQ ID NO: 59279

SEQ ID NO: 76740 - DNA, 2480 bp, Homo sapiens; identical to SEQ ID NO: 59280

SEQ ID NO: 76741 - DNA, 2469 bp, Homo sapiens
ggcacgaggggggcggtccccagcacactagaggaagtcgtgctacccccgcggagttgtcgtgtgttctggattcattccggcaccaccatgtcgaaggtttcctttaagatcacgctgacgtcggacccacggctgccgtacaaagtactcagtgttcctgaaagtacacctttcacagcagtcttaaagtttgcagcagaagaatttaaagttcctgctgcaacaagtgcaattattaccaatgatggaataggaataaatcctgcacagactgctggaaatgtttttctaaaacatggttcagaactgcggattattcctagagatcgtgttggaagttgttaatatctgctacttggaacatacgattgcctttcagaataaatattggtattttttgttgttgtaaaattgaaatcaggcatttaacatactatgaaaacaccaggagtcaatgattaatgaaaggtgactcatctgtccctttttgttgtccatactcttcctatgaagagggaatgcgtatgaattaaggctactactgtcacagaagatcatagtctttgatgctacctcacaacacaaacaggtagttcgttgggggcaaatgaattagccaactgttaactggaagcttttgataatttttttttttagaacaatttggaacattaaaatttactgaatcgtatatattcatctgagataaaaatataaaaagaattatggaccctggatggcaatttgcttgatagcatctgatttgcagactcataatttgatttttaattaaatatataggttatgatgaagtgaatagacatatcagtgaacagttaactatattaaatttttatcatttactttttttaagattcagacctcagttatataaatttcagtttaatatcaaccaaaaaattaaaattttaatctaacccttatgtgtataaattggtgtcccataccagcttttaatggtggacctatagaatccagtacttttaatggtgggaatttacagtagaagcatcctttgctgagttatacattcctttatcaatctcttttgatacaacatttaaaacaagtagcttcaagaaaccactggtgttttgaggatagtatttctaaatagcattcaggaacagagtattattgcacagatctgaagatcaaaaaaaagctcaaggaaatacagatcggaagtgctgatgagttatatttattgaaaacccaacttttaaggaagtgctaagatcagtcacccatgtgaataagaagccaggaaaggaaagatggggaagcccagatcaccaggcttctattaaggaggaaagcaacagaggaaacagtgaaggggaacagaagggggtagcaaagtgttacagaaaagcggactggatagacaaaactgcagaaggtgtatgttggggagaactgaaagggaaaacaaaatacttgacatagtcttaagtagaagaaggcagttagagaaaacaaagtatctactggccttgtcaacatacagacttcaaaataccccttatgagaatccaaagaatgatgtgtgtaagggaagattttatttgcccttccggaagaaatcagtatctatgcaaatcttgaaagacaaaatcaaagcccattaatgattcagaatcagtgcttgacctcctgtattctgaatggtgaactctggaagcagggattgtgtctggctctttttagagctggaagtgtagtggctttcattaaatacttgctgtaaagtctttctaagaccaattattatcttagcatgtttcagtatcttctctatcataggccctaagttcattgggggaaaaaaaataagaagattcaacagaatcagcatttgaagtgtaccattggtagttgtttatgaaattaccagatattcataaatgtgacaaatgaacagcaggattatgaattatcaaaggaaaaagtatttgctgaggtgaaaaaatctgatgtttgaggaagtttttatttttatttatttgttttgttttttttttttttggagggcagacttttttgcccaaggcttttcctgcctcagcctcacgagtagctgggactacaggcatggccccaccacgcccagctaatttttgtatttttagcagagacagggaggaagtttttatttttataaacaaaatctgatgttcagaggccccgtttcttacaataaatgttgagtcttagttaagcaggaatttatgaacacccatttcctgactttttgctttaatttagatttttctccatcctgtttctagcacaaaaatttgcctgctgtgttacaaaaataaatttatgttgtcctgtgccataaagtgatatatttaatatttttattctttggttttgaacattgtaagttcctaaaaacattttattaaacaagtagacattttgttattaaaaaaaaaa

SEQ ID NO: 76742 - DNA, 782 bp, Homo sapiens; identical to SEQ ID NO: 59282
  misc_feature (1)...(782): n = a,t,c or g

SEQ ID NO: 76743 - DNA, 1895 bp, Homo sapiens; identical to SEQ ID NO: 59283

SEQ ID NO: 76744 - DNA, 1943 bp, Homo sapiens; identical to SEQ ID NO: 60872

SEQ ID NO: 76745 - DNA, 1540 bp, Homo sapiens
ttttgactttcaaaaaagtttttattgtagtaaaacacaaaatttaccatcgtgaccatttaagggtatagttcagtggcattaagtacattcaactttttgagcaaccgccatcaccattcatcatccatctccgtttttttgttttgagatggagtctcactctgtcgcccaggttggagtgcagtggcatgatcttggctcactgcaacctcttcctccccagttcaagcaattctcctgcctcagccacccaagtatctgggattacaggcgtgcaccaccacgcccggccaattttttttttgtatttttagtagagatggggcttcaccacattggccaagctggtctcaaactcctggcctcaagtgatccgcccgcctcagcctcccaaagtgttgggataacaggcgtgagccaccatgccaggccatcgtctcctgaactttttcatctgcccaaactgaaactctgtacccattaaacaataactcctcactgccccctcctccagtccctggcaaataccattctactcctagagtactttcagactcagtttcttctttcacttaataaaagacagggtccactgctgactaatgggattgtttgtatatttggaggccttcttgcagaccatgtgatttgagtttatggcagagaatggtaataggaaatgggattgtacaaagaaaagagatggagagaaaactggatgagggtttcgcactgggtgtcccacccacaggcctcagcagccctgccacggatctgcccgattctttcgcatcaagaagttgatcttgcgagccatttccatgttgtagatccgccggcacctttcatagctttccctctgtcgctggcggcatggcttctcataataccgccgatgcttaatgtcctcaatgagcccatccatagtgaggattctgtttagggtcctgtatgcgctttccacgttcccttcctgtaccatcacagtcctggcgatgaacttcagatgttttgccatgaccttggatttaaaccttcactctgtagagcctaaaggatgatggagaaagggcgaggaaagcagaaagagaaacgcaacataatacaaactacaccgcgcggcttatttaggatttggaaattcaacatgctcagggacgcgcgagatggagcacatggaagtcatcctagaaagtagacgtgaatcgttgtctcttattctcactgccagtccaaatcctcgcatagagaagaaaagagatggcagcagggcgttaccacaaagacgcgtcgccgggcatgagaaggacacgagcgacaaggatgcgccacagggtcccaaccaccacacatagttccaaaaggggttgagttgggagttggggaaggactctttgttggtctttggaaaagggggcgaaagcccgcaaacctgccctctcgccaagccagccttcctttccccaaaccctgcacaactcctcacctcgcgcgctcagtacgaaatcgtcgacccgggagttccggagaagatcac

SEQ ID NO: 76746 - DNA, 1780 bp, Homo sapiens; identical to SEQ ID NO: 59285

SEQ ID NO: 76747 - DNA, 3190 bp, Homo sapiens; identical to SEQ ID NO: 59286

SEQ ID NO: 76748 - DNA, 2132 bp, Homo sapiens
attgaacgcctgcgatagatcgcgttaggcacgggccgacccacgcgtccgccactgggcatctctttcaaggtttctgctgggtttctgaactgctgggtttctgcttgctcctctggagatgcagcgtctgttgactccagtgaagcgcattctgcaactgacaagagcggtgcaggaaacctccctcacacctgctcgcctgctcccagtagcccaccaaaggttttctacagcctctgctgtccccctggccaaaacagatacttggccaaaggacgtgggcatcctggccctggaggtctacttcccagcccaatatgtggaccaaactgacctggagaagtataacaatgtggaagcaggaaagtatacagtgggcttgggccagacccgtatgggcttctgctcagtccaagaggacatcaactccctgtgcctgacggtggtgcaacggctgatggagcgcatacagctcccatgggactctgtgggcaggctggaagtaggcactgagaccatcattgacaagtccaaagctgtcaaaacagtgctcatggaactcttccaggattcaggcaatactgatattgagggcatagataccaccaatgcctgctacggtggtactgcctccctcttcaatgctgccaactggatggagtccagttcctgggatggtcgttatgccatggtggtctgtggagacattgccgtctatcccagtggtaatgctcgtcccacaggtggggccggagctgtggctatgctgattgggcccaaggcccctctggccctggagcgagggctgaggggaacccatatggagaatgtgtatgacttctacaaaccaaatttggcctcggagtacccaatagtggatgggaagctttccatccagtgctacttgcgggccttggatcgatgttacacatcataccgtaaaaaaatccagaatcagtggaagcaagctggcagcgatcgacccttcacccttgacgatttacagtacatgatctttcatacacccttttgcaagatggtccagaagtctctggctcgcctgatgttcaatgacttcctgtcagccagcagtgacacacaaaccagcttatataaggggctggaggctttcggggggctaaagctggaagacacctacaccaacaaggacctggataaagcacttctaaaggcctctcaggacatgttcgacaagaaaaccaaggcttccctttacctctccactcacaatgggaacatgtacacctcaaccctgtacgggtgcctggcctcgcttctgtcccaccactctgcccaagaactggctggctccaggattggtgccttctcttatggctctggtttagcagcaagtttcttttcatttcgagtatcccaggatgctgctccaggctctcccctggacaagttggtgtccagcacatcagacctgccaaaacgcctagcctcccgaaagtgtgtgtctcctgaggagttcacagaaataatgaaccaaagagagcaattctaccataaggtgaatttctccccacctggtgacacaaacagccttttcccaggtacttggtacctggagcgagtggacgagcagcatcgccgaaagtatgcccggcgtcccgtctaaaggtgttctgcagatccatggaaagcttcctgggaaacgtatgctagcagagcttctccccgtgaatcatatttttaagatcccactcttagctggtaaatgaatttgaatcgacatagtagccccataagcatcagcccctgtagagtgagggagccatctcctagccgggcccttcattccctctcccatgcctgcaatcactgtcctgggcttatggtgcctatggactaggggtcctttgtgaaagagcaagatggagcaatggagagaagacctcttcctgaatcactggactccagaaatgtgcatgcgagatcagctgttgccttcaagatccagataaactttcctgtcatgtgttagaactttattattattaatattgttaaacttctgtgctgttcctgtgaatctccaaattttgtaccttgttctaagctaatatatagcaattaaaaagagagaaaaaggaaaaaaaaaa

SEQ ID NO: 76749 - DNA, 1464 bp, Homo sapiens; identical to SEQ ID NO: 59272

SEQ ID NO: 76750 - DNA, 801 bp, Homo sapiens; identical to SEQ ID NO: 59289

SEQ ID NO: 76751 - DNA, 1591 bp, Homo sapiens
ttttttttttttgccaattcagttctttactggagtggaagggctggggacacaactcctttatgaaaggaaaccgagggccacatctcgggccccaatctggggcgttcaatccagccgctgctccggtgcggcttgggctcaggccactctcttccctgggcggccccggccccggcctcgcccaccatcccgggaagcccctctgggcccccgcctggcctgggctccctgggacttgtccttggtcttgggaaacttctggtcacaaaggcgacccctgcctcgatccatttcccaccgcttccgcttccgccctggagacttggcaagccgtttctgcttggcctcggggaacaggtcctcactgggcgcctcgcccaccgcctggcagaaatactcgatgtcatcatcttcctgttcatcatcgtcctcacccaactccaggctcgccgtccttgaagggatcccagaggcctcttcatcactacccccgacccgtgccttcttcatgccctccaggctcttctttctgtgggcctcccgctgctcctgcttgcgctgcacattctgggcctgctgggcctgcctctgcgccttcagccgcagcttcttctccttggcttccaggatggcctgcagctcctcctccgtcttgctcacaaaactgtggaacatcactttgccctccccgacgccctcctggaccttgatgagctgcagtgtcatccgcgggccgatctcggtgagccgcactgcactctgctgggcccgcatgttgccacggccagcgacagcctgaggcagctctgtgatgttgtggtcgccgtcaggctctgcctcgctctccgacagccccgcgcccgtggccagcagctcgctgatgtcctgcaggcggctcatgttggggaacttctcctggagcagcttcttcatcccgcgactcgcgcccacaggaacaactttgatgctatagtggcggaagtccagctcctgggagtcggggttgtagtcgatgaggaggcagcgcttgatggtgttcaggttcaccttgtgcacgttgatggaggggaacaggttctggaacatggtggccatgagcttcacatgcataccatgggggccaaagctgttgagtaccaggaggggtgggtgggcaaactgctgctcgtgcatgcggtgccggcgcagtgaggagaccacatcacgcaccagcgagtacttcttcacctggaaggtcaaggtggggcctcctgggaggcgcatcagcttaaagtagacattggtctctgttttgctcaggatcagaaagtgtgtgaccccgaggggcccagccactgccacgcagtccttcagcgagttcttcttacgaacctgcagacggctggcagtgagcggctccatgacccgccgcacgtccaggctgagctgccggatgttgcgacccgtgcagcctcgcgtgaacacgaacgagtgcgggttcgcggcataggcctcgaggttgcggagctgcgcctgggcgcgggcgcgcttctggtgccgggacctccctgactgtcccatgctgctgtgtcctccacgaggcacgaaa

SEQ ID NO: 76752 - DNA, 3738 bp, Homo sapiens
tttcgtggatgaaggaggctgtgcctccgggttgcacgaagagtccgagtcatttctcagaaggttttgataggtgggccttagaggagacgccgccgagcaccgcaagaactggaaaacacacccctctctgtctgcctgggagagccacggaaattggcacttctctgagtgaagctgaggagaaggctgtaaatctgccaaaacagccttgaagtattcttttgtcatgaggaagtgacggctgctggagggaggtgaacaccacaaggagagatggcatctggcctgggccccgcctagcagcagctccacctcctaggccaggccctgtgggatgcgccactagaccaccatggacggatcccacagcgcagccctgaagctgcagcagctgcctcccacaagtagctccagcgccgtaagcgaggcctccttctcctacaaggaaaacctgattggcgccctcttggcgatcttcgggcacctcgtggtcagcattgcacttaacctccagaagtactgccacatccgcctggcaggctccaaggatccccgggcctatttcaagaccaagacatggtggctgggcctgttcctgatgcttctgggcgagctgggtgtgttcgcctcctacgccttcgcgccgctgtcactcatcgtgcccctcagcgcagtttctgtgatagctagtgccatcataggaatcatattcatcaaggaaaagtggaaaccgaaagactttctgaggcgctacgtcttgtcctttgttggctgcggtttggctgtcgtgggtacctacctgctggtgacattcgcacccaacagtcacgagaagatgacaggcgagaatgtcaccaggcacctcgtgagctggcctttccttttgtacatgctggtggagatcattctgttctgcttgctgctctacttctacaaggagaagaacgccaacaacattgtcgtgattcttctcttggtggcgttacttggctccatgacagtggtgacagtcaaggccgtggctgggatgcttgtcttgtccattcaagggaacctgcagcttgactaccccatcttctacgtgatgttcgtgtgcatggtggcaaccgccgtctatcaggctgcgtttttgagtcaagcctcacagatgtacgactcctctttgattgccagtgtgggctacattctgtccacaaccattgctatcacagcaggtgcaatattttacctggacttcatcggggaggacgtgctgcacatctgcatgtttgcactggggtgcctcattgcattcttgggcgtcttcttaatcacgcgtaacaggaagaagcccattccatttgagccctatatttccatggatgccatgccaggtatgcagaacatgcacgataaagggatgactgtccagcctgaacttaaagcttctttttcctatggggctctggaaaacaatgacaacatttctgagatctacgctcctgccaccctgccagtcatgcaagaagagcacggctccagaagtgcctctggggtcccctaccgagtcctagagcacaccaagaaggaatgagactcgcctccctctatttataactgtcccctccaggctgacagtggttcaaccctgaatcctaaaacttgcctttcaagtctcattttgtttctaactgagaactctatggatgatgatctcaaaaagcctttgtctctgggaaaggatgcgttatcttggtcttggaaatttcaaatgatgagggttgggggatggaagcattattccaggtggacgggatagaatccagcctctgcctggattagcccagggggatttggaaagcctttctaccatccttgaggatggtaactgagcttcctctgacagtgaccaaaggatgctgtatccttcagagctaaggcaagacagagagtctgctgttaattctcaaatccagcgaaaggctggacatctctaaatctcgtcttcctccacctcatgtgcatgcctgatctcaccctgacactcctgatgccgcatctgtgatagcactcgtgttgccttcacatggcaggctgggccaaccctgggtgggaaggttctgacattgtgtttttcagaaatgtacatctgccttccagtcatctgtgcccttctagggaagatgtgcttgatatgttcaaattggatctactctgaaaacgaaacttggttttggtcctgtgaggactacttgtttgtccacctcctccaccaaaggaattaggaagttaagagaaggggaagaatatggaggataggagagggtgatgatgctttagcccattaaggaagaaaagttccccttactcttacaaaaggggattgcaccacttaaaaaaggataggtagaaaatctggccattttatgtgttattttttttcctgcataccagtgccccctggaaagatggggatgctcatttcagagacagcctcttcacctgtcctccgtctctccattacagagccacaagccaagcttgagttactggttaatttccttgaagtcaatagagactctctgggtcctcatccccatgcatatatgtctgggagaagcaagcattctccaaaacagggctgttgctttcttcctggccgcatatgtgactgtcttcccctagactgatggtatacttttgagaggggcggataaaggtttgcaaactttaatgggcataaggatcccctagaagcatatgtaaaatgcagattcctgcaccccaactgcagacactgttaagtgggactggagtggggcccacgggtctgcattcttaactggtaccaccagtgattctgatgcgatgcttcaatcccgagatttcacatctggaaagcctaagaatttacaaagatgttctgctaaaacccccagggccccatgcagtcttgctagaaaatttcctccctagggttcctttggaaggttaaatactccccataggatctgtggcatttctccatccaatgaatactacttagagctacactcaccacttccctagacagcctttaataggcatgataacagtgttaatagaccagtgtgatagatcacttatctttatggattgtgcttaatactgatttagtatcttgactccaaaaactgacatctgttgtctgtgataaccacttctgtattgcgtcttaaccacttctgtattgtgtggtcttaactgcctaaggcggcaatgggcagtgggcccctttcccttaggatgggtatcaattcaacaatatttataaggcatttactgtgtgctaagcatttggaagacccaggctacaaaataagacatagttcctgccctccaggccagcagagggaggcacaaatacccaggaatctctgatgggtgtgaagtgcggtcgtgggccacagaaaatgaccgtcatgggagaccctgctaaaggtcggaccctgagcccaaaggggtattcagaagtggagatgattttggccccactcatagatgggtggcaaatctaagatttgtataaagcatataaaatagggtgatcacccccgaggcagaggggccagcatttgcaaaggcacagagctaagaggagctgggcaaagaaaggaaagccagggaaggttggtgggagatgagtctcaaagctaagtagtggaagctgggcacagtggctcatgcctgcaatcccagcacttttgggaggccaag

SEQ ID NO: 76753 - DNA, 1963 bp, Homo sapiens
tttcgtgcggcagcgcgccagagactggcgggcagctccgcccgcggccgggatgcactaggcaaagccagctgggctcctgagtccggtgggtacttggagaacttactacgtctagctggaggattgtaaatgcaccaatcagcatgctgtgtctagctcaagaactcaagctccatgaggagatgtttcattgtcgagagcagtcatgatggcctgcactccacacaatgcaacagagtgaaagagcaggttctgcttctttggtgtagtcctgaagcttcctaagaaacttcacatcaggtgatggataggagcaaccctgtaaaaccagccttagactatttttcaaacaggctggtgaattaccagatctccgtcaagtgcagtaaccagttcaagttggaagtgtgtcttttgaatgcagaaaacaaagtcgtggacaaccaggctgggacccagggccagctgaaggtgctgggtgccaacctctggtggccgtacctgatgcacgaacaccccgcctacctgtactcgtgggaggatggtgattgctcacaccaaagccttggacccctcccagcctgtgacctttgtgaccaactccacctacgcagcagacaagggggctctgtatgtggatgtgatccgtgtgaacagctactactcttggtatcgcaactacgggcacctggagttgattcagctgcagctggccgcccagtttgagaattggtgtaagacatcacaatcccattattcagagcgcgtatggagtggaaacgcttgtagggcttcaccagtctttcccagggaactccgatgaagtgttccaacaaaatgagcgagtgaaccaagaagaggatgacattagatccaggagatacaacagaggagataatctccaggatgcctgtgaagaaagatccctggatcccaggatgattataggacaagttgttcataatccagcaggccagaagacttccagggaaactcattcaaggaggtgaaaatgatggatgactcctccaagatgaaaatggaccagccgcagtggctcacgcctgtaataccagcactttgggaggctgaggcaggcggatcacttgagcacaggagtttgaaactagcctggccaacgtggcaaaactccatctctattaaaaatacaaaaattagccaggcatagtggtgcatgcctgtagtcccagctacttgggatgctgaggcaggaagaattgcttgaacctgggaggcagagtctgcagtgagctgtgatcaggccattgcattccagcctgggtgacagagtgagaccatcacaaaaaaaaaaaaacaaacaaataaataaataaataaataaataaataaataaaaaatctggacctcccaccaagggtgggaaacatcagaaagctcagaggaccacacctgcccgttcacctgtcctgggctcctgctgaagccagggctaccagatgggggcaaaagacctcccttacgcaagtcccaaaccaccattacctcccacgagtacagggaggcggggtgttcgtgcatcaggtacggccaccagaggttggcacccagcaccttcagctggccctgggtcccagcctggttgtccacgactttgttttctgcattcaaaagacacacttccaacttgaactggttactgcacttgacggagatatggtaattcaccagcctgtttgaaaaatagtctaaggctggttttacagggttgctcctatccatcacctgatgtgaagtttcttaggaagcttcaggactacaccaaagaagcagaacctgctctttcactctgtttcattgtgtggagtgcaggccatcatgactgctctcttgagctagacacagcatgctgattggtgcatttacaatcctccagctagacgtagtaagttctccaagtacccaccggcccacgcgtccg

SEQ ID NO: 76754 - DNA, 907 bp, Homo sapiens; identical to SEQ ID NO: 59293

SEQ ID NO: 76755 - DNA, 5812 bp, Homo sapiens; identical to SEQ ID NO: 59294

SEQ ID NO: 76756 - DNA, 2393 bp, Homo sapiens; identical to SEQ ID NO: 59295

SEQ ID NO: 76757 - DNA, 1206 bp, Homo sapiens; identical to SEQ ID NO: 59296

SEQ ID NO: 76758 - DNA, 2870 bp, Homo sapiens; identical to SEQ ID NO: 59297

SEQ ID NO: 76759 - DNA, 1457 bp, Homo sapiens
  misc_feature (1)...(1457): n = a,t,c or g
ttttttttttttatttacaaagatttattacagcacgggaggggttcaggcctggagtcagggaagaaggggaaaggggcagagcagctgggggacaaggaaaacctggcgccccccgctgtgtgccccaccggggacataaactaggcggcattcctggcatcaaagcacaaaacgcaacaaagaggtctctgccagtccatcttccaggcacccaggaggagcaagggtgattaagggaagattcccaaaatgttgaggctatggagaaaaacgccttagtcctggaccctggtagaagccggtgagagaagtggtgacttggaatcctccataggaaagtgggtagaaaaggatctaagggtacctcaaggttctcaggacctcctttccccagatcttagggtcctgccctgtgggtctcctgtgtccaggggagaggatctggggagtagaattgtgaagggcaaatccctgttcccggttttctggattttccaatgtgggctgtctcacatcccacctcccgctgggtgaatggaggaatgactggcaggggtgggcatcaggcagcaagtgcccaggttctctgggtatcagccaaaggtgggcaaacaagcaaacacagaccagccttagtcttctagaagtcagaagccgcagccctagcaggcgaggggaagagcacaaaacagggtgaggatagagtgggtttctggggaacagcgatgtcccctccacttcctcctgggagatgcaggctgggtgcctatgtgccaggctcagagggggaagggcgctgaggttcctccccaggctcacttagtgctgggtcttccacttggtcctcagagcctccatctctctcggactcatccagagggggtgggcgctcccagggcccttccagaccctggccacaggttgtcttttgcccagcagactgcctgatgaccttcaggacttcagcctggctgtcctcttcttcttcctcttcttcatcatcctcctcttcctcctcatcttcctctcttggataacccagctcccgaagctcccccagctcatcctcctcctctgaggcctggttctcattcaaattgctgatagactgcaggtgagactcagcaatgcgctgcacagctttcagcgaaggtggtgtgtaggcacaggggttgggtctcttcgacttgagatggtgcccctctcctgaggctctctggtggggggaggcttcctcctctggtgaggagtgctctgagagccggaacagcatggcaggcgttggtctcctgcgccggatcatctccacctggcgggggtcgagctggctagggggcgcgggcaccgagaactggatcttcttgcggtccataaaatccatagcgcgcggggtgggcggtggggctggggtgcgcgactcggggtcccgaattccnccacgctggtcgagaggt

SEQ ID NO: 76760 - DNA, 1219 bp, Homo sapiens
ttacgccaagcttggcacgaggagcgagctgagtggttgtgtggtcgcgtctcggaaaccggtagcgcttgcagcatggctgaccaactgactgaagagcagattgcagaattcaaagaagctttttcactatttgacaaagatggtgatggaactataacaacaaaggaattgggaactgtaatgagatctcttgggcagaatcccacagaagcagagttacaggacatgattaatgaagtagatgctgatggtaatggcacaattgacttccctgaatttctgacaatgatggcaagaaaaatgaaagacacagacagtgaagaagaaattagagaagcattccgtgtgtttgataaggatggcaatggctatattagtgctgcagaacttcgccatgtgatgacaaaccttggagagaagttaacagatgaagaagttgatgaaatgatcagggaagcagatattgatggtgatggtcaagtaaactatgaagagtttgtacaaatgatgacagcaaagtgaagaccttgtacagaatgtgttaaatttcttgtacaaaattgtttatttgccttttctttgtttgtaacttatctgtaaaaggtttctccctactgtcaaaaaaatatgcatgtatagtaattaggacttcattcctccatgttttcttcccttatcttactgtcattgtcctaaaaccttattttagaaaattgatcaagtaacatgttgcatgtggcttactctggatatatctaagcccttctgcacatctaaacttagatggagttggtcaaatgagggaacatctgggttatgccttttttaaagtagttttctttaggaactgtcagcatgttgttgttgaagtgtggagttgtaactctgcgtggactatggacagtcaacaatatgtacttaaaagttgcactattgcaaaacgggtgtattatccaggtactcgtacactatttttttgtactgctggtcctgtaccagaaacattttcttttattgttacttgctttttaaactttgtttagccacttaaaatctgcttatggcacaatttgcctcaaaatccattccaagttgtatatttgttttccaataaaaaaattacaatttacccaatggttgctctgcatctgagtcatttaactgttgaagtctaataattttgaaaataaaatatggcattggtttaaaaaaaaaa

SEQ ID NO: 76761 - DNA, 2103 bp, Homo sapiens
tcgtggcagccggagtcgtcttcgggacgcgcctgctcttcgcctttcgctgcagtccgtcgatttctttctccaggaagaaaaatggcatccgttgcagttgatccacaaccgagtgtggtgactcgggtggtcaacctgcccttggtgagctccacgtatgacctcatgtcctcagcctatctcagtacaaaggaccagtatccctacctgaagtctgtgtgtgagatggcagagaacggtgtgaagaccatcacctccgtggccatgaccagtgctctgcccatcatccagaagctagagccgcaaattgcagttgccaatacctatgcctgtaaggggctagacaggattgaggagagactgcctattctgaatcagccatcaactcagattgttgccaatgccaaaggcgctgtgactggggcaaaagatgctgtgacgactactgtgactggggccaaggattctgtggccagcacgatcacaggggtgatggacaagaccaaaggggcagtgactggcagtgtggagaagaccaagtctgtggtcagtggcagcattaacacagtcttggggagtcggatgatgcagctcgtgagcagtggcgtagaaaatgcactcaccaaatcagagctgttggtagaacagtacctccctctcactgaggaagaactagaaaaagaagcaaaaaaagttgaaggatttgatctggttcagaagccaagttattatgttagactgggatccctgtctaccaagcttcactcccgtgcctaccagcaggctctcagcagggttaaagaagctaagcaaaaaagccaacagaccatttctcagctccattctactgttcacctgattgaatttgccaggaagaatgtgtatagtgccaatcagaaaattcaggatgctcaggataagctctacctctcatgggtagagtggaaaaggagcattggatatgatgatactgatgagtcccactgtgctgagcacattgagtcacgtactcttgcaattgcccgcaacctgactcagcagctccagaccacgtgccacaccctcctgtccaacatccaaggtgtaccacagaacatccaagatcaagccaagcacatgggggtgatggcaggcgacatctactcagtgttccgcaatgctgcctcctttaaagaagtgtctgacagcctcctcacttctagcaaggggcagctgcagaaaatgaaggaatctttagatgacgtgatggattatcttgttaacaacacgcccctcaactggctggtaggtcccttttatcctcagctgactgagtctcagaatgctcaggaccaaggtgcagagatggacaagagcagccaggagacccagcgatctgagcataaaactcattaaacctgcccctatcactagtgcatgctgtggccagacagatgacaccttttgttatgttgaaattaacttgctaggcaaccctaaattgggaagcaagtagctagtataaaggccctcaattgtagttgtttccagctgaattaagagctttaaagtttctggcattagcagatgatttctgttcacctggtaagaaaagaatgataggcttgtcagagcctatagccagaactcagaaaaaattcaaatgcacttatgttctcattctatggccattgtgttgcctctgttactgtttgtattgaataaaaacatcttcatgtgggctggggtagaaactggtgtctgctctggtgtgatctgaaaaggcgtcttcactgctttatctcatgatgcttgcttgtaaaacttgattttagtttttcatttctcaaataggaatactacctttgaattcaataaaattcactgcaggatagaccagttaaaaaaaaaaaaaaggggcgccctttttaaaggacccttggggggccccaagcttccccggccttgcaacgtattaattttctccttatggggggcctaattaaaccctccctgggcaccttgggaaagaacccttccttctggggggtgccatattggaccaacccccctacagacattaaaggctttagggtaaaattaacctttttacgggttttg

SEQ ID NO: 76762 - DNA, 915 bp, Homo sapiens; identical to SEQ ID NO: 59299

SEQ ID NO: 76763 - DNA, 1356 bp, Homo sapiens
  misc_feature (1)...(1356): n = a,t,c or g
ttttttttttttagtaaacaacctagtcttttatttgcccaaggccggctgttgcaagcactgaggccccaagacttccagaagggaaggggaggaggggcaaagcactgtgcctaccaggtgctgcctgccccgtcctgcttcctgcaggaggtgggaagggagagaaaacggacattcgcgccatcaagtatctccccagttttcagccactatattcagttgtggaggaggaaactgaggcacacgcatccccccaggcttctacttgctagtccaaggtttaacttactccctcccctcatctctacccccagcagaatgagctgtaagcagcctggggagggtctcaggagcccatctggtggcctgtggagcggggcaggccagccagggtcaagggctaggggtggggggagcaggaggggtgtggctggaggagcagctgctggcggtggggggagtcggcactcaataggggaccccagctggggttccatactgatagcagtgggggacaggcagagccctcagctgtacagacagggaaattgaggctgagaagcctccagtctttgggtagggaggggccttccttcagctactcaggtccattcatcttccccatgaagacgctggctctggggctggagcgccttgtcagcggccactccatgtttagactgaggtacaaggagtggaaggcagccaggtcacctggccacagagcctccttcaactcttgacaaactggaggggaaccctcccccaccacagctgctggaaaagggagtgctgggctctggcgcctgtctgccttccgctgctcacgtgcttgagaaaggctcatttttagcacctggcctcttttccctgcctggagggagcttaggggacagagcagggaagaaggcaggcaagggggacagggagacctggaagcagggcccaaggggatgtctgattgcttcgttctcccctctaagggtgcccaggcccagagaagggccctcagccgccgtgcagagtggagatgaagaggacgctgtcctggtcctgaagctggtagtccagctcacccagtagctcccagtcggcatcgttaatcagcaccagaattcctggccgcacgctgtctccctggatgaacaactctggccgctcttttagcaaattcttcttgatccagatgagcaggttccggatgtcccagggttcctcctgtccaggcaaagtgactcgatgtttcttaataccgtcaaacaggagctccgcaccacctccgaactccacctccactgacaagggcgcagccatgttgaggcagcccctcgtgccaagaanggctgtggcatc

SEQ ID NO: 76764 - DNA, 2520 bp, Homo sapiens; identical to SEQ ID NO: 59301

SEQ ID NO: 76765 - DNA, 1549 bp, Homo sapiens; identical to SEQ ID NO: 59302

SEQ ID NO: 76766 - DNA, 1918 bp, Homo sapiens; identical to SEQ ID NO: 59303

SEQ ID NO: 76767 - DNA, 2406 bp, Homo sapiens
ttttttttttttccaaatacagcttttaatagtacctgtgtgatagctccctctcactgtttttaatcttttataatgtgaagatttagaaccaatccttaaatagtaagaaagttagaacacaatctaatacagaatcaatcatattcaggacaccctgaatgcaaatacttcataatacagttttatagtttaatggacaatgtttaacatggcacctctcaaatctgatatatctgtgtggtgcttacaatttgccttacactttcatttaaagttaccctgttctccactcaccacatgtataaaatatcctattttttctcttaatgttttacaaaccggtaattttcactatcagtagcggatctttttataactcaccctatgttgcccaaaatacaccaataatataatgattagattaaaaaacttggcatcttttttaaaaaaatgtgctttcttttccatgtataagattctactataccatttgtgaatgacaccctagttacataacacctacatatctgcccctgtgagaatttaccttagtcttctaagactctatcttcaacagttagataagtcaataaccagagttccaagaaaagtagttactttttaagaccaaattattgggataactggtcttgtcaatatggcttaacattaatatggctataacatagggactagcccgttttttttttttattaacaatgtgacctgatcacaattctttaaagtctagactagttttccgtatgttttccccattttattttgacatcatatcttttaaaaacaaaaggatgcgaacatttgcccttctcaatgtttttttttttcccatagatgtagtttcacttatttccttcaggctttttatcagcaagaagcaatgtctgattttgataccacccatttgctatgaaaatataagaaggcgtcatcttcaaagcaacactccagttgggcttcttcatcgtttagctgcatgatttcttctacgacatttgtaacagacacaacgtatatagaatttcagtttgggtttttttatccttttttttcttttttaaaataagtatgttttctgcttatttgtgttttcttttctttgaatatattgcacaatattttattattaaaaaaaggttttatgtctcaggcaaaaagtttttctccttcaatcgggaggtgttaatgtgtattattttctaaaagaggtaagtggttgtctgtgtggccatcctcaaaaggaacagaattgacaggtttataggatccaagtctgaaacgacagcaaattatttcaactataaattttccaattccatgtaacatgcctgttgttgaaaagattcctccaacaataccacagagtcttacaaaaaactgccagaatggcatgtgctcctcagtaactgtcaccataagagaactgagatcatatttcataaatatcccagagactccatggctgcctgcagcatggttaatgatacgttccctttctgtcacagaaaactgatgggtgtctgctgatattttatatgtatgtagttttgttggcacaactgtaataaaatattggaacatctggttgtgatctatagcaattttttcagttccatctaaaggattaataattgctggaacaagctctccaaaagacaaatgatctattctatgagaaaaattgtaagattcatggttgacaagtgctgccaaatgtgcatgaccacgaggatgtggaattgccttgcccactgttatgtgaaaattccctgctactttattgacatatagatggccatgaattctgcatgcatttggagactgtgatgaatcatcttctcttggtggaagagctgttgatgtacttttaaaagcacttttaaatatcacatcttgaagtgaatgctcttcttgtagcctactctgaatcagctgcagcatcctctgccactctttctgctgtggtgaaagatcaaatactgttggttcataaactaaaccatctgcagatgcaaccattgtttctgctaaatccaatacatccgctccaacatattgacacttcatggcaacagtaatatctatattaattcttaatttgctagaaaaatccttgtctacttcgtattcatacttcatccatgtatcttgatatactgagaattccattatggttaataaagccatagttgtaaatgctattagagaaactgtacctccactggctgaagtctctacatagctctcaggaaccttcggaaaggcatccaactcttttaccaaacttaaagtttttttccgattcagtcgcctcatcttcaggaaaaccttcctcttccttcatatagtcatgcttgtgttatggtcccagcctacacgaaa

SEQ ID NO: 76768 - DNA, 2500 bp, Homo sapiens
aataaagaaatagtgctttaagtcaatgaattcctccttgggacccactatcgagaaactatcagtggtaacgttttaaaaaatgacaaattcaatctgctcttgacttgtgtgtcctaagatttccactaagtgtcttcaaacctccccctccccggcttcctggataatagaagttcccgaaggccgccgattccagaagatactgtctggcgtgaaattagtttcagtagaaacataagtcccgcgcgtcttgtgctgcgcgtgcgcaagcttttgggccctcccgagaaagggaagtgcattctcgcttccgtagcggtctccgccggttgggggaaagtaattccggctgttgcaccatggcgtccatggggaccctcgccttcgatgaatatgggcgccctttcctcatcatcaaggatcaggaccgcaagtcccgtcttatgggacttgaggccctcaagtctcatataatggcagcaaaggctgtagcaaatacaatgagaacatcacttggaccaaatgggcttgataagatgatggtggataaggatggggatgtgactgtaactaatgatggggccaccatcttaagcatgatggatgttgatcatcagattgccaagctgatggtggaactgtccaagtctcaggatgatgaaattggagatggaaccacaggagtggttgtcctggctggtgccttgttagaagaagcggagcaattgctagaccgaggcattcacccaatcagaatagccgatggctatgagcaggctgctcgcgttgctattgaacacctggacaagatcagcgatagcgtccttgttgacataaaggacaccgaacccctgattcagacagcaaaaaccacgctgggctccaaagtggtcaacagttgtcaccgacagatggctgagattgctgtgaatgccgtcctcactgtagcagatatggagcggagagacgttgactttgagcttatcaaagtagaaggcaaagtgggcggcaggctggaggacactaaactgattaagggcgtgattgtggacaaggatttcagtcacccacagatgccaaaaaaagtggaagatgcgaagattgcaattctcacatgtccatttgaaccacccaaaccaaaaacaaagcataagctggatgtgacctctgtcgaagattataaagcccttcagaaatacgaaaaggagaaatttgaagagatgattcaacaaattaaagagactggtgctaacctagcaatttgtcagtggggctttgatgatgaagcaaatcacttacttcttcagaacaacttgcctgcggttcgctgggtaggaggacctgaaattgagctgattgccatcgcaacaggagggcggatcgtccccaggttctcagagctcacagccgagaagctgggctttgctggtcttgtacaggagatctcatttgggacaactaaggataaaatgctggtcatcgagcagtgtaagaactccagagctgtaaccatttttattagaggaggaaataagatgatcattgaggaggcgaaacgatcccttcacgatgctttgtgtgtcatccggaacctcatccgcgataatcgtgtggtgtatggaggaggggctgctgagatatcctgtgccctggcagttagccaagaggcggataagtgccccaccttagaacagtatgccatgagagcgtttgccgacgcactggaggtcatccccatggccctctctgaaaacagtggcatgaatcccatccagactatgaccgaagtccgagccagacaggtgaaggagatgaaccctgctcttggcatcgactgtttgcacaaggggacaaatgatatgaagcaacagcatgtcatagaaaccttgattggcaaaaagcaacagatatctcttgcaacacaaatggttagaatgattttgaagattgatgacattcgtaagcctggagaatctgaagaatgaagacattgagaaaactatgtagcaagatccacttctgtgattaagtaaatggatgtctcgtgatgcatctacagttatttattgttacatccttttccagacactgtagatgctataataaaaatagctgtttggtaaccatagtttcacttgttcaaagctgtgtaatcgtgggggtactatctcaactgcttttgtattcattgtattaaaagaatctgtttaaacaacctttatcttctcttcgggtttaagaaacgtttattgtaacagtaattaaatgctgccttaattgaaggggtttgggtggatttttttttctcaaaataagctgtagggactattttaacagcttaaacaggagctctcaagatgcacttttgtattgagaggaatatgggcttgatcctcttcctatctaaatgggtgggccatttgattgtagagggtccaccacagaattatgggatgccttaagtgctgttactaggttgctcacagcctaacctggc

SEQ ID NO: 76769 - DNA, 2824 bp, Homo sapiens; identical to SEQ ID NO: 59305

SEQ ID NO: 76770 - DNA, 2416 bp, Homo sapiens; identical to SEQ ID NO: 59306

SEQ ID NO: 76771 - DNA, 5138 bp, Homo sapiens; identical to SEQ ID NO: 59307

SEQ ID NO: 76772 - DNA, 1029 bp, Homo sapiens; identical to SEQ ID NO: 59308

SEQ ID NO: 76773 - DNA, 3952 bp, Homo sapiens
cggaatcactgactggcacaggtgttgggaaaatgatccacagtctatttctcataaactgttccggtgacatatttctagagaagcactggaagagcgttgtgagccagtctgtctgtgattatttctttgaagctcaagagaaagctgctgatgttgaaaatgtaccacctgtcatttcaacacctcaccactacctcatcagtatctaccgggataagctcttctttgtatctgtcatacagaccgaagtgccacctctctttgtaattgagttcctacatcgagttgctgacacttttcaggactactttggtgagtgttcagaggctgcaattaaggataatgtggtcatagtatatgaactcttagaagaaatgttagacaatggatttccactggctaccgaatctaacattttgaaagaattgattaaaccaccaacaattctacgctctgttgtcaactctattacaggcagtagtaatgttggggacacactccccaccgggcagctgtccaacataccatggcgtcgggcaggggtaaagtacacaaacaatgaagcctattttgatgttgttgaagaaatagacgcaattatagataaatcaggatctacagtctttgcagaaattcagggggtcattgatgcttgcattaaactatctggaatgcctgatctctccctttctttcatgaaccctaggcttctggatgatgtcagctttcacccctgcatccggttcaagcgttgggaatctgaaagagttttgtcatttattcctccagatggaaatttccgactcatatcataccgtgtcagctcacaaaatctagtggcaataccagtgtatgtgaaacatagtatcagctttaaggagaacagttcttgcggcagatttgatataacaattggaccaaagcagaatatggggaaaactattgaaggaattacagtgacagttcacatgccaaaagttgtgctgaacatgaacctgacacccacacaaggcagctatacatttgatccagtcaccaaggtactaacatgggatgtgggaaaaattactccacaaaagctcccaagtcttaaaggactggtaaatttacagtctggagcccccaaaccagaagagaatccgagcctcaacatacagtttaagatccagcagcttgctatttcaggcttaaaagtaaaccgtttggacatgtatggggagaaatataagccatttaaaggagtcaaatacgtcacgaaagctggaaagttccaagtgaggacatgagaagaggccaaaattcctcaggaccagtttgttttccaagtgtcattacgatgtatcactattaggtaccaagtgagtgggaatacatattctagttaaagcatttgtgtctagctacacaccgctaacaaagttacttagttatcaatgtaggattcttaaggagctttaagctaaggaaaccttttagtgacttagcttattttgtatcttttcacttaggaagattttggaggtgatttttttccataggaggataccatctggcggctgcacattgtaacagtaaaggcagaaagctgtagtgataacctctctcctaaaagagttaactggtctcatccagcagaagctatcttaaatctgtgatgtgtcaggtgcagccaaatatcacaccttctgatcttagccatcccaaaccagtatctgtcccgagaggaaattccccccacccccagaagtttacagaaaactgcctcttcaagtgtttgccttattcagcttttcacttgtgccattaagcaagcactgtagcaaaagccacttccacatggccctggcagggagcactgctgctccatgctccattctcactgtacttggtattgtattttttataaataagatttttatgtaaagcttacaatttgatttacagggaccttgctgcagtaaataccatctcaattttgtgccactggttcagctgttagcacagtaaaaaaatcatttgtatcaaaggggcaaatgctttattaaggtagtaaaagggaacattacttctgcttttaggaagttactgcaagcacaagcatttgtgcttttaagcaaattaaagtagtaaaagaaaaacttaagtgaaacctttgccatcttcatgttttataatataaagcttacccaacaccagttaagccatggttaacctaaatgcctcatgccccagttcagcaaaaggaggaaaatgtgcctgcctcacagtcatcagtctttttaaatcttttttgttgttgttcttaagggtttgaatttgtctgcattccttgtctttaggggaaattcccttttcatattgtgtgcttcccaaagctatagtcatagatttcttccagaaactattgtcataattgtcactggagtgcttaaatatacgtactatactgacaaaatacatggaagtgagttataatgaggcagaaacaaaatcctcggtaacattgatgatactctaccgatcaccgtggttttggaaagtcagtcaacagttgtattattgcactcaatttcattgtgacattttatttaacttcttcatcttggtggtccttgcccagttattttgcctcattagacatcaagaaatggagaaagactgaaagttaatatcttaagtgcttgttcttcatgtttccttcttgttatttatgctattctctttgtggctccattcttctttcaatcttctcagcttataaccgtctttcccttatgctaaggatagcccttacactcatcccatctatgctgtcaagggctgctggttggtgctggtacaaggagcccactcagcagttttcttacctttgcctgccctgcctttcatggaataagaaaggcaacgttttgcagcttccaaatttctgaagaaactaatctcagattggcagttaaagtcaaaatgttgccaaatatttattccttttgcctaagtttggctacccggttcaattgctttttatttttaatgtcttgactcttcagagttcgtacctcaaaagaacaatgagaacatttgctttgctttctgctgaatccctaatctcaacaatctatacctggactgtccagttctcctcctgtgctatcttctcttctatccaagtagaatgtatgccaggagctccttccctctagcaatttctactaaaatgtccaagtagaatgtttccttttacaatcaaattactgtatttattaatttgctagaatccagtaaatcattttggtagctctggctgtgctatcaataaaaagatgaaagcaacaagttgattttttttaggtctactattgattgaacattctccaatgggcaaggctcattgtcaaagcagggtgaacatgatcagattttcttctgcatcatcacacaagctgcgagtgttgctgcaaagcacttctcagtactccttccctaacctcagtatgttaatagccattcatacttggcttaagcatcaccattctggccacagtctgagagattagtgatcaaagctcccttccctatcactaccaccacctactgataacaaagatttctgaatacttagtagtagtaaaatatttttcaagcacagagttacagctaatcctggatcacttgttctaaattcataagggagtatatcaagagcaaatgaagtaaatgattctttcctgcgtgtgggagtcaccatcattttattcaaagggagttcctgtgataggttcattccttaagtggtgctacagaaggaccctaggaaaatgctgatcttgtcctgagaggcaactgatttgagaaaatgattatactacagcaggaaggcagcaccagtgaacatatggtaaatggcaaaaacaagacagttttagaaactgctaattcagtagcagccttg

SEQ ID NO: 76774 - DNA, 2768 bp, Homo sapiens; identical to SEQ ID NO: 59310

SEQ ID NO: 76775 - DNA, 984 bp, Homo sapiens; identical to SEQ ID NO: 59311

SEQ ID NO: 76776 - DNA, 1974 bp, Homo sapiens; identical to SEQ ID NO: 59312

SEQ ID NO: 76777 - DNA, 2313 bp, Homo sapiens
cgggtccggcgggcggttggcttgagcgggaccggagctgaggcaggaagagccggcgccatggtggagaaggaggaggctggcggcggcattagcgaggaggaggcggcacagtatgaccggcagatccgcctgtggggactggaggcccagaaacggctgcgggcctctcgggtgcttcttgtcggcttgaaaggacttggggctgaaattgccaagaatctcatcttggcaggagtgaaaggactgaccatgctggatcacgaacaggtaactccagaagatcccggagctcagttcttgattcgtactgggtctgttggccgaaatagggctgaagcctctttggagcgagctcagaatctcaaccccatggtggatgtgaaggtggacactgaggatatagagaagaaaccagagtcatttttcactcaattcgatgctgtgtgtctgacttgctgctccagggatgtcatagttaaagttgaccagatctgtcacaaaaatagcatcaagttctttacaggagatgtttttggctaccatggatacacatttgccaatctaggagagcatgagtttgtagaggagaaaactaaagttgccaaagttagccaaggagtagaagatgggcccgacaccaagagagcaaaacttgattcttctgagacaacgatggtcaaaaagaaggtggtcttctgccctgttaaagaagccctggaggtggactggagcagtgagaaagcaaaggctgctctgaagcgcacgacctccgactactttctccttcaagtgctcttaaagttccgtacagataaaggaagagatcccagttctgatacatatgaggaagattctgagttgttgctccagatacgaaatgatgtgcttgactcactgggtattagtcctgacctgcttcctgaggactttgtcaggtactgcttctccgagatggccccagtgtgtgcggtggttggagggattttggcacaggaaattgtgaaggccctgtctcagcgggaccctcctcacaacaacttcttcttcttcgatggcatgaaggggaatgggattgtggagtgccttggccccaagtgaactcaagatttggcagccccagagatgccaactgcagcatgcccacctgtattccctgtccccttccttcatgaaggcatctccaggcaaggaaaactgaagtcattggcccgatacaaaacatttcctgcaacgaaggaggtggtgccgacgtgctgcttcccatcaccagcagctgctcgacaaggggcgcagggtggctgtctttgttccagcactgttcaggctgcctgtcatcccgggcctgccagctcccctgagtgatgagcacttccaagcacccctctgccctttctctgtccttatgctgtcccggcctcgccagccctctggggcattgtgggagatgcctgccaggaatgagcaagctctgttgctcgggagcctcttgtcaccttcttggacttattccccacctgataccttatagagaaaagtgtgaattcaggtggagagtaggcccaggccccatgaggcaccagtggaagcacagctccaagttcagacaggtgcccttagagaggaaaaccatgacaggcaaatgcatttcctctggagtttgagaccctgacaaacaacaggtggcatctggtgtgctgttcttgagttttcgtttaggattagttgagttccagctgggttttgggagaaaggagatgctaccaagtcttggatgttagggcgagaccctgcaagttgagtattagagagcttgtctttcaaggcaggttcctggggcttcagggctaggagggaggagcctgcccttttaacagaaccccagtcacatgcggctcaagtcactcagaggctgttgcatttcagggctatgttggtcctttgtttacctcctaaaccacagctgtttgtgtttcacatatgttgtgaattttccttggttctttttaaaggaatgataataaagttacttgctttaggatttgcttgtttttcttccacttcaaaagcttctgagagggaatgggatgatcctaccagttgccttttcagacctgaggctctaactcaagagattcctcctctccctcaccattcctgccaccattttttctgggtgatgcagcaagagttaaattgttcacattctagaatgtgtcgaagcttctggctccaggtgtctaatggataattcagctaaatagcggctattttcagtggcaagaattataataataaagggcagtcacaagt

SEQ ID NO: 76778 - DNA, 1759 bp, Homo sapiens
tttcgtgcgggccggtgcgcctggcagtcggctgcgtactcctgcgagcgccggagaggggctggaggcggggcgagggcgcggctcgaggcatccctgcagggcgctcctccgagtccctcggcgctctgagcccacagggaagaaggaggggccggcgtcagtgacgtcagcgagaccgaggtgagcgtgggcgttgccagtggtgctctgtcagtgcctatggattatggcagggaaagtaaaatgggtcactgatatcgagaagtcagtgctgatcaataactttgaaaagagaggatgggtccaagtgacagaaaacgaggactggaatttttactggatgagtgtgcaaaccatccgaaatgtgttcagcgttgaagctggatatcggctctcagatgaccaaatagtcaaccattttccaaaccactatgaactgacccggaaggacctgatggtgaagaacatcaaaagatacaggaaggagctggagaaagaagggagtcctctggcagaaaaagatgaaaatggaaaatacctctatctggactttgttccagtcacctatatgctgcccgctgactacaacctgtttgtagaggagttccggaagagcccgtccagcacctggatcatgaagccttgtggcaaggcccagggaaagggcatcttccttatcaacaagctctcacagatcaaaaagtggtcccgggacagcaagacatcttcgtttgtgtctcaatctaataaggaagcctacgtgatctctctctatattaacaacccgttactaattggcgggaggaagttcgacctgcgcttgtacgttctggtgtccacgtaccgtccactgcgctgttacatgtacaagcttgggttttgccggttctgcacagtgaaatacaccccgagtaccagtgagctggacaacatgttcgttcatctcaccaacgtcgccatccagaaacacggggaggactacaaccacatccatgggggcaagtggacagtgagtaacctgcggctctacctggagagcacccgcggcaaggaggtgaccagcaagctgttcgatgagatccactggatcatcgtgcagtccctgaaggctgtggcgccggtgatgaacaatgacaagcactgctttgaatgctatggctacgacatcatcatcgacgacaagctgaagccctggctgatcgaggtgaatgcgtccccgtctctcacgtccagcactgccaatgaccgaatcctcaagtacaacctgattaatgacaccctcaacatcgccgtcccgaatggtgaaatcccagactgcaaatggaacaagtcgccacctaaggaagtcctcggcaattacgagattctgtatgatgaagaattggcccagggtgacggggctgaccgggagctgagaagccgtcagggtcagtctctggggcccagagcaggccgatcgagagactcagggagagcggtcctcaccacctggaagtgagtcccacctggaccttatcaaaactactcactccacctgggcccctgctgaagccctattttgaaatttcccttttgtagagcttttttcctttcctaagccctgtaaataaacgaaggcacttctttggaaggttatggagtctgtttgactagtgctaaaggaaacaattcatgcggatgtataaaactcgctctttttttttttaatttttaacctaagcagaattttcatattaaaaactcacttttttgacag

SEQ ID NO: 76779 - DNA, 1783 bp, Homo sapiens; identical to SEQ ID NO: 59315

SEQ ID NO: 76780 - DNA, 1132 bp, Homo sapiens
  misc_feature (1)...(1132): n = a,t,c or g
ttttttttttttaataccattctgtgatttaaacttttctattggtgacttttagttgtataggcacggaaaggaaaatcaattgttttctttaatgctgagaatttttgttaatatttctggacatttcataaaacatcttttgttgacattctacaaatgatagcatccaataatgtcccaatactttcttcttgtgaagagagtttatatatctttttgacttctgtaatattcattatttcaggaagatttttcagagaaacctgatgaccttctacttgagatattaggtattcttgatttatttgtttttctccctcttcaatgtaaacaattagaattgaagtgtcatttgctgagataccaaattttttcaaagcctctgaaatattgttatttggggaaaggttgaaaataatttcagtagatagagttcttgtcttcatttttcccagtttgtagaggtgaactgctttgtttgctgccacaagtatctgaaatggatcaacaatcactgtaggatttatcagtgatccatcgatggtgccttccatggcctttcttctcaagtctcccgcattttttacatctttaaataacagaagggttaccctgcattcgggaaataggtccagctgatgtgttaactgcatttcacagataagcaggattctacatccggcccccagtgcgtctcggaagagctcccgctccgaaacaaagcccacaacttccggaagcgatggccaatccccgtcttcttcgagccagtttccggataggccggctcggggtggccatctgtttccgggtcctggtaggagggttgcttccgcccatggtcccgcccattcttccgcctccccaacctgggtcccgtcaacggacgcgaaggagaacaggggctgtatatcacttccggcgaaggaaatggaagaatctatgggctgggaccggaagctggggtctggttttgagtctcggctttgtcttaacctgtgttgggcgttgcaccgggcgacctcagtttcttcctgtacaaggaaaagtactgaccaaaatgagttctacatacatttccgctgctggagatttctttnntccaccggcnctcaatagtggtctcatg

SEQ ID NO: 76781 - DNA, 1299 bp, Homo sapiens; identical to SEQ ID NO: 59317
  misc_feature (1)...(1299): n = a,t,c or g

SEQ ID NO: 76782 - DNA, 2342 bp, Homo sapiens; identical to SEQ ID NO: 59318

SEQ ID NO: 76783 - DNA, 889 bp, Homo sapiens; identical to SEQ ID NO: 59319

SEQ ID NO: 76784 - DNA, 2711 bp, Homo sapiens; identical to SEQ ID NO: 59320

SEQ ID NO: 76785 - DNA, 2380 bp, Homo sapiens; identical to SEQ ID NO: 59321

SEQ ID NO: 76786 - DNA, 1029 bp, Homo sapiens; identical to SEQ ID NO: 59322

SEQ ID NO: 76787 - DNA, 1710 bp, Homo sapiens
ttttttttttttcaaagaggaaaaaagcacgtttgttgttggtaggcgggcgtgaatgggagggttcttcaccttctccaacacctcgtatagatgggacgttgcagggcaatagaaaaggcagcagatgggggcgtgttttgccccactctgtacaatatagaagaatctcatatagatactttgtataaaagccacgtgtcctcatttgtgtcctcttattggctggctgggctgggggtactgggggacaaagaagctggggtgatagaccaggacacagggataccccatggtccccttcctctggctgtcccctggtggggtcactttggatccttggtgggagcatagcacagctccagtggccgggacaccttccagaatttctcattcaccagctccagggtcagcgagccattcaacgtcgtgaacgccccgcctccaggtgcgatgtagatggtgtactgcttttcactgacgccctccaggctgggcaaagcaggctcctcaggaccgtcacctcctccggcacccccaccctccccgccacacccatcaggtcctccggtgtcagaggcgccccctccaggccctcctggctcccctgcttcctgctgttgcctccgctcgagggcaatgcgcagggccaagtacttggagaggtggtccactgtggcattcccagttgtcttcacatacctcgtctggcagtattctcccttctccacgagcagggggtggggccggaacacgagctcaatttctccacctggctctggggggctgggggccccaggagggcttggggggcccagcgttccccctcccagagtccctccccggtcaccagagtcttccgaaccggcacccccacccaccccaccagtgccgcctccccccgtccctacactgctcccccctgcgccccctccacggggtcgcttgggagcagggcctggggcagagtcaggggcggagtctgagctcacatcttctccatccccttctccctccccgggctctccttcccccccactcatcgttgtggtctgatctgaccctggtatcggccgcctcacacgctgggccctgtgcatggcctgcatgcgtagcccctcctcaatgctggagctcaatgcctgctggttgtgcaggcggctcaggcggataagcactcggtcttgatgggcctcgtattcctcccggctaggatagatcttagagatcagggcatcaaagttggggtctggccgtagggatcgcttggacaccagcttctttcggcaggtaggacactccttgttcccgctccgtagggctgtgacaatgcagtcagagcagaatctgtggaggcactccttggtggtcatcgtattcttcagcatgtccaggcagatagggcacatgagttctgaatgcagtgaccgaggggaaacagcaatctctgtgccatccattatggcttcctgcggggtccggtgcagctcatacagactcagttcccacgttttgctggcattctgggcattcgccggcgtcgtcatggtgaccgggcgcagaccccccaccagggctccacagccgaggagaaggcgaagaaggccagctccagccgttcgcgctcccgccgccgccgcgcctctccctaggcccgggctcctgggccaagttcgctcggtccgcaaccgctgctcagacagcacgaaa

SEQ ID NO: 76788 - DNA, 766 bp, Homo sapiens
ccggagtcgccaacatgtcgaccgccatgaatttcgggaccaagagcttccagccgcggcccccggacaagggcagcttcccgctggatcacttaggtgaatgtaaaagctttaaagagaaattcatgaagtgtcttcataacaataattttgaaaatgctttgtgcagaaaggaatcaaaagaatatttagaatgcaggatggagagaaaattgatgctacaagaaccattggagaaactgggatttggagacttgactagtggaaaatcagaggcaaaaaaatgaattttgatgagaagacccctgggccgtgttcagtggtctctcaggacggagggcatcatcctgcctcttaggttggctgaggcctgcgtgtggtgtccttagaaatgggcttcgaatagaagctccagccctgtgggggcgtctcctgggtagggagtggcgtcccgttttcccttaggagggtgtttctgcattgaacccctgagtgggacggcgttcccggcaaagctgggagggaggcgagcgtggggcaagacccttgtcttcgaggccggggccctcttgtatggggcggttttatgttgcagtcctctgatactttctgagttcaaagaggtaaatgtataaatttcagtcccttctgaacacagatatcatcagaaaattaccattccctagcaggatgttttcgtgtttgtattcgtatatgccagttcatttcctttgaaaaaaaaaaaagggggaccccaaaaaaaaaa

SEQ ID NO: 76789 - DNA, 7471 bp, Homo sapiens; identical to SEQ ID NO: 59325

SEQ ID NO: 76790 - DNA, 963 bp, Homo sapiens; identical to SEQ ID NO: 59326

SEQ ID NO: 76791 - DNA, 1349 bp, Homo sapiens; identical to SEQ ID NO: 59327

SEQ ID NO: 76792 - DNA, 1329 bp, Homo sapiens; identical to SEQ ID NO: 59328

SEQ ID NO: 76793 - DNA, 2018 bp, Homo sapiens; identical to SEQ ID NO: 59330
  misc_feature (1)...(2018): n = a,t,c or g

SEQ ID NO: 76794 - DNA, 2746 bp, Homo sapiens; identical to SEQ ID NO: 59331

SEQ ID NO: 76795 - DNA, 1697 bp, Homo sapiens; identical to SEQ ID NO: 59332

SEQ ID NO: 76796 - DNA, 4041 bp, Homo sapiens; identical to SEQ ID NO: 59333

SEQ ID NO: 76797 - DNA, 4323 bp, Homo sapiens; identical to SEQ ID NO: 59334

SEQ ID NO: 76798 - DNA, 1464 bp, Homo sapiens; identical to SEQ ID NO: 58749

SEQ ID NO: 76799 - DNA, 1029 bp, Homo sapiens; identical to SEQ ID NO: 59336
  misc_feature (1)...(1029): n = a,t,c or g

SEQ ID NO: 76800 - DNA, 2178 bp, Homo sapiens; identical to SEQ ID NO: 59337

SEQ ID NO: 76801 - DNA, 791 bp, Homo sapiens; identical to SEQ ID NO: 59338

SEQ ID NO: 76802 - DNA, 746 bp, Homo sapiens
gcgcccacgcgtgcggcccctgccactgggccatggagactgtggcacagtagactgtagtgtgaggctcgcgggggcagtggccatggaggccgtgctgaacgagctggtgtctgtggaggacctgctgaagtttgaaaagaaatttcagtctgagaaggcagcaggctcggtgtccaagagcacgcagtttgagtacgcctggtgcctggtgcggagcaagtacaatgatgacatccgtaaaggcatcgtgctgctcgaggagctgctgcccaaagggagcaaggaggaacagcgggattacgtcttctacctggccgtggggaactaccggctcaaggaatacgagaaggccttaaagtacgtccgcgggttgctgcagacagagccccagaacaaccaggccaaggaactggagcggctcattgacaaggccatgaagaaagatggactcgtgggcatggccatcgtgggaggcatggccctgggtgtggcgggactggccggactcatcggacttgctgtgtccaagtccaaatcctgaaggagacgcgggagcccacggagaacgctccaggagggcctgtccatcctcgctgtcctttccctgttctccccctgccccccgtctctatcctctgtggccttcagctaatttctgctcccctgagattcgtccttcagccccatcatgtgctttgggatgagtgtaaataaaacggggctgtggcttgggaaaaaaaaaa

SEQ ID NO: 76803 - DNA, 1304 bp, Homo sapiens
cgagtgtggcggaattcgctggttccctggcaggctggagggcaggagctggggccacgctggtctgggatagttgggcagggaggctgtctacctggtctccagaatggacggccctgtggcagagcatgccaagcaggagccctttcacgtggtcacacctctgttggagagctgggcgctgtcccaggtggcgggcatgcctgtcttcctcaagtgtgagaatgtgcagcccagcggctccttcaagattcggggcattgggcatttctgccaggagatggccaagaagggatgcagacacctggtgtgctcctcagggggtaatgcgggcatcgctgctgcctatgctgctaggaagctgggcattcctgccaccatcgtgctccccgagagcacctccctgcaggtggtgcagaggctgcagggggagggggccgaggttcagctgactggaaaggtctgggacgaggccaatctgagggcgcaagagttggccaagagggacggctgggagaatgtccccccgtttgaccaccccctaatatggaaaggccacgccagcctggtgcaggagctgaaagcagtgctgaggaccccaccaggtgccctggtgctggcagttgggggtgggggtctcctggccggggtggtggctggcctgctggaggtgggctggcagcatgtacccatcattgccatggagacccatggggcacactgcttcaatgcggccatcacagccggcaagctggtcacacttccagacatcaccagtgtggccaagagcctgggtgccaagacggtggccgctcgggccctggagtgcatgcaggtgtgcaagattcactctgaagtggtggaggacaccgaggctgtgagcgctgtgcagcagctcctggatgatgagcgtatgctggtggagcctgcctgtggggcagccttagcagccatctactcaggcctcctgcggaggctccaggccgagggctgcctgcccccttccctgacttcagttgtggtaatcgtgtgtggaggcaacaacatcaacagccgagagctgcaggctttgaaaacccacctgggccaggtctgaggggtcccatcctggccccaaagacccctgagaggcccatggacagtcctgtgtctggatgaggaggactcagtgctggcagatggcagtggaagctgccctgtgcaactgtgctggctgcctcctgaaggaagccctcctggactgcttcttttggctctccgacaactccggccaataaacactttctgaattgagaaaaaaaaaa

SEQ ID NO: 76804 - DNA, 1640 bp, Homo sapiens; identical to SEQ ID NO: 59341
  misc_feature (1)...(1640): n = a,t,c or g

SEQ ID NO: 76805 - DNA, 1840 bp, Homo sapiens; identical to SEQ ID NO: 59342

SEQ ID NO: 76806 - DNA, 2320 bp, Homo sapiens; identical to SEQ ID NO: 59343

SEQ ID NO: 76807 - DNA, 1589 bp, Homo sapiens; identical to SEQ ID NO: 59344

SEQ ID NO: 76808 - DNA, 8029 bp, Homo sapiens; identical to SEQ ID NO: 59345

SEQ ID NO: 76809 - DNA, 2153 bp, Homo sapiens
  misc_feature (1)...(2153): n = a,t,c or g
ttttttttttttaccaaattgccttttatttacatacgagaaaatctcaccgtgtgtccagctggccccgtcacggccgctgaaggcagcactgctgggcaaggagaaacaaggccacacctgcaacctgggctgcagggtgaggtggctccctccgcacaggccccaggacacccaccatggcacaggccaggctgctgcccccacacggcctccacgaggtcacgggtccatctccacaaccccaaggcagtaagcagtgtgcctcgctttcgccaagctgggccaatgaagaggccccgcccccaccctcaggccccgccctctccccttggaaaacaggtggttttttcctaacacaggaaaacagaaaatgagcacgctttctatggctgccaaagtacaaggagaggctctgccctgggagccactgcatggatggtgggcaaggtccgggagccagctccaaggagcaggaagcagggggccatgacggcaggacaggcccagccatagccccgggaagagagactgccctgtacatccaggtccgggagcctcttccggctgagcagggccgcgactcggcatggccccagcacccgagcaggtctggagggccctcagagcggggcaggggcgggcacgctggggaggggcagctccagggccggcgtctccgcagcctgtgccgggctgggcttccggtgatccagctgttccagcttctcgccgagctgggagtaaagctccttcactgcctctccgctctggcctgtaggctccagggccttctgcaacgcctccagcttagacggggccaccctggggtgcaggtgaatgaggagccgcagcgcgtgccggtgcacgttctccttccttggagaggcggtgaggaagaagccatcgaagaggctgctgcagaagtcctcaagggcaaattcgtcggccagcagcgcaaggttgcccgtgagcaggtggaggaagatgtcgccaaaggccaagtcgccaaaggtctccaccagcccgggcagcaggcggaggagcgcgttcttgttcctctgcttggtgatgtgcaggacgtagtacagccccacctcgcaggccatgcgctgctcctgcagaaacttagtgaagctttcgggaagtgtgtttggatatgagactggggctttctcctcagccggaagtttctgatccacattgaaagtgtagtcatccaccaggaaggacatgagcatcgggaggaacctggtgatgagctctacctccatcttgggctccttgaagacctggctgtcgatcatgtcccaggctccctggcccagcgccagcagccggagcagcagcaggaggtcggggctgtccctgggcagtgtctcctggccgaccagctcctgcaggtgcctgactgtgctcagtgccagcgtgttgatggcgaaggggtcacacaggatcatggacaggtcccccagcacctgctcctggcccttcttgacgccatcgagaaacccctgcagctcccgcgccctcttgctgtccacgaaccgctctcggatgcaggcgtccaggcaccaggtgaacttgtggcacgggtccacggtgcagatttcacccacgtccaggtcgtgcagggacatgagcagctcagcccgcagcgtgcagtagtgcacattccgcgtgcgcaggaagagcgtgcgcagaaactgcagcaccatgtcgtacagcttcacgttcttccccaccatccgcgtcagccgctgcaccacctcgccctggcgcctggtcttgggggaaggactgaaaaagttgtgcaggacagagagctctgtactgaagagagcgctctccttctccaggatgtactgcttcaggagtggggaaacctcgtccccgaagagggcctggttgtcttgccagatctgccgcctcacctccacggcgcaggctcgatacagctccttgtcagccataaccagcttcagttttttctccggaaccttgggcaggtgcttcatgacgcacatcaccacgggctgcagggacggcatcttcaccagagaaaagctcttctccagaaggtcttccagcttcttgtacctttcctcagccttcccctccgaagcgatggctgaaactcgcnccagcagctt

SEQ ID NO: 76810 - DNA, 858 bp, Homo sapiens; identical to SEQ ID NO: 59347

SEQ ID NO: 76811 - DNA, 1510 bp, Homo sapiens; identical to SEQ ID NO: 59348

SEQ ID NO: 76812 - DNA, 2177 bp, Homo sapiens; identical to SEQ ID NO: 59349

SEQ ID NO: 76813 - DNA, 2211 bp, Homo sapiens; identical to SEQ ID NO: 59350

SEQ ID NO: 76814 - DNA, 875 bp, Homo sapiens
gtggtggaattcgagccgctgagggtgcgggctgaccctgtaagtggctgcggcgggaagatggcggagctgcgcgtgctcgtagctgtcaagagggtcatcgactacgccgtgaagatccgagtgaagcctgacaggaccggtgtggtcacggatggtgtgaagcactccatgaaccccttctgtgagatcgcggtggaggaggctgtgcggctcaaggagaagaagctggtgaaggaggtcatcgccgtcagctgtgggcctgcacagtgccaggagacgattcgtaccgccctggccatgggtgcagaccgaggtatccacgtggaggtgcccccagcagaagcagaacgcttgggtcccctgcaggtggctcgggtcctggccaagctggcagagaaggagaaggtggacctggtgctgctgggcaaacaggccatcgatgatgactgtaaccagacagggcagatgacagctggatttcttgactggccacagggcacattcgcctcccaggtgatgctggagggggacaagttgaaagtggagcgggagatcgatgggggcctggagaccctgcgcctgaagctgccagctgtggtgacagctgacctgaggctcaacgagccccgctacgccacgctgcccaacatcatgaaagccaagaagaagaagatcgaggtgatcaagcctggggacctgggtgtggacctgacctccaagctctctgtgatcagtgtggaggacccgccccagcgcacggccggcgtcaaggtggagaccactgaggacctggtggccaagctgaaggagattgggcggatttgagcccctcccagagatggcaataaaactgactctcaacaaaaaaaaaa

SEQ ID NO: 76815 - DNA, 1763 bp, Homo sapiens; identical to SEQ ID NO: 59352

SEQ ID NO: 76816 - DNA, 954 bp, Homo sapiens; identical to SEQ ID NO: 59353

SEQ ID NO: 76817 - DNA, 2159 bp, Homo sapiens; identical to SEQ ID NO: 59354

SEQ ID NO: 76818 - DNA, 405 bp, Homo sapiens
tcgttgcgtaattcggcacgaggtctgaagatggcggcctcagcagcgcgaggtgctgcggcgctgcgtagaagtatcaatcagccggttgcttttgtgagaagaattccttggactgcggcgtcgagtcagctgaaagaacactttgcacagttcggccatgtcagaaggtgcattttaccttttgacaaggagactggctttcacagaggtttgggttgggttcagttttcttcagaagaaggacttcggaatgcactacaacaggaaaatcatattatagatggagtaaaggtccaggttcacactagaaggccaaaacttccgcaaacatctgatgatgaaaagaaagatttttgagactgcagcctattaataaagttaacataactgagaaaaaaaaaa

SEQ ID NO: 76819 - DNA, 2144 bp, Homo sapiens; identical to SEQ ID NO: 59356

SEQ ID NO: 76820 - DNA, 1316 bp, Homo sapiens; identical to SEQ ID NO: 59357

SEQ ID NO: 76821 - DNA, 2077 bp, Homo sapiens; identical to SEQ ID NO: 59358

SEQ ID NO: 76822 - DNA, 1704 bp, Homo sapiens; identical to SEQ ID NO: 59359

SEQ ID NO: 76823 - DNA, 2309 bp, Homo sapiens; identical to SEQ ID NO: 59360

SEQ ID NO: 76824 - DNA, 1435 bp, Homo sapiens; identical to SEQ ID NO: 59362

SEQ ID NO: 76825 - DNA, 2075 bp, Homo sapiens; identical to SEQ ID NO: 59363

SEQ ID NO: 76826 - DNA, 1588 bp, Homo sapiens
ttttttttttttgtattataaactgacttttaataataataaaaaatctatcaagaatttaacgagaagaatctgtacattttaaagtaaaccagtgcacaatgcgctggccctgggccctcccccatttcccgcagcagggctaaagcgggtcctcctttgtctctgatgcaagatacagtgacaaggccactgcctgccctcgtgtatgctgcggcaagagagggaagcgcaccctggagggcgggaggctcggatgccagatgccgggagggcttcaagctcccaggcctgggggcagcagggagcccccacctgaactcaccacctgccaggggtgacaggcgtccccccgcttcctccccagctgtgacctttccctgaaggcataccgaagctggggggacaaactgccgagggggcttgtgtgggtccctcctccccagcaggcagggtggcttcctgtgctctggctggtgatgtcccaatcgccctgctctgagaagttaccatcaagaaaataaatcacagaagccaccgcccggtgtttcccagtgaccctctaacccgtgtgacatggcacctcaggtggggctccatcccctccagctccaaccctggctggccacctctcaggcccttgtagccagtcactcaaagagagcgagttttaacaccggccaaccgctggagaatggagggtgggggaaggaatcacagtcgatacctcaaaacgacaccttacaaccctaatattaacaaacaggaaacaatgacattttttaatttttcaataatttagtttttcttttgtgctcttttttttttagtagaagcaggaacagttgtcaatactaccttctgttggtcccctgttagacaacatacctttctttgaaatgtaaaatgtcaaatatataatcacacaactttagaaaaaacaaactttgacaacaccaacaacaaaaaatcccaaaataaaccagagatttcatgccatataaataaagtcagagcaaatctcgtgcccagggctggtggccccagttccaggggcggtgatgtccagagctggtgtggctctcggggatcctctggtaacaggcgtgatggaggccccgtctctcctttcccgacagagccaagtcttttccaagtccaccaagcaggttagtacagggttagggtgaacctggaagctaagatgaggaggaggagacacgtgtggtcacctggaatgtggacgttgaaggaaaccggggtttcaaaagtgcaggcggagccatcccgagggagccgggtggccccatgtggcctccatgacgttcccttgggttctggggacgcaggagccgaaggccaggcaccagctgctcccatcagctctatgggtctccagcacccctccagcttctggcaggcgtgtgaagaatgggccggcccagggccaatcagccagctcgtcatcacagcgagggtggccaggcttgtcccggaaggaggcagggaggacgctgggcaggtcccggaacgggcggctgcggaaaccttgggccatccatggagaaggccagcgctgcttgctgtg

SEQ ID NO: 76827 - DNA, 1129 bp, Homo sapiens; identical to SEQ ID NO: 59365

SEQ ID NO: 76828 - DNA, 1944 bp, Homo sapiens
ggggggttttggttcgagaccctagtcaccgtgctggaattccggaagagctgggtgctgacggcgctgggcgggtcaggggcggagagcgtgctaaccaatgacttgagggagtagggggccgggtttgggccctcagttgctaagggctacccgagtgggaagcggttcaagagatggggtgaagggtggttcaccggttcttcaagtcctcagccttctggcccgcggaagttaagcaaccaagaggcgggcctaagaccggaagcaggaaggagggcgcaggaagcagggcgccgcagcctgtcgtacggtccttctgtgggtctgtcggtgccgagggcaggatggagaagctgcggctcctgggcctccgctaccaggagtacgtgactcgtcacccggccgccacggcccagctggagacagcagtgcggggcttcagttacctgctggcaggtcgattcgccgattcgcacgagctgtcagagctggtgtactctgcctctaacctgcttgtgctgctcaatgacgggatcctacggaaggagcttcggaaaaagttgcctgtgtcgctgtcccagcagaagctgctgacatggctgagcgtgctggagtgcgtggaggtgttcatggagatgggagctgccaaggtgtggggtgaagtgggccgctggcttgtcatcgccctcatccagctggccaaggctgtactgcggatgctcctgctgctctggttcaaggctggcctccagacttcaccccctatcgttccactggacagagagacccaggcacagcccccggatggtgaccacagccctggcaaccatgagcagtcctacgtggggaagcggtcaaaccgggtggtgcgaaccctccagaacacgccgtccctgcactccgggcactggggagctccccagcagcgggagggacggcagcatcagcatcacgaggagctgagtgcgacccccacccccctggggctgcaggagaccatcgcagagtttttgtacattgcccggccgctgctgcacttgctcagcctgggcctgtggggtcagaggtcgtggaaaccctggctcttggctggtgttgtggacgtgaccagcctgagcctcctgagtgacagaaagggcctgacccggagggagcggcgggagctgcggcgccggaccatcctgctgctctactacctgctgcgctctcctttctacgaccgcttctccgaggccaggatcctcttcctgctccagttgctggccgaccacgtccctggcgttggcctggtcacaaggccgctcatggattacttgcccacctggcagaaaatctacttctacagttggggctgacagacctcccggaaggagggtgtggggaggggtggggcagggagcccctcttccctaataaaactgactccggcagcgtcccagcgtgcggcctctccgtgcctaccggccaggccacacacagccctggtcgccaccagcgttcctcccaggacacccttgactgcgctctcctgtgacgatgccactgcagcccgcaccttgtcactgctgggccaagaagccttcactaggagtgggatccaggctcctctcccacagaaagcggtgacttcacctcatggagcccgggaagctgcttgcctcggcagccataggagcgaacactgctgctctctcgctggcccctggtgaggacaggaagcctgaacccgggtgatggctgaacgctgcccagcgtgtcttctggctggggccctccgtcctgccccttctccgcagggccctgtggctctggcagccccaggccatggggttgccagcctccctgtgacagagcctggtgaacagtgagcctggctcccacgcaagtggccctttaagccctgcatcctcggttgagagtaaaaggcttttctcccttaga

SEQ ID NO: 76829 - DNA, 911 bp, Homo sapiens; identical to SEQ ID NO: 59367

SEQ ID NO: 76830 - DNA, 3128 bp, Homo sapiens
gcggccgctccctcccggactcccggcctcccggcctccctggtcccgcctgggaagggatgcaaggaagccctccggcgctgcgctccgaggtgggagacagcgtccccctccgcccctcgggtcctggcgcctcagagcccggcccaggccgcggaacggtgatgctcgggccggacgggcgggcgcggatccctgcgtcccgctgaaaatgtgtgtctgacatgcaagctcagtggggcagagacccgtggattgctgtgccctgccctccggacctggatcatgaaggtgttgggaagaagcttcttctgggtgctgtttcccgtccttccctgggcggtgcaggctgtggagcacgaggaggtggcgcagcgtgtgatcaaactgcaccgcgggcgaggggtggctgccatgcagagccggcagtgggtccgggacagctgcaggaagctctcagggcttctccgccagaagaatgcagttctgaacaaactgaaaactgcaattggagcagtggagaaagacgtgggcctgtcggatgaagagaaactgtttcaggtgcacacgtttgaaattttccagaaagagctgaatgaaagtgaaaattccgttttccaagctgtctacggactgcagagagccctgcagggggattacaaagatgtcgtgaacatgaaggagagcagccggcagcgcctggaggccctgagagaggctgcaataaaggaagaaacagaatatatggaacttctggcagcagaaaaacatcaagttgaagcccttaaaaatatgcaacatcaaaaccaaagtttatccatgcttgacgagattcttgaagatgtaagaaaggcagcggatcgtctggaggaagagatagaggaacatgcttttgacgacaataaatcagtcaagggggtcaattttgaggcagttctgagggtggaggaagaagaggccaattctaagcaaaatataacaaaacgagaagtggaggatgacttgggtcttagcatgctgattgactcccagaacaaccagtatattttgaccaagcccagagattcaaccatcccacgtgcagatcaccactttataaaggacattgttaccataggaatgctgtccttgccttgtggctggctatgtacagccataggattgcctacaatgtttggttatattatttgtggtgtacttctgggaccttcaggactaaatagtattaagtctattgtgcaagtggagacattaggagaatttggggtgttttttactctttttcttgttggcttagaattttctccagaaaagctaagaaaggtgtggaagatttccttacaagggccgtgttacatgacactgttaatgattgcatttggcttgctgtgggggcatctcttgcggatcaaacccacgcagagcgtcttcatttccacgtgtctgtccttgtcaagcacacccctcgtgtccaggttcctcatgggcagtgctcggggtgacaaagaaggcgacattgactacagcaccgtgctcctcggcatgctggtgacgcaggacgtgcagctcgggctcttcatggccgtcatgccgactctcatacaggcgggcgccagtgcatcttctagcattgtcgtggaagttctccgaatcctggttttgattggtcagattcttttttcactagcggcggtttttcttttatgtcttgttataaagaagtatctcattggaccctattatcggaagctgcacatggaaagcaaggggaacaaagaaatcctgatcttgggaatatctgcctttatcttcttaatgttaacggtcacggagctgctggacgtctccatggagctgggctgtttcctggctggagcgctcgtctcctctcagggccccgtggtcaccgaggagatcgccacctccatcgaacccatccgcgacttcctggccatcgttttcttcgcctccatagggctccacgtgttccccacgtttgtggcgtacgagctcacggtgctggtgttcctcaccttgtcagtggtggtgatgaagtttctcctggcggcgctggtcctgtctctcattctgccgaggagcagccagtacatcaagtggatcgtctctgcggggcttgcccaggtcagcgagttttcctttgtcctggggagccgggcgcgaagagcgggcgtcatctctcgggaggtgtacctccttatactgagtgtgaccacgctcagcctcttgctcgccccggtgctgtggagagctgcaatcacgaggtgtgtgcccagaccggagagacggtccagcctctgatggctcggagatgatggaccgtggaagggaagcgtctgtggggagtgagcgcttagatggccagcagctgctccttctgggaagctcgcaccttggcaacagaacagccctctagcagagcgtcagtgcagtcgtgttatcccggcttttacagaatattcttgtcctattttagaattttccggagtagtttatttgcagtctgttgattatgtgcagtagacccgggacactgcgttttaccgatcaccttgaatgtggtgcctggatgtgcctttttttttttccctgaaattattataaattttctttggggagttcatcagttcatagtttttttagtaaagaagcaaaattaaaaggcttttaaaaatgtacaacttcagaattataatctgttagtcaaatatttgttattaaacatttctgtaatatgaagttgtaatcctggccgtgagcttggaagcttacttttgattcttaaagcctatgttttctaaaatgagacaaatacggatgtctatttgccttttattgtaacttttaaatgaaataatttcatgtcaatttctattagatatatcacttaaaatatttggttttaaatcacaagaatatgtattctttaataaagataatttatgatcatggtataattaattgaaatttattaaaatctgtttttattaatttttttgacttgagcttatctttatacaaaattccagccaattttttttttttactaagatgatttctatattaacatgctattctccaagacaccaaattaatgcagggttaattgg

SEQ ID NO: 76831 - DNA, 1820 bp, Homo sapiens; identical to SEQ ID NO: 59370

SEQ ID NO: 76832 - DNA, 1251 bp, Homo sapiens; identical to SEQ ID NO: 59371

SEQ ID NO: 76833 - DNA, 1448 bp, Homo sapiens; identical to SEQ ID NO: 59372

SEQ ID NO: 76834 - DNA, 1404 bp, Homo sapiens; identical to SEQ ID NO: 58848

SEQ ID NO: 76835 - DNA, 1427 bp, Homo sapiens; identical to SEQ ID NO: 59374

SEQ ID NO: 76836 - DNA, 1438 bp, Homo sapiens
ttttttttttttgcaaaaaagtcggcggtgttttaatcaagtcttcatttacaacggcagaattaggaattgagtcccaccgtagctttcacattgcgtgggcagcagctgtcacacgggcctgtcgtggcactcagcccatggcacagacatatgtggctcagggcaagaaccagtggatggggctctgcacaggaacgctggcctcgggatgggagacccggcctgcccaacactgctcagagcccctcccaactctgacaacaggctcgggtcaggactccccgaaatcaggcaccctcctgctccactgctgagatccccaacgggccagacctagcttggaaactttcttccacctggctggccaggaaggcagcaaacagagatgatgactcggaatgatgggctattcggaaatggctagggaaacaactgtttccctactgtcctggcgggacccaccctgggctaacgggcttcccaaggaagtcctagtggctctggggtcctgaagtccccaaatgggaacctaggctgagagaagcaaggctgtgagggcatccaaagggctgcctcaggttttgttcctgagaacgaagcgtggccccggaggctcaggcgtgctcagtggggccagggccaccagcatgggagtgggcaggggctgccacctgtagggggccagcactgggctccggggacgccagcagaggggccgagaggccatcagcagagtctgtgtcgaggtccagcctcccgtaagcttcgcacagaggcaggtcattagcttcgcaaaggcttgagctggacgagtaatactcctcctccagctcgtagaggtcaatggagatctcgtctcgcagcgtgatgagcttccggtcgcactcctcctgcagtgtgcgcagctgctggttgcgctggtcaatggcctcgttcacggaggggaagtcattgaggatcaggaactgcttgaggtcggacaccagcttcatcagggactcgccggctcggatgatgttggcggctcgcacatgcatctcgtaattgtcctgttcaccctgagtggcccgtgacacctgcgtctcgtcctcaatcttggcggtcttgatgatctcggtgaagttgtccatgatggacttaatgtcgtccttcagccgcttgttgtaggactgcagcagcgtctccttgctctggggcagggctctctgctgggccatggccgagcctcaagcagcgcagcggggagaccttggacccgccccagcgcccgcacaccagacgccgcgtccgccgggtcggcctagggcggggtggtcaagtgcctctgcgacccgcactttcccgcgtctctcccacggcctggccctcccgccgcagtctctcttccccggccgccgcggtccgaaaacctagtcagccgccgcagcctctcccg

SEQ ID NO: 76837 - DNA, 1667 bp, Homo sapiens; identical to SEQ ID NO: 59376

SEQ ID NO: 76838 - DNA, 5835 bp, Homo sapiens
ttttttttttttctaaaacaacaacataggcattttatttcttttcattaagcttcttagtttcttagtatcacaatggaatgatgagaaaacaacaaaaacgtgagtcatttgcaaatctctgacaaagagcagagatctcaaggcaattggggcgggggaggcttgacagaagtgccagagcagttccaacgtcacatctctccttggctggaatggtgagaaaggtggcactgtcgtgagctgtccttggcaaattctgccccatgagccacgtgcgcctgggtctgcatgggccaccccgcgggattttcctggtggcctcctaggtacctgggccacacacccctccgcctggttccaacgccctggggagcaccgtcccagtgctcaggtgggacccagaagccagctctgctgggcagcgggcaagatgtggaggagcggcagaggcaggcagcgttgcttgcggtgggagaagccaaggagtgtgaccaaggcccatctgggagacatctgtggtggaaggtagggctggcgcaggtggcagcagcagaagtccgtgtccccaggcagtagcaggcctagagcttcacagtgccagggggcaggctgtcgttgcagagtctgtagtagcgcaggtcgttgaccagcctgtgcacattctgggtgaatgagggcaggtcctggaaggcaggggcatagctgcagccaacaacacaccaggtcacccacccaccagaccccaacagctacttccatcccagagtgtgcactgaagataggggagcactttctaaaactcaaaacttctattcactgttgcactgcgtgtcacagagactctgtgccaggcgctgtgggagaaaaagaacaagaggaatacgtccctagggcctctcgggtgccagacactgctgcaatcaacatacagacatcaactcactgagtcctcaccacaaggctgccaccaagccctaccagaaccactagtctaaggacagaaagaccaaagcgctgcaccatgaagaagctggccccagctcacactgaagagaccagcacacttgctcctgagtccggcccctcaaacgcagacatggctgtggtgacagccctcttcttcaccatggccccttgaggtgacgcgcacaccgagcaatgtctgcagaacctttacccacggggctccaggccgcccctgcccctcgagagccacccgagcagcagcaaacacagtcccaaggcctgtcccactgggcgcagcgtgggccatggaaggccctgggccagaagtgaggccctgacctccgccatcatgcacacggtgagaccctgctttttttttcagtgtaggtcccggtgaggactcaaacaggcccagcaagccccagcagagccatgagcaggaccaagttcattttcctgcccaaccactattcctcttccagaactccattcaaagcctgcctcttcccaaagtctgcacagatgcctcctatttcctggccccagcagccagctcagcgcctctgtcctgagcaatctgcttctggggagtgtgtgcaggctctggggccagaacacccaggtctgcctcctgcttcgcagctctaccacttccaagttctgtgaactgctcaccttctgagcccccaccatctgtgaaatgggggagtaacaggacccacacttcagaggcttgttagaaggcttactcgagccaagacatgtcacatgcttggcactatgtggtccacagagggtgctgtattggcctgtctaccatgaaagacttggtgaaggctgggactggtgccccagttcctggcccggggcttgagaagcagctggcttcaaacacacagtgcgtgactgaatggaaggtggtgattcttttattttaccctcaaaaaaccaactaagggatgtcttttaaatcagtggctcccaaatgccaaaccagaatttcctgggtagaacacagaagtctgtttctccatttttaataagtaccccaggtgcttctgatataactagatttttttttttgagacaaagtcccactctgccgcccaggctggagtgcagtggcacaacctccgctcactgcaacctctgcctcccgggttcaagagattcttgtgcctcagcctcccaagcagctgggattacaggcgtgtgccaccacacctgactaattttttttatttttagtagagacagggtttcgccatgttggccaggctggtctcaaaccccctaacctcaagtgatccgcccgccttggcctcccaaagtgctgagattacaggtgtgagacaccgcgcctggcctataactagattttgaaaccacagctttaaatcaaaaagttgactgatattgatgtcgttagaagctgatcattaagtattaggatctggcctctagaaaaaggaaaaaacatatccaggggctgaagtgaactggaagaggcttaggagagaacaagtcccaagaaaaggaagaccccaagacaaaggagaacaggatgagtctaagcaaaagcttccctgccacacgtggcaaatgaggaaagcaggcggccaggtttgcaccagtgagagcagtgtgtgcatctgagcactacggtggagccgtggacaagctgcttcacagaggactcaggtcaagaaccccaagaggaccagggagaaagcgatttcttttcctaatttcatcaagtataaaacggtacaaggaaaagttcccagaagttcctatcaggcaagagagaggcctggtcacctgacacaggaagaagagaacaggtgagccccatggggaaggaggtcccaggcactgtcaggctccaacaagatggcctcatggacaccaagagccagcagcacccagctcccaccgaggtgctgcacgggtggggacagcccacctgacagtccctgcacaggtggcagcagtgggacaagagggtgagtactaggagggctcctcccaggacctggcagcaactcagcccaagctgagctggggctggtctggaaagagcccaagacagccggggaacctgggtcccacctctaaccctggggacccagaagtgcagctcccaagcaccaaccatctcagcctgaatgcaagcctgggcacactccaatgctggccccaccggggctcatcacccaggagggagaacggcagggtcctgggtatgaacaaagatgccaagacaaatggaggggctgcagagccaggaactcgggacctccatggctgagactaagaacatacgtgctacagacaccaagactggggaaaaggctgtgcccctcaatcaggctacagcaccaggtcagcaggcatctcgtgagctgccgccaagctgcagggtgggcacagaccacgcccagaggcctcaatgtgccccctccttgctgcacaggtgccaggcttgcgtgcccactctgccctcctcttagcccggcctctttctctcctcacccgatccatcttgaaattccgccccagcacacttttctggttggcatccacaccatcacagctggtcaggaactctgggaggaaggcggcaaagaagccatcaaagtcgactgaggccatgttgtagatggcgatgccaatctcctcctgcagaagatcatgggacttgtggaccaggacctggagcagcacgttcacaaactggaacagcatggcagtccggaagatcttcttgtggtacagcttctgcttggtgttgagagtctccaagtagaagagattttgtttaaaaaggtggatgtcgggctggagaaaggactgtccgaaagcctgcatgatggcactgaactggggctcattctccatctgctcctcagcgatccccctctggacactggccagcacggtggacttgaagaagtacctccagttgtgatggagcgtccggaaaaggagctcaaacagctcggccttcacatcaggggagggacgctcggcaatgatgggatacacttgctccatgcacagggcgatgatgctggggaggaagggcttgaacacctggcctggctcctggaccaccacctgcaggatcttcagaaacttctccaccacccggcagcctgtgctgccctcgtggaggatgctctcggctaactgctctctggtaaacatgttgaggaaagtctgtatgatttgctcagtgaaaggcacacccatctgtactctaaggcctcgaaacagagtgaggaagaagctcagcatctcatcagtcacatctgactgatggataaaagctggaaagagggccagggagacctgaacagattcctgcagcgactggtagcaaatctgtcgagacttggtggactcccccgagatattctccacaatatcttctaagacgctgagtgtctggtggataatcagtttggtgtcatccagtggcatctttctctgtggggcaacagcactgggcttcaggttgcgatagtcccgggagagtgcagagatgaggctggcgtggttgatggagcgcacgggccactgctgctcattctctggaaggtttggccacggaagcagcaagatgttagagagggctcggcacaccaacacctgggccttatcgacaagtcgcagggcagaggcatcagtgattctgttgaatactttctgcactgcagggatgctgatcagaaagacgggccgcacggtggtggccagtgagaccagtaagtggcacgcagatagcagcagcttgtcttggaccttggtgctgattagaggtgtgattgcatccatggtagtagagatgagtgtcacgaactgctgcgtgttctgccggtgaacttcactgcaatactgtgctaaccagtgagagtaagcctgcagcgcagccagggactgagcatgcacatcaatgaggtcaggtttcaatactgatggcacagcagtttcaatgttgtacaattttatctgagatccgtacagagtgactttgaccaacctttccacgactgtgagggcatcattgaaccgtgcagcaaacacatccccgataaagtactcggccaggcggcccacggcctgcagcagggagctcaagtctctcagggagcagtgcagccgccggcagtcgttctccgccgtgatgttcaacctgtgtcctgaccctgaagtgactataaactgttgtaatcccaaataaacttctaaattgtcctgaagaacagggaacagagtggagaaggcgtgcgtgggcaggagctccatcactttggccaccacctccaagctctgccgtaagtaccgctgccactccgtctgctgatcgtcatccagagtctcatcatccaactcctccagctgggcttggttgtatctgaactggattcgattcaacacctctgtgagcaggagcaccagggcatcttcgtacctgttgagaactgcttccttgtctccaagacgacttttaattttacttgtcagatagtccaaaaacagcgtccagatatccaaacaagagaagtaaccttcatgagtaggctgatgaaatgtgtacttgaacaaaagtgtcaaaaactccaccacagggaactgggagtaagactcgattcttcttaggtgaacactcacaaagagccgaagaaagtcagtaaacttctcgatatagctctcatcgagctcttctagcctgctcttcactgtgtgggcattgttatccttggtgattttctgcaggaggtagaaagtcccctggaacatacgcagtaaatactcctcaaattccataggcacacagttcttggacatcccacgcgtccg

SEQ ID NO: 76839 - DNA, 2478 bp, Homo sapiens
agaagcgtagaccgagtagcttgagcgcctcttccggttaccttttcccagtgccagaggcgcctagggttggggtcctcgctcaggcacagagacccgacaccgagcggcggcttccccgggatcgagggacgcgcacgccagaggagacgaaaggaacccgggtcggaccagatcggaaccactgaccattgcccatggcggccctaggccctagcagccagaatgtcactgaatacgtcgttcgagttcctaagaatacaaccaaaaaatataacatcatggcttttaatgcagccgacaaagtcaactttgctacgtggaatcaggctcggctggagcgggacttgagcaacaagaaaatctaccaagaggaggagatgcccgaatcgggcgcgggcagtgagttcaaccgcaagcttcgggaggaggctcggaggaagaagtacggcatcgtcctcaaggagttccggcccgaggaccagccctggctgctccgggtcaacggcaaatcaggcaggaagttcaagggcatcaagaagggaggcgtaacagagaacacgtcctactacatcttcacccagtgccccgacggggccttcgaggccttccccgtgcacaactggtacaatttcacaccgctggcccggcatcgcacgctcactgccgaggaggccgaggaggagtgggagaggaggaacaaggtgctgaaccacttcagcatcatgcagcagcggcggctcaaggatcaggaccaggacgaggatgaggaggagaaggagaaacgtggccgcaggaaggcgagcgagctgcgcatccacgacctggaggacgacctggagatgtcgtccgatgccagtgatgccagtggtgaggaggggggcagagtccccaaggccaagaagaaggcgccgctggccaagggcggcaggaaaaagaagaagaagaagggttcagacgacgaggccttcgaggacagcgatgatggggacttcgagggccaagaggtggactacatgtcagacggctccagtagctcccaagaagagcctgagagcaaggccaaggcgccgcagcaggaggaggggcccaagggtgtcgatgagcagagcgacagtagtgaggagagtgaggaggagaagccgcctgaggaggacaaggaggaggaggaggagaagaaggcacccaccccgcaggagaagaagcgcaggaaagacagcagcgaggagtcggacagctcagaggagagcgacattgacagcgaggcctcctcagccctcttcatggcgaagaagaagacgccacccaagagagagcggaagccgtcgggagggagctcaaggggcaacagccgcccaggcacgcccagcgcagagggtggcagcacctcctccaccctgcgggcggctgccagcaaactcgagcaagggaagcgggtgagcgagatgcctgcagccaagcggttgcggctggacacgggaccccagagcctgtctgggaagtcgacaccccagccaccatcaggcaagacaacacccaacagcggcgacgtgcaggtgactgaggatgccgtgcgccgctacctgacacggaagcccatgaccactaaggacctgctgaaaaagttccagaccaagaagacagggctgagcagcgagcagacagtgaacgtgttggcccagatcctcaagcgactcaaccccgagcgcaagatgatcaacgacaaaatgcacttctccctcaaggagtgaggcttggtccaatacatggctctgccccccagaacttaaggctctcactgccccttcgccatcctagagtgaggctctgtccaatacatggctctgccctccagaacttcaggctctcagtgacccttcgacatcctgcttgctccctgactcccagggccccgtagttagcaattctggaaaagttaagccatctcctcctctggcccttccttctggaatcttcagatgcctgttaggccttcttattgtcctcctcctcctggctcggcctccctcacactgaccaagggcctgtgctgcccactgggtaacttctacagttctcccttccacttccctaagtctctcttcagctgtgacttatccaccacatagcccagtaagtcttcagttttggctgggcatgatggtgagcgcctgcagtcccagctacttgggaggctaagcccagttcaaggctgcagtgaactatgatggtgccactgcattccagcctgggtgacagaatgaaatcctggcacaaaaaaaaaaaaaagtacccaggcttgggggggggaaccttgttgccccacttttcccgtaggctgaggcacaaaattcacttgaccctggaaggggggggttgctgtgagctgacaccaccccactgcactccagcctgggggacacgtgagactttgtctcattaattaaaaaataataataaattgctcagaaaaaaaaa

SEQ ID NO: 76840 - DNA, 1886 bp, Homo sapiens; identical to SEQ ID NO: 59377

SEQ ID NO: 76841 - DNA, 901 bp, Homo sapiens; identical to SEQ ID NO: 59378

SEQ ID NO: 76842 - DNA, 1340 bp, Homo sapiens; identical to SEQ ID NO: 59379

SEQ ID NO: 76843 - DNA, 3203 bp, Homo sapiens; identical to SEQ ID NO: 59380

SEQ ID NO: 76844 - DNA, 3138 bp, Homo sapiens
gcggccgcggctcccgagctcctcgggctctgggtcccggcgcccctccggccgcgagtcccacgcgccacccccgggcgccctcgacggtggatctagcggcggcgaggaggcgggtcccggccccggcgaaccccagtcccggcccccggccccgggcccagcttcggcatggatgtgaggttctaccccgcggcggccggggaccctgccagcctggacttcgcgcagtgcctggggtactacggctacagcaagtttggaaataataataactatatgaatatggctgaggcgaacaatgcgttcttcgctgccagtgagcagacattccacacaccaagccttggggacgaggaattcgaaattccaccaatcacgcctcctccagagtcagaccctgccctaggcatgccggatgtactgctaccctttcaagccctcagcgatccattgccttcccagggaagtgaattcacaccccagtttccccctcaaagcctggacctcccttccattacaatctcaagaaatctcgtggaacaagatggcgtgcttcatagcagtgggttgcatatggatcagagccacacacaagtgtcccagtaccggcaggatccctccctgatcatgcggtccatcgtccacatgacctgatgctgcgcgttctggggtcatgcctcctgcccagctcaccaccatcaaccagtctcagctcagcgcccagttggggttgaatttgggaggtgccagtatgcctcacacatctccttcacctccagcaagcaaatcagccactccctcccccttccagctccatcaatgaagaggatgctgatgaagccaacagagccattggagagaaaagagctgctccagactctggcaagaagcccaagactccaaagacaaagcaacagaaagatcccaatgagccacagaagccagtgtcagcatatgccctgtttttcagagacacacaggctgcaattaaaggtcaaaaccccaatgcaacctttggagaggtctcacaaattgtagcatctatgtgggacagccttggagaagaacaaaagcaggtatataaaaggaaaacagaagctgccaaaaaagaatacctgaaggccctggcagcatacagagccagcctcgtttctaaggctgctgctgagtcagcagaagcccagaccatccgttctgttcagcagaccctggcgtcgaccaatctaacatcctctctccttctcaacactccactgtctcaacatggaacagtgtcagcatcacctcagactctccagcaatccctccctaggtcaatcgctcccaaacccttaaccatgagactccccatgaaccagattgtcacatcagtcaccattgcagccaacatgccctcgaacattggggctccactgataagctccatgggaacgaccatggttggctcagcaccctccacccaagtgagtccttcggtgcaaacccagcagcatcagatgcaattgcagcagcagcagcagcagcaacaacaacagatgcaacagatgcagcagcagcaactccagcagcaccaaatgcatcagcaaatccagcagcagatgcagcagcagcatttccagcaccacatgcagcagcacctgcagcagcagcagcagcatctccagcagcaaattaatcaacagcagctgcagcagcagctgcagcagcgcctccagctgcagcagctgcaacacatgcagcaccagtctcagccttctcctcggcagcactcccctgtcgcctctcagataacatcccccatccctgccatcgggagcccccagccagcctctcagcagcaccagtcgcaaatacagtctcagacacagactcaagtattatcgcaggtcagtattttctgaagacgcatatggcagacggatttgcgtataccaaggagagtggcataggagggaaaagcatatgtggctgaaacctgtaagttggtgttggttatgcagaaatgtgtaacagatcaaacggtcctctcaagtgtctattagataggcaataagaactgcagtgtagctgagtaacatcttttagctgactataaatcactttgtttttaaacaagaaaagctgtgctcttttatgtgatgccttttttatttattcaggctatacctacaatatgtgaatcaaactgtttaatgaatcctgggacatactgatgactataaactggcctctctgagtcatagaaaaatggccttatttctccagaagtgagtaaaccacacttccaggctatctgaactcctgaagccctaaaaataaaaagcacagttgtaactacctgaaatatgaagatccagtttcatacaaacattttgtatgacgtgaatagttgatggcatttttttgtcatgaaaaaaataatgtaaatcacaggacttttgccaaagctcttattttttttcctaaatctctccagaaaaaaaaatgcaagtgactaaattcaattattgactaatttccactttttatccatgacttctccaaatcaaaccacagtatatgttgtaacaaatatctatgaccactgttagcccattatattcattccaattagaagaaaagaaatgtgaatactatattccgtgttttgagtgacaagtttcgaaaaataaaaacactgtatttttaaaagggaaatgcacttaaatgaaaacagttattaccaaaagttaaggatttaaaaaggaaaagcaaggagtttttattatggatgtaataccagtagaatatttaaaaggcacaccacatctgaataatcaatgtaaatattttctttcaaagttgtaagttttcatatcatgtgctgtaaagttttcctaaatgaggctttaacgtaaaacactggtgacataaaccattcattgctacgttgcttattgtgtttttatgctgttttatacttttttatgagttatgatagcagcaattaagttgtttgtattttgcttaactaaaacaaaaatgcttttatcttgctatagaataaacacatttcagtaaaaactgtggactgtattttgatgcaacaacaaagaaactgttcacttttcaaataaaatgatatgtcagaaaaaa

SEQ ID NO: 76845 - DNA, 2629 bp, Homo sapiens; identical to SEQ ID NO: 59381

SEQ ID NO: 76846 - DNA, 2265 bp, Homo sapiens; identical to SEQ ID NO: 59382

SEQ ID NO: 76847 - DNA, 7153 bp, Homo sapiens; identical to SEQ ID NO: 59383

SEQ ID NO: 76848 - DNA, 2966 bp, Homo sapiens; identical to SEQ ID NO: 59384
  misc_feature (1)...(2966): n = a,t,c or g

SEQ ID NO: 76849 - DNA, 970 bp, Homo sapiens
ttttttttttttcatcttccattattttattattttttatacatatatatatatgcgcagatctgttttatgtacaacaattggttctatcaaatattcagaccaaggcattctactggtaatttccccccaaatcaattcaggtaaaattagatacttatgcacttcacgggctatcaaaacttgcaacttcattatcaatttcagttctgaggtcatacacacaattcaaaatatacattaactaggttaaggcgataaaagtgggctgaaagaaaccacaggattcagaacaatgaaactgtgtattttgcttgcatgagagtcataacgtgaacagcaagtattgtgcgtatctcatagctcttcagtggagaggaagcggcttctgaacatctaaggtgactgcacagcaggtgggaaacagctggtgtggcctgctggaggcttcgccgagggagggctcatttcttctctgcctctccttttttgggttcttgtttcaatttgtaatcagccagggcggccttgattgcatcttcagccagcatggagcagtgcagtttcacgggaggaaggcagagctccttggcgatatctgtgtttttgatagtcaaggcttcctccaccgtctttcctttcacccattcagtggctaatgagctggaggcaattgcggaaccacagccaaatgttttaaacctagcatccacaatcttccccttttcatccacttgaatctgtaatttcattacgtcaccacatgctggagcccccaccagtccagttccaacatttttagatgtcttgtcaagggaccccacgtttctaggattttcataatgatcaacaaccttcttgtgatagagtcgggccggggccgacagctcccgggcgggcaggcgggggctccgcagcagcagagccgatgccacccgcctcagacggccagccccagccgccgccatct

SEQ ID NO: 76850 - DNA, 1619 bp, Homo sapiens
ttttttttttttgccattaagggccttttattcgtattcatcacatcggagatcatctcttcctaggaagcttttaaaaaaatccccaggttggattagggcactccctctgggtccctggcaatttcctccaggttagggatcccaaggggtcgctgccttcctgggtctctcggcctggcccttggggatctacagtcatcaagaagtgctggggggaagtgagctctttatttagacatagctctgctgagtggaaagtgggcaccagccccattaatgcttgctggctggtggcttccaagcacgccccactgccaaggctcagctctgcagttctgccactgcaggtccctagcacagcccccagggtccttaaaagtcatcatcatcacagatgtcaaggtacacgtcgaaagcctctctgttgcagtttccatcaggagtgaagacatatttgtggaaggtcccatctacgcagatggcaatgacagagttgacgttcttggaagtattgcgaccgaaggcgcagatgcaagctgactcagcaggcacagtgaagctcgccaggctccactgagagtccacgtactgcccaatcataggccccaccttgcccacgcgagccagcgcggagcggcggttgaggcgggtatccttgagagcaaagatatggacagtacccttatcactggaagcgcagaggaaggaggagtcgtggctgaagttaatgcagtagagggtggcagggtcagtgcctcggcgcagctccaccagtttctccttggattgtgtgtcaaagaggcgaataagggtacccttctgggaggctgaggccactacagtgcctggctggtttagagacacacaggctatgtcactctgatgtgcattgatcgtgaatggagcagacgaggtgccaggctttgtgctcgccaggtccacaagttgcagactcccacacttgtgtcccgggaacactagcagttgcttctccaggctggggcagaggtcacagagccccttggggttgtcccgggtatcaaactcaaacagctttcggggattgtcggggaaggagtacacatagatgcggttcttcagcacgatcacgatcttgtcatggcgcatgcgcacagaaagcactggcttggtgaaggtgaactccagcaccagcttctccttggagtccttgccctcccgggcatcgtcccagatcagcactgagatctctgagaacttgggactactaccaccgcccaccaaggccagaaggttggagcggtgcagcatctccaccaagcccatgctgcccacctgctcgtggtccagatgccccttctccatcaagggctccacgttgtagatgcgcacacctgtctccatggcgcagcaaaagcagctttggtcttggttgaaacgcaggctggtcactcctcgaagtggctgttgagtcatggtgcaggattgttcctcctgggatcgtgctccagcttcctgccgccttcaccggcctgacctccgcgtgtccctgacccgggccccagctgtcggtgccgcccgcggcccggttttctgacctcccgggccttggagcccggctcgggtgtttacatcag

SEQ ID NO: 76851 - DNA, 1979 bp, Homo sapiens; identical to SEQ ID NO: 59386

SEQ ID NO: 76852 - DNA, 1618 bp, Homo sapiens; identical to SEQ ID NO: 59387

SEQ ID NO: 76853 - DNA, 955 bp, Homo sapiens; identical to SEQ ID NO: 59388
  misc_feature (1)...(955): n = a,t,c or g

SEQ ID NO: 76854 - DNA, 1031 bp, Homo sapiens
cccgggccgacccacgcgtccgcggacgcgtgggcggacgcgtgggctcagcccaacatggcgatgcacaacaaggcggcgccgccgcagatcccggacacccggcgggagctggcggagctcgtgaagcggaagcaggagctggcggaaacattggcaaatttggagcgacagatctatgcttttgagggaagctacctggaagacactcagatgtatggcaatattattcgtggctgggatcggtatctgaccaaccaaaaaaactccaatagcaaaaatgatcgaaggaaccggaagtttaaggaagctgagcggctcttcagtaaatcctcggttacctcagcagctgcagtaagtgcattggcaggagttcaggaccagctcattgaaaagagggagccaggaagtgggacggaaagtgacacttctccagacttccacaatcaggaaaatgagcccagccaggaggaccctgaggatctggatggatctgtgcagggagtgaaacctcagaaggctgcttcttctacttcctcagggagtcaccacagcagccataaaaagcgaaagaataaaaaccggcacagcccgtctggcatgtttgattatgactttgagattgatctgaagttaaacaaaaaaccacgagctgactattagaagacacattagtgccagaagccttccaggctgtagagccctgcttcccttctctgacctcacaaagataaacatccttcacctgagttcgtggccatccacctctgctctcccagacccagtgcctgtgactttgagtagtttgttctaaatgtggtgacaaacaagtcatttctgtaagacattgggtcttactttatgtcatttttagtaacagaactgcaggaagatcaagacaatgttgtaatcccggcaagttgctaactgtgcgtttctcccttcttagaatgaatgtctcccccaaaactggctggcaccagcttcatctgtgatacccttcaagaaatgttctctggttttgttttatg

SEQ ID NO: 76855 - DNA, 1516 bp, Homo sapiens; identical to SEQ ID NO: 59390

SEQ ID NO: 76856 - DNA, 1090 bp, Homo sapiens
ttttttttttttacattttctcctaattttattggggagccatcattatatattaaaagagcagaggtaattctgtcttctccggttgtgcagcacgatctgctccagctcgtcatgccagggcccggaaaacctccaccttctcccggtacagctggtggaactgcttggcaaggcagtggaaaggggcttcgaagttttccatctctttcacggatgttccaaaacattccaggccctggcccagcgcccatgcccgggcctcagctgagtccactgctcgtctgccggccaggtctgtcttgttcccaactaaaacacctgggagagagatgcctggagcctgtgaccgagccttctccagccacttgctgcagttgttgaaggattcttcattggtcacatcatagacgagacataagacattgggactctcccacaatttatccagcatttccgaaaacagctccttgccagcagagtcaaaaatgaagagttccacactgtctcccgtgtcaggaactggcactgtcttcaccaccaaatccattcctgttgtcagggtgtagcttttctggaaatgggctccatcactgcggaagatctgtgccagggcggtcttgcccactgctgggtctcctgccaggatgcatttggctgccagcttcaccatggtaaccaacactcccgcgagccgtacccagaggacaagagcggctgctagagacgcgagtgggtgggcttcgggccctgggctggcctgggacgggaaggtggggaggggagggctgatctcaagggtcagtggccgcgacgggactggggatgaccgagcccggcccttctgggccgggggcggatatcgggcgctgggggcgggtgggcaggggagggctccaggtgggcccggctcgaggcctgacacggcagtctgaaaaggtgcaagcgagcggacacggcctgtgctccccgcccagcccctcagcacagccctacccagagggttcaaggaaggacgatccggctctcctccgatcacaagtaccgggccggatgcactctccaagcaaccatagccggacgcgtgggt

SEQ ID NO: 76857 - DNA, 1078 bp, Homo sapiens; identical to SEQ ID NO: 59392

SEQ ID NO: 76858 - DNA, 1103 bp, Homo sapiens; identical to SEQ ID NO: 59393

SEQ ID NO: 76859 - DNA, 1026 bp, Homo sapiens
cggtgactgcaccgcccgccctgccagacccgcccggaacggggctcgtcgccgccagtagccgcagcaccgcagccttgggcctcgcgccggctatggccgtgccctggggctgagccctcaggttgtgaccgagattcccgacgagagagactgaggggaagagaggaaggaggggcgggctcctggcaaggcattcgctcctgagcggaatcctgcaaagatggagaaggaggagacaacccgggagctgctgctgcccaactggcagggtagtggctcccacgggctgaccatcgcccagagggacgacggcgtctttgtgcaggaggtgacgcagaactcccctgcggcccgcactggggtggtcaaggagggggaccagattgtgggtgccaccatctactttgacaacctgcagtcgggtgaggtgacccagctgctgaacaccatggggcaccacacggtgggcctgaagctgcaccgcaagggggaccgcttcttcccgagcctgggccagacctgggacccgtgaagtcttcagctccttgcagcttcttgaagtggtttttgaaacacaccacagccatcagcactggaatgcaaaggaccagaacaaacaggaaggaagccagcagccaagccggggcagtttcagtctccaccccaaatgcaggactgtagaagcggccaggaagaaaaccaccccctcttaaggttgtttttgtgaccgttctttggagcattgttctaaaaatgggaaattacatattgctgtgccaagggcaacaaacacctgcagttaaaggaataccttccgcgaggcggcttttcggagcatgcatgtttatagctccagccaggccagaccgagggctgctgcataagccctgcttggtgcatttctttacttgcaaggggacagagtgtgggcttaggtttgggactagagggggctttggcaactatggtgctcaggtgattatccttcgctcgtttatccaataaacaattatcaagcaaaaa

SEQ ID NO: 76860 - DNA, 5418 bp, Homo sapiens
  misc_feature (1)...(5418): n = a,t,c or g
tttttggataatgaaactttttatatctgttttgcacaaatccccaccaagtaatttcagcataaagcaaaccaaatggcagacgaaatgatgttaggtatccttgtaggtttacttcataatacataacctctaatccatgtccatcttcttgtttctgcttttaattctgccatttcctcttaaaatttagggtttaacaaagacaacagggctgtttgccaaatcgcagctattaattcacagcatagaaaagtcaaagctatagcaaaaaattgctaatctgcacaactttaaaaaatagttcagtacatttttgttataaaattcatttacaggaggttattcacatgtacttgtcaaatttactcctgataattcacaaaaacatacaactcaacaaactgtgcacaataaatccaaggcaaattatatacaaagaaacaaaacaagcttttaagtagcacatattcatttgaaataactaatattgaaagaagacagggaactttcttttaatgccatggcaaagacgaagcgaagagccacacttcacaccttgtaaaaagaatagccctgttcaacaacgctgcgctgacagccacatcaggaggggccacggtgaacataggaaatggctttggcaaatacttgtaccaactggaacgagtgaagtttcaaaagtaatgtgaggtacaactgcattccgctgtgaaaggccgtcacaggacacaggctcgtctgttagaaaggatgatctagttctaccattaattcttgcagaatcagatctgctgagtggtgaaccaacaggtgaacacaacgtaagaacaggcatcaaacttcactggaaataatattgttcagtgtgtggcggcaaaatatgcattttagagaaaacttatttctcaaatcatgtgttaatagtattaacatgagcagcgtgagagacatcctgaccccaacgtttttgcccatgccctccctttagaagcttaggagtttgtacattccctaagtggtcagcactacaagtgtctgctaaaatgggcacttcatcaagataacaggaaagcaaacttaaagtaacgagatttcttcccaaaggcacatggaagaagctgatagagcccttgacccagacagaatgggacccatccctacccgtcctgaactgtcgcacactgcatggccaaagacaaactctccacccccacagaggaagcagtggctgactctggggacaaagcactccaggaagtcacctgctccctgggtttcaggagtattcagttgaccgtctggacaccagtgagggagacacaggtaatgaaatcaaatgctcaaacttttggcaaccgaaagttgttttttaaagctctttataatctgctcaagtagaatttctaacacaaaacccttttttgcttaaaaagcagatgacaaaggaaatgtcaaataatgcacatgaatcttcagctattttcctacccccaaatgagatatggggctgcacagcattcattacagatccctagtttttacaactgtcaactgtacattctcatgtttaggatactccagttcactgcgtggatatttggaaaactggacaaaatcaggcagcccacccctcccttgtcccgagattcctcgatctccattcaccatgaccaattttttcccccacaaaagcactattaccttttattagtagctggaaacacctatcagatattctaaacagcatgtatttttaccaggtagatgatttctgaagatcacaggaagtctaccactctcttcccagttctgaactcctctggttacgcttcattttaaatcgggtgcttctttcccgcccaaaatattctatttggcctgccccagtggttcccaagctgcctggtgatcagaatcccttgggaaatgttgaacacacagcttcccaggctttctggaaaactagttagatctgtctgacaatctgtaagctgaggcgattcttccacagctgacccagcgctaatctagcatttggcaaccaaatgtctgtacctcaccagtcacacaaggctcacaatatgctgggagcatttgaatgatagctcaagaattattctttcactccatattcttctctctcaagaagattaggaattttagctagggaactatgtgcatactgaaacaggtaaatgaactcatcacagaaatataataccctgggccaatgcactctatctaaaaatgcaccatgtcagcaaaactttacctaacataaccgtgctgcccaaagtgtcccctaggagactccaggtttttggggggttttttgctttttttaatagagccagagacacctgacccaccagcactaactcagcttattccaagctaggctgttaaataattatctgtcttgctctaacaatggttgaaaggacccgccctcctcccatcttttttttttttggtaatataaagtttgttctgttgaaaactgattaacattttaaacagggggaaagaaaagcggtctactagattaaattttaaaaggattttgttatttgctatacaaatatacatttcaacttttacaacattcactccagtctgacctccttgtctatagaagactaagagatcaacatttccagtctctgacttcaaggacattattacggatacacaatgccctctgaaagcttttgcaaatgacagaaaatactgaagatgaccagaggctcaggtgttaaggatgcattttccatgttttccaacagcacacaaactccttacaaaaaacaagcttatctagatggtcccacgagctggtcatcttcagtttacaatatgctgtggctgctggcccatgtcactgggctttcctataaaagctttcttttcttggaactgctgtcctcctgctccagtgtcctcttgtcccacctagagttcctcctggtgtgatgggtctcggaaccacacttctcctgctccccttcactgaaagccctggcctctctcctgtgacagagctcctcttccgggtcatcacatttgctctgacacgtggaagcctcgggactggcagctggaggttcgccccgcacgggaggtttgtggctgctcagagcagccactacagcagcgggctgctgtacatggctcaggtcctggtgaacgacagggaagcccggctcgcccgtaggaggtgttgctccaggatgctgggggctcgagggttgtggatcccaaaggaatattcctcctttgacctcaatgcccatcctcttcagcagtcgtgggtcctgaagttggtcatgaacaggaggtctttcagggtcctttgaagtaacagtaagagtaatttccttggagtcagagggtgtgtggtatagagaagcagcaacagatgtcttggcaaatccactgtctagcttgctgctgggcaaaccaccctggggtctggacccctctggggctatggtaggagggtgagtgagacttctctgcagcacaggcttgagtttcagaatcttcactgcatcatgtctatagtttttgtcacaggtcttaataatggcaccacgcttctgagcatcctgaatcagctgattccaatgctggttttccatcagggtcctcaaatgtccgaggatgaagaggctgtacttggctcgtgtgatggtgacattcaatctctgcaaacttgccaggaatccaattgaaccttggatgctatttgctctgacacacgtaacaataacacaatccttctgccgaccctggaatgcatccacagtgtctacttctgctggtccttttctatcgaactctttgtccaaatccttctgaatcatcgtcttctgggccttgtaatgagttattatgccaatgtttcgaaaactaacatcctttcttttgtctttaataagcttaattatttccatcaccagttttatttcttgaacatttatatatgagtcattatcccgtctttctgaaccatctccaacatcaaacacaaggtatggctgaaatggccaatctgatgaacatcgaatggcttctgtctgtctatttgtttttaagtttctgttataaacataattagaagggaagaggcatatgtctggatgcatcctgtactgaacagtgagctgtagaatgggcagcctgctgatcatgttgtgttctacattctcttccagcagtctgcagaagcgagccatcattgactggtcgtagccatactcctgtgctttcatagagatgactgtcggagggagctgcttaggatctcctactaggatgagcttattgcagcgatggatgagtggagtaagagtctcaatttcacaagactgtccagcctcatcaacaatgacacagctgaaggggacacccccttgcccacggaaagcagactcaagtagtaaaccaccacttgtgctcaacgtgcagcagatgatatgggactctaagatgatgatactctgtgttttctgtgggcgtccttgaacctctttaattttagaagcaagttcctgcctttccttagaaactttggaaatgttttcatctaattcttgcctctgtatttcccgtccacctcggcatagagctcgctgccgggaaagctcatccagctgataatctagaaattcctttcttttatgcatcgcctgaacatgagaaggtaactcttttttcattctgtggtttacttggctgtccaaactgaactttagaacctcactattaatagacttttctggacccagtcgtactaaatttatatctccacagtttcctaaaggattcttcttgtctttacatttttctttgaattcaaggataatttttttcatgagttcatcaacagctgcattggaaggtgcacacacgaggacacggttttgtttgattttggcattggagttttcgtctgaatgccccttcctctggttctctgtcagtagacgatagaggaggccaacaatagtttttgattttcctgttccaggtggtccatgaatcaagcagattttggcaactgatggtgagtgtttcaccatagcatatgcagtttctattgctttcttttgatcttcattgaaatctcttaagtacgcaataattctctcagatgttgtagtcagtaaatcttttgtacagaagtccatagggtttggattcagaacagctctagccagttggttccgactacccaacagagacatggctttcaacttcctttgtgtagttaccagagaactgattacaatacaattcacaagttcgtttaaattggccggaaagttctcttgagtctggatggaaaggtaacactcagttttggaattccaccgcacttannnanggnctacaatanagggctcgatggcg

SEQ ID NO: 76861 - DNA, 1456 bp, Homo sapiens; identical to SEQ ID NO: 59397

SEQ ID NO: 76862 - DNA, 1649 bp, Homo sapiens
ttttttttttttaataaacataagagtggttttattgattacatacaattttagctatattaatatatattataaactttaagaattagaaataagtgacttttattttttaaccaagaataatctaagttatggcagcatgttcaatgaaaggtaagtccggcacaatttttctatatctgtttctcagataatcaggaacatcatccaagctttacattacgataccataatgaccctcagaacacaagttccattaagtagaaatgaagcatcatatgttttcttttttaggaaagacccccccttttgttgtatagacatacccctaataatcttactctactgtacaaataacttttcacccacaagagctgcctcaagtaactttcattttggaaagctatcaaggcatgagacagagtagcaaaatgccactctggactttgcatcttggagtttcaattttgctttaggatttagaccccagtttataattaaaaccaaatcattcccacattattatacttatgtaggaaagccttgctgtgtccactgttaacacaaagatagaaaatgtcaaatagtttaagcaagtatttggcagaccacagacatgaaacagtgccgtcggaaacggaaacactttagtgttttagaggtgaagagattgatgggtgtcattcaaatttctcatctccttcttctacatctttcagattgagtacttccaaagaacctttgcctttagtttccttttttattagctcatcaatttctcggaagcagcccgggtcaatcagacatacgatttctaactgttggccataatcttcactttctatgaccttgatcagtggcttgagcttttctttcagcttcttgccttcattgactggaaggatgaaccgaagcctcatgtgagcacgttctatcttcattttctcttttaactgctttatcacttccaaagcctgctgttttgtactcttgttggttttcaccgaatagtggatgtccttcatggctctctcaataaggatcacggtgtatggtctctttgtttcaggattcacacatttgtctgccacaatagttgcaatgtccctaaacatctgctccagttgtgtgtgtctttctttatctgatacttgaacttctcctttagtcaaaatctgcttacagatttcagtttggtcatctgttccaaacgcactgatgagatcttcctttttggcaacctgacctttagaaacatttacaaacactgagtgggtctgcagaacttcatcgaggtctttttccacgccgctccgccagccgacgaccttgtttttgtagcaggcgatttcgaagcgcttcccggcacgcttcatccgtaccacggccacattggttaggcggatctggttggtgggggtgaagatcgacatcgcggctgttcaaagacccagaagccggcgaaccagggctgacccgcgccgtccagcctgaaggccaccagcgcctcgcggtaacgaccgatcggcgcgcggcactgacccaaccaccagtgcgcggcgccgcgactcactagcttcaggcagccgtcacagtgtgtctggcaggcttacttactgcgcaggcgtcaggtggagcaaaagacgaaa

SEQ ID NO: 76863 - DNA, 2017 bp, Homo sapiens; identical to SEQ ID NO: 59399

SEQ ID NO: 76864 - DNA, 1418 bp, Homo sapiens
ttttttttttttccaggtggagtctgatgatctttatttcttagacagccctggactggggctatgaaacacagtcaccagcactatactcactcctagggtggctctgtctgtggcgttcctcaccatccccgggactcatagctcagtgccaccccccgacaccatgccctccagggggaggggacagcgaaggggagaggagggagagccctgcgcctggccctgtcctgagtccaaagattcccatggtgatcagagggcggtgttgggaatgtgggacacccttggccccgcctccctgacctccccactaccccaccaaaccagccttccttcctcctggcacttccagtgtccattcccggcagtgcaaatgtgttaggtggggtagggggtgggatagggagataaatagcagcctggcgttggcactggctggtgctctgtggtgggtatgagtaggggacggggccgccttcctggagacaagctcctgggtgctgtgatcagaagggtctgtagctccagtagctggagaacacggagatcttgtccttgagctgctggcagagctgcagggagacggtgaagtagaccagggcgtcgttgagccaggggatcacgcactccactttgtgcacgtggctcacctccaggcgctgagagccccactcgaacatggccccagggctatgcagcaccgcgcccccagctgggcggaagttcttggtggagttgggctgcagggcatgcagctggtacaccgtgaggcagagcttgttgaggttgatgtagacgttgaccagcaggtcggacggcagggcaggggcgaacatccgcgtgaggccgctggcggcgatctcggggagggtgagggtggcgggggtggtgagccggtttcgggctctggtcagctgcagcatcactgcgtccatcagcttgaggacctcagcgcccgtcttgaactggtagctctggtcccggctggtaagcaggtaaatggcttggctcacatggtttctggcatcctggatctgctgcagcttccactgcttgtcctcccggaaggcgaagtgcagcagctggttgttccggggcatcttcaggttcacatccgcctggctgagggcatccccctgcagagtcagcacacccttcacctggtctgtgccacagctgcctaggatgaagttctcttgcttggcgggcccctcagtgccggagcccggcagagtgaagcgcagagaggcctccttgaggatgtcctgcagctgcttcaacacagcgtgcacctcgtcgtgcagcagccagcggaactcctcctccagcaccgcccgctccgccgccgtcgctgccatcacggtggccatggccgcaggccgccgccgagcgccctccccaccggccgctgctcc

SEQ ID NO: 76865 - DNA, 1825 bp, Homo sapiens
  misc_feature (1)...(1825): n = a,t,c or g
ttttttttttttcttatttaaaatattttaatttctaaaaagcttaaatcatattaaaatttaaacaatttcattgtacagtacttgacaatacatttcaacaaactgaaaggcaaaccagtaaatcagttttgcttactttctaagcttaataatgtacagactcttgctcttcaagaagatgcaaaaatcagcaacagtacaagtgaaatatttaaataggaaatctgaaacaaaacgggattcaatctgatcaaatcccacaattaattgaagttttcattttattcaattgtgaataaaatagcagacactgtttcatccaataagccaatgatatcagcttaggagaaattgatctgcctgggcttgtgcaagacaagaacagttaccttctgctgaaaggatgtgagttttccaaatttggttttcatgtcatagtttccaaataaatgaaccgctccaccaaaaacgacagtctagttgctacctatcttccagggtttcatcatacagccatttataagcacaatctttggaacgctctatagtttcaaaaagtgttttgaagtcttgagggtgcatgttaactactttctcatcctcctgttttcctatttgcatcaatatatctctcgcatcaagtggagtcaatgaacgtaagtggtctattacagtggcgctgcgcctcccaaaacagtgctttaacaagtgaaaaaatatattatagttcataggtgttaagttcttggtaaataaattttgacgaggaatcatttgaataagatacagcttttgttgtaattggtctaataattccctacgctttgggttttccagcggccctttccgggtgtatatatcaaatgatgaccaaggctccatgtgcagaaccttaatctcacaagctaattgccagataacacttaatacatgatacaagtctggatttccaggatctgccattagtttctggaattctttttcaccaataaacatatttacttctattcgtccaaatttatatatagaagtacaggaatacaagtcatatgcgagtttccaaagtgcccttttctcacctctacttgggaacattccaactacttttaaagggatgtctgctgtccaaggaactgcttctattcccaaattcttaaagagccctcgagaagacatagcaggtggttttattactccaccacttctaggatctagtttaaagaagtcacagtgaatcactcgtagttttccatccagattttttcctaaggactccaaatgtggaataaaagttttgtcactttcgagcgcaaccactttggcaccagcttcaagtaatgcctgagtcaggattccaggacctggattgcactccagcagtaggtgtggaggtctacttggttttcccaaatagatttgcgccagggtctcagccaatctccgatcggttacgtaacgcttaaagtctaagctggccttagacgccttccttggcggattcctgaaatccggttcgggccacagctgcggagaggagtcagagagcccacagtggttcctcgccggcaaatgctttcgcgtcgccgcttcagaccctaaaatgcaaaagcgaccagcgcccgccaaggcggagagcctcagccgccgaggaagcccgaccactgggatccacatgtccttgtctctcaggcccgctccaagaatcacctagtgcagctactacagtgaaccccacgcagggtatcccacgtggaacattttctggcgtcccggacgcgtgggtcnaccgngnattcgaggcgatcgacggcttcagccccct

SEQ ID NO: 76866 - DNA, 3293 bp, Homo sapiens
ttttttttttttagcatgtaattctatttttatttcttgactacataacctagcaggggtctaatactgaccgtttcaatttaaatgctggaaaaatactgaccaagactttctgtgaaaaagataatggaaaacagaaaccagttagtaaagccatgcaaataggaagtgattttcagccccaagaggactttgtatcatctatggctccatttaaacccaagtagcatctgtcctggtggattttgaacatccttttgatttaacacagaagaaggtttgttctaccctttaaaagcatatcctcttttttcccccaacagactcctcaacaagtggcttctaagacaagactggggttgttttcttactgaaaatcctgtgtttatccagtcttttccttttcaatttctgagtttagcttacctaacagcaaaacagaatcctcaaatttctcacagagcaatgaaaagcaaaacagttggtttctctgatcaacatcattttcagtatgaaaacaaaagttatgactcctagacctttgaaatatttacaaattgtactttaaacaacggagatttttcagtgtgcttctaaaacaaagtaaagggatcagaaaatgtggttcaagtcaagtgtgcaaagctctcgaagaaaggtcctgcagcctggacaggagtacaaatattctcttatacaagttaaatgtacccttttcctccacaacatttttgaaatgaaacagcaaatgcatttatactcacaaatcagtcaaaaggcctcttctccttattaagccctttacacacagatgataaaagcaaggttttcctacaatagatgtggccctaccacatattcaagatacaatcatcctaccatcagttaggttatgctttaaatattttgaaatcaggtatccttaactactgatttccttttagaaactatcttgagtgttagattttcataattacaccatttttaacttttagctttttaaacttctagacaaactatatgtttaagcaaaaacaaaaataaaaatcctcaaaaaaagtaatatcagagttttaatttcaaccagctggcacaacaatgaaagtgtcagactttctgaaagtactcgagaaataatgaataaattcttaatgttttcccctccaccgcccttttttattctccaagattaggaattactacggattaggtttttgaaaataaagtttcctttttggaaaatggtctacattcagaaatgtcttagaacaagcatttaaaaaaaactaataaataatcataaatcaaaatacattaaaataaaattacagtacatcatcgctcctagaaaattcaccatacaagacgatcctttcaaaggttcataaataaaagtcttcttgactcgaaatcgtttcctgcatcgtgatgaaaagtatgcagaaaactaagaagaatcgcaagttttcagtagggtgatgtccaaactacttgatctggtgcggggcggagagactgttttgcttttgatccaagtgaagacaatagaaatgtgctcgtcccacttcctcaagtcctcaaaaccttgtcttgcccgggagctgcccctttcaggcagagttggaggtgctgcggagaagccggtgcccgtgcggctgcgagtgcggctgtgggtgtgggtgcggtatttggtgcggatgcgggtgcgggtgagggtgtgggtgcgagtgaggatgagagtgtggatgtggatgtggatgcggatacgggtggagctgctggggctgaggcttgggttggggctgaggctggggttgtgattggggctggggttgctgcgcttctccagcacgccctccttcagcgctttgcggctgcggctgcgaggggggctgctgctggaccaggtgctgctgcttctgccgcgtggatttgaccgccaggatggcctgacgattcttgtactgcaccatctgcagcgtgatctcggcgttccagccctggtcttgcgggcaccgaaagtcgatctccttgccctctgccatcaccacagtgaagtacatgtacttgcccttgcgctccacacagtccacggtcttcatgttggagaagtgcagttccttgagcttgaccggcggctcgaggctggcgacagcggggccactgggttgggacggctcggccggcccctgcccgggctgttgttgctgctgctgctgctgctgttgctgctgctgctggtgttgcagctgcttgggcgggataagcagcagcccttcctcggtgaggatgcaacactttttcttccagagctgcaacaacccgtcgctgcgcttctccagcacgccctccttcagcgctttgcagccgctactctccagcatcctcccagcataagaggggccgccgcttggctcggcctctccgtttccagccgcgcgggccgggggcagcagcagcagcctcgcgccgtcctcgccccagcggctcccacggccgcctgcccggagcgcgcagaggaggctaacacgcaggaggcagagcggcggcggcggctctgggtcccggcagagggacagccgcgtcctgatgcgccacaaggtcccggagctccgagctgccgggcctctgccgtcctcttgcgagcgctcactgaagggcactggccgggccccctcgcggcgcttttgaatgggccatcttccccacccccgagtgacacccagcggaaaaggcggctcctggcgcccgcaccgcgggggaaagcccagctccaagaggcgctcggcagccggcgcacgcctcattaacttggggcctttccaaagcccgctgcgtccacgccctccagcgtctcttgctccgcctctcgccgcccacttgcttccgcgctcgttcccctggaaggcgacccggacccgagccccggaaactcctctcctctacccagggcgatcgcccaaggagccctggctgcctgactactgccgacgctcacagggcgctgcgaggccatcccccgcgtcccgcttctccccggcccgcgggactctctgctaacagcctcagaaagtgaggacgggggcgcggaggcgggggcagcctccaggcagtgctgcctctcggttcttgggaattagcccgggggattcgcgctgggctccgagagcccgcagaaccagcgtcgtgtcctgggcgagctgggaggccggggccgagtcccgcgagtcccgcgagtgtgcctcccccggacgcctaggtaaacaactgagcgcacagaggccgagaggact

SEQ ID NO: 76867 - DNA, 1941 bp, Homo sapiens; identical to SEQ ID NO: 59403
  misc_feature (1)...(1941): n = a,t,c or g

SEQ ID NO: 76868 - DNA, 1120 bp, Homo sapiens; identical to SEQ ID NO: 59404

SEQ ID NO: 76869 - DNA, 2745 bp, Homo sapiens
gtcgacgatttggtgtgcctccctcccgccgccgcctcttcctcggtgaggcgctcttccagcgggcaggcagcatggcggccgtggagacgcgggtgtgcgagacagacggctgcagcagtgaggccaagctccagtgtcccacttgcatcaagctgggcatccagggctcgtacttctgctcgcaggaatgttttaaaggaagttgggctactcacaagttactacataagaaagcaaaagatgaaaaggcgaagcgagaagtgtcttcctggactgtggaaggtgatattaatactgacccatgggcaggttatcgatatactggtaaactcagaccacattatccactgatgccaacaaggccagtgccaagttatattcaaagaccagattatgctgatcatcccttaggaatgtctgaatctgaacaggctcttaaaggtacttctcagattaaattactctcatctgaagatatagaagggatgcgacttgtatgtaggcttgctagagaagttttggatgttgctgccggcatgattaaaccaggtgtaactactgaagaaatagatcacgctgtacacttagcatgtattgcaagaaattgctacccttctcccctgaattattataatttcccaaagtcttgttgtacctcagtgaatgaagtcatttgccatggaataccagacagaaggcccttacaagaaggtgacattgttaatgtggatatcactctttatcgcaatggttatcatggggacctgaatgagacattttttgttggagaagtggatgatggagcacggaaacttgttcagaccacatatgagtgcctgatgcaagccattgatgcagtgaagcctggtgttcggtacagagaattgggaaacattatccagaagcatgcccaagcaaatgggttttcagttgttcgaagctattgtgggcatggaatccacaagctttttcatacagctcccaatgtaccccactatgctaaaaataaagcagttggagtgatgaagtcgggccatgtatttacaattgagccaatgatttgtgaaggcggatggcaggatgaaacctggccagatggttggactgcggtgacaagagacggaaagcggtctgctcagtttgagcacaccctcctggtcacagacactggctgtgaaatcctaacccggcgacttgacagtgcacggcctcacttcatgtctcaattttaatttctcccaagatggcacatctcagtaccttcttactgtgctatgcattttattgagagtacagaaaggaagaggaacctttttttaatcacttgttttgttttgactatagataagaaaggactacagcatttgatgtgtgtcctcaagaacttgtcttgggtctgaaaaagctgagaagaataaaggaaacattgctcaactcttcagccccctccccctgcacacctgttttctcatttgccctttgagcacttttacttaaacttgcttgtagttgcttttatcactgccgcaaaacagccatcaagagccatctgctttccaggtgaacattggaaatgagaatctttgaaacttagcaatatgtgttgcaccagattttttaaattatatatatggaaatatatatgtatacattttaagttctgtatacataattaccaaacactatgtgacctggagtttgtgttgtttctgctctgacaggtttatatgttcttacaaatggatccatagtttgcagtgatttaattcctggttgggatttggcctcccctctcccccatgctaattatttaccccttgtaaattgtggcatagggaagcactcacccaatgagactttctccaatgtggactctgtgtgtcagtgaatgaatgtagtaaaattcactttggaagggttatcaggcttttaaaaatctagtttatgggcaaaaatagccattttccaagtggtggctgactgttgcagggaatgagaatttcataatacactgctatttcagacctctgtttggtcagaaatggaaaagaaaaagccccctttcttcccttttctgttttacttcaagggcataccttggaggtgctcagagaagcgtgaagtttgcactatggtggaggatggggaaagagttctaaagtgtctccagctgtgaacccaggaggtcaagtgggctattaaaatctaacgttgagtaaatgtgatagtgatgagaaaggaattttgtgtactgtaaccttgcagtagagatgcagctgtccttcgtgtgtggaaacacacctctcctttacatagttgggaacctcattagaaatgacctcagctgccccatatatacgttcctttccagcagttgtcccaagtaggagtgtatccaagtgaagacatatcaaatcacaaagtcattgtcattagagtgtacttgattacctgggcatccttgtaatataatttcataccactgacacattatacttgtaagagaacatctttcccagagtgcctcagaccttattgctttaaaatataataatgttttcattacttttattatttgaatgatttagtaaagttgactgaatctggtatagactttgggagtatgtgtgtgaagtttttatcaaactgtaatatttgtgaatggaatgccttgcaatatgaatgttaatataatgtgtaaagggagattaaaaagtttgaatgattatcctaaaaaaaaaa

SEQ ID NO: 76870 - DNA, 2222 bp, Homo sapiens; identical to SEQ ID NO: 59406

SEQ ID NO: 76871 - DNA, 1584 bp, Homo sapiens; identical to SEQ ID NO: 59407

SEQ ID NO: 76872 - DNA, 1072 bp, Homo sapiens; identical to SEQ ID NO: 59408

SEQ ID NO: 76873 - DNA, 1878 bp, Homo sapiens; identical to SEQ ID NO: 59409

SEQ ID NO: 76874 - DNA, 2819 bp, Homo sapiens; identical to SEQ ID NO: 59410

SEQ ID NO: 76875 - DNA, 459 bp, Homo sapiens; identical to SEQ ID NO: 59411

SEQ ID NO: 76876 - DNA, 1479 bp, Homo sapiens; identical to SEQ ID NO: 59412

SEQ ID NO: 76877 - DNA, 1294 bp, Homo sapiens; identical to SEQ ID NO: 59413

SEQ ID NO: 76878 - DNA, 1150 bp, Homo sapiens; identical to SEQ ID NO: 59414
  misc_feature (1)...(1150): n = a,t,c or g

SEQ ID NO: 76879 - DNA, 1497 bp, Homo sapiens
ttttttttttttcaaaatgtggatattgtttacttgaagcaacagtccaggattgtgaagtacaacacattttaaggatgagactttcctttcatggtcaagcaccagcatcatgcacacagcatcaggttatttaaaacaacacgcctgtgggaccccgttcctggaggaagacccgcttcagtgtgattgcctcccttgcttcactgcttttagttccaggcagtttcattgtacatccaagccttcctctgcgtgagagcaaaggctttgctcatcagccagccagtcttgttactatctggctactttttaaggttaaaaaataaaaggcagtttctttgctttgcaggcggcaaggcaggaggcgcaggcctcttcattgttcacatgtcacaggaggaggctctgagcaaaggccactggcaagttagggcaacaccaagaaggctctgcggagagactccctgtgggttggggcctggcaggaacggtgcctgtggactgtttatggtctgtccagttgaggcttggtaaacccaagtaaagtgttaaaaacctcagtacaaaagatcctcttaacacatctgggaaccaaattatttcttcttaaaaacacagtactaagtgttcacaaagcttttccctcccattctactacttggaaaacacttcatgcccatggggcccacagaccccaagagttcaagggtcagagagaaacctgttcttcaaaagaaaaaaaaaaaagacagcaagtacataaagtgcttctttttaatgaaacaaatccaagagatgtacagtcaggctcaagttgtgcagttcacaagcatggaggaaacagacagaacgacagcgttcaggacagtcagagctaacccaagacgaggctggacttgccgccagggggatttcttctggatggcactggggccggggccaccgggctgggcacaggcgcagcaggcacgggcttctcttcactctgccccaggctgcctggcaagtctgtgtccacattttcatgaatatcaccttctcccttcagatctaagaagtctccggagcttgcttcagaggagttccttctctgcagtccagatgactccaagtcttccctgccaccactagacttggcacctgctgacttggcccaagaagcttgattttcttcaggtgtcccaaagatattagaggccattttgttcttcctcacaggttgttctgttggttcatcaaaacctaatgaaaaattggatccaccacctggaggccgcaaaactcgggagctattcctgctgttggggtcgactcccttgaaggtggtggttgtggtcatggcgccgaggagcgaggtaggctggcgccggagcagaacgctcaaagggtcggacccgaggggcgctgggaaactccacacccaacagccgaccaccgctgctcgtgccgaattcctgcaggcgggtctatcgaggcgctcattggggccccact

SEQ ID NO: 76880 - DNA, 1744 bp, Homo sapiens; identical to SEQ ID NO: 59416
  misc_feature (1)...(1744): n = a,t,c or g

SEQ ID NO: 76881 - DNA, 2743 bp, Homo sapiens
ttttttttttaagtggaatcagctatattttctacatttcccttttattcatccttttcatataattgatgttcttatagaaaactctgtaacagtcatttcatttaaatattatccgacctgaaagaaaccatgaatcagggatcagacaaaaatacatgatcaacttttacacatttcagtaggtgaaggaccagaaagaatcttagaaatcactgagcttcatacctggctgtacagacaaggaagctgggacccagagagggtgcagagttccagggtaagaggcccggtctctaaccttccagctcactgctcttttctgctataccagggcaccgctgtgcagtcatccaggctgccggggactagcttccccgacatggcaacaaaaactacagaactcgctcacatcttaaacatggccaaccttgactctgccaagatataaggtttagaatgagttgctaacattcaatttacagaattggatttgaactggaagacagactttccttagcactggtatttggtggaagtttataaactggtatttggtggaagttttaacactggctcttataagagctaaaccccgtgtgaggaaagttgctgtaacaacatcatagcacctttgcttcaacttcaaaagaaaaaaaggctatggtaaaaagctttaataacagacaatgtgatttcataggcaaccaattagcagattaatggatcatttaactttctttacttaaaaccaatactccactcaagaaagatgaacccaaaatgcatcctctaacactgaccaacataactaagtacaaatgaagtcaatggtgtaccccattagcatgctgcgttgtatgtcaataaaacaagccctcccccaccccgagccctggcccctggcaaaacatagataaatgattgtgcactgcgtgatgataccattaggtgagaactttggttcatgcagtcggctgccgcagaggttgcacccaaaacccgcagcaccggcacccaaagtcagtcagcggtggtggctcatggtgtcagccgtgctccttccacaacaccaggtgaatactgtggtcaggcatgctggtggcaaagaccaagcccgtgtcattgtgcccatccagtccattcagccaggatgcttcgcctgccaggaagcttgagcctctctttgatttcctgtactctggcagaggccagcgactaatcaggctctctgtccgcaagtccatgatgtacaggtagcggttgtcaaacagcagggcaaagatatctccaaagccaagcaaggccaagtttgctatctcaggagtcttgatgaccctgagaatatcataactggcaaagtcccactggtagagaccaagtgctgaactacagacaatgtatttgccatcaaaatgaagtcttggctgcaggcagatacttctatcctcagagacagacaatgtctttaagcacttacagttgatttctctcccaattggccaaatcttaatctcatatttgtctgcacttaagaggatgtagtctccaggactgtgcaagagagacttgactttgcacttctgcaaaactaccttggtgacccattccgtgtgcccggtgagtgtgttcaggcatgtcccagcagataaagcccatactttcacagtgaagtctgcagagccgctcaccaagatatccagttcatcattgtagtccacgctaaataccgcccccgtgtgcccccgaaagtgctgggtcctggctccggaactccattcccagcaagccacagtgttgtcaaaggagcctgtcacaagcttctgttcatcaaacttcaccgctgcacaagtgtgggtctggatgccataaacgcactgccctgtgctcacatcccacagctttgcagacaagtcatctgaccctgtacagagaagtccatctttgtagtaaagtgcatacactctggcactgtgtccaattaatgacgaggtttcaaaggcttcatggtcctccagttgcttcattctcaaaatagccttcaaataaaccttcttccagtgcaaagcgtcctgaacagaatcatctatctgccagcccaaatttttacatgcagtctgccacacctctgtacaggcacttatcaccttattccactgtttagagacgaggcagcatgtgagtaaagtctgaggatcgagccattttaacaaataaaaactgagctccaggggaaggagtttgaggaagtcccgcttgaggagagtctctaggttattggagagatgcctgagctggactgccccactcagactaatcaggtgatccagagtttcatttttctgcaagtccgtcagagaaagaaatgtaacagaaatgttatccagccatgtctcaaagtcctttctctccataaggttatggaaaaatttacctgttttcatggcatacccacaattatggcgcagtatagcgctttgtacttcataaaccacctcatcacacttcatcgtctttcaaacgtttggtagccctgggacatcactgttaactcatttcgcagctaaggaaatggaggcagtaggaggcagtaactccaaaaccctgttttcccgtctctaaaatccagatcccatcaacccattcgttgctcccaggtcccttgctctcggaatcgtgttccgcgcggcactgacctgagcgagcgcccggggcccgggacctcgcgccgggttcacagcta

SEQ ID NO: 76882 - DNA, 1557 bp, Homo sapiens; identical to SEQ ID NO: 59419

SEQ ID NO: 76883 - DNA, 1421 bp, Homo sapiens; identical to SEQ ID NO: 59420

SEQ ID NO: 76884 - DNA, 1066 bp, Homo sapiens; identical to SEQ ID NO: 59422

SEQ ID NO: 76885 - DNA, 3913 bp, Homo sapiens; identical to SEQ ID NO: 59423

SEQ ID NO: 76886 - DNA, 1231 bp, Homo sapiens; identical to SEQ ID NO: 59424

SEQ ID NO: 76887 - DNA, 1183 bp, Homo sapiens; identical to SEQ ID NO: 59425

SEQ ID NO: 76888 - DNA, 1582 bp, Homo sapiens; identical to SEQ ID NO: 59426

SEQ ID NO: 76889 - DNA, 1230 bp, Homo sapiens; identical to SEQ ID NO: 59427
  misc_feature (1)...(1230): n = a,t,c or g

SEQ ID NO: 76890 - DNA, 2513 bp, Homo sapiens; identical to SEQ ID NO: 59428

SEQ ID NO: 76891 - DNA, 1258 bp, Homo sapiens; identical to SEQ ID NO: 59429

SEQ ID NO: 76892 - DNA, 1581 bp, Homo sapiens; identical to SEQ ID NO: 59430

SEQ ID NO: 76893 - DNA, 1528 bp, Homo sapiens; identical to SEQ ID NO: 59431

SEQ ID NO: 76894 - DNA, 3565 bp, Homo sapiens; identical to SEQ ID NO: 59432

SEQ ID NO: 76895 - DNA, 2181 bp, Homo sapiens; identical to SEQ ID NO: 59433

SEQ ID NO: 76896 - DNA, 1185 bp, Homo sapiens
ttttttttttttagttataatgactttattaaccttttgatctttcaacatttagatagtctttcttaatatttccaggagagtacctcatttttattttgaaaaccattcagcacatttatcttatgtaacatgcagagcatatatctatctgtatttttaaaattttcctgttactcattgatacatagtacttaattacatgttattccatgtacactgaaaacaatataggaaatatatacatctaagacttctactttgtacagtctttcattaaataagaatacttacacatacattttcagatatttctaccttcctgtatgtgtttggaattgtatggaaggaggcacttgaagaaatttgggccccttgggaggatggcagtggaagtccatgaagtaaagagcattctttaaaaagcagatttgattgcataccttttagttatttgagattctgagaattctgataaaccccaaagcagaaagattccttatacccttggaagatgggaaaggtgagggaaatatttgaagcagggtcagaacatccactaagaacatagcacctcagtagagcttacattatagtgccagggtagagttattactgaatagcttaggatgatgaacattaaccttcctacaggagtagtagcagctgatttggtgaccatcattggtcaccttttagtgtaactgcaaactaagaacaattatggcttgacatatactccatgtagggaagtgatgggagaggcagcctctgtgtggtccatccttggaagcactgcatcgattttgctcccctctggttttaaggagatcttttagacctttccttgctaactgctttcagtaaattcttgatggccttcgattctggattcagacatctcttctcacccttctttttcattgtagcaatgatctcaacacgtggacaaaattggcttgcaggaataatttcaagtttttctaaagaccttggattaacaggttgattactaatgctgatgcaggtacagcgtacagttctagagagaggtactccttgaatgccacttagagtcagaaagataaggcagcaaatcagaatggcagtttgattcatggtgctgagactggaggttcctctgctgtaggctcagaatatgtctaagcaattgaggaatgtctc

SEQ ID NO: 76897 - DNA, 747 bp, Homo sapiens; identical to SEQ ID NO: 59435

SEQ ID NO: 76898 - DNA, 730 bp, Homo sapiens; identical to SEQ ID NO: 59436
  misc_feature (1)...(730): n = a,t,c or g

SEQ ID NO: 76899 - DNA, 1484 bp, Homo sapiens; identical to SEQ ID NO: 59437

SEQ ID NO: 76900 - DNA, 2468 bp, Homo sapiens; identical to SEQ ID NO: 59438

SEQ ID NO: 76901 - DNA, 1010 bp, Homo sapiens
tttttttttttccagcaacgctccttttaatatccggatgtccaaagccacagcctgtgtgttgagccccgggtagggctgctggccggaggctgttggcttccagcagcagcacgacgtggctttttgaaaggagagcccggagagtggcggccagcaggggcccagccccatgggccgcgtgcctggtcccagctgcggcgtccctctggccagctacaaaggggaatgcttctcgaagggcacggtcaggaggcgggcggccgcctcgtccaagaaccagcacagtttcccggtgtggggctggaccagggcggcgggcagcgggttttcctcctggtcctccaaaatgcgcttcagaacagctgccttgccttctccagttgccacaaagatgacagttcgtgctgcattcaggacaggtagtgtgagggtcacacgctgtggcggtggcttcggggagtcactgatgggagccacaatcttctcccgctcctgtaggagggggtggtctgggaagagtgagcaggtgtgaccatcggggcccacccccaggatcagcaggtcgaaaaccgggatggagtccccttggaatgcctgtctcagcttcttggcgtagtcctcagccgcctcctccacaggcagctcggggttaatggtgatcacctggctttctgggatcggcagtctggagagaagatgcgtccggtagaggccgtacgtgctctcggcgtgatcgaagggcacgaggcgctcgtcgcagaagcccagcgtccagcgcgctaagctagctggcccggcaggggcgacggcggcgggtagctcgcgggctagcatcgagacgaggctcccgcccgacaagccgagcgcgaaacgggcgcgggcccctgccaggcagcatgctgcgcgctgggccaccagctgcgctagcgccgcacccagctcctgggaactcgagaacaccgagatgaggcccggggccggcgcggccatggcgagggcggcggcgg

SEQ ID NO: 76902 - DNA, 2182 bp, Homo sapiens
gcggccctcccccgccccaccccgcgcgctccgctcgggcgcgaggggacggggtccgactcagaaatggcggcctccatgttctacggcaggctagtggccgtggccacccttcggaaccaccggcctcggacggcccagcgggctgctgctcaggttctgggaagttctggattgtttaataaccatggactccaagtacagcagcaacagcaaaggaatctctcactacatgaatacatgagtatggaattattgcaagaagctggtgtctccgttcccaaaggatatgtggcaaagtcaccagatgaagcttatgcaattgccaaaaaattaggttcaaaagatgtcgtgataaaggcacaggttttagctggtggtagaggaaaaggaacatttgaaagtggcctcaaaggaggagtgaagatagttttctctccagaagaagcaaaagctgtttcttcacaaatgattgggaaaaaattgtttaccaagcaaacgggagaaaagggcagaatatgcaatcaagtattggtctgtgagcgaaaatatcccaggagagaatactactttgcaataacaatggaaaggtcatttcaaggtcctgtattaataggaagttcacatggtggtgtcaacattgaagatgttgctgctgagactcctgaagcaataattaaagaacctattgatattgaagaaggcatcaaaaaggaacaagctctccagcttgcacagaagatgggatttccacctaatattgtggaatcagcagcagaaaacatggtcaagctttacagcctttttctgaaatacgatgcaaccatgatagaaataaatccaatggtggaagattcagatggagctgtattgtgtatggatgcaaagatcaattttgactctaattcagcctatcgccaaaagaaaatctttgatctacaggactggacccaggaagatgaaagggacaaagatgctgctaaggcaaatctcaactacattggcctcgatggaaatataggctgcctagtaaatggtgctggtttggctatggccacaatggatataataaaacttcatggagggactccagccaacttccttgatgttggtggtggtgctacagtccatcaagtaacagaagcatttaagcttatcacttcagataaaaaggtactggctattctggtcaacatttttggaggaatcatgcgctgtgatgttattgcacagggtatagtcatggcagtaaaagacttggaaattaaaatacctgttgtggtacggttacaaggtacacgagtcgatgatgctaaggcactgatagcggacagtggacttaaaatacttgcttgtgatgacttggatgaagctgctagaatggttgtaaagctctctgaaatagtgaccttagcgaagcaagcacatgtggatgtgaaatttcagttgccaatatgatctgaaaacccagtggatggctgaaggtgttaaatgtgctataatcattaagaatactgtgttctgtgttattgttctttttctttttagtgtgtggagattgtaattgccatctaggcacacaaacatttaaaaggatttggactgcatttaattgtaccattcagaatggactgtttgtacgaagcatgtataatgcagttatcttctttctttcgtcgcagccagtcttttttgcttctcctacaaaacgtaacttgcaatttgccagtttattattgttggatacaaagttcttcattgataagagtcctataaataagataaatacgaagataaagctttattctttagtgttaaaatacagtatatctaataactagcctcattagtagagcagtatattaaaacaatgttttatgtaaaaagtgtttatcttcagcaccaaatacatgataaatgtatcaatcactatttataaacagagctttcaaacactcctcagaatattcttctaagtattttgatgaagtaactttgtaattatttgaacattgttttaatcattaggaaacactgattaactgcaagtcttcatgattctgtcatattaagaaacacctgtaggtttgcttcaaataaaggcatatataccaaggacttacagacaaaattaagaatgtcaatttaagttaataaaaatctcccaatatgaaaaaaaaaa

SEQ ID NO: 76903 - DNA, 669 bp, Homo sapiens; identical to SEQ ID NO: 59441

SEQ ID NO: 76904 - DNA, 1652 bp, Homo sapiens; identical to SEQ ID NO: 59442

SEQ ID NO: 76905 - DNA, 944 bp, Homo sapiens; identical to SEQ ID NO: 59443

SEQ ID NO: 76906 - DNA, 1902 bp, Homo sapiens; identical to SEQ ID NO: 59444

SEQ ID NO: 76907 - DNA, 762 bp, Homo sapiens; identical to SEQ ID NO: 59445
  misc_feature (1)...(762): n = a,t,c or g

SEQ ID NO: 76908 - DNA, 3021 bp, Homo sapiens; identical to SEQ ID NO: 59446

SEQ ID NO: 76909 - DNA, 3139 bp, Homo sapiens
ttttttggagcgaggatacagaagatttattcgaagtccaggtacagactggccaacctgcctctacagcgtccacagcgaacacagggctagacaagggaggagtttctcaaacggttttaatcggttctctccgcgtcacaagccatcgggtaaggcaacggaatgtgcgtggggtcccctgtggctccgcggtcacaatactgagcctggaattgctgttagcaaaatatacatttgtgtcaccataaaaaaccgcgccgccgcccctcgggtctcacaacaggtataaaaaattataaatatttacacccttgttacacgcttttacggaaaggggatcctaggagagcccccgggacaggacgcgggggcggtagaaagagcacagagaagacaggaggagcgcccgccttccgggtcccagcatcagaggcaggcaaaacacagaaatgagactttggtccaaaatttgaaggaagaaaaaaccctgaagtttgagagcaagttttctaggcgactgcaggtgaaggcgtggtgtaaggcaaccggaggcgatgccagaggcggcgacacgcccgccccttccctgaagctcaggggctctaagataggaccggggctccctgtgcctgacccactgggcggccccgcctgctctctggaaactgggtcctgcctgtgacttaattacaaggaataaaataaaagtaacagcatacaaggtaataccacaaggaagtttagattacactcataccattgtatcatcttgctataaaaagttacttaaaactatttcttttgcatataaatgaaaaaagattagaatatttggtcaactggaaatattgctaggcacagacgtctgcaactgcaaagtatataatacagagattatgtcgaccagctccgcagctggagcagcggggagcccgcctgggggcagaagggaaggccctgggggcggggtgaagggagaatcacgtgacttgattagagggctggggttggggtgtcgcagccgcggccgccgcgccccagctgcatgatcctgcaggagccggccaggccccctgcctctctctggtgtgaccccctcaccccttgggtccccaggacaccccgggtgggtgtgtggctgcaggaaggcaggttttttaaggcacaaggaagccaagtcgtggtcggggcgcccacctgcaggccccacgcccgacacaggccccaccaaggcatggccccgagggtctggccccgggtgtggagggccgggaactcccgctgccacagtcaccaagagcctgagctgtccctgtcaccgcagggtgagcaaggtgaactagatttaatttttttaaaaacaggtaaactgatttctctttaaaaaaataaaatctctggtctgctaaggtcacttcagctgtttttaaagtggcttttctctggaatgatggaagttgtcgccagggggcccggccgtgggggcctgtgcccctagatggtggacttggagaaggagacccgcaggtggtggttctccccgaggtcgtggttgtgcaggtcaatgagggcctggaccgcctcctccacggagcccatctggatcagtgccatcttgcggtccttctggaagaacttgaatcctttgacgacgcccccattgctggaaaacaggaccttgagatcctcctcggagactgagggcgggatgttggagaggtgcagcgtggccgagggcgggaatatgttctggaagttcttggagcccggcttcttgaagcggtgcaggggtgagttgccgtagtccttggtcaggccctggtcctcctggccctcgcggggcagctgcacgttctggtgcttcgagagcgtgatgcggatgggcttcccgtgcagcttgtgcccgttcaggtggctcatggccagctgggcctggttgccgtccgccatctgcactagggcgttctccttcttattgaacaggatcttcacgcgctgcacgtcaccgtagacgccgaaaagaataaagaggctttggggtgtgactctctctgggttgaggttgctgaccagcaatacagaatttcctgcccccgccaggcccgggatggcgatccgacctgccgccgcagctgccgccgccgccgaggggatggccaggggggccagggcgccgtggacgttcggaacggaaaggccgaaggccgcggccatggtctggtccagcgagggctggctgtccccggaaggcaggtctgggcgtgtgtagtcacggctcttgtcattgttgtacttgacgttgaggctggtgagcttggaaaagtcgatgcgcagcgtgcagcaggcgttgtagatgttctgcccgtccagcgacagcttggcgtgctgggcgctcacggggtccgcatactgcagcagggcctggaactggttgttcttggtgaaggtgatgatcttcaacactgtgccgaacttggagaaaatctggtgcagcacatccagggtcacagggtagaagaggttctccacgatgatcctgagcacggggctctgcccggccatcgccatccctgcatccacggccgccgccgaggcagccaaggccaggttccccgactggaccgagttcaccgcctgcagggccgcctgggcccgcgcctggttgggagagctgtcggtcttcagctccttgtggttggagaactggatgtagatgggctggccgcgcagcacaggggtcaccgaggtgtagtagttcaccatggtattggcagcctcctccgtgttcatctcgatgaaggcctggtttttccccttcagcatcaggaggttggtgaccttcccaaagggcagccccagggagatgacttccccctccgtgacgtcgatggggagcttccggatgtggatcactctagaggggacgcctgcacttcggctgtcacctttgaacttcttgctgtcatttccgtttgctgcagaagccgagttgctgctcatgataaacggtccgttagtgacacaagtagagaaaagctcgtcagatccccgctttgtaccaacggctatatctgggacaatgccgtccatggcacacagagcagacccgcgggggacggagtggagccgccggaat

SEQ ID NO: 76910 - DNA, 1226 bp, Homo sapiens; identical to SEQ ID NO: 59448

SEQ ID NO: 76911 - DNA, 1206 bp, Homo sapiens
ttttttttttttctgggttgggttttttcatgggtttttgttttgtttatttcgaatactgaaaaagtcctttgggctctgtggggttccccacgctcacggctcctttctcccacactcactgcccttcttcccacagcaaatctatttcaaggacagtactttttaaaatgattaatgttgagttctcaactagctctgcagaactagaggagctgtttgcatctgtctgtgcggatggagtttcttttatctgacaccaggtctccaaccacactgaaacaaggcatttatctacagagctcaactagaaccccttttcattaggctactccacttccttcccctcatacctaccccacatcagccacgtggttaagaaggatagtcaggaatgtttttaccaactccaagccctaattcatactcctccatatctcccaccccaccctttcaaccccacccccacccccagaatttcattgatatttctcccaactgttatttggaaaaaaggtaaaacaaaaaaggttcaaggtcttggtgctcagcccaaggggctccatgtgctgggacaccaacaggaaagggcttctgcctctccagcccacacccgagccacctcctgacccctggctgcaaaagcaggaaggggcaggagccagcacaggacccgggtggggcagggaggggaagcgtctcaggatctggcagagccccgggcagcatcattcaacttggccacccgcaagcttgctggtgacgagcgaggactttctctggggcagatcctgtggggtggggatgtgatcaccagtcaccaggttcttgtctggtcctgcacttggcagctgcttattcttcatcttggctttggccatgttgtagtctcctgagtcaaagtacttttgccctttctggagtctcttcatgaggaagtcggagcctccaggcttttgtcctaggcttgggtatttggcctttagctttgcctcttcagctctctcaggcagaataccttctttctcctgcgtgtcctgcttctcctcgccggtctcctccgcagggttctcttcttcttgtttctgggacatggcgggaccgggactgtggagtgtaaggggcccgggaaggcaaccggagaagggaagggggaggggaaacggggacaacctgcgctgctgcttcggctcctgtcactagggt

SEQ ID NO: 76912 - DNA, 1260 bp, Homo sapiens; identical to SEQ ID NO: 59450

SEQ ID NO: 76913 - DNA, 1035 bp, Homo sapiens; identical to SEQ ID NO: 59451
  misc_feature (1)...(1035): n = a,t,c or g

SEQ ID NO: 76914 - DNA, 1085 bp, Homo sapiens; identical to SEQ ID NO: 59452
  misc_feature (1)...(1085): n = a,t,c or g

SEQ ID NO: 76915 - DNA, 2208 bp, Homo sapiens; identical to SEQ ID NO: 59453

SEQ ID NO: 76916 - DNA, 1015 bp, Homo sapiens; identical to SEQ ID NO: 59454
  misc_feature (1)...(1015): n = a,t,c or g

SEQ ID NO: 76917 - DNA, 2646 bp, Homo sapiens; identical to SEQ ID NO: 59455
  misc_feature (1)...(2646): n = a,t,c or g

SEQ ID NO: 76918 - DNA, 853 bp, Homo sapiens; identical to SEQ ID NO: 59456

SEQ ID NO: 76919 - DNA, 1092 bp, Homo sapiens; identical to SEQ ID NO: 59457

SEQ ID NO: 76920 - DNA, 1534 bp, Homo sapiens; identical to SEQ ID NO: 59458

SEQ ID NO: 76921 - DNA, 2222 bp, Homo sapiens; identical to SEQ ID NO: 59459

SEQ ID NO: 76922 - DNA, 1247 bp, Homo sapiens; identical to SEQ ID NO: 59460

SEQ ID NO: 76923 - DNA, 693 bp, Homo sapiens; identical to SEQ ID NO: 59461

SEQ ID NO: 76924 - DNA, 1553 bp, Homo sapiens; identical to SEQ ID NO: 59462

SEQ ID NO: 76925 - DNA, 1210 bp, Homo sapiens; identical to SEQ ID NO: 59463

SEQ ID NO: 76926 - DNA, 2701 bp, Homo sapiens; identical to SEQ ID NO: 59464

SEQ ID NO: 76927 - DNA, 1881 bp, Homo sapiens; identical to SEQ ID NO: 59465

SEQ ID NO: 76928 - DNA, 1802 bp, Homo sapiens
  misc_feature (1)...(1802): n = a,t,c or g
ttttttttttttgctacattttactttattttgttgtaaggaaaaccaattgactaagttgtccccaaaatgttagtgttcactgatcaagaaggaaatgaggtcagaaggcaaacttttcacttcttctcaaacataaattgcaagtatcacagaaaattgtaacaacacatgcaacacgggatggctttcaacacacagagagcctaagcaagaagagtgagtactgaaggtctacagaggtcagactgggagcactaccacaggaagtttgaatctatccacgcagctctttcctcccacagtccaggctcaacacctcttcctattccaaggtggcttatccatatgcagaaatccaggctgttccatatacattaatacttgcccagctgtgtttcacgaggcatctccataagccaagccccgactcaaattctgtacaggaagttcccgttgctgtcaaagaactctcggcccctctgcactactttgctgctgaagttatctggctcctctgccttcaactcctccagcttctgaccacttggcaacgcaccactgccagttcctctggggctctcagaatcactggagtacttctgcagctctcttggatgacctaggggtgcagcaacaggcacaaagctctcctccaggtcctggatttctttatttcttcccttccttctccttggtgtatttgtcctgtgagtgtctgactctatcactttcaaagctgtgctgtgatttgggtctttagatgaggcttcatgccctggcataagcaaagagcctgatacagagtggcctgcagggagcagctttgaggtatttccagagccccggaggtgctgcagcgagtgggcaagcccagctttcttaaggactttttgatcctgcttcagcttctgctccaatgtgggtaaaaacttgctttttaaaactcttcggatcacatcagtgctgacatcaaagccttcagccaacctgggaactgaccaggactctggaaattcctcatgtaaataccgtatctgctccatggcttcccacgtcagggtcctgggcggggcaccaggcgcctccatttgcctccgaattttctggaatcggattgcttgtttctgtcgtttcagggtgctgggggaagagaaccaatggcagaagccatgcgtggaagcagaatggatgtttgaagagcctcaggctaaatcatggagcgcccagccctcttctctttgatcgcaagggcaaccgggccatgttgccggcttagagctgctccgtacacccagaaagctaacacctagaacaataactgcctgtaagcatgccgaactctctaaactgatgatgaaatacgtcactaatgaagggaccagtggtcccaggggagctgaacacctgacgctgcgcccctaacaacgggtaagaagaaacaagggccgctgcgcaagcagcggcaggacacccggcgccaagggggcgcggcctggagcgccggggcacgaggccctgcttcaagctgagggcccggggagaagccggtacctctccacctcctgcagctcccgttcctccggctcccagtcggaatcggggtccggctcccggccaatagggcctgggcccgccaccccccgggtcgcgaacccacagcgagtgacggcggcgcaaacgcgcccgcccagcaagagactcagggtaaccgccatgtcgacgcaaaccagccttcagcagtcggctaccctcgtgccaagcttggcgtanaggtgttcaatacagtctcatttgccgtc

SEQ ID NO: 76929 - DNA, 1730 bp, Homo sapiens
ttttttttttttcagaggctgtttctttatacaaaggcagacaacatggacacctcagcatgctgctgcagttcatgggggcccatcccaccgcttctggggagaggaatcggggtgggggcgcccgcagcaggggagagacactacacaggcctgggaccgccaagcacaccagctgcgagctcctgaagggcagacacatggacacacggacactgaaaccacgagcacggcacagccacagggaggaatggtggagctggggacagacatcggcagctactgccaactgctgccctcttctgccacgagttccttggcgaggagccttgtccgtgttactaaagagccacgtgactttatctgatggcagaacgtctcgctttctgcatctgtaagctgggccagtacaccgtactccacagggctgccgtgagtacagatgagactgaaacaggggcattgatcaaagtacccaacacagagcctggcacatagaggtgttcaataagtaacttttgtcaggagactcttagggaggaccttcagaaggccaagtgagatgacttccctagaaattctctcagggcatggggaccctggaggactccttggagcctgcagcccctggtgtgcccaaggccccagaatacaccgtgccagggctgttcacaggcgtggggggctggatgcccagggaggtgcccgcagaagctgggtagacactggaggaggtggggtttggaccaaagtggttctgcacatagcacaggccggaggcaggctggtacggaggcaaggtgggcatgtgcccgggggtgcaggagggccaggaggccagcttctgaccactggcgtgctgcgtctgggacacagggtggcttggggacaggtgagggtggcagctctgtgtggggtaggagccaggcaccgggttcagtttccggctctgggctgccctcctctcggctgaagaccctgagacgtacttgaacacggatatcctcctcatcaggctgaaggggaaggtctgatcgagcttcagcgccactcgctctgagaggtcgatggaatagcagtaggtgaggccataggccagcccgatggacagcccgcagacattactgaggaaagaggtctggggaatgagccacgaggcacccagcaggagccacggaaccaggactgagggcacaaccatgccaaacaccagggcccgcctcatccgagaacggacggtggtgactcccagcatggcaaaggccactggggtgaaacctctggcatcctccacttcccccagctttgacagtgatgacacagcctcgaatgacaggaagatgatagcggagaagatggcgaagatcacggtgaagaagcagtggcggacggtgcccacggttctctcgaaattgccagcaaagcgccagatgatgatagcgccgcagagcagggagatgggattctcgtagacaaagatgtaggttaccagcctgtaaacttgccagttgcgaagggcctcggacttcagcgtgaggcccgagggcgccaggggctgctgcagcaggaacaggcgaggcccggaaaccagcagcgagagcagcgcagtgaagaaggtggcggatggcacctcgggacacaagcaccagctgcgacacccgggccccgaggccgccatggccgccgtcgttcccgcgccccgcctcgacgccggctgccggtcctctgct

SEQ ID NO: 76930 - DNA, 5294 bp, Homo sapiens
atttttcacttgtgatgtcatgttggtgctcaaaaagttttagattttggaggatttcagatttcagattttcagattagtgctgctcagcttgtattctgtcagtgttgcgtgtcaaggtttttttttaacaaaatcaatttatgtatcatttcatggttctctgactcattgttagggacaaatatgccttcccatttgagccgcacaggattaaagcagctccgagctgcttcccagctctgacattttgccattctaaaaaatgagtttactcaccacttccccatcttactctttgagtattatgtattttcaattgaaaactgtagttttgtgatgatgaattggaaagctcaatagaacatgatctgtattccttgaagaaatgcaggatccactggaaatgaggtggagagagaccttttccacccatcagagtgaagcggtgtactctacaaggtgcattcctgacgaggaaggccctgtgtgctgtgctgccaattctggcttttcctcagttcaggtgtatgcccatgctactacgtttgtccatcagcatttttgttttggtttgttttcagatgtaaatgagaggaagcaaagatttttatggagactatcaataatctcaagaaaatacatattcaaaatggaattaaagccgtgcagtaagataagtttatatatgcaattccttaaggtaaaagtaaattataaaagattgaatcaggcagttctgctctttgtccaaaaggtaagattgcatgtgaaacatcaacaggaagttgccttttcctcctctggactctgggtatactttgtttgccatctgcgagatcagtccatggctgagagatggcataagtgagcctgagtgcagcagtgagcagcatcctgaggttagcattacacttctcccagtggagcccatgacttctgatcaggacgctaaggttgtggctgaaccgcagacgcagagagtccaggagggcaaggacagcgctcatctgatgaatggtcctatatctcaaaccacttctcagacaagttccatcccacctttgagtcaggtaccagcaactaaggtttcagagctgaaccctaatgcagaagtgtggggggctcctgtgttacatctggaagcaagcagtgctgctgacggtgtgagtgctgcatgggaggaggtggctggccaccacgcagaccgtggcccgcagggatcggatgccaatggtgatggtgaccagggccatgagaatgccgcattgccagacccgcaggagtcggacccagcagacatgaacgctctcgctctgggtccctcagaatatgactctctgcctgaaaatagcgagacaggaggaaatgagtctcaaccagacagccaggaagacccccgagaagtacttaaaaaaacattggaattctgcttatctagggagaaccttgctagtgacatgtatcttatatcacagatggatagtgaccagtatgtgccaatcacaacggtggctaacctcgaccacatcaagaagctcagcactgatgtggacttgattgtggaagtgctaagatctttacctttagtccaagtggatgaaaagggagaaaaagtaaggccaaatcaaaatcgctgcatagtaatattgcgtgaaatatctgaatctacccccgtggaagaagtagaagcactatttaaaggagataatttaccaaaatttataaactgtgaatttgcatataatgataattggtttattacatttgaaacagaagctgatgcacaacaggcttacaaataccttcgagaagaagtcaaaacttttcaaggaaaaccaattaaggcacggataaaagcaaaggcaatagctataaacacatttttgccaaagaatggatttagacccctggacgtgagcctgtatgcccagcagcgctacgcgacgtcgttctacttccctcccatgtacagcccccagcagcagttccccctgtacagcctgatcactccccagacgtggtcagcaacgcacagctatcttgacccacccttggtaactccatttccaaatactggatttataaatgggtttacgtctccagcgttcaagcctgcggcgtctcctctgacttctctcagacagtatcctcctcgaagcaggaatcctagtaaatctcatctgcggcatgcgattcctagtgcagagaggggacctgggttattagaaagtccttcaatatttaacttcactgcagatcgattaattaatggtgtccggagtccacaaacaaggcaagcaggtcaaactagaacacgggttcaaaacccttcagcatatgccaagagagaggctgggcctgggcgtgtggagccaggcagtctcgaatcctctcctggtttagggaggggaaggaagaattcctttggctaccggaagaaaagggaggagaagtttacaagcagccagacacagtctccaacgccaccaaagcctccgtcgccaagcttcgagctggggctgtccagcttccctccattacctggagctgccggcaatttgaagacagaggacttgtttgaaaacaggctatctagcttgataataggaccatccaaagaaaggaccctcagtgcagacgcaagcgtgaacacccttcctgtagtggtctccagagagccctcggtgccggcttcttgtgctgtatcagcaacgtacgagcgatccccctccccagctcatttacccgatgatcccaaggtggcggagaaacagagggaaacccacagtgtggacagacttccttccgccctcactgcgaccgcgtgtaaatcggtgcaggtgaacggagccgccacggaattgcgaaagcccagctacgcagagatttgtcagagaacgagtaaagagcctccttcttccccattgcaaccccaaaaagaacaaaagccaaacactgttggttgtgggaaggaggaaaagaagctggcagagcccgcagagagataccgggagcccccagccctcaagtccacacctggagcccccagagaccagaggcggccggcggggggccggccctcgccctcggccatggggaagcgtctcagccgagagcagagcactccccccaagtctcctcagtgaaaaccgtacgtctgggaggggtcgcagagcgctgtgttaaccacaaacgagacactctcccactcagtgcgagggcgagccgctggttaggagcttgcagtgtctgaggcctgtgggatcctcaagttggttttcttctgtgagttggattctccccctcttgaaaaaaaatcgatttttcaggatttaattaatacaaaccttattttaggttggtgcttaactggaggtgatgcataagtctgatttttttttccaagatagaaaaagcatttatcctaacaaattggtattttttattaagcctccatgtggctctgaatgcaagctatatatagtgagtttttctaaattaagggaactctgctttttttttttttttttttaagtaactggtctgtaagtgcatatctctagaacgtccccgcagatgaatgagggccagtggccttggcagaggcaggtgtggcctcatagaggcagtgctggccgcgccagggcatcagtgctgatgtgggagctgtgcttccacctaagccgttggtaggggactgtggcatttaagaatgtagagagcgcatcctttttgatctcctgggcggagtgaacctgcaggggccaccccagaaaccttggttctgatgcactgcaagcaagtaaccagcttctcactccagtttcaagtggctattatgtaatataaattcaaagcacattgtgaatagaacctacatgaaaacatacactttgttgcccactgacatgttaccagaagttgtaccatgatgttgttttgacccctgtgagctgatggccccggccctgctctgtgcacatttctgtccgtgttccccagcactctggttggagagagtccacatcttcagctccgtgtggacatctccctgtacctctgcatcagcacatggatttaagagttatgtaatcgtgagagaatggtgtttgtggtttttccccctctttggctggtggaggataaagttcctgctcttttacctccaagacgagggcctcattgattcacttccagaagtgctgcacttctgaagaacaaggatgcactaaagttagcaagtttataataaagttaaatataaattattttgttttaaaatgcctcaaatttttctttattctaagcagcaaacattaaaataagaatatttcctgctaaatgtaaccatacactttattccacaaaatgttatttaacaagactgagggttttttttaagaaaaaattatttccatccaatatttaaagacttgaattttatttaaacttgaaaatgactttgccttaacttttgtataagacagcttaaagtccatggagcccggccctgggttggcgtgagtgggtcagagttactcagttactgcgtggatctcctgtcgctagttttactgagtaagcatactgtagtacaagagctagtagtagtttttgtaatataccttaaagatcttcaacagttgatcttttttcagaatgttggaaaatcctgtaaatgcaaatagtcaatactgtattaaatacgtgcacttggagtgtggcttcgcttggtacagttggtaaataatcaggaacatatggaaaaagggtacccctacagaggaaaattctgatacagattattgatatattataaatgttgctgttgagcgggatgtagataaactaaatgttgtggtttgaatattattttgatttgttgagattttcttttttctcttacatcggtgtgttgaactgattctgcctctttgctgcaaaagggaattggaaagtcttattaaaagcctccagatgttttcatactcttttaaaatgtatgtaaatgcatactaatcatatctaatgtgaaagagttttaaagtatatagagagcaaaaactggcaggatcgtaagtgaaggtgactagtaatctaatttaaatcacctgcagctaagcatgattgaccctgccagaggaaaacatgcctatttgaccatttcctttaaagcagttgccattattcaaatacagagaaatagccacagggctagtgtttttcaaatgcattttaaagaacatggggatttttttttgtagttgtcagttcactgaccaaaaaaaaaa

SEQ ID NO: 76931 - DNA, 1861 bp, Homo sapiens
ttttttttttttccgtatccaacagccaggagcctccaccctccaggagggaagggatggacagagccacactcgccgtctttattttgcactcaccctgggtgacactgggcaggccgctcctgcccacagccagactgaggaagaacacagcactcggcaggcccagtggggtccgtgcagggaggaccccaggaccagccttactcccgagcaggggacacagggccccacagagaacccctccgggaggttctctcctggctgggggagggctctggacccccacaaacactccccaacttgcggggctggggcataaaaacagccactcccagcaggccccctcagctttttgcatcagtcagctccctcccgggggattagggtgaggtgaagccaggcccaggcgtggggtataggtcttcccccgcaggcctcagccctgtcccgaggctgcatcacaatccagggcccccgctggcctttgggaacatggcctgggtcttcctcaaggcaagatcagccccagaccacttccggggtcacggtcacggggtcacggggtcacagggcagaagccagatggcagccatggctgacgggcctcctcctcgatggggcggagacagccacggggtctcccgagggtcccacagggctgtcctcatgcagcccaagccagcctgagcactggagccccaattcccaaccaggtctccctcagaccccccagaaagggcctcgaaaggccgccgctgcgccctgtggaaaggctgccgctgcagggcctgggccagccgggctgccagactcccctccaaagcctccggatgcctacgcttttccagacatagaggaaagtttgtcttcgagaaaacaaagtaaatagaagaaccccaaagcaaagcaaacccaccccccagatcagcagcatgggagccaacaggaggccactcctccagcaccaggggaccagccgtcccgacggcagcgcggctgcgcctacgtgatgtccctctgccgcggcggccggtgcacattccgcacgacacacttcaccatccactcgatgccctcgcgcacccctttgcctgtgagggccgagcaggcctgggtcaggcaatctcgcctgccgatcttgctggtgcagtcgctgaaggccgtcttgatgtcagggattgagaggcacgtctccacatcctgcttgttggccagcaccaagacggggacaccgcacagcgcctcgctggtcaccaccttctcaaacgcctgcttggactcagccagcctctcctcgtcggtggagtcaatgacgtagatgacgccgtgacactccgcataatacttgtcccacaaagactgcagctcttcctgccctcctaagtcccagaacatgagccgagcctttcccacatccacagtgccgatgtttaggcccacggtggtggtgattttggatagactcatccccttgtagttcttgttaaatcgggttttcgactgctccaggaaggtcgtcttcccagcattgtccaggcccaggatcaggatgcagtactcgtccttctgaaacatgtacttgtacaagcccgacagcagcgtgtacatcctgccctgggcaccccaacataggtcagtgtgcagccagaaagcacctcccctcccccgggcttctccacggtggtcagtggcgccccacgtccagccgaccgctcaggacgagagcctgggggccattcccgactcctcgtccctctcccaccccgtccctctgtaacttctcccaggtcagccgccactgtgtcctgctcacagcaatgactgcgacctctccgcacgaaatcgtcgacccgggaat

SEQ ID NO: 76932 - DNA, 1740 bp, Homo sapiens; identical to SEQ ID NO: 59469

SEQ ID NO: 76933 - DNA, 1953 bp, Homo sapiens; identical to SEQ ID NO: 59470

SEQ ID NO: 76934 - DNA, 1167 bp, Homo sapiens; identical to SEQ ID NO: 59471

SEQ ID NO: 76935 - DNA, 1601 bp, Homo sapiens
  misc_feature (1)...(1601): n = a,t,c or g
agaaagtgaaaggtgaggcacggccctgcagattttccagcggatcccccggtggcctcatgtcgcgcagtggaaccgatcctcagcaacgccagcaggcgtcagaggcggacgccgcagcagcaaccttccgggcaaacgaccatcagcatatccgctacaacccgctgcaggatgagtgggtgctggtgtcagctcaccgcatgaagcggccctggcagggtcaagtggagccccagcttctgaagacagtgccccgccatgaccctctcaaccctctgtgtcctggggccatccgagccaacggagaggtgaatccccagtacgatagcaccttcctgtttgacaacgacttcccagctctgcagcctgatgcccccagtccaggacccagtgatcatccccttttccaagcaaagtctgctcgaggagtctgtaaggtcatgtgcttccacccctggtcggatgtaacgctgccactcatgtcggtccctgagatccgggctgttgttgatgcatgggcctcagtcacagaggagctgggtgcccagtacccttgggtgcagatctttgaaaacaaaggtgccatgatgggctgttctaacccccacccccactgccaggtatgggccagcagtttcctgccagatattgcccagcgtgaggagcgatctcagcaggcctataagagtcagcatggagagcccctgctaatggagtacagccgccaggagctactcaggaaggaacgtctggtcctaaccagtgagcactggttagtactggtccccttctgggcaacatggccctaccagacactgctgctgccccgtcggcatgtgcggcggctacctgagctgacccctgctgagcgtgatgatctagcctccatcatgaagaagctcttgaccaagtatgacaacctctttgagacgtcctttccctactccatgggctggcatggggctcccacaggatcagaggctggggccaactggaaccattggcagctgcacgctcattactaccctccgctcctgcgctctgccactgtccggaaattcatggttggctacgaaatgcttgctcaggctcagagggacctcacccctgagcaggctgcagagagactaagggcacttcctgaggttcattaccacctggggcagaaggacagggagacagcaaccatcgcctgaccacgccgaccacagggccttgaatccttttttgttttcaacagtcttgctgaattaagcagaaagggccttgaatcctggcctggaatttgggcagatatagcattaataaaactgtgcatctcaaaaaaaaaaaaaagggggggcccttttaaaagaaccaatttttacgcccgggggggggaaagttatttttttttttttggggccccaaaatttaattccggggccggggttttaaaaagggggggaggggaaaaacccggggggtccccaaattaatccttttggaaaaaaacccctttttccccggggggggaaaaaaaaaagaacggggnnnnnnnnnnnnntantnnnantttnnttnttttatnnannnttaaaaaaaaaaatgtatttgaa

SEQ ID NO: 76936 - DNA, 2172 bp, Homo sapiens; identical to SEQ ID NO: 59473

SEQ ID NO: 76937 - DNA, 1023 bp, Homo sapiens; identical to SEQ ID NO: 59474
  misc_feature (1)...(1023): n = a,t,c or g

SEQ ID NO: 76938 - DNA, 3111 bp, Homo sapiens; identical to SEQ ID NO: 59475

SEQ ID NO: 76939 - DNA, 695 bp, Homo sapiens; identical to SEQ ID NO: 59476

SEQ ID NO: 76940 - DNA, 2887 bp, Homo sapiens; identical to SEQ ID NO: 59477

SEQ ID NO: 76941 - DNA, 2063 bp, Homo sapiens; identical to SEQ ID NO: 59478

SEQ ID NO: 76942 - DNA, 1019 bp, Homo sapiens; identical to SEQ ID NO: 59479

SEQ ID NO: 76943 - DNA, 1694 bp, Homo sapiens; identical to SEQ ID NO: 59480

SEQ ID NO: 76944 - DNA, 639 bp, Homo sapiens; identical to SEQ ID NO: 59481

SEQ ID NO: 76945 - DNA, 3147 bp, Homo sapiens; identical to SEQ ID NO: 59482

SEQ ID NO: 76946 - DNA, 2633 bp, Homo sapiens
gcgaccgcgtcggagagggaggtggcagcggcccgggaggccgatgccaagccagcgacccaccatggagacccgctacaacctgaagagtccggctgttaaacgtttaatgaaagaagcggcagaattgaaagatccaacagatcattaccatgcgcagcctttagaggataacctttttgaatggcacttcacggttagagggcccccagactccgattttgatggaggagtttatcacgggcggatagtactgccaccagagtatcccatgaaaccaccaagcattattctcctaacggctaatggtcgatttgaagtgggcaagaaaatctgtttgagcatctcaggccatcatcctgaaacttggcagccttcgtggagtataaggacagcattattagccatcattgggtttatgccaacaaaaggagagggagccataggttctctagattacactcctgaggaaagaagagcacttgccaaaaaatcacaagatttctgttgtgaaggatgtggctctgccatgaaggatgtcctgttgcctttaaaatctggaagcgattcaagccaagctgaccaagaagccaaagaactggctaggcaaataagctttaaggcagaagtcaattcatctggaaagactatctctgagtcagacttaaaccactctttttcactaactgatttacaagatgatatacctacaacattccagggtgctacggccagtacatcgtacggagtccagaattcctcagcagcatcctttcatcaacctacccaacctgtagctaagaatacctccatgagccctcgacagcgccgggcccagcagcagagtcagagaaggttgtctacttcaccagatgtaatccagggccaccagccaagagacaaccacactgatcatggtgggtcagctgtactgattgtcatcctgactttggcattggcagctcttatattccgacgaatatatctggcaaacgaatacatatttgactttgagttataatatggttttgtgacttatgagctgtgactcaactgcttcattaaacattctgcattgggtataatctaagaattgtttacaaaaagattattttgtatttacccttcattcctttttttgatccttgtaagtttagtataaatatatctagacattcagactgtgtctagcagttacgtcctgcttaaagggactagaagtcaaagttccttgtctcactatttgatctgctttgcagggaaataacttgttttttctcatgtttcatcttctttttatgtaaatttgtaatactttcctatattgccctttgaaatttttggataaaagatgatgttttaagttccaatgagtattactagttactcaataccacttattgagtactctgtttctacgtatgtagaatgtatagggatagaagagttgaaaagggaaagcaaaactcctcaagtagcttccttaaaatgtcattcataggagatgtactggaattgctcattctgtgactttatttgtgtcctaaacattcttcagtgaaaataattttatttcagtcaaacatttatgaggaaatgagatcacatctttgtcactggatgctacttgaagagggagtactttgtaaccactttgatatgctgttatcaccaccccctgccctctgctgccataatcacacaaatttaaaaagaaagaaaacagtcttccatagatttttaaggaagaaagggcccaagccaggagatcgcttggttttcttccagaagttaaatggggggatctgaagatttgaatgtttggtctgctttgaaatgtatgtcttttgggatgtattatatgcctagctttataatcagtataaattttaattattccaggaatatgcataatattgaaatatttcatgtcctattttaatagaaaacctcagggcccaagtaacagtgatagaagttagaaaaacctttacttagaattgtccacctagtcagagcccaagaaagaattttcagtggaaaaatcaatatataacttagtgctagctagcgccacagactctagtagataatattatcatcataatggctggtgaaaccatataatcacagaaaaacattgccttcagcatgttcagttcgcagcactgagggcactcttgagggtgttgttaatgaagatttaatttttaaatacaggtggttccaagctttcaaataggttatgctccaaaagtgttatttgtaagttaatttttttacaagtcaaacaatgttggaagtggtatttaggttctagatcggtccacgaaagttagcccatatgtatatcttgaatagtataggggagggtattcataaagtccttatgtggttttaactaagtgaaattatggacaagagaaataattgtaaaatcgtcttaaaggaaaatttaatttttactcctgtttatgggacattcgttctattaactgtcagacacaatttctgttttcatctgagagccagttttcctttatttctacatctaaaataagaacatattgtacactattatataatacagaattgtcttaaactttaataaattcgcattttaaaggtgaaaa

SEQ ID NO: 76947 - DNA, 649 bp, Homo sapiens
cgaggcgggagggcggccctgttgccctggagacgctttccctgctgccggccgcgaccgcaacccgctaggccttcatcgcgagctacgcccggaccgagaagccccggcatggccacgtccatcggagtgtccttctcggtgggcgacggggtgcctgaggctgagaagaacgcaggggagcccgagaacacctatattctgcggcctgttttccagcagaggttcaggccctctgtggttaaagactgtatccatgctgtgctcaaggaggaactggcaaatgctgaatattctccagaagaaatgcctcagcttacaaaacatttatcagaaaacattaaagataaattaaaagaaatgggatttgaccgatacaaaatggtggtgcaagtagtgattggagaacaaagaggtgaaggagtattcatggcttctcgctgtttctgggatgctgacactgacaactatactcatgatgttttcatgaatgacagtttattctgcgttgtagcagcatttggctgtttctactactgaatgaatctttgaaaagctggtaaaagacatgaccatgaagaaatctgaactttttaatattgttaaatatcttgacaaaataaagatgttagtagtttgaaaaaaaaaa

SEQ ID NO: 76948 - DNA, 2595 bp, Homo sapiens; identical to SEQ ID NO: 59485

SEQ ID NO: 76949 - DNA, 1106 bp, Homo sapiens; identical to SEQ ID NO: 59486

SEQ ID NO: 76950 - DNA, 1911 bp, Homo sapiens; identical to SEQ ID NO: 59487

SEQ ID NO: 76951 - DNA, 2009 bp, Homo sapiens; identical to SEQ ID NO: 59488

SEQ ID NO: 76952 - DNA, 2795 bp, Homo sapiens; identical to SEQ ID NO: 59489

SEQ ID NO: 76953 - DNA, 3566 bp, Homo sapiens; identical to SEQ ID NO: 59490

SEQ ID NO: 76954 - DNA, 1565 bp, Homo sapiens
  misc_feature (1)...(1565): n = a,t,c or g
gattcgtagaccctagtccagagcggtggaattcctgcactctggcctgggcaacagagcgagactctgtctcaaaaaaagaagtcctggcgcggtggctcatgcctgtaatcaaaacactttgggaggccgaggcgggcagatcacctgaggttgggagttcgacaccagcctgaccaacatggagaaagcctgtctgtactaaaaacacaaaaaattagccaggcatggtggcacatgcctgtgatcccagctatttgggaggctgaggcaggagaattgcttgaacccaggaggcggaggttgaggtgagctgagatcacgccattgcgttccagcctgggcaacaagactgaaactctgcctaaagaaaaaaaaagaaaggcagctaggaatagtaaaaagaatattggttttagaactcatactgccacatcttgattcctgcacaatctcttattagttgtgatttttaacatctttgtggttgttttcacatttttaaagtgaagagatagcacgttcattgtagagatttggggattagcaataacacagtcaggtctctagcacatactatgtattcaatgattggtggctaatatttttccttcacaaaatttgggcctactccactggactcctcagggaagaaggagaaagggccaacccctgaagaagcaatacagaaactgaaggagacagagaagatactgatcaagaaacaggaatttttggagcagaagattcaacaggagctacaaacagccaagaagtatgggaccaagaataagagagctgccctacaggctttgcggaggaagaaaagattcgaacagcagctggcacaaactgacgggacattatccaccctggagtttcagcgtgaggccattgagaatgccactaccaatgcagaagtccttcgtaccatggagcttgctgcccaaagcatgaagaaggcctaccaggacatggacattgacaaggtagatgaactgatgactgacatcacggaacaacaggaggtggcccagcagatctcagatgccatttctcggcctatgggctttggagatgatgtggatgaggatgaactgctggaggagctagaggagctggagcaggaggaattggcccaggagttgttaaatgtgggcgacaaggaagaagaaccctcagtcaaattgcctagtgtaccttctactcatctgccggcagggccagctcccaaagtggatgaagatgaagaagcactaaagcagttggctgagtgggtatcctgatnaaaatctgggcttgtcttcctaatgcctaccctttgttggtccctttccttcccttaagtgcccaagtgctgagctaaaggaggataactttttggggaagtcatgctgagggtggtagtgtgaccctgcctgaacaaaagggtctcttaccctcccagccctggctcaactctgaagaaggatcttgctacagaaggagcccttgggctcccttctctttgatagcagttataatgcccttgttcccaataaaactgggcagatggaaaaaaaaaa

SEQ ID NO: 76955 - DNA, 2833 bp, Homo sapiens; identical to SEQ ID NO: 59492
  misc_feature (1)...(2833): n = a,t,c or g

SEQ ID NO: 76956 - DNA, 2039 bp, Homo sapiens; identical to SEQ ID NO: 59493

SEQ ID NO: 76957 - DNA, 1829 bp, Homo sapiens; identical to SEQ ID NO: 59494

SEQ ID NO: 76958 - DNA, 2783 bp, Homo sapiens; identical to SEQ ID NO: 59495

SEQ ID NO: 76959 - DNA, 1756 bp, Homo sapiens; identical to SEQ ID NO: 59496

SEQ ID NO: 76960 - DNA, 2632 bp, Homo sapiens; identical to SEQ ID NO: 59497

SEQ ID NO: 76961 - DNA, 1103 bp, Homo sapiens; identical to SEQ ID NO: 59498

SEQ ID NO: 76962 - DNA, 1761 bp, Homo sapiens
ctcctaaggaactcattgtctatagcccttagccttgtggtttaggcaagaggccaggtcaggtgccctagagtgaggcaggggcttcagccaaagttgtgatcgcagcttctgaggcagttcctcagtggagtcagagtccgctgccacctgagctttccaccagatcttctttcctttccttgtgctttcctcaagctgcaggcttgatcccagcccacaaatatgagagaattctggaaagtgccctgagaaatgggttctgggtttttttttcatttttatttttttaaatgtcccaggctgccttcctgtcctcccatcctgcatcctgctttctgttccctggataccgtaggatggttttatttcagttcatgcacaaattagtctggacactgtggagtcataacaagagtgggatggaggttccagggccaatcagtttctttggagggaagcttgagaagtaggttagagcaatgcccacaaaagccactgcttctccttcccatccccagcaatgagctaagagccaacctcagccagagagagggtctttgatcacagagggtcagtcagtgggatgtgattagtggggtttgggggatgggagtcccagggttaaaccagagggcaaagggatcctctgagtcctggcttaagggaatggggtttcaagttgagggttggggacttagggcaggggagcagcaaggtgaggaaaacagaaaggctggcatggcgagcatccttggcaattcaacctgcatgctgttacactagcccccatttctgcctttgctcaatccaatggccaaagtcagtctatcctcagcagcaccttctgacacgatccagtggtagtgtccctcacctgtggccctcggggtgctgtccactgtttttcacagacccagccaccccccagctctggcccctggttcttcacacataccctgtcaggctgtaggaattgaactcactcttgactttgggaggttgaccaggccttggagagctccttgtggcaagaggttgggcttggtaggcatcgtagtagttggagcgatttctctggcatgagcaggaaaagcagaggatgattccagctatcagggagaacagggaagaaataatgcccaagtaaagagcctctccaatctcaaatttcatgctgtcaggcaccagtggtgagtagaagtcccgtaggatcccatgaagattccaggcaacaggaatgaatcccaggaggcctccaaggatgaaaaagactccacctgctaccgccactctgtctttggctcgggattcctggcagaagactgtgcatctcatgcccaccacagagataatgcaggccagggaggagattgcactggatgtcaccatcatggcctgggcagcctggatgtcagcgggcaggcccagaagggtgctatagatgtcacactgggtgatgcctgtgctgtgtgtggcacattccatccagaggcccttggagaagccaactgctgtcacaatgctggcaccgacataagaacttgttttccagctggggagcagcatggcaaccagtgtgcccaaaagccccagaaggcctaggatgtagcccacaagttggaggccaagagaggccatggcagacctctcagtagaagcgtcttcagggactgctcccttgtcttcaggctgaagctcttgctccttgaacacctctaatccctcatttcagagtctctctgccaggctgacttctct

SEQ ID NO: 76963 - DNA, 1833 bp, Homo sapiens; identical to SEQ ID NO: 59500

SEQ ID NO: 76964 - DNA, 1963 bp, Homo sapiens; identical to SEQ ID NO: 59501

SEQ ID NO: 76965 - DNA, 1612 bp, Homo sapiens; identical to SEQ ID NO: 59504

SEQ ID NO: 76966 - DNA, 1758 bp, Homo sapiens; identical to SEQ ID NO: 59505
  misc_feature (1)...(1758): n = a,t,c or g

SEQ ID NO: 76967 - DNA, 1666 bp, Homo sapiens; identical to SEQ ID NO: 59506

SEQ ID NO: 76968 - DNA, 1504 bp, Homo sapiens; identical to SEQ ID NO: 59507

SEQ ID NO: 76969 - DNA, 1398 bp, Homo sapiens; identical to SEQ ID NO: 59508

SEQ ID NO: 76970 - DNA, 1437 bp, Homo sapiens; identical to SEQ ID NO: 59509

SEQ ID NO: 76971 - DNA, 2010 bp, Homo sapiens
gcttctttcacacgggttgcttcggaggaatccgccgtgcaaatctgtccgcccccttggccactgatcccccgaagagcttctgtcgccgctctaggaatacagacattgaagtttgggacaagatatttatctaacttctgtgtcaaaattagcgacctgctatggcaatgaagaaagaaactgaatttgtcattttcacctgaagaaaaatgatagacaaaaatcaaacctgtggtgtaggacaggattctgtgccctatatgatttgtctgattcacatactcgaagaatggtttggtgtggagcagttggaggactatttgaattttgcaaactatctcttgtgggtttttacaccactaatacttttaatacttccttactttactatctttcttctctaccttactattattttcttacacatttataagagaaagaatgtattgaaagaagcctactctcataatttatgggatggtgcaaggaaaacagtggcaactctgtgggatggacatgcagccgtttggcatggttatgaagttcatggaatggaaaaaataccagaagatggaccagcacttataattttttatcatggagctattcctatagatttttactatttcatggctaaaatatttatacacaaaggcagaacttgccgagtagtagctgatcactttgtctttaaaattccagggtttagtttattactggatgtgttttgtgctctacatggaccaagagaaaaatgtgttgaaattctgaggagtggccacttgttagctatctcaccaggtggagttcgagaagccctaattagtgatgaaacttataacatcgtatggggtcatcgcagaggctttgctcaggttgcaattgatgcaaaagtgcccattattcctatgtttacacaaaatattcgagaaggatttagatcacttggaggaacaaggttatttaggtggctttatgaaaaattccgctatccatttgctccaatgtatggaggttttccagtgaagttacggacctatttaggcgaccccattccgtatgacccacagataacagcggaagaattagctgaaaagacgaagaatgctgttcaagctttgattgataagcaccaaagaataccaggaaacattatgagtgctttgttagaacgttttcattgataacaaagggtcaactagaagatgatttagtacatttatattaaatgtttgtatctaaggtactgtcttctgaattttgtaggtcctataattagtattttttaaaaaaatcatgttaataagcatctttcacagaattcgtttctttaaaatagtcaattttgtttttgcaattgggtcaaatactaacaaattacacacctagtaattcaaaaaaagatgtcttatttgtaaattcctaacaatttatgctaaacatatagattcttaagtttattaataacagcagtttaggttaaacaaacattcctggataatgcgttaaatttctgtatctgtcgccctgagctgattttgaaagatggtataagctaggggttagtatagttgtttaagttagaaaaaacatgctgttgtctgcccctcattcccttcatgaccttgggcaagtcacgtaatgtttttgtgcctcaacaattcactttttaaaaacatgatcgtatgatgaatgatattattttgttatttatatttactgtgattgataactgttgaaccaaaataataaaataattaatttaaacaatgtcaaaatcctttagcagttatgtatatattttctccattgtgtgtttaaattgtcatgtccagttgccaagcacaatgaaaaagatgtattattttttaaattgaataaaaaattaggaaaaataaaatttctaattattatttttagtatgatatttttaacaagagtctataggcaaacaatatagggtgtgctgtgcattggtcagccctatactgtggtcttaataatgcc

SEQ ID NO: 76972 - DNA, 3215 bp, Homo sapiens; identical to SEQ ID NO: 59511

SEQ ID NO: 76973 - DNA, 2156 bp, Homo sapiens; identical to SEQ ID NO: 59512

SEQ ID NO: 76974 - DNA, 2137 bp, Homo sapiens; identical to SEQ ID NO: 59513

SEQ ID NO: 76975 - DNA, 1135 bp, Homo sapiens; identical to SEQ ID NO: 59514

SEQ ID NO: 76976 - DNA, 2844 bp, Homo sapiens; identical to SEQ ID NO: 59515

SEQ ID NO: 76977 - DNA, 759 bp, Homo sapiens; identical to SEQ ID NO: 59516

SEQ ID NO: 76978 - DNA, 1560 bp, Homo sapiens; identical to SEQ ID NO: 59517
  misc_feature (1)...(1560): n = a,t,c or g

SEQ ID NO: 76979 - DNA, 2859 bp, Homo sapiens; identical to SEQ ID NO: 59518

SEQ ID NO: 76980 - DNA, 1221 bp, Homo sapiens; identical to SEQ ID NO: 59519

SEQ ID NO: 76981 - DNA, 1324 bp, Homo sapiens; identical to SEQ ID NO: 59520

SEQ ID NO: 76982 - DNA, 1850 bp, Homo sapiens; identical to SEQ ID NO: 59521

SEQ ID NO: 76983 - DNA, 1109 bp, Homo sapiens; identical to SEQ ID NO: 59522

SEQ ID NO: 76984 - DNA, 1181 bp, Homo sapiens; identical to SEQ ID NO: 59523

SEQ ID NO: 76985 - DNA, 1513 bp, Homo sapiens; identical to SEQ ID NO: 59524

SEQ ID NO: 76986 - DNA, 1124 bp, Homo sapiens; identical to SEQ ID NO: 59526

SEQ ID NO: 76987 - DNA, 2855 bp, Homo sapiens; identical to SEQ ID NO: 59528
  misc_feature (1)...(2855): n = a,t,c or g

SEQ ID NO: 76988 - DNA, 869 bp, Homo sapiens; identical to SEQ ID NO: 59529

SEQ ID NO: 76989 - DNA, 3807 bp, Homo sapiens; identical to SEQ ID NO: 59530

SEQ ID NO: 76990 - DNA, 971 bp, Homo sapiens; identical to SEQ ID NO: 59531

SEQ ID NO: 76991 - DNA, 1611 bp, Homo sapiens; identical to SEQ ID NO: 59532

SEQ ID NO: 76992 - DNA, 2759 bp, Homo sapiens; identical to SEQ ID NO: 59533

SEQ ID NO: 76993 - DNA, 2050 bp, Homo sapiens; identical to SEQ ID NO: 59534

SEQ ID NO: 76994 - DNA, 1876 bp, Homo sapiens; identical to SEQ ID NO: 59535

SEQ ID NO: 76995 - DNA, 1436 bp, Homo sapiens
ttgaactgactgccctcgaaacagcgtggtggaattctgggcggcgggctctgcctccgccgagggacagccggatcgcccctctgcttcccgcaactgccctgatcaccccccgtcccagcccttgagtgaacgtccttctgagcggcttcctggggtcctccccacgtcccaaaggccggcaagatggtgtcctggatgatctgtcgcctggtggtgctggtgtttgggatgctgtgtccagcttatgcttcctataaggctgtgaagaccaagaacattcgtgaatatgtgcggtggatgatgtactggattgtttttgcactcttcatggcagcagagatcgttacagacatttttatctcctggttccctttctactatgagatcaagatggccttcgtgctgtggctgctctcaccctacaccaagggcgccagcctgctttaccgcaagtttgtccacccgtccctgtcccgccatgagaaggagatcgacgcgtacatcgtgcaggccaaggagcgcagctacgagaccgtgctcagcttcgggaagcggggcctcaacattgccgcctccgctgctgtgcaggctgccaccaagagtcagggggcgctggccggcaggctgcggagcttctccatgcaggacctgcgctccatctctgacgcacctgcccctgcctaccatgaccccctctacctggaggaccaggtgtcccaccggaggccacccattgggtaccgggccgggggcctgcaggacagcgacaccgaggatgagtgttggtcagatactgaggcagtcccccgggcgccagcccggccccgagagaagcccctaatccgcagccagagcctgcgtgtggtcaagaggaagccaccggtgcgggagggcacctcgcgctccctgaaggttcggacgaggaaaaagactgtgccctcagacgtggacagctagggtctgctgcatctgcccccttcttacctcgtgccctgcagggctccagggctatttggagggaccttgggctgcacatctggcctgcctgcaccagctgcctgggccccaccctcctgactcctgctgatggttaagggccgggagcagatgctgccaaggccacatgcagggatgcacccacaatgtaccaaagcaggctgggcccagggttctatttattgccttgctctgccctctcccttccccggttgtgggacaagagccctccctgaacccctgcaaccctccctgaacccctgcaaatgaaaccaaacgtccacctgggtgtgttcattccttcctgtccttcaaagtacttgatagcctttcataaggcctggcacatgtgtcctggttgtgtgtgtgtgtgttggtgagtgaggtcaggtttgcgagtgttttgataaataaatacataaaggggaaaaaaaaaa

SEQ ID NO: 76996 - DNA, 1146 bp, Homo sapiens; identical to SEQ ID NO: 59537

SEQ ID NO: 76997 - DNA, 1054 bp, Homo sapiens; identical to SEQ ID NO: 59538

SEQ ID NO: 76998 - DNA, 1442 bp, Homo sapiens
ggatccgcgcgcaatggcggcgctgggcggggatgggctgcgactgctgtcggtgtcgcggccggagcggccgcccgagtcggcggcgctgggcggcctgggccccgggctgtgctgctgggtgtcagtgttctcctgcctcagcctcgcctgctcctacgtgggcagcctctacgtctggaagagcgaactgcccagggaccatcccgcggtcatcaagcgacgcttcaccagcgtcctggtggtgtccagtctctcacccctgtgcgtgctgctctggagggaactcacaggcatccagccaggcacatccctgctcaccctgatgggcttcaggctggagggcattttcccagcggcgctgctgcccctgttgctgaccatgattcttttcctgggcccactgatgcagctctctatggattgcccttgtgacctggcagatgggctgaaggttgtcctggccccccgctcctgggcccgctgcctcacagacatgcgttggctgcggaaccaagtgatcgccccgctgacagaggagctggtgttccgggcctgtatgctgcccatgttagcaccgtgcatgggtctgggccctgctgtgttcacctgcccgctcttttttggagttgcccattttcaccatattattgagcagctgcgtttccgccagagcagcgtggggaacatcttcttgtctgctgcgttccagttctcctacacagctgtcttcggtgcctacactgctttcctcttcatccgcacaggacacctgattgggccggttctctgccattccttctgcaattacatgggtttcccagctgtttgcgcggccttggagcacccacagaggcggcccctgctggcaggctatgccctgggtgtgggactcttcctgcttctgctccagcccctcacggaccccaagctctacggcagccttcccctttgtgtgcttttggagcgggcaggggactcagaggctcccctgtgctcctgacctatgctcctggatacgctatgaactctcaccggctccccagccctccccaccaaggggtactgcaggggaagggctggctggggtccccgagatctcaggaatttttgtaggggattgaagccagagctagttgcgtcccagggaccaagagaaagaagcagatatccaaagggtgcagccccttttgaaaggggtgtttacgagcagctgtgagtgaggggacaaggggcaggtcccaggagccacacactcccttcctcactttggactgctgcttctcttagctcctctgcctctgaaaagctgctcggggttttttatttataaaacctctccccaccccccaccccccaacttcctgggttttctcattgtctttttgcatcagtactttgtattgggatattaaagagatttaacttgggtaaaaaaaaaa

SEQ ID NO: 76999 - DNA, 2604 bp, Homo sapiens
ttttttttttttcttattttttaaacgtttattacttcaagagggaattatttttcaaagatgataaaactcatttctattccagtaaaaaagggtcacaggtttgcccccagggtcccaggagcgcccggaaggcagggccccccaggcctcttcacctcagcctggggcaccttataatctgagggaccctgtgaagggggtgggggcaagctcgggggcacagcctggcggccaacttcggccagacgagtggccggctcacgtccataggatagatgtcagtttaggctgggagggaaaagggcgccagacaaccacgatgcagtgccctgttgaagacttccggggggatcaaagtccgggcccggggttgggcggagaccctcggggcagctgcacagggcatctttgttgcttcactccattgttttttccgaggcctgtgttaaaggcgctttgcctggcctggcaggtagaccaaggccaaagctctgtggccagggcctgggcactgagtccccactgaatttggcacaggaaggcggcactcccagcctggcccgtcctgcatggggagccaccacaccgggactgcagtgtttcaccttggaggggaggaagcctgggcccaacggctgaacgggacaggccaggctcacccgaggaaggggacgcaggacccacagcccctgtggtcaaggcctgtgggccaccgtggaaagaaggttccagaacagtgcttgttgacgagcctctccctacaagtcccttcagcagcaagctccatccctgagtgtctgccacaagcctgcacgcatgtgtgtatgtgtgcccagggcgtgtgtgcaggtgtgcaacaggcacatggcagctgggaggctcaggctgtggggctggggggctgtcccgctgggagagtccgggagaagtggggtgtaggggctggggggccggtcaggcccagcgggccaggcctggctggctcacggtgtcctcaggaccctacagttttgcttcctgcagcacagagcccttgggagctgatgtcatcagggattcagaataggcctgaatggcctccttatcctttgagccctttttactactactccaaaataaatagcatttctcttggctccggatttggcagatgacagggaccagcagcaggacgcagcccagcgccaggaggacgtactgggcatagtgcatcaccttgggcatcaacaccagctgagtgtagaatgtgtgaagagtctccccctccatggccccgctctctgcaaaccagagcagcggcaggaccacaggctcaatcttcccagtttgtccaatgcctgcgacagatttcatgtagaggctcagctgcagtttcacagagcagttcatggggattcccgtgaccgggtggatgtccaggaacaaggagtgtgcctcctggttagggtgcaggccagtcaccgcttctgccagaaccgggtcggcgttgaggaagtgaggatgggagagaaacaagggggcactgaacctgcaggtgctgacgttctgaattccagactccaggcacgggcagaagccttcgttgggtgggtagatggacccgttggcaaacagggttttgggagccacgaagcgataggtggggatgccttcaaacacccctgactccttgtacattagcttcatggatcggcaggcctccgggctgtagaactccagcgaggactcaggagtcatgaagggcggccacatttgcccagaagttccattgatcatgttgcactgatcggaatgccagaagtcaaccttgctcagcccgttccacttgtccacgaggtggatcctgctgatgttctggacccccgtgaaccccgtgaagagcccagagtcggagttgttgagctcagcaaataatccgaacttgtccttgaaggggaacatgcctggaaagtacttgttgatgagattcacaagggggtccttgtagccccacatgatctcacccacagtgcggttcatgaaggcacgttcgccgagggtggtgaatgccaaggtcatgatgagcttcagggtcatgggcttattctccatcatcaccgccgcacccaagaccaggatgttgggcatgacgatgtagtcgctctccgagccgtgggacttggagggctggaactggaaggtgcggtactcgaggaaggacacggtgtcgttgttgttgaaggtgatgttgcttttgtgcctgaactccctgtacacgtagggcccgcgctcccgcacctgcggcttctcgcccttcaggatctcgctggggttcatgacgtcaaagaagtagacggagagatagaaggggatagggatctccttccacatgttgaaggacaggctactggggtcgatgcgcacgttcttaaggacctgctgcttgatgagcgacggcaccatcacgatcatgacagcgcccagcacagcgcacagtagccccgcgacgcccagcgccccggcagcccagcgcgctttggcggagcagcccatgtctgcgcgcctggggcccacccgcggctcgcagggctccgcgcctggcaggagacggggacggcgacg

SEQ ID NO: 77000 - DNA, 970 bp, Homo sapiens; identical to SEQ ID NO: 59541

SEQ ID NO: 77001 - DNA, 746 bp, Homo sapiens; identical to SEQ ID NO: 59542

SEQ ID NO: 77002 - DNA, 2399 bp, Homo sapiens; identical to SEQ ID NO: 59543

SEQ ID NO: 77003 - DNA, 1835 bp, Homo sapiens
ttttttttttttaataacaaaagtcagtttattaaatgctcaattctcaaaattatatgtatatatttttaattatttaaaaaaacttccatgcccttccattcccctccctccaaactaggtattgtccaagttgtatcaaatgccacaaagtctaccatgcacccagaagcagagaagacaggaggtccagaggacaaggtatgctggggtcactactcgcactgcagagtccacgcgagttaactcatgctgggggcaaagaatggaaagagctaatacacagacaaagcaaaagaacgaaatgcgcagcctgaccagagacgtttacaatttataccaacttacaaatatttagggtgccccccaactccgagagaacagaccaaactaaccacatgaaggaagacctctgccggggcctcctctccctacaacctcctctcaagaatcattaggaagcccaaacagcttcacagttccggcttcccggctgctgtcatatttgccgtctttgtcatcacaggcaaatgccagcagaggccttttggggtgccacgccactgtgaaggtcggagactcacactgtacctcccatagtttgtcccctgtctccacttcagcaatgtcaataaaatgatcttccgatgctgacgccagcattttcccatcatggctgaaactgagggttcttacaggccaatccagcctggaaaagcaccgaacacacactaactcatccacatcccagaggctgaccaaagcatctgcacttcctgtggcaaagtacttccccatggggtcaaacttgatacagatgcagttggaaggatgggcgttgatggactgcacaggcttcagttctgggtagctgaggatgttgatacaaccattgccatttgtcaggaagaacatattattgtcattgttccaggagatttcgttgacctcgaacttgaactgctcttctgctttggaacggtgtgtcttggcatcaataaaggtcaccacatcatccttgttgcctacagcaatggtctgcccatcaggactccagcagatattaatgttctcccctttagtgttcacagtggcaatgcattttgtagtcctcacatcccagatgcgaatggttttatctccggacgccgtaacaaataggtcaggattacttggatgccaacaaagctggtccacactatccccatgtccccgataattgttttctttgaccaaccggtccttctccagcaagaagacgctggccgtcttgtcgaaggaccccgaggctaggcgacgcccgtcgcaactccaggccaccgagtgcaccttggcgctgtgcgccaggaactcgcgcgtcttgctgtggccccggaacagctcctgcatcccaagcacgtagcgcgacgggccgctgctcactgagcaccacggggccatcgagccggggccgctctggcccaacgccgagggccccatggctgcagcggggaccgccatgccgagctccccagcttccaactcacaacactgcagcagcctccacggcgcagtcagtcctggcgccgctgccgcacgcatgcgcccggaagagcgacggcccctctgcgcaggcgcgctgtaccccgccccggaagggactacaaatcccggtatgcagcgcgtgcccgcgtctgcttacttagtaatatttggttcttttaactccaaatatgcttcacacttaacgattccgagtttttttagtgttcttatttctcccttacctattctttggtagacatatgtgtattcctgtttaatcgaataaaagaaccaacactaaccttctaaaa

SEQ ID NO: 77004 - DNA, 2082 bp, Homo sapiens; identical to SEQ ID NO: 59545

SEQ ID NO: 77005 - DNA, 3551 bp, Homo sapiens; identical to SEQ ID NO: 59546

SEQ ID NO: 77006 - DNA, 1451 bp, Homo sapiens; identical to SEQ ID NO: 59547
  misc_feature (1)...(1451): n = a,t,c or g

SEQ ID NO: 77007 - DNA, 1309 bp, Homo sapiens; identical to SEQ ID NO: 59548

SEQ ID NO: 77008 - DNA, 2450 bp, Homo sapiens; identical to SEQ ID NO: 59549

SEQ ID NO: 77009 - DNA, 1470 bp, Homo sapiens; identical to SEQ ID NO: 59550

SEQ ID NO: 77010 - DNA, 1408 bp, Homo sapiens; identical to SEQ ID NO: 59551

SEQ ID NO: 77011 - DNA, 7272 bp, Homo sapiens
tttcgtcgggctcctcggcggctactgcagaggattcagagccgagtcgctgaggaggaggctccggtccccgcgcgccatccgccaccctactggacacgggcgagagcgtcgccgccgtagcctccggagaagacaagggcatcgccgcctcagccgccgccgccgccgttttcgcctgcagctgctcaccggatcctcagtcttccacaatgaaccctgtttacagccccgtgcagcctggggctccttatggcaaccctaagaacatggcctacacgggttaccccacagcctatccagcagctgcccctgcctacaatcccagcctgtaccccaccaatagtcccagttatgctccagagtttcagttcctgcattcagcttatgcaactctgctgatgaaacaggcctggccacagaactcgtcttcctgtggcactgaaggcaccttccacctcccagtggacaccgggaccgagaaccgaacttaccaagcatcctctgcggctttcagatatactgcggggacaccatacaaggtcccaccgacccagagtaacactgctccacccccctactccccatcacccaacccctatcagacggccatgtatccaatcagaagtgcctacccccagcagaatctgtatgcccagggagcctactacacacagccggtgtatgctgcccagcctcatgtcatccaccacaccacggtcgtccagcccaacagcattccctctgctatctacccagcacctgttgccgccccgaggaccaacggtgtggccatgggcatggtggcaggcaccaccatggcaatgtcagcaggtaccctgctgactacaccccagcacacggcgattggggcacaccctgtctccatgccaacatatagggcccaaggaacccctgcgtacagctacgtgcccccacactggtaaagcctgcagcccatccaaatctggagtcacacattgtatgcaactactcaagtcttacaccggtgctggagcagttccctagcagcaccacctctatttgcaagaagagacaacggaagtgcaagggtcactttatgcatctttaatggttttgatttttatttttggtttttgtaaaagctgctttttctaatctcctgcctctccccaactgtccccctcttagcccctgcccttccagctctatccccttcctcctacctgaccaggccatgtcctctctgctcttccctaagtgtcctgtccctggggatcccagtctagaggcaagcagagagtagggtttattgcagtggttcatctgaaggctggattccatttgaagagcataaacagatgtggtccagggtaggaactcagagctgttgagcaggctacatctctaggggagtgttctggttgttttttcttaagcaagattagttcaggacattcccatgtcccagacacaaatgaaatgtctcctgagaaccattgcaacagaccaagaacaaaaccacctgagtatgtaggcgtgttattagcagcttaataccccaggctgagaacctggggaaaaaagtctttagaatttgggggagggtggggggagggagggcattgtggggaaggagagggaagaagggaggagcggtgcttgcctcatggctttggtttgaaaggtctctggccaaagcatctggccctggaccttctgatttgcacagtgatgttaactgacctggcacttcctcaaaaggtgattttgtccttagacctgccaagcggctgcagggtggtaggatcccagcatcccgaggccttggaaggccggatgccctgtgtcatccagacttcagcctctgagctgtcatggacccactctgatgaggagcttcctcctgattggagtgggaacctagggcatttctctcccttttcttttgcccttcccagtgccaggactcacctgtctgaccatagagcttgcaggcaggccaagctcttggttacctgtgccattcatggcccaagtgaaggaaccacattccaggtgggtgctggcagctctgaaggtgaggatagtgaaggaaaagcaatagcaataaacatttcatagactcatggaactgaagggaccttagcaatcatctcatccatttccctatttggcagatgaggaaactgaggcccagagaagcggaaaggacttccctagaccttacagtaaattagcattaaatgcagccttcctacctagtgggcaccttgcttacaaaaatttacctagggacggattggcttggttttgtaaaaattaagtcggcagcgcccatacctggtgagtctggaatggtctctgggctcctgtttctgctcttttcctccacggactccaaaggcgggggttgaagactgggcagaggctacatgggggcggatggcaggaacagaaattgcaaatgaagaaatagcatttggaaattctgtgaagacatctggaacttccgtcctgtacctgactccacctccaggagaaggagcaggtggactggccgaaaaggagaggccatgcttttaggacagtagcccctcatcccgagaggagaggaagaggaggaagacagtgggagtcatcaggagaggagaatgaggatgaggcccaggagacaggctcatctgggagaagagggacccctgggacgaggaggtccctgctagtctcagccaggagcctggattgcccagcagcagcctccggcacccagcgcttggctgggccagcagcccctctgggggtggggcacgaacattttattgtgaaaaatgggatcattgacaacatttgggactttaaaaaactgctttcatttaaaattcatgcaaacttggacatatccttaccccaacctcccatgtctccctaagggagggaaaaatcaggaaacccttgggttggaaggagctcagaagctgtctagccattcccaggagggtaaagcccatcagcctccttggcctagagccaggagtttgggggcccaccttcctgggcttccaaggaactttaggaccagtaagaaaaaattcagctgttctaaattatctgttctgggtgctgatgaggtttcactttaaaacaatagaaagttttccagtgttaattcactttttgcaaatacctccttccaccctctttggttttgtaaaggtgggtgaaggttgttctagattatgtcatacgtgtttgaaaaatgccaaaataataataatgataataataatagaaacctttggatttgtcaggtgcatcacagaggtcaaagcacttcacggcctttcatgtactcgccctgagagggacagggttagagttattacagtcaattgacaaatgaggaaacaggttatggaagggaacaggcccacagtgagcagcatgctggtatccgctaggcttcccagaaccctgctgcctccatgtgggctggggtggaaccacagagaggagaaaggaagaagaggagacctaggaatgaccttgtaacttttgttctttcaacaccagtaagtaaaactaacagctggacctcacagttcacagaacagttgaacataaattatctggtttaacccgatgaaatagaggttatttctcctatttgatccataaggaaatcaaggcttggaaaagtcaagtgacttgctaataagtgacagagccactcgaatcccaggctgtctgctgtctcgttcccctccatctgatccccacacaggctcacgtactgaagcatctgtgctctgtgccctatcttagcacctactatgtaattcaagagcaaaggggggccccaaggtgaaaataaggcactgaaaggctgtggtctggaagagcccaggtccagcacccctttttcagtatgagccccagttcagccggcctcagcctcttgctgtgatggagatccacaagcctagccaagcttggggagtcactgcaaaaggactgagcccaggagagcggggacagtcatgtgcctctggtaggatgggcacagttactggtaaggtcacagagatctagtgggaggtaccataggtagatacctccaaagattctagatggcacggtggtcaagctagacaaaaagtcagagctggaagggccgtctcattgaaggcaggcaagcaagagaggacaagggatgtagccgcctgacagtgagctacagcatctggcccccaggatgcaaacccctctctcctcctcatgccactgcctctccccaagtgcaacacctatggccaggatcaggggtacagatggctcgttaccagccaacccttttgaattcttctacttctacctgaccccctctcctcactggcctgggggtcaagaagtttgagtctgggagctggattgcctgcaaatagtgaaagcctgaaacataatggtttcccatgttttgaaaaaaaatgcatatttaatttcttcctcatgagataggacagttgctgttctttcttacctgggcaatgaccctaaaatgtatatcctctttcctgaatatttaggcagagacacacacacctgttccagaggcgtttttgggtatggcaaagtactttggacattggttgccaaagtcctccattttatagatgaaaaaactaaggctcaggaggcttgagacttgctaaaaggtcacacagcttggaagtgattcttcaaatcctctgctctttctgctgccacctgctgggtctcttggcaagcatggagggaggggctaactgtactttatagagctgggaagcccagtctctgagctgagcagatttgtatgaactgctttggggccagggacctgtaaatgagccctggggagggacccaggaggcacatcttaactgggcagcacaagggagggatgaggattttggcaacttaaaggcctcacttgggacaaaacactttgggggttcacaatgcccaggaccgaagacatgtttcaagggacagcacgaggcatcttttctattgggagacccatgttccttggtaagcctgcacacctggcttcctaatcccttgagagcctgcccactgtccagatccagtgagttggtacaaaacgtacagattgaagtccctggggtttgtttttccctgggtgagggaccagaaccagactctgagcatccttacccctggccacccgaattgttccaagtttgaggtaccccgttcccagagatctgggggtccttctttggagggcttgctttgttctgatggccttcagaaaggaatcacatgaagtataaaaggacaggccccttggtcaccaagttttggctcctcatacagataggactcatccaggttcccagcgaggcactgactaagcgaggctcagagcttccatatcaaattcctcagctttgttctgtgcccagagggggtgggccccattctgggccctgtgaactttgtcttatatatcaccatctgtatcagaattcctcctcaattgcagttaagtgaaaatacgtggaagtctgcttttccatcctgtattctcccacatcactactggctgtgcggcccccgctgcttgccaagcttgggaatccagagaggggcagtagtagagtgggccagttgggacccacccgcagagctgaagaaacacgccagactaactgatgggattccacaccggagcctctgagcgcacaggcaggcatgccaagggggctgcagggtttgtcctttacttatctgcccctttcctagaaaactcctcgtttctgaaattaggcattatatggttccaggacccagccttcaaaattcctggcaggccagcttcaacattccatggccagccctgcctaagccagacttgggtcccagtccctcagtctctccagtggatatcttctgtggtgcatgctgttgagtccaacccaaaggccaaccgaggcacacaggagttgggactggctgccacaaagctagaaagggacaaaacagcacttgcttccctatggccacatggatagtccctggatatccttgctgtggtagaggtcctctacccattccagccactgatagcagggggattttccttcctaaggagaacagatgtaacagctttgcaaagtaccggcccataggaatcaaatgggtgagatcagctttgggcctgaccccagcaagaccagcatctccagaccccagcctttctcctcaggcctaagagagtcagggaaagagaggagactgtcccagagaccttctcctcgggtcagccagatagtctggatctatggtgtgactcaagctcctccttacccagggggggtaaggccaggcctctagctacttggagttgtctgtaataatcttgaaaggcccaagggcctgtccccatcctgacttaaaggcatctgcttccctgtttcatatcacatgacagagaaacctgttctcatggcatgtaacatccctgtgaagagagcgttgtatatgattttgtattttttaattcattttaatctacaggttggaatctaatttttaaattttattggaactcacattttaaaaagaaataaaatttaaaataataataataataataataataataataaacctttgaccagtgtcttccaagtagtttgatcaaagaatttataggtgttttcaaaacacagtccggagtgtaaagattggaaagccccatggccttgcctggtgtgtatgaagtgtaaatctggttttgttttgttgttttggattcttttggggtttttggttttgttttgaagatccagacagtgatcactcctgaaagattgaagcccaagaatttgtaacccatggtatttaccggtaagcctggtagaacactccataactattaaaaaaaaaaattcccccccaaaaaaaagtccttaggtgaactagactgagtggttccttggggagggaggcacagaggactgtccctgggccagtgagtcccttgggcgtctccccaagttgatgcctaaatttgttctcagtagtcaagaaaaacctatggtacatcttacagctgatctgacaggggtctgccctaagggtctcacagctgctggggagctttaagtggcaacttcagcacccaccctaagtgtgtgatgtgggagcacagtgaggccattcagagttgaaatccattgagccatccgcgcaataaagctgacatctattgaaaaaaaa

SEQ ID NO: 77012 - DNA, 1918 bp, Homo sapiens
ctagcttggcacgaggcgggacgccggcagggttgtggcgcagcagtctccttcctgcgcgcgcgcctgaagtcggcgtgggcgtttgaggaagctgggatacagcatttaatgaaaaatttatgcttaagaagtaaaaatggcaggcttcctagataattttcgttggccagaatgtgaatgtattgactggagtgagagaagaaatgctgtggcatctgttgtcgcaggtatattgttttttacaggctggtggataatgattgatgcagctgtggtgtatcctaagccagaacagttgaaccatgcctttcacacatgtggtgtattttccacattggctttcttcatgataaatgctgtatccaatgctcaggtgagaggtgatagctatgaaagcggctgtttaggaagaacaggtgctcgagtttggcttttcattggtttcatgttgatgtttgggtcacttattgcttccatgtggattctttttggtgcatatgttacccaaaatactgatgtttatccgggactagctgtgttttttcaaaatgcacttatattttttagcactctgatctacaaatttggaagaaccgaagagctatggacctgagatcacttcttaagtcacattttccttttgttatattctgtttgtagataggttttttatctctcagtacacattgccaaatggagtagattgtacattaaatgttttgtttctttacatttttatgttctgagttttgaaatagttttatgaaatttctttatttttcattgcatagactgttaatatgtatataatacaagactatatgaattggataatgagtatcagttttttattcctgagatttagaacttgatctactccctgagccagggttacatcatcttgtcattttagaagtaaccactcttgtctctctggctgggcacggtggctcatgcctgtaatcccagcactttgggaggccgaggcgggccgattgcttgaggtcaagtgtttgagaccagcctggccaacatggcgaaaccccatctactaaaaatacaaaaattagccaggcatggtggtgggtgcctgtaatcccagctacctgggaggctgaggcaggagaatcgcttgaacccggggggcagaggttgcagtgagctgagtttgcgccactgcactctagcctgggggagaaagtgaaactccctctcaaaaaaaagaccactctcagtatctctgatttctgaagatgtacaaaaaaatatagcttcatatatctggaatgagcactgagccataaaaggttttcagcaagttgtaacttattttggcctaaaaatgaggtttttttggtaaagaaaaaatatttgttcttatgtattgaagaagtgtacttttatataatgattttttaaatgcccaaaggactagtttgaaagcttcttttaaaaagaattcctctaatatgactttatgtgagaagggataatacatgatcaaataaactcagttttttatggttactgtaaaaagactgtgtaaggcagctcagcaccatgcttctcgtaaaagcagcttcaattatccactggggttatcttttgacaacttgccattatctgatgttacacaattcaatagcaagcaagtttgagacaatcgcagtttaaaagcatgaaccatttaacaaaaagtggaataattaaagataaagcacttcttcccaaagggaattatcacctagtgaaaaattatgcatttcatctactcagttaccgactgcaagtctctcctcgctctagctctcaagcctttgggtgaatattcctgtgaaatatatcttcaacttgaaagttcatactcccaatcaaaaactcccttttactgagtttgcagtactgtatttgcact

SEQ ID NO: 77013 - DNA, 2248 bp, Homo sapiens; identical to SEQ ID NO: 59554

SEQ ID NO: 77014 - DNA, 1907 bp, Homo sapiens; identical to SEQ ID NO: 59555

SEQ ID NO: 77015 - DNA, 1990 bp, Homo sapiens
ttttttttttttgagcccactctgctttatttacaacacgcaggctgtctgtacaaacagcggccgatattattaaaaacaaaagaggtgagtgagaatcgtcacctttctgctttccttcctcacttggccaggctctagtactccacctttgagctgccatgcccaataggggaagtccaaaattaaaaatacaaccggtgtagaagaaaataaatggggagtgaaatagaagaaaagatgagggaggggagtgctaatatttacactagagttttatagacaactgtcccattccatcccaattccaatcctgacccagaaagtgatggtggcaggtccaagagacagagattatgtgtcgggacacagacagcctcccatccccaaccgtaatggattcaatttcaagtccacagagtggggaggaaggatagggtgggaaagtgagacactcattttcaaacaagtctcccttgagaattcctgccttgaagtgcagacagtatccaagctccaggggataggctgaggaccctgaggctcagttcccaaatcatgttgtcatttggaagttccaggctaaagttggtgccatcagggctctccagatttgggaggcccccctaaccgccgggcctctggcctcagttccttgcatttctggcaataaaagaagtcggggacgttggtcttcttaatcttagcacaggagaggtggatccacgtcccacacaggctgcactcaatcatgggccgccctgcaaagggctttcgacagtaacatgtgatcagatcccatgagtcatcacctgattctaccatgatgtcctcgtccatgacccgcatctcgccttcactggagctggcatctccatcttggcttgtttcagtgctgcccacctccttgctttcactgtcagcaggagggactccttcagggtgcactgtggcagggggcctaggagcctcagggggtgttggcagcacagggactggggcttcaccccctaccactgttgccatctcttcttcttcttcctcttcctcctcttcctcctcctcttcagagtctgtatcactggggggtgcctggggaggcccaggaggtgggagtctatccccccgttctgccttttttaacttccgcttcttgctcttcttgattcgagatctcttttccccatccccaggagttggccgaggcctccgaagcaccccaaagccagccccagctcctggccccaactttcggttctttcggtccttctttcgaggaggatgggagaggtccccctgggaaaggggcacgggggtaagagcagcagggggccgggaggtatgtgtcagggatgtgggggacaaaggagatgccactttgggcccatccagatcaaagagagagtccttgagcttcatcttctcaagcaaggtagcactgtcgggggcctgcagacgagagaaagtggaccttgggggtcctggctgggtgggacctgcttgagctgcccttctcttggatgactttgctttcttaacaaaagtctggatggttcgaagatctgagggggccgagtcccagccatcactgtcggccgcactctctcctcgcaatggagagctggagccagaggctggccagtcactttcctctttgctagggggaatgtaaccagcatatgccaaaacaaaactgcagaatttgttgaaatcctcaattgttctccgccgtttctctggtggctgagtctctggcttaagggtcggaggtggatcttcgggactgggctccgccatggcttccagcatcgccccctcccctcctcccggtccggcgcccccctccccggagccggggatcccggtgtcgcctctagtgctcgatgctcccactgcttcgctccacagaagtgtccgcctcagcccggttgagactcgagtccgctagccgctgccgccacctccctctaccactgcctcccgcacgaaa

SEQ ID NO: 77016 - DNA, 2740 bp, Homo sapiens; identical to SEQ ID NO: 59557

SEQ ID NO: 77017 - DNA, 1008 bp, Homo sapiens; identical to SEQ ID NO: 59558

SEQ ID NO: 77018 - DNA, 2258 bp, Homo sapiens
tttcgtcgcgggcgggcgggcagcgcagcgccgagcggggcccgcgggcccatgaggaggcctggggaccatgggctccaggatcaagcagaatccagagaccacatttgaagtatatgttgaagtggcctatcccaggacaggtggcactctttcagatcctgaggtgcagaggcaattcccggaggactacagtgaccaggaagttctacagactttgaccaagttttgtttccccttctatgtggacagcctcacagttagccaagttggccagaacttcacattcgtgctcactgacattgacagcaaacagagattcgggttctgccgcttatcttcaggagcgaagagctgcttctgtatcttaagctatctcccctggttcgaggtattttataagctgcttaacatcctggcagattacacgacaaaaagacaggaaaatcagtggaatgagcttcttgaaactctgcacaaacttcccatccctgacccaggagtgtctgtccatctcagcgtgcattcttattttactgtgcctgataccagagaacttcccagcatacctgagaatagaaatctgacagaatattttgtggctgtggatgttaacaacatgttgcatctgtacgccagtatgctgtacgaacgccggatactcatcatttgcagcaaactcagcactctgactgcctgcatccacgggtctgcggcgatgctctaccccatgtactggcagcacgtgtacatccccgtgctgccgccgcatctgctggactactgctgtgctcccatgccctacctcataggaatccatttaagtttaatggagaaagtcagaaacatggccctggatgatgtcgtgatcctgaatgtggacaccaacaccctggaaacccccttcgatgacctccagagcctcccaaacgacgtgatctcttccctgaagaacaggctgaaaaaggtctccacaaccactggggatggtgtggccagagcgttcctcaaggcccaggctgctttcttcggtagctaccgaaacgctctgaaaatcgagccggaggagccgatcactttctgtgaggaagccttcgtgtcccactaccgctccggagccatgaggcagttcctgcagaacgccacacagctgcagctcttcaagcagtttattgatggtcgattagatcttctcaattccggcgaaggtttcagtgatgtttttgaagaggaaatcaacatgggcgagtacgctggcagtgacaaactgtaccatcagtggctctccactgtccggaaaggaagtggagcaattctgaatactgtaaagaccaaagcaaatccggccatgaagactgtctacaagttcgacattgccgagaatggctgcgcccccaccccagaagagcagctgccaaagactgcaccgtccccactggtggaggccaaggaccccaagctccgagaagaccggcggccaatcacagtccactttggacaggtgcgcccacctcgtccacatgttgttaagagaccaaagagcaacatcgcagtggaaggccggaggacgtctgtgccgagccctgagcaaaacaccattgcaacaccagctacactccacattctacagaaaagcattacccattttgcggccaagttcccgacgagaggctggacctcttcatcacattgacttacgccgttgcttttccagactgggcaaaggggctgacttcgcagtgtgtgccaaaaagccggtgtttgataatcccattttcctgcttatcacctgaactgtgtcagtatcacttttagttttgttggttggttggtttgttgtttgtttaatatgccctgttttctacttctgttggaaaatatttggggttgaaataaaccagtgggagcatgggagccagtttggtggttggcaaactaccagtgatagaaaacaaatgacaggttttctgtgagcgtacgtcacagtggctcgggcccacaaggagacagaggggtacgtttcaggacatcattccaagggtttctgttcacgtttgtttaacgaggaaggggaagttgttctcccataataccagtggtatttctagtgcaacccgggtgtttttctacgcctcttcccatgctgcttccccacccccccactgtgctccgccccttccaaatgccatgtcacaacagcacttggatgtgtttttctcaactgtcatcagctccagctggcaggaccaacttcttga

SEQ ID NO: 77019 - DNA, 1803 bp, Homo sapiens; identical to SEQ ID NO: 59560
  misc_feature (1)...(1803): n = a,t,c or g

SEQ ID NO: 77020 - DNA, 980 bp, Homo sapiens; identical to SEQ ID NO: 59561

SEQ ID NO: 77021 - DNA, 479 bp, Homo sapiens; identical to SEQ ID NO: 59562

SEQ ID NO: 77022 - DNA, 2002 bp, Homo sapiens
agagacttgccaagccccacgaaagcaaatactgaataaatgcctcagcttaactttggaatggctgatcctactcaaatgggaggcctgagtatgctgctgttagctggagaacatgctcttggcacaccagaggtattctctggcacatgcaggcctgatgtttcagaatctcctgaattacgtcagaagtcaccattgtttcagtttgccgagatatcttcaagtacgtcccactctgatgcttctacaaagcagtgtcaaacatctgccttgtttcagtttgcagagatttcttcaaacacttcgcagttgggtggtgctgagcctgtaaaacgctgtggaaagtctgcactctttcaactggcagagatgtgcctggcatcagaagggatgaaaatggaagaatcaaagctaataaaagcaaaagaatccgatggtggaagaattaaagaattagagaagggaaaggaagaaaaagaaattaaaatggagaaaacagatgaaactaggttacagaaggaagcagaatttgaaaaatcggctaaggaaaatttaagagattctaaggaattgagaaattttgaggcattgcaaatagatgacataatggctataaaaatggaagatcccaaagaaattagaaaggaagagttagaagaagatcacaaatgtagtcattttcctgatttttcttattctgccagtagcaagataataattagtgatgttcccagtagaaaggatcatatgtgccatcctcatggaattatgatcattgaggatcccgcagcattaaacaagccagaaaagctaaaaaagaaaaagaagaaaagcaaaatggatcgacatggaaatgataaatccacacccaagaagacttgcaaaaagaggcagtcttcggaatctgacattgagagcgtcatatataccattgaagccgtcgcaaaaggagactggggcatagagaaacttggagatacccctcgcaagaaggtccgcacatcctcaagtggcaagggaagcattttggatgccaagccaccaaagaaaaaagtgaaatcaagagagaagaaaatgtcaaaggagaaatcctcagacaccaccaaagagtcaagacctccagatttcattagtatttctgctagcaagaacatttctggtgagacaccagagggtataaaagcagaaccattgacccctatggaagatgcactaccacccagcctatcaggacaggccaagcctgaggacagtgactgtcacagaaaaatagaaacttgtggttccaggaaatccgagaggtcttgcaaaggtgctctttataaaaccctggtgtctgagggcatgctcacctctctgcgagctaatgttgacagaggaaaacgaagctcaggaaaaggaaactcctctgatcatgaagggtgttggaatgaagaaagctggacatttagtcagagtgggaccagtgggagcaagaagttcaagaagacaaagccaaaagaagactgtctccttggctccgcaaagctggatgaagaatttgaaaaaaaattcaacagcctccctcaatatagtcctgttacatttgaccggaaatgtgtacctgtcccaagaaaaaagaagaagactggaaatgtgtcctcagaaccgactaaaaccagcaaaggaagtggggataaatggtcaaacaagcaactcttcttggatgccattcaccctacagaagccatattttcagaagacagaaacaccatggagcctgttcataaggttaaaaatatcccatccattttcaacactccagagccaacaacaacggcaagaacctttggggggcagccaaaagagaaaagcaaggaaaacccagattactcaccttgtcaagacacgcagagggccgggtatcaccatgaggaggtactttggatgacaaaccttatgaacaactgcggaggagtctacctaaagcaactgagacatactgcgatgacgaatgctc

SEQ ID NO: 77023 - DNA, 2327 bp, Homo sapiens; identical to SEQ ID NO: 59564

SEQ ID NO: 77024 - DNA, 1294 bp, Homo sapiens
ttttttttttttaatttaaaggctttttattaggaaccaggggaatgagctgcttatccctctataacagtctagagcaggtcatcaggcccaggatggagagaggttatcaaaggtgctgtggtgtgctttgctgcacgtgcttagggcctggaaggaaaggtggtggcaacagaggttggcaggaactggtgttagtcaaaacaccaaaatcctgggggagagcccctctaccttccttctaactccacttgaggtgggagcattccaggagacagagaatgtgaccaggatgcagcagtgtcatctgaacccctggcttcgttcagtgctacttcacttgccagccctccactcttcttgccttttagtgattaggtatttgaagaactcatacacagaccatgcgatggctgtggaggggatctggtaaattactctggcctgcacccctcggaaataggcggtcaccccacctacttgatataccgtcctgaaggcactagccatgcctgtgatatgtcctgtaatgtgtgagttcaaagccaaggactcctgggtgttgagcagtgttttgcaaacgtccagtggggttgtggctgcggcagctacagctcctgcgcaagctccagagaggacgtgggagcttgggttgtaccgtctctgggggttaaagtgctcctgcaggaattcataggtcatgaagtgaatggcttggaaaggaacgttcatggtcagctgggtggtgtagctgcggtaaaaggccccggccccttcattttgccacactgcccgtacacagtctgtcacccggtggtatggtgagttgtacatctgcatcctctgcttgaccacttccgcagggttcatggctgcatcatgaagtaatgttgccacacacccggccgcaccattggcaatatggctattgcccccagggtggattacatcactcaatgtcttttttaacttttcgtagcaggcaaaataaagggcgtgggcaggccctgcgcctgttgctgtgacgttcagccccctcatgggcctccataggccctccgttcttataatcctccagagggcctccaacacattgcgatagcgggcagctgggtcaggctgtagactctgcatccgggtcttgacgcagtcgatggggtacatcacgcagtgctccaggatccctgccacggcgcctgccaccatgtgcgtggtgacagtggctccagccggcagcgcctcgtagtccgggccggagtccggatcttgtcgtaccgggggcctgcaggccccg

SEQ ID NO: 77025 - DNA, 1783 bp, Homo sapiens
aagagttcatgtcactagtacagcgcggaggaattcgttttccatctgagcaatgggtattggaccaggccaatggttcctgacctgctgagcccctttgctctcatccttgtacccaaacagcctctcctgagtggtgccctcatcagatagagttctggtgtcacctggggagaagcacatcttttttgcttggatggtctggccagtgggcatgtgtggggaagagttgtgatgccagcctgacttggggcagagcagaagcactgtttggatggctttggaagccaggaggtgggacctgagggtatggggtctgcaggctgactatgtgttcgttttccaggtgactttgacactgaggctggagctgtgtcctcctcagagcccactgtggccagagatgagccagagagcctagccctggctcagaagtcaccggcccccaaggtcaggaagccaggcaggaagccaccaacccctggcccggagaaagcagaggcagctgctggggaagagtcctgtggtgcctcccctacccctgctaccagtgccagcccacctggccccacactgaaggcccgcttccgcagtctgctggagaccgcctggctcaatggcctggctctgcccacctggggccacaagtcctcaagaccagaccagccctcaccctgcccacagctgctggacagccagagccatcacctgtagcactggttgccagtgctgtgtgtatagcagtcactctccacccttccctttttgccttgcccagctgccccggggccacgagtgggatgctgggggctgtggctgctccctgggaagggtttccatctttggaccctgtgggcccatttcagggtgggctgaagagcccctgagcttttaacgtgagggtctttattggataggactactccctatttcttgcctagagaacacacatgggctttggagcccgacagacctgggcttgaattccggctcgtgttcttgctgcaggacctgggcaagaaacttcacctctgctgagccctcattccccatgtgtaaaatgggacaacgcaacctacctcacagggttgttgtggggatgctgcctgatacataccctgtcaccatttggtctctgcttcctctctgggacagggcctagaattggaggcagagaaccttcctatagaaagtcttcgtgtgtcctaggacttggctatcgtagagtggtaccttaggcagtggatgtgactcacactttcaggagtcaccccccagcatttggggttgggttggccctactccagcctggagctccctgagggagcctgcactccctgctcccaatccccgctactggtgcagggatgcagcctggagctggcgtccttgttctgggcctgctgctgccgccaccccaggaggccccaggcctgtcctgaattgacatcagtgcttccctgaactgcctcccccacccctggcattatcccaggaaacttatgttttctagaagctaagcagctgctgggactcagggactggtgcaggtaggctgagtggcagctcagtcctagaaggtctctgaagatctggactgaggaccctgctactccccaagccagagcccatcagccaggcctgctgtgagccacctgcctgtggagtgctgagctcaaccaaaggctggcaagctctgggcctcatttaagggattctgatgagccgatgggccctggaggcagcccattaaagcatctggctcgtttttggaaaaaaaaaa

SEQ ID NO: 77026 - DNA, 5773 bp, Homo sapiens; identical to SEQ ID NO: 59567

SEQ ID NO: 77027 - DNA, 3617 bp, Homo sapiens
cgccggcactcgcccggctcgcccgctttcgcacccagttcacgcgccacagctatatgtccccgagccgcgcgggcgcccgcgacgctactcctcgccctgggcgcggtgctgtggcctgcggctggcgcctgggagcttacgattttgcacaccaacgacgtgcacagccggctggagcagaccagcgaggactccagcaagtgcgtcaacgccagccgctgcatgggtggcgtggctcggctcttcaccaaggttcagcagatccgccgcgccgaacccaacgtgctgctgctggacgccggcgaccagtaccagggcactatctggttcaccgtgtacaagggcgccgaggtggcgcacttcatgaacgccctgcgctacgatgccatggcactgggaaatcatgaatttgataatggtgtggaaggactgatcgagccactcctcaaagaggccaaatttccaattctgagtgcaaacattaaagcaaaggggccactagcatctcaaatatcaggactttatttgccatataaagttcttcctgttggtgatgaagttgtgggaatcgttggatacacttccaaagaaaccccttttctctcaaatccagggacaaatttagtgtttgaagatgaaatcactgcattacaacctgaagtagataagttaaaaactctaaatgtgaacaaaattattgcactgggacattcgggttttgaaatggataaactcatcgctcagaaagtgaggggtgtggacgtcgtggtgggaggacactccaacacatttctttacacaggcaatccaccttccaaagaggtgcctgctgggaagtacccattcatagtcacttctgatgatgggcggaaggttcctgtagtccaggcctatgcttttggcaaatacctaggctatctgaagatcgagtttgatgaaagaggaaacgtcatctcttcccatggaaatcccattcttctaaacagcagcattcctgaagatccaagcataaaagcagacattaacaaatggaggataaaattggataattattctacccaggaattagggaaaacaattgtctatctggatggctcctctcaatcatgccgctttagagaatgcaacatgggcaacctgatttgtgatgcaatgattaacaacaacctgagacacacggatgaaatgttctggaaccacgtatccatgtgcattttaaatggaggtggtatccggtcgcccattgatgaacgcaacaatggcacaattacctgggagaacctggctgctgtattgccctttggaggcacatttgacctagtccagttaaaaggttccaccctgaagaaggcctttgagcatagcgtgcaccgctacggccagtccactggagagttcctgcaggtgggcggaatccatgtggtgtatgatctttcccgaaaacctggagacagagtagtcaaattagatgttctttgcaccaagtgtcgagtgcccagttatgaccctctcaaaatggacgaggtatataaggtgatcctcccaaacttcctggccaatggtggagatgggttccagatgataaaagatgaattattaagacatgactctggtgaccaagatatcaacgtggtttctacatatatctccaaaatgaaagtaatttatccagcagttgaaggtcggatcaagttttccacaggaagtcactgccatggaagcttttctttaatatttctttcactttgggcagtgatctttgttttataccaatagccaaaaattctccttgcctttaatgtgtgaaactgcattttttcaagtgagattcaaatctgccttttaggacctggctttgtgacagcaaaaacccatctttacaggctcctagaagctgaaggttagagcattataaaatgaagagacagacatgattactcagggtcagcaacctagtgagttaggaaaaaaaattaacataggggccctattaagggggaaagccaactatgtttaagtttacgtgtccaaattttaatggaaattttttactaacaattttaaaccatatttttcttccttcatatccatttctaatccatcaaacagcttatgtttacataaaattttatcattcacaaggaagttttaagcacactgtctcatttgatatccacaacttatttttggtaggaaagagagatgtttttcccacctgtcagatgaaaaaactgaagctcaaaaagggttgacttgaccatacagctaatgctgacagatccaagacctagacctaggtcttttgaactcaagtccagcattctcaactatatcaagttactgttcagaatacttaatatctcctctcttcataattatcaatagccccaagctcatggatgacaaatctctgctttatttcttgtctctattttttcactttatagctcctgttataataggcaagtttaatgggtataaacacagggatacccatcctctcttggcaagcacccatgtggcctttggatgaggtcagggtggcaaggctgtagtagataatgagaaaggccagaggctgcaaaagacagtccaaaggacacgagagaaaggaaggggaagaacaggactccaggactgttttatattatagaaaagcaagagctaaagagcatttacacatgttaaacagatacttgttaagcatagtgcctgacacacggcattagctgttattttatgagattccatcagctctgcctctgtcctctttcttctaacatgaaggtatcatgagaagagaaccttctaacataagctgtaattctaaacctgcacttgtccctctccagcaagaggctagcactgaattcattctactcatactacacacccagttatggaatgtccagagttctcgaagaaaataaatgactttaggaagaggtatacattttttaagtcgctctgcctccaaatctgaacagtccctgtaaatcattcttaagcccaagatatgagaacttcgctggaaaagtgggaccctctgagtggggggtccagaaattccccatgctgatggaattgccctatgccccaagggacccaattccttaaccgtgggggagtggaccccaccatggggccctgctccagctctgccataggtaattccaggaaatggggaggcttccacccttaaaaaccagtgtgccaaatggccagctagaggtttggatagggaagtatggtttggttccctagtgtttaccaaatattaagtactcttgatacaaaatatacttttaaacttcataacctttttataaaagttgttgcagcaaaataatagcctcggttctatgcatatatggattagctataaaaaatgtcaataagattgtacaaggaaaattagagaaaggcacatttagggtttattttttacacttggccagtaaaatagggtaaatcctattagaattttttaaagaactttttttaagtttcctaaatctgtgtgtgtattgtgaagtggtataagaaatgactttgaaccactttgcaattgtagattcccaacaataaaattgaagataagctcaaaaaaaaaa

SEQ ID NO: 77028 - DNA, 1826 bp, Homo sapiens; identical to SEQ ID NO: 59569

SEQ ID NO: 77029 - DNA, 1394 bp, Homo sapiens; identical to SEQ ID NO: 59570

SEQ ID NO: 77030 - DNA, 4518 bp, Homo sapiens; identical to SEQ ID NO: 59571

SEQ ID NO: 77031 - DNA, 1509 bp, Homo sapiens; identical to SEQ ID NO: 59572

SEQ ID NO: 77032 - DNA, 1084 bp, Homo sapiens; identical to SEQ ID NO: 59573

SEQ ID NO: 77033 - DNA, 3710 bp, Homo sapiens; identical to SEQ ID NO: 59574

SEQ ID NO: 77034 - DNA, 1959 bp, Homo sapiens
tttcgtcagggtgccggcaggggcgtccggggcgctctgaccggcctcgcccgcccccccgcagacacaagatggtgaaggagacccggtactatgacatcctgggcgtgaagcccagcgcgtccccggaggagatcaagaaggcctatcggaagctggcgctcaagtaccacccggacaagaacccggatgagggcgagaagtttaaactcatatcccaggcatatgaagtgctttcagatccaaagaaaagggatgtttatgaccaaggcggagagcaggcaattaaagaaggaggctcaggcagccccagcttctcttcacccatggacatctttgacatgttctttggtggtggtggacggatggctagagagagaagaggcaagaatgttgtacaccagttatctgtaactcttgaagatttatataatggagtcacgaagaaattggccctccagaaaaatgtaatttgtgagaaatgtgaaggtgttggtgggaagaagggatcggtggagaagtgcccgctgtgcaaggggcgggggatgcacatccacatccagcagatcgggccgggcatggtacagcagatccagaccgtgtgcatcgagtgcaagggccagggtgagcgcatcaaccccaaggaccgctgcgagagctgcagcggggccaaggtgatccgtgagaagaagattatcgaggtacatgttgaaaaaggtatgaaagatgggcaaaagatactatttcatggagaaggagatcaggagcctgagctggagcctggtgatgtcataattgtgcttgatcagaaggatcatagtgtctttcagagacgaggccatgacttgatcatgaaaatgaaaattcagctttctgaagctctttgtggcttcaagaagacgataaaaacattggacaatcgaattcttgttattacatccaaagcaggtgaggtgataaagcacggggacctgagatgcgtgcgcgatgaaggaatgcccatctacaaagcacccctggaaaaagggattctgatcatacagtttttagtaatctttcctgaaaaacactggctttctctggaaaagcttcctcagctggaagctttactccctcctcgacagaaagtgaggattacagatgacatggatcaggtggagctgaaggagttttgtcccaatgagcagaactggcgtcagcacagggaggcctacgaggaggacgaagacgggccccaggctggagtgcagtgccagacggcatgacgtggtgcggggcagcgtggccccaccggactagcacatgatgaatgtaaagttggcacaatgaaaatgacatcgctttaatggccttgtgtttgggatgtcctgtgtatgtgttcaacattcttaattgctgagtgtctttttggcttttcttttggttgtaacttaagttatagcttaatttatatttaaatgttttaagtataaatcacctctagtctgcatatggaatctgttcatttctattttcaggatatacttttgagatgtcagtgattgcaccaacactttgtgcttctagtggctttgccataattcagtgtcaccaataaggcacagcccagttagcagcttagcccccctagcaaaccccaaggcacaaagtgggcatcctgactcatctctaggtctgtggtttctcccctcttcccttggcagagttattgagggcatgatctcagggctgctaagataacatttctgaggattctagatgatcctcttaaagaataaaagcacatccgtggatcggacatggctgcatgtgcctgcttaacagggccaacttagttcctactgttctgtgcccttcagtggatggaacgtgagtgtctgatcatctctcttggaagttttctgaaccttccaagctctgtggtgaggacaaaccagtgtttgaatcatttgctgataa

SEQ ID NO: 77035 - DNA, 4423 bp, Homo sapiens; identical to SEQ ID NO: 59576

SEQ ID NO: 77036 - DNA, 798 bp, Homo sapiens; identical to SEQ ID NO: 59577

SEQ ID NO: 77037 - DNA, 2387 bp, Homo sapiens; identical to SEQ ID NO: 59578

SEQ ID NO: 77038 - DNA, 3015 bp, Homo sapiens; identical to SEQ ID NO: 59579

SEQ ID NO: 77039 - DNA, 1379 bp, Homo sapiens; identical to SEQ ID NO: 59580

SEQ ID NO: 77040 - DNA, 2262 bp, Homo sapiens; identical to SEQ ID NO: 59581

SEQ ID NO: 77041 - DNA, 1414 bp, Homo sapiens
cggcgctgccgggtgaaatcgtaggacagtgaagatgctgctggaattgtccgaggagcataaggaacacctggccttcctgcctcaagtggacagcgcggtggtcgccgagtttgggcggattgctgtggaattcctgagacgcggcgcaaacccaaaaatctacgaaggcgccgccagaaaactcaatgtgagtagtgacactgtccagcatggtgtggaaggattaacgtatctcctcactgagagctcaaagctcatgatttctgaactggatttccaagactctgtttttgttctgggattctctgaagaattaaacaaattgttgcttcagctttatctggacaacagaaaagagatcagaacgattctgagtgaattgggcaccaagccttcccagttatcataaccttgaatggcgactagatgtacagcttgcaagtagaagtctcaggcaacagattaaaccagcagtgactataaagctacaccttaatcaaaatggagatcacaacaccaaagttctgcagacagacccagccaccctgctccatttggttcaacaactggaacaagcattggaagagatgaagacaaatcactgtaggagagttgttcgcaacatcaagtagtaccagttttaaggttttaattcatttgaatcacttatgaattgatgatatacagcaattacttttcaaaattaattttttattaattcatgatgataaatacatagtattcctcagtatctattccaagatactgaggtcataatcagaagctaagctgggtgcagtggctcatgccagttatcccagcactttgggaggccgaggtgggcaaatcatgaggtcaggagattgagaccttcctggctaacatggtgaaaccccatctctactaaaaatataaaaaattagccaggtgtggtggcacgcatctatcagagtcccagctactcaggaggctgaggcaggagaatcgcttgaacctgggaggtggaggttgcagtgagctgagattgtgccactgcactccagcctgggtgacagagtgagactccatctcaaaaataataataataataataaagtaaaaataaaaataaaaaagtaatcagaagctaaagtaaagttcctttcctggtgctaactgtggtcttcttgacacattaagatgtattttgtattttaagagtctcatgctctaccgttgggaactagccagatggccattattttgtattttaaatacataaataggattgaatcaactagaaatgaatctatatgttctgtatatatgaatgactatcttgtttttgctacttcttttgactgcttaattttattattttcatctttattgatcaaatttcccaataaaattcacaatgtaatactaaaaa

SEQ ID NO: 77042 - DNA, 2629 bp, Homo sapiens; identical to SEQ ID NO: 59582

SEQ ID NO: 77043 - DNA, 2526 bp, Homo sapiens; identical to SEQ ID NO: 59583

SEQ ID NO: 77044 - DNA, 762 bp, Homo sapiens; identical to SEQ ID NO: 59584

SEQ ID NO: 77045 - DNA, 2120 bp, Homo sapiens; identical to SEQ ID NO: 59585

SEQ ID NO: 77046 - DNA, 1350 bp, Homo sapiens
gcgattgctggggctgcagcgctgcctccgagaccgcgaggtgggtggagcgggtcttcctggaagggtgcgataaggccgggcgaggtgcctgggatgcttctccccttccgcgaggaagagatctaattgggtagggcgggtgtagactagcctgccgagccgcccgctggcacctgcagcctcctgggcgcccgccgggccccggcgagaaagttgttaaagggagcgaggtggttgttcctggggtccgaggcgcgcctctcacgccctgcccaacagaagccgcagtcccgtggggtctggagacgcagtttcctgttaatgacaataaatccctgctccccctgcctcagacatctacgcagcgaaatcgagcctggccttgagggtccacaccgcgagggaagatgcgtgcgcccattccagagcctaagcctggagacctgattgagatttttcgccctttctacagacactgggccatctatgttggcgatggatatgtggttcatctggcccctccaagtgaggtcgcaggagctggtgcagccagtgtcatgtccgccctgactgacaaggccatcgtgaagaaggaattgctgtatgatgtggccgggagtgacaagtaccaggtcaacaacaaacatgatgacaagtactcgccgctgccctgcagcaaaatcatccagcgggcggaggagctggtggggcaggaggtgctctacaagctgaccagtgagaactgcgagcactttgtgaatgagctgcgctatggagtcgcccgcagtgaccaggtcagagatgtcatcatcgctgcaagcgttgcaggaatgggcttggcagccatgagccttattggagtcatgttctcaagaaacaagcgacaaaagcaataactgaaaaagactgtcctgtcagcgatgactttatacatcaagggggtcttgttttgctagagagtttggggtttggtttgtggatttcattgtgatttataataaggcttattttcacagaataaaataaagcaaaacgagggaggattttattgggggaagtgcagcaagaactgcctggtgtgaagtctgttcagggaacagccgggctgtcttcctggtcagggattgtctttcactttctttttgcgtgctgtgttctttgcattgcaggaggcagagtccagctccagttatctcaagtagagggcgtttctggtcgtcaggatacatgcggggcggaagggagacagaaagacataatacacaagaacagaaagcagcagacagccaggacccttggcccggaactagatctaggatggcctctgagactcagcagctggagtct

SEQ ID NO: 77047 - DNA, 1049 bp, Homo sapiens
cgctggggcagccggggcagccggggcagcccggtcaccccgcccccaggcccacactaagggtgtccgcggcctgccctccaggcggaggagcccggactgcggaaggatggagctggccgccggaagcttctcggaggagcagttctgggaggcctgcgccgagctccagcagcccgctctggccggggccgactggcagctcctagtggagacctcgggcatcagcatctaccggctgctggacaagaagactggactttatgagtataaagtctttggtgttctggaggactgctcaccaactctactggcagacatctatatggactcagattacagaaaacaatgggaccagtatgttaaagaactctatgaacaagaatgcaacggagagactgtggtctactgggaagtgaagtacccttttcccatgtccaacagagactatgtctaccttcggcagcggcgagacctggacatggaagggaggaagatccatgtgatcctggcccggagcacctccatgcctcagcttggcgagaggtctggggtgatccgggtgaagcaatacaagcagagcctggcgatcgagagtgacggcaagaaggggagcaaagttttcatgtattacttcgataacccgggtggccaaattccgtcctggctcattaactgggccgccaagaatggagttcctaacttcttgaaagacatggcaagagcctgtcagaactacctcaagaaaacctaagaaagagaactgggaacattgcatccatgggttgatgtctctggaagtgcaaccacccaatgtctctggaagtgccacctggaagtgccacctggaagtgtctctggaagagcacccaccactgttcagccttcccctgctgtttctgtcttcagaggcctacacactaccacatcctttctaagcatgtttgcctgacatccagctcactcgtctgcttcctttctcgctccccccatcctggggctgggctggccttcttctacagttcaatatggggcagactaaggaaacg

SEQ ID NO: 77048 - DNA, 2536 bp, Homo sapiens
cgttgcccaacccggtccccgcccccagacacgccgggctctcggggcaccacagccatgtgctcgttagcgtcaggcgctaccggcggccggggcgctgtggagaatgaggaggacctgccagaactgtcggacagcggggacgaggccgcctgggaggatgaggacgatgcagatctcccccacggcaagcagcagaccccctgcctgttctgtaacaggttattcacatctgctgaagaaacattttcacactgtaagtctgagcatcagtttaatattgacagcatggttcataaacatggacttgaattttatggatacattaagctaataaattttattagacttaagaatcctacagttgagtacatgaattccatatacaacccagtgccttgggagaaagaagagtatttgaagccagtattagaagatgaccttttacttcaatttgatgtagaagatctttatgaaccggtgtcagtacccttctcataccccaatggactcagtgaaaatacatctgttgttgaaaaattgaaacatatggaagccagggcactgtctgctgaagccgcattggccagagcacgtgaggatctgcaaaaaatgaaacaatttgctcaggattttgtgatgcacacagatgtcagaacctgctcgtcatctactagtgtcattgcggacctccaggaggatgaggatggtgtttatttcagctcatacgggcattatgggatacatgaagaaatgctaaaggacaaaatacgaacagaaagctaccgagatttcatataccaaaatccacatatcttcaaagacaaggtagttttggatgttgggtgtggaactggaattctctctatgtttgctgctaaagctggggcgaagaaggttcttggagttgatcaatctgaaatactttaccaggcaatggatattataagactaaataaacttgaagatactattacactaattaaaggaaagattgaagaagttcatcttcctgtagaaaaagtagatgttatcatatctgagtggatgggctattttcttctgtttgagtctatgttagattctgtcctttatgcaaagaacaaatacttggcaaaaggaggctcggtctaccctgacatttgcactatcagccttgtagcagtgagtgatgtgaataaacatgctgatagaattgctttttgggatgatgtctatggcttcaagatgtcctgcatgaagaaagcagttattccagaagctgttgtggaagttttagatccgaagactcttatttcagaaccttgtggtattaagcatatagattgccatacgacgtctatctcagatttggaattttcatcagattttaccctgaaaatcacaaggacatccatgtgcacggcaattgctggctactttgatatatattttgagaagaattgccacaacagggtcgtgttctctacgggccctcagagcaccaaaacacactggaaacaaacagtatttctactggaaaaaccattttcagttaaagcaggtgaagccttgaaaggaaaggtcacagttcacaagaataagaaagatccacgttctctcaccgtgaccctcacgttgaataattcaactcaaacttatggtctccagtgaaacagccataaaagcacactaccttgtagtttttaatgtgggggtagagtgggtcagcaggagggagctggttttatgtgagcagatggatggatgatggaccctttcctaatgagcctcctcaataagagagaagttctcattgtgggaatctgacatagttcagctgaggaagagaatcagctgatcctcatggtctgccacgtaatcattttcttagacgtttgctccaccagatttaaccaaatgtaactcccacattgagtttatctatattgaaaatcatttacattggcctatatttggaagagagatagtcttttgtttttaataagtttcttactataaattttaaacaaattggttagttatttggatattttattaaactagtaacacaggtactacacattttattatggactcctctgaggagggagtttttaattgtatttgctagaaaatcaggatgtaataaagatttgtataaaaaaactaaaatatggaaaagagcttcagccttcatatacaaatcatatatgcagacagcctagttgattatctagcatacttagggttctcattttgtagtttcttccctctttgtgactattccttagccttatagatttctagtactgcccaggaaatctaatttcaatacatttatcctaggtttcatgaaagtttttaaagattgggataaatatgtacttatttactaacgtattatctttttcaaaccagatttatgtgcaaaggttaaacatgttaactgttactaagcagtctataaagttgtcatttacaattactgattcaatttgaaatgtagaataaaattttaataaaatgtatccttataaaatattttaaaaatatt

SEQ ID NO: 77049 - DNA, 776 bp, Homo sapiens; identical to SEQ ID NO: 59589

SEQ ID NO: 77050 - DNA, 866 bp, Homo sapiens; identical to SEQ ID NO: 59590

SEQ ID NO: 77051 - DNA, 1552 bp, Homo sapiens
gtccataaacctcagagttagggaaagttgagtgtgacccacaatgccagctacctagaaactaaggtagatctaggtactgggattaaagatatcataaaatcattaaaatgttttctgaaatgtttgaagttaactcattttatttctaggatttggatttcaacattttaatttctttggaatataagtcactttttgcaagctaaaaaatagaatcaaactaaggtgatctagtcctctaggcatccaggctgatccttggaatcatgagcagaatgatgacatactacaaggtgctagcaatacggctataaactctaaataataaccactacatgtttcattaggaaacagccaaaagtccggccgttaaaggaataatctgcagaacatcttgatttacaagggacaaaatgatgcaaattatatgctgtccaacctactggtgaactggatcagaatggtccaaggactgttaaacagaggaagtatttacattttgaaaacttgctctgcaggataaaaaaattcctggttgctgtcagtaagaaagcaagtaaaaaaaatattacagatgaactcactgatctttgattttactaaggtcttccactggaacatgaaggtagggataagtgtacaggataatatactcagatatttttaaaataaactacttaataataagaaattagccataccacattgttccatttgctacaagaacaaattggcaatgaagactatttaaaagaaatgctcagctctacagagggtggtggcaggcaacacttttccattacagaataacctctattcttccatgatacatattcctgtggaaaaacttgtcagggcccagggatgaaaaatagagcttgtcctaattagctaactgtaggttcacttaacatctttgggaaggacccaaaaaatctggccattattttcttaaacatctgcaagctgcagaattccttagtcctcagctatagtttctgctagatatcttaaagctgggacagttccactgtgactcctcctcagctatggggtgggtgctagtcatcaaagtctggaatgtcatcataggagtaaccacggtagcctttggatgcatagtaagcgatgcgcaggtggtaaaatccgggtaggaacaccagaatgccaatgatcagcactggaacggcccggtctgccccccctttgctgatgtagcctgacagcaggagggagcctataataatgagaaaggcgccaatcaaaaacagcacagtggcaagtgcgatggccttataagggatcttaggaggggttttcttaaactgaaggtcaatgtagccatcgtctgtgctggagagccttgaatatttcactttactactggggattccagtagccaggttggtacgggacggcatcataacacgctgacacagcggagcgccgcgccaggccgcccgcacacccagagctcgcccacggttggcagcgcccaaggttgcatggcatggcccgcttaagtgccactcagccggccccaggcggg

SEQ ID NO: 77052 - DNA, 1131 bp, Homo sapiens
ccgggtcgacgatttcgtggaactgcggcgaccatgtatttctggtttatcaaaccgctaacacccagtctaagggcaggttctgtcccattgttatcactatcgaagcagccgatggaggaggggaggtctgagcagagggcggggtgcaggcgtaatggccctcgtgccctatgaggagaccacggaatttgggttgcagaaattccacaagcctcttgcaactttttcctttgcaaaccacacgatccagatccggcaggactggagacacctgggagtcgcagcggtggtttgggatgcggccatcgttctttccacatacctggagatgggagctgtggagctcaggggccgctctgccgtggagctgggtgctggcacggggctggtgggcatagtggctgccctgctggcatgccgaattcgctatgaacgggataacaacttcttagcaatgctggagaggcaatttattgtgagaaaggttcactacgatcctgaaaaagatgtacatatttacgaagcacagaagagaaaccagaaggaggacttataattggctataatttataagaatgttgtcattgagtgtgtcacttaaggtcttagactgcaaatctaaccatatttaatgaaatgtcttactgtacaaaaagtctaagccaaaggttctcaggggagaaagcacatgtgcagttttaaaacaaagcagtgctttgtcccattgctgtgatttttagtcagactttactcagtctgaaatgcaattaacattaaaggattaagtgtgagatttcgatttatgctatttgtgtatcccatactcctcccttttaataaacagtttccactgatgatatgaagggccggtataaagaagtctttaaatgagtaagctttcttggtaagattaaatcttacaaattatttttaaaaccttgtgatatatacaatgtttagctgagttttctaattttctggatgtaaaacaaaaggtttaacctatacattccttgagctgttagtgctatttaaatcttttgccctgtttaggtcctaaacacttttagttgagtaggatatgagcttttttgggtctcatatcatgctttttgccttaatttcagg

SEQ ID NO: 77053 - DNA, 3307 bp, Homo sapiens; identical to SEQ ID NO: 59593

SEQ ID NO: 77054 - DNA, 2637 bp, Homo sapiens; identical to SEQ ID NO: 59594

SEQ ID NO: 77055 - DNA, 1874 bp, Homo sapiens; identical to SEQ ID NO: 59595

SEQ ID NO: 77056 - DNA, 2093 bp, Homo sapiens; identical to SEQ ID NO: 59596

SEQ ID NO: 77057 - DNA, 1709 bp, Homo sapiens
aattcccgggtcgacgatttcgtcgcgcacctgcagcgcccgctgctcggccctgcatcctgcctgggcatcctgcgcccggccatgacggcgcactcattcgccctcccgggcatcatcttcaccacgttctggggcctcgtcggcatcgccgggccctggttcgtgccgaagggacccaaccgcggagtgatcatcaccatgctggtcgccaccgccgtctgctgttacctcttctggctcatcgccatcctggcgcagctgaaccccctgttcgggccccagctgaagaatgagaccatctggtacgtgcgcttcctgtgggagtgacccgccgcccccgacccaggtgcccagctctcggaatgactgtggctccactgtccctgacaaccccttcgtccggaccctcccccacacaactatgtctggtcaccagctccctcctgctggcacccagagacccggacccgcagggcctgcctggttcctggaagtcttcccagtcttcccagccagcccgggccctggggagccctgggcacagcagcggccgaggggatgtcctgctccaatacccgcactgctctggagtttgccctctttcccaaggagatgctgctggggagctggtatgggtggggtctttccctttacagacggggcagatgccaggactcagcccatcctgaggaggacacgtgtcctcatggagagggtgctccggcccaggcgggggagtcagtgcccagtcagcagctctgccaccatcctgctgggaactgggggggcctctattgggttataggcaaggccttttctctggcatggaattgttaattttctgacacgtctagatgtgaaatttctgaaaatgttgaagcagagaaacattcacacacaaaaagcaacatagtcatgtgggtccagatggcctcagtcctagatgttggcaccctttgctgtgtctcctcagagtatcctgttccgcctcctgccacctggacctccctcagtggatgtcttccctcccccgaccccagcctgtcagtccgagcacagtgcaggtttggctctgacttgggcctttggctgcagtgggggtggatttcagagcctctcatggcagcatctaagtgaccagagctgggatgagagaggggaaggggcaatgtgagtggcgctatgggacgggccagccctgctcctgagccagccccgccctctgccccctggccctgggctctgtgctagggatggtgaagaatgggggcgtgccagcctggcaggagtgggaagcaacacgcaggggtcccggaccttttcaagccttgccctcacgcttatccgagctcccagtgtggttagcacagagctcacccaccttgcctggctcccagctggggcctgtcctcactggtgctccaggggaagaaacgacagcctcacttctgtatggactgctgatgtggcctgccatcctgttcagcgggcattgtctttggagcagcaggagactaggatgcctctcactcacatgccagttcctggctggccagctgctcagggctcaggctggggcctcccattgacatcctccccctacactccctctctgagcctccgtcgcccctcctgttgggtaagggtgttgagtgtgacttgtgctgaaaacctggttcatatataataaataatggtgatgaaaa

SEQ ID NO: 77058 - DNA, 2244 bp, Homo sapiens; identical to SEQ ID NO: 59598

SEQ ID NO: 77059 - DNA, 847 bp, Homo sapiens; identical to SEQ ID NO: 59599

SEQ ID NO: 77060 - DNA, 1296 bp, Homo sapiens; identical to SEQ ID NO: 59600

SEQ ID NO: 77061 - DNA, 3307 bp, Homo sapiens; identical to SEQ ID NO: 59601

SEQ ID NO: 77062 - DNA, 769 bp, Homo sapiens; identical to SEQ ID NO: 59602

SEQ ID NO: 77063 - DNA, 2861 bp, Homo sapiens
ttttttttttttgatcttcttcaacttggatttatgtccatgattcgtgcaaatagctatccagggatggacagccaccctaatctgggcttctggcaccacaggcctccagctatggggtccagggtctgaacctcagggcctggcagcttcaggctggcgcccctcggcggacgtggctggcatggccttctcccatctgtgatggcttcagcaaggctactgtgagtggtggtggagagggccccagagccagaatatccatcattctcttctgttctggagacaaacccacacttcccacagctcctcacagaggggtaggggtgtgcgtggggcaaggtccctgctacagagcttgaaagcaaaaattaaacacacacaacaaattggtcatggcaactagagggcctgaaaccacttccgggaggttttgaaggaagggggtcttggctgcctcccactcttaggattgctgctcctggaggcttctgcaacggatggtgggtcaaagccggatgaggcctctctccactcagcagcagggaaggagtttttcccagtcactcccagcagagtacaaatgaaagccttctgggtggagcctccccagtcctgtaaacagctcagttcagggactggtatacaagctggccacccatctcagcctctcatccagctgaggctctggccacaccgtgcaagtggcttctagtttcttggcaatctgagatcagctggctctgcaagatgaaggtggagccaaatgacacaatctggtctcactgaggcccctcacggtcattttttggagactctggttctgtaggcctggctgtgggagggtccatcacttgggagctctgatttggatttcgaacccctccacagggtagacgccaggtgtattccggcagatggaagaggcgcgagttggggagtgggggcgggtgctccatggccatggggggaggggggtagcggatctgggaccagtcctcgaagccatggtgtggcaccatggctggcatgggcgggtaggcgtaggggtaggccccgcagagatgttctgggtggggctccacatggtaacgctctcctgaggcctttgctttcctcttctgctgtctgagggcttctcttgccttctcctcatctttgaatgcttttagctgggcatttgacagggtgacctgggcctgcagcttctccacttgcttcttcagctcttccttctcctcattcatgcgctcacgatcactgcgctccctctggaagtcctcctcgaagatcttcacctgctgtttcagcaactcattctgcgtgaccagctcctgtttccttaggagggcccctgctccttctgggctcccaaatgctgttggtggagatgatggcggggtttggatgctcagtgcttcctccagggccttgttgagccgctggatctccttttcctggtactcacgctgtcgggtgagtgggctcagctgatcctgcaggtacttgaccttttggcgcagctccttggcctctgctgtcagctgctccttgtcggtctcctccatttcaatcttggacttggccaggaggagcttgcggtcaaagtcacgctgcttctgctcccgctcggcctccaggtcagtcacctgcttctgcaaatcagccagcttctgacgcagctcagtgatcttctgctcatactgctgcttcatggaccggaaatgctggtcccactgcttgttcacttccagcagctcactgcgctgctgctccagcatcttcaccttcttctcggctgcgcccaaggccaccacctctgggaccttacctgccgtcacactagcctgctgctgtccagccactgccttcttgcctgtcccttccatcttcggtgagcctggccgcccagacgcaccctctttgttgccattgctcatcaacaacttcttgagctccaaattttcctcccgcagcctctcggcagcctgatcccgctgttccaggcccttatccaacttggccttcagagcctcgttctccttccgaagctgctcacacagggtctgcagaatggaggtgcgctgctcattcttgtgcaccttggatgccagtcggttgaactccagggccatgcggcccaggtgggtgaagagctggccgtggtccggctcctcggcacacacactcagcgtggtctccaggcgctgcaggtgcagcatcaggttgccgtcctcacggggcagggggcccagcgccatcgcattggcatggctgctgctctctggtgaattctgctcctcaggagtgaccacttcaaattcagaggaggtgccactggatggaggcttctggactggtgctggcttgtcactggggcatgcaggggctgtgggagatgctgtgacatttgagtcctttcctgtgagctcagccagggggtcgaaggagcccaaggagggagaaggtggtgggagcagctcgttgtccttcactagctcctctgccttctgccggagcctggtcgcttccatctgggactcttccaaaagctcccctaacatctttatcccttgcattttttccttcagccgggaattctccttcactaggcgctcaaaagctgcggatgcctctcctgagggcacgctgcccccagggtcgtagatccggtacggtcctctcccttccatgagggtagctcagcccctgccgtggtgcccgcctggccgaggacggggagcttggggacacagcgccccgcttgctgcgtccagccccgaatccagggacggggcagcggcccgggcaaggctccggccccccgtagcactcctagggctcctggacgggggacgaaa

SEQ ID NO: 77064 - DNA, 2426 bp, Homo sapiens; identical to SEQ ID NO: 59603

SEQ ID NO: 77065 - DNA, 3983 bp, Homo sapiens; identical to SEQ ID NO: 59604

SEQ ID NO: 77066 - DNA, 1381 bp, Homo sapiens; identical to SEQ ID NO: 59605

SEQ ID NO: 77067 - DNA, 1609 bp, Homo sapiens; identical to SEQ ID NO: 59606

SEQ ID NO: 77068 - DNA, 2036 bp, Homo sapiens; identical to SEQ ID NO: 59607
  misc_feature (1)...(2036): n = a,t,c or g

SEQ ID NO: 77069 - DNA, 1309 bp, Homo sapiens
ttttttttttttttgctgctttgacccgacgcatttattgaagagagctctgtccttctcccttctaccgagaagaggcggcttgcagggctggcacctgcccacacctgccactgggcctttccctgggctaggctgagtgggagcagatgccctcatcctatgtcgggcctgtgcaggagccatcacaccaccttgttgatgatgacacctagttcttcaatctcacactggacttcatcccccttcttgagaaagacaggaggtttcctgaatacaccgacacctgggggggtcccagttaggatgacatcccctgggtaaaaggtaacaaactgggagacccaggctatcaggtcctctgtcttgaataccatctggttggtgttgccgctctggaccacttccccattcactcggcagcagatctttaagttgtgtggatctgctacactgtccttggtcaccaaggcagggcccagagggcagaaggtgtcgaaggtttttcccagcagccattgtttcccattacgtctcatttgccagtcacgagcactcacgtcatgagccacagtgaagccggccacgtgggccatagcatctgtggccttgatgtgcttgcctttctttccaatgaccacggccagctccacttcccaatctacctcctggctctgtggtgggaggaccacctcatcatagggccccacgatggagctggcaaacttgctgaagatgatgggctccttgggcacgggcacgttctgttctttgcagtggtccacataattcatgcccacacacaccaccttatctggtcgtgtgactggagccaggaaggttacctccgaccgtggtaggactggcaactgggcagccagggctcttcttgccactgagagggtggcctctccctgctctaggaactgcgtcatcgtcttcgggagtgtggggtcaaaggcattgaggttgataacccctccaccattccctgtctccaggcccaagtgaggccccaccaggtggggtgcccggaactgcactagtctcatgtctctggagggttgaaagggccacttctgagcctgcagcagaactgtgagtaaccttcttctaccagacaccagcatcagagcctggccgcggcggccgatcttcctgcgctgtagggttagagctcgcggggccgaaggtcaagggcggcgggcgcctgagcactgccaccagtgaccgcagccagccggggaaatgcagcagctgctaacccagggccactcggccggatcacccgagagaaaagcgggcgcga

SEQ ID NO: 77070 - DNA, 1610 bp, Homo sapiens; identical to SEQ ID NO: 59609

SEQ ID NO: 77071 - DNA, 3305 bp, Homo sapiens; identical to SEQ ID NO: 59611

SEQ ID NO: 77072 - DNA, 3817 bp, Homo sapiens; identical to SEQ ID NO: 59612

SEQ ID NO: 77073 - DNA, 1345 bp, Homo sapiens; identical to SEQ ID NO: 59613

SEQ ID NO: 77074 - DNA, 1292 bp, Homo sapiens
gacgcccgccctactccgcgtggattggttgaccgcccttcgagcccggtgctgactggcttgcgtctctgccactttctttcagcttagtggcgcgcggcgcggcgacgaccgccgggagcgtgtgcagcggcggcggcggaagtggccggcgagcccggtccccgccggcaccatgcttcccttgtcactgctgaagacggctcagaatcaccccatgttggtggagctgaaaaatggggagacgtacaatggacacctggtgagctgcgacaactggatgaacattaacctgcgagaagtcatctgcacgtccagggacggggacaagttctggcggatgcccgagtgctacatccgcggcagcaccatcaagtacctgcgcatccccgacgagatcatcgacatggtcaaggaggaggtggtggccaagggccgcggccgcggaggcctgcagcagcagaagcagcagaaaggccgcggcatgggcggcgctggccgaggtgtgtttggtggccggggccgaggtgggatcccgggcacaggcagaggccagccagagaagaagcctggcagacaggcgggcaaacagtgagcgcccacccagaccggctgctgcgccccctcctgccagggtggcgattccgctccacagtctcggacggatctgctcagaaaggaagaggcaggcgccagggggaacccccttcgtgttttgtgaccctcccttttaggtgaagcccctttttcttgctaaaaccggcaattctccggttagaaatgttacttggtgttttttggttttgtgaaacggccgtcccaaagctggctggattcctagaagagtctgtgttgaaggcatctttcaagccctcgctctggttctcagggcagcattttccaggcgggtttgttttgcatttcttggagcctctccgagcagcaaccagacgggagatttttattttaagctgttcatgctgggactgacagcctgcagggtttccttgggcgcggccccaaaattgccttcaaaacaaacccgggacggttgaaagccttcgaaccgtgcaggggatgcctcgggccctggcccttcgcttcctctcttgtgttatggaaataaaaacaaataaaactacacactgcacatccaaaaaaaaaaaaaggggggggcgttttaagggaataaattttaagacccgggcgcgggcagggaaatatttttttaagggggccccaaaattaaatttcggtgccgggttttaaaaaagggggggtgggaaaacccg

SEQ ID NO: 77075 - DNA, 1420 bp, Homo sapiens
gagctgggaggctgcgagatccctaccgcagtagccgcctctgccgccgcggagcttcccgaacctcttcagccgcccggagccgctcccggagcccggccgtagaggctgcaatcgcagccgggagcccgcagcccgcgccccgagcccgccgccgccctttgagggcgccccaggccgcgccatggtgaaggtgacgttcaactccgctctggcccagaaggaggccaagaaggacgagcccaagagcggcgaggaggcgctcatcatcccccccgacgccgtcgcggtggactgcaaggacccagatgatgtggtaccagttggccaaagaagagcctggtgttggtgcatgtgctttggactagcatttatgcttgcaggtgttattctaggaggagcatacttgtacaaatattttgcacttcaaccagatgacgtgtactactgtggaataaagtacatcaaagatgatgtcatcttaaatgagccctctgcagatgccccagctgctctctaccagacaattgaagaaaatattaaaatctttgaagaagaagaagttgaatttatcagtgtgcctgtcccagagtttgcagatagtgatcctgccaacattgttcatgactttaacaagaaacttacagcctatttagatcttaacctggataagtgctatgtgatccctctgaacacttccattgttatgccacccagaaacctactggagttacttattaacatcaaggctggaacctatttgcctcagtcctatctgattcatgagcacatggttattactgatcgcattgaaaacattgatcacctgggtttctttatttatcgactgtgtcatgacaaggaaacttacaaactgcaacgcagagaaactattaaaggtattcagaaacgtgaagccagcaattgtttcgcaattcggcattttgaaaacaaatttgccgtggaaactttaatttgttcttgaacagtcaagaaaaacattattgaggaaaattaatatcacagcataaccccaccctttacattttgtgcagtgattattttttaaagtcttctttcatgtaagtagcaaacagggctttactatcttttcatctcattaattcaattaaaaccattaccttaaaatttttttctttcgaagtgtggtgtcttttatatttgaattagtaactgtatgaagtcatagataatagtacatgtcaccttaggtagtaggaagaattacaatttctttaaatcatttatctggatttttatgttttattagcattttcaagaagacggattatctagagaataatcatatatatgcatacgtaaaaatggaccacagtgacttatttgtagttgttagttgccctgctacctagtttgttagtgcatttgagcacacatt

SEQ ID NO: 77076 - DNA, 3067 bp, Homo sapiens
aatgaaggtggacacccaaatagccccaatacaaatgcctgttcaatcaaccaaacatctaagcagcacatctatgtggtagcatattgccaggccgtgagactgcgaatataaataggaaccgcccctcatctgcaggcgctcacaacctagttagcaaacagtaaaacaattaagcgcgccgtggacataggcccacttgtcctgggaaatgaggggaagctggggtttgcagtggtttgattgaagggggactacatgttagaggcacagactgggtgcaggtacacccaaaggaacgagaagagtggaaggaaacaacatccacaaagtaaccacatgctggcgtatcgaaggccgtgatttacggttttgagactttacctcgccagcaaaggggggccagtctgttagcggtgcagattggaggggtgacattggaagctgtccaggaaaaagaaaatggaactggggagcagaaggcctacgcaagagggcgggacagacaggacttgtgactagtagctctggactgaggaatcctccctgctttctggtgcgggagagctagtggatgatggtgccaataacctggatggggaaagtaagctccctcctggaatgcttcattcacaacctccattttcagcaacatcccatctactggtgcttcctggtcgagatacaagtttcctgaaactgctgctctgttttgggcctcacccggccaacagctcactagctggcaagcagtagtatcaagatggcggccccctaggactggctagtcatgtgacctcgggtttcccaagtttgaagcccggcagtcctttcgggggcaaggttcacctgtcacgaaacgagtgtcaccccttcgactctcgcaagccaatcggcatctgagactgggccactgcggtgaggcgatcggaagattggtcctttccagtcgcctagctagggccaatcacggagcgtcccatacttcgcgggcccgcccgtaggccggggagaagcaggaatatcgtcacagcgtggcggtattattacctaaggactcgataggaggtgggacgcgtgttgattgacaggcagatttccctaccgggatttgagaatttggcgcagtgcccgccttagaggtgcgcttatttgattgccaagtaatattccccaatggagtactagctcatggtgacgggcaggcagcttgagctaatgagtcctccgtggccggcgcagctctccacatgccgggcggcgggccccagtctgagcggcgatggcggcggcggcggcggcggcagcagcagcgggggctgcgggcggtcggggctccgggccggggcggcggcgccatcttgtgcccggggccggtggggaggccggggagggggccccggggggcgcaggggactacgggaacggcctggagtctgaggaactggagcctgaggagctgctgctggagcccgagccggagcccgagcccgaagaggagccgccccggccccgcgcccccccgggagctccgggccctgggcctggttcgggagcccccggcagccaagaggaggaggaggagccgggactggtcgagggtgacccgggggacggcgccattgaggacccggagctggaagctatcaaagctcgagtcagggagatggaggaagaagctgagaagctaaaggagctacagaacgaggtagagaagcagatgaatatgagtccacctccaggcaatgctggcccggtgatcatgtccattgaggagaagatggaggctgatgcccgttccatctatgttggcaatgtggactatggtgcaacagcagaagagctggaagctcactttcatggctgtggttcagtcaaccgtgttaccatactgtgtgacaaatttagtggccatcccaaagggtttgcgtatatagagttctcagacaaagagtcagtgaggacttccttggccttagatgagtccctatttagaggaaggcaaatcaaggtgatcccaaaacgaaccaacagaccaggcatcagcacaacagaccggggttttccacgagcccgctaccgcgcccggaccaccaactacaacagctcccgctctcgattctacagtggttttaacagcaggccccggggtcgcgtctacaggggccgggctagagcgacatcatggtattccccttactaaaaaaagtgtgtattaggaggagagagaggaaaaaaagaggaaagaaggaaaaaaaaaggaattaaaaaaaaaaaaagaaaaaacagaagatgaccttgatggaaaaaaaatattttttaaaaaaaagatatactgtggaaggggggagaatcccataactaactgctgaggagggacctgctttggggagtaggggaaggcccagggagtggggcagggggctgcttattcactctggggattcgccatggacacgtctcaactgcgcaagctgctgcccatgtttccctgccccacttcacccccttgggggctgctcaagggtaggtgggcgtgggtggtaggaggttttttttttacccagggctctggaaggacaccaaactgttctgcttgttaccttccctccgtcttctcctcgcctttcacagtcccctcctgcctgctcctgtccagccaggtctaccacccaccccaccccttttttccggctccctgcccctccagattgcctggtgatctattttgtttccttttgtgtttctttttctgttttgagtgtctttctttgcaggtttctgtagccggaagatctccgttccgctcccagcggctccagtgtaaattccccttccccctggggaaatgcactaccttgttttggggggtttaggggtgtttttgtttttcagttgttttgtttttttgttttttttttttcctttgccttttttcccttttatttggagggaatgggaggaagtgggaacagggaggtgggaggtggattttgtttatttttttagctcatttccaggggtgggaatttttttttaatatgtgtcatgaataaagttgtttttg

SEQ ID NO: 77077 - DNA, 1164 bp, Homo sapiens
ttttttttttttgcatttcaatagaactagctttatttacttatttatttattgtaaacaaaagaaatggtttaaaagcaaatgcatatatgtaccaagggatggacatgacctggtacttacaaaggagctgctgtgtcataatggaaacagcatattaggagaaaaatagtatttcgtgtgctgtctgcttgagtaatcaatctggagatgcaagttaaccgaaggtgctctgccaagccatcagcgtgagaaaaaaaaaccaccagaagttgcctccagataacgatgtagtggcagcatgataactggcatcaactcacggtcttctcattttccccattttctataattttcctcttcttttcatctatttttttcttgaagatgttatttcggtaaaactgaagctctttgatgctttcactaatgtcatcaagtgccctatgagaagcagccttctttggtgcaaattcatattcttctggataccagcgtctgcacagttctttaacagtgctcacatcaattattctataatgaagatgtttcatgaactggggcatgtatttgtcaagaaacttcttatcttcatgaactgaatttcctgcaagtggacagagccctggaggagtctgctgtcgtacaaaggacagaaattcatactctgcctgctgcaatgtaattgtactctccttcactgccttggtaaggccagacttcccgtgatgctccttacaccaatctgacatgctgtccagcaactcatctggttgttttataatcaggttaggaccttcagccaaaatgttgagatcagagtcagttatcagacaggccatctcaataatctggtccttctcaatgtccaatcctgtcatctccaggtccacccagaccatccgctgagccatgctctcccctgccgccatggctgcgccaccttcgcggacacctcgggccccgaaccgtccgtgactcccacctacaccccgcaacagcctggagcccagggagccgcctagcatcacccgggaccagcagccacggccccagtctcgcagccggcgctggcgcaggcgcaatagtcgctaaacgtcgcaaacccacggggaggcgcacgagcgaattccaccgcactgactagtgtctcgagttttcaat

SEQ ID NO: 77078 - DNA, 2935 bp, Homo sapiens; identical to SEQ ID NO: 59618
  misc_feature (1)...(2935): n = a,t,c or g

SEQ ID NO: 77079 - DNA, 1236 bp, Homo sapiens
tcggaaaaggcccactttgggggataatgctgagggacactatgaaatcttggaatgatagccagtcagatctgtgtagcactgaccaagaagaggaagaagagatgatttttggtgaaaatgaagatgatttggatgagatgatggatttaagtgatctgcctacctcactttttgcttgcagcgtccatgaagcagtgtttgaggcacgagagcagaaggaaagatttgaagcactcttcaccatctatgatgaccaggttacttttcagctgtttaaaagctttagaagagtcagaataaatttcagcaaacctgaagcggcagcaagagcgcgaatagaactccacgaaacagacttcaatgggcagaagctaaagctatattttgcacaggtgcagatgtccggcgaagtgcgggacaagtcctatctcctgccgccccagcctgtcaagcagttcctcatctcccctccagcctctcccccggtggggtggaagcagagcgaagatgcgatgcctgttataaattatgatttactctgtgctgtttccaaattgggaccaggagagaaatatgaacttcacgcgggaacagagtcgacacccagcgtggtggttcatgtctgtgaaagtgaaactgaagaggaagaagagacaaaaaaccccaaacagaaaattgcccagacaaggcgccccgaccctccgaccgcagcgttgaatgagccccagacctttgattgcgcgctgtgaggcccttggttgtggtgcgaggcggctgccctggtgggctctggccatggcgctctgtgcctgcggccgatgcgttgctgcgaacagcataggtgagactctgccgagtgaggtataggtcttctcaccacgcctgtactgcagacacggtcgtgtagagtagcagctgatttgacctgtcccagattttaagtgatattccaaaagggactttacattaaaggagaagcccccaagatgtggccacccttaaccatttttaaatagtaacaaattaggaaaacagctcccctcccctccagccatgtaagtcctcctgattctgtatcacatgagacaccaaaaactggaaatgtagtcacacccagtacagtaccatttttatgaatttaaaaatagtcttataattttaattgtttgtgggtatttttctactggtataaatagcttctaattaataaatcgatcaaaggttgttactcag

SEQ ID NO: 77080 - DNA, 857 bp, Homo sapiens; identical to SEQ ID NO: 59620

SEQ ID NO: 77081 - DNA, 5580 bp, Homo sapiens; identical to SEQ ID NO: 59621

SEQ ID NO: 77082 - DNA, 1041 bp, Homo sapiens; identical to SEQ ID NO: 59622

SEQ ID NO: 77083 - DNA, 1101 bp, Homo sapiens; identical to SEQ ID NO: 59623

SEQ ID NO: 77084 - DNA, 2051 bp, Homo sapiens; identical to SEQ ID NO: 59624

SEQ ID NO: 77085 - DNA, 992 bp, Homo sapiens; identical to SEQ ID NO: 59625
  misc_feature (1)...(992): n = a,t,c or g

SEQ ID NO: 77086 - DNA, 1437 bp, Homo sapiens; identical to SEQ ID NO: 59626

SEQ ID NO: 77087 - DNA, 2048 bp, Homo sapiens; identical to SEQ ID NO: 59627

SEQ ID NO: 77088 - DNA, 1870 bp, Homo sapiens
tcgatacgacttttttttttttttttttttttccggtaggtcgccagctgaggcggtttgtaagttttgggtcgcagtatgctagaattttgaggctcccttctgatgaaaattgagctgtccatgcagccatggaacccgggttacagcagtgagggggccacggctcaaggctggagtgcagtggcatgatcttggctcactacaacctccaccttctgggctcaagcagtcctcccacctgagcctctcaagtagctgggacttcaggcacgcaccaacacacccagaaacttacacatgtccaaaaatgattgagatggagcaggcggaggcccagcttgctgagttagacctgctagccagtatgttccctggtgagaatgagctcatagtgaatgaccagctggctgtagcagaactgaaagattgtattgaaaagaagacaatggaggggcgatcttcaaaagtctactttactatcaatatgaacctggatgtatctgacgaaaaaatggcgatgttttctctggcctgtattcttccctttaaatacccggcagttctgcctgaaattactgtcagatcagtattattgagtagatcccagcagactcagctgaacacagatctgactgcattcctgcaaaaacattgtcatggagatgtttgtatactgaatgccacagagtgggttagagaacacgcctctggctatgtcagcagagatacttcatcttcacccaccacaggaagcacagtccagtcagttgacctcatcttcacgagactctggatctacagccatcatatctataacaaatgcaaaagaaagaatattctagagtgggcaaaggagctttccctgtctgggtttagcatgcctggaaaacctggtgttgtttgtgtggaaggcccacaaagtgcctgtgaagaattctgggcaagactcagaaaattaaactggaagagaattttaattcgccatcgagaagacattccttttgatggtacaaatgatgaaacggaaagacaaaggaaattttccatttttgaagaaaaagtgttcagtgttaatggagccaggggaaaccacatggactttggtcagctctatcagttcttaaacaccaaaggatgtggggatgttttccagatgttcctttgggtgtagaaggacaatgacatcaagagtagttgaaaagtatcttgccactgttggccttttgatttttttttcccactttttcttgaaagattaagtaattttattttagttccattctagaatgttggggagtggggcacaagaaaaaatagtaaaaatgaaatgcatctgttaaaaatgtcatggattgaaagcagaactggagtttcaaattacaaccttaaaattgttgttagatatttccttcacattaccagctgccccattttgaaaaagaaattatcccataaaggtaatgttggtgctccaaatttgcccagcccattccccaaccccccttctccccttacctgcccttcacctaaagaaccccagaaaagctaattgctccccctttcagcctctgttgcaactaacaactctcagtggcctcaggacacagctttggccttggggaattctgggaaaacttttacttcctgattaaagatacatatgcagttaggccacctcctcccccccttactgccataaacaccaaagtgatgactggagctggaggagttatttgaaccacgacggaagggccaagagaaccacgaagatgccagttgccacattgttgagctgctgacccaacaccagccattgcctgtctctaaacatcttatgaaataaaaccagttttgtttaaaaaaaaaa

SEQ ID NO: 77089 - DNA, 5449 bp, Homo sapiens; identical to SEQ ID NO: 59629
  misc_feature (1)...(5449): n = a,t,c or g

SEQ ID NO: 77090 - DNA, 1470 bp, Homo sapiens; identical to SEQ ID NO: 59631

SEQ ID NO: 77091 - DNA, 572 bp, Homo sapiens; identical to SEQ ID NO: 59632

SEQ ID NO: 77092 - DNA, 5271 bp, Homo sapiens; identical to SEQ ID NO: 59633

SEQ ID NO: 77093 - DNA, 3102 bp, Homo sapiens
ccatctcagggacgtggcggtgaaggcacagtctcagctatggtcccaggaaacagacagtggggcctccacccttccttccccgtttggattaaggggctcctggctggaacacctcacaggactggccccatctggggcccccctctgggacccacctcacacgcgtggtgcgtttgtttgtggctgctcccattcctataacctccgagaccttcactcctaggaatgtcccaaggccaattcccttggcagcaatgagaagaaatgcccttttccaaatagcgacttctgcaaaacccgctgttgtttgtgggttccagcttcctggggcctggaactttccctgagtccttcccacccaccacgcccagcaccccaacccttgctgagttcaccccgggaccaccccccatctcctaccagtctgacattcccagcagcctcctgacttcagagaagtctaccgcctgcctcccaagccagatggcaccagcaggtcacctggaccccactcacaatcctgggaccccaggactacacacctccaaccttggggcccctccaggtccccagctgcaccattcaaaccctcccccagcgtcccggcagtccttgggccaagcgagcttaggacctacgggtgaactggccttcagtcctgccacaggcgtgatggggccccccagcatgtctggagccggggaggccccagaaccagctctggacctgctcccggaactgaccaaccctgatgagctactgtcctacttgggcccacccgacctccctacgaacaacaatgacgacctgctttctctgtttgagaacaactgatcctgtgtttaccccaagcccggcggggacacgctcacagatgtcaccacagccctgcccttcatgcccagccccatgggacacccggtggtctttcccaaacctcccccaaaacacacctggagccagagccttctgccgccagccctgcccctgaattggaagcagccctgtgctcgatgggaggggctcccaggccggcagcccttgccacctccctctgccaagcctgctgctgcagaacggtttttgctgaggtgcccctgcccagccctgtccagccttgtccacacacacatctcacgcccctggtctcacagcctcacaccttgtccttccacccctgcctgcccccacccagcctgcttcttgtccagcattgatccttctgtttcaacaactcctccactgggcagagctgggcatctggcagggctggctctgtcccctgggcctttggctccagtggcccctgtgcccagcagtccagctcttggaacctcgctgaatggcagcctcttgggggcctggagctctggcagcccagccgtgtgtggtgtcaggttcctctccccaccccagcttcaagcagaggcctcggggtgggggagctacaaagcacaacaatgtacatagtgtagaaacactaacagctgggagaggggagccagctgtccagccagcatgttcctgttgtacagcccggtctccctgcgcgctctgctccttcccatgtgcagacagatcagggaggaacctccaatgggtgggggacagtgagcttcggcctggccgaggtgggtgggtgggctctcagattcagctctgtgtaaagattctctagcgggctgcgctcccaagttccccttctctgtgaaagtgaagaattagtacagctgtgttttttaaagccacctctctgtctccaccccatgggcccacacccaggtgggggaggaggaagccactgcatctgttggctcagggccccagcctgtgcgagcagggcgcctgggctgttgtgtctcctgtctgtgccgatctctattaaaggactccctcttggtgggcctggccgagtccctcctttgtgctcccagggactattttctcctcgtaagccagcgacctgcctaaagcttgggctgtgcctgcaaagcttgtgcaggacctgggggccaggtcgaccttcaagtggcttttggggccccaggttgagctctggatgtttcaagccaaggctcggctattcccgccccatagtaaatttccttttccctggaattttccaagttggcttcagctgaagagctgttttgtgaagcatcccaggcttgcccaggagagacatttgccactatgtcaccttatctgggcttgccctggggcactgagacagttgtttggcagccccagcccagccaggggctcatccttctcagctcttgtccctgggaggcctctgcttgtcacttcccagagattgcagaggtgtgtcctgcctaccatctgcctgtccagcttggtgggggtccgggtcaccatttcctccagtcctgggccccatccttgagggccttcccagccagccagcaggagaggcaagaactgggggaacacaggaacctaggggaggaggggagcgctgggcatcctcaggctggcggccaaggcctgcccctggaggcactagaggagggcatctgtctgtgggagcccagaggctgcagggaggaggaggagggaggtatctggtgtgagcgttgcccctgcgacatttgggaccacacaggtgggcttccttattccctgacaaagcctctgtttccagctcttccgccctctctggatgagggaacagaagtggaggaaacaaaagaagcagcagcacgcacagtcctgtcgctgggtgcggagacagcctggcaaagtcccactcagccatggcctgatgcaggccccaggccctcctttcttgggtgtcaaatgactgtgtcctggacatctgatgcaccacctgccctgcctgttgcaaacgtgatgctcccggatggagtggagaaactaggagactgggacaagcaaaaggctgcaaacaacccagaagcccatcctcagaagactggagaaatgattgaggaatgcatgggcaccgtggccctgtgctccatcacaaacacctctcagaaacaacgtgggatgaaaaagcaagacagttcatacagtatgatgccatttttataaagctcaaaaccaaaaaaaaaa

SEQ ID NO: 77094 - DNA, 1746 bp, Homo sapiens; identical to SEQ ID NO: 59635

SEQ ID NO: 77095 - DNA, 1849 bp, Homo sapiens; identical to SEQ ID NO: 59636

SEQ ID NO: 77096 - DNA, 2095 bp, Homo sapiens; identical to SEQ ID NO: 59637

SEQ ID NO: 77097 - DNA, 2095 bp, Homo sapiens; identical to SEQ ID NO: 59638

SEQ ID NO: 77098 - DNA, 5534 bp, Homo sapiens; identical to SEQ ID NO: 59639

SEQ ID NO: 77099 - DNA, 2632 bp, Homo sapiens; identical to SEQ ID NO: 59640

SEQ ID NO: 77100 - DNA, 1663 bp, Homo sapiens; identical to SEQ ID NO: 59641

SEQ ID NO: 77101 - DNA, 1502 bp, Homo sapiens; identical to SEQ ID NO: 59642

SEQ ID NO: 77102 - DNA, 1052 bp, Homo sapiens; identical to SEQ ID NO: 59643

SEQ ID NO: 77103 - DNA, 4558 bp, Homo sapiens; identical to SEQ ID NO: 59644
  misc_feature (1)...(4558): n = a,t,c or g

SEQ ID NO: 77104 - DNA, 1376 bp, Homo sapiens; identical to SEQ ID NO: 59645

SEQ ID NO: 77105 - DNA, 2586 bp, Homo sapiens; identical to SEQ ID NO: 59646

SEQ ID NO: 77106 - DNA, 4239 bp, Homo sapiens; identical to SEQ ID NO: 59647

SEQ ID NO: 77107 - DNA, 2285 bp, Homo sapiens; identical to SEQ ID NO: 59648

SEQ ID NO: 77108 - DNA, 924 bp, Homo sapiens; identical to SEQ ID NO: 59649

SEQ ID NO: 77109 - DNA, 808 bp, Homo sapiens; identical to SEQ ID NO: 59650
  misc_feature (1)...(808): n = a,t,c or g

SEQ ID NO: 77110 - DNA, 1968 bp, Homo sapiens; identical to SEQ ID NO: 59651

SEQ ID NO: 77111 - DNA, 2480 bp, Homo sapiens
tgggaaaaaaaggagtgagagaggataaaagaatggaagacagagtaatagggacattacatgaagaccatggataaattatatttttttctctttccgcctctactaacctagcaaatctctagaagatgacggtgttctttaaaacgcttcgaaatcactggaagaaaactacagctgggctctgcctgctgacctggggaggccattggctctatggaaaacactgtgataacctcctaaggagagcagcctgtcaagaagctcaggtgtttggcaatcaactcattcctcccaatgcacaagtgaagaaggccactgtttttctcaatcctgcagcttgcaaaggaaaagccaggactctatttgaaaaaaatgctgccccgattttacatttatctggcatggatgtgactattgttaagacagattatgagggacaagccaagaaactcctggaactgatggaaaacacggatgtgatcattgttgcaggaggagatgggacactgcaggaggttgttactggtgttcttcgacgaacagatgaggctaccttcagtaagattcccattggatttatcccactgggagagaccagtagtttgagtcataccctctttgccgaaagtggaaacaaagtccaacatattactgatgccacacttgccattgtgaaaggagagacagttccacttgatgtcttgcagatcaagggtgaaaaggaacagcctgtatttgcaatgaccggccttcgatggggatctttcagagatgctggcgtcaaagttagcaagtactggtatcttgagcctctaaaaatcaaagcagcccactttttcagcactcttaaggagtggcctcagactcatcaagcctctatctcatacacgggacctacagagagacctcccaatgaaccagaggagacccctgtacaaaggccttctttgtacaggagaatattacgaaggcttgcgtcctactgggcacaaccacaggatgccctttcccaagaggtgagcccggaggtctggaaagatgtgcagctgtccaccattgaactgtccatcacaacacggaataatcagcttgacccgacaagcaaagaagattttctgaatatctgcattgaacctgacaccatcagcaaaggagactttataactataggaagtcgaaaggtgagaaaccccaagctgcacgtggagggcacggagtgtctccaagccagccagtgcactttgcttatcccggagggagcagggggctcttttagcattgacagtgaggagtatgaagcgatgcctgtggaggtgaaactgctccccaggaagctgcagttcttctgtgatcctaggaagagagaacagatgctcacaagccccacccagtgagcagcagaagacaagcactctgagaccacactttaggccaccggtgggaccaaaagggaacaggtgcctcagccatcccaacagtgtcgtcagagggtccccagggcattttcatggcaagtacccctctgcccccactccagcagtgcttcccaaagtgtgctctgtcacctgctttgcaatcggcttccattagcgcatgttttattttggtgtgacggttggccctcctaaacacggactttcctcaggctggttcaagacggaaaaggactttcttctgttttcttccaaagtgcaaccacagtggagagcccacggtgggcttagcctgcctaggcccttccatttctcttctttgaccgtgctaggaattccaggaaagtgcattcctgccctggtgaccttttcctatgtctaggctcctccacaggtgctgctattttgtgagctccggctcctgtttagcttttatttcagttctaacctcagtccagaaacatatgtgaggttgtttccctcttcagccacggctacaataccggaaaatgctagtttttatttatttttttaagtagtgcttcctaaatggtttgcatgagagccacctggggtacatgttgaaaacttatttggggtctaccccaaacctaataacccaaatttggggatggggcccaggaatatgcatttttaaaaagtcatctgcccttcccaggtgattctgtaagttgtccctcaactgtacttggagaaatcgtgttttaaagcagtagtccacaaagtattctgctcatgtgcccccaaaagtattttgaaaaatcatgtataccctcacccatctaagttgatatctaaaattttatctaagttggtatctaaaatttttcatgggaagttaaatagttgacaaagtatgtatttgctggtgtcgtgtaaatattggtattttaaaataaaacctgttacatcactattttaaacatatccagtacaatttaaatatcacaacaatttgacacccttcattcatttataaaaataaatgagctagttctttagtagttaaacatttcaaattgg

SEQ ID NO: 77112 - DNA, 1925 bp, Homo sapiens
tttttagcttgaaacaataaatttattcccatagttctggaggccaggaagtccaatatcagttttatcggtatctgtagggccatgctcctgctggaagaggctctggggaagaatctgttctttgcctcctccagcttctggtggctgtcagcattcctttgctgcggctccatcactccaatctctgcctctgtggtcactgtgctttctcctcttctgtgtggtaatatctccctttgcttctgaagttcagagtgttctttcaggagttgatcatattctttcgaaagtctctctgactgcatcttcatttccatcacatcattttgtgccttagaaagggcatctgaagtcttccttaattcagttttcagtttctcctggtcttctactagttttttattttctgcttccaaaacacattcttcatctttaccatggcttttcaaaatccattttagtttttcgttttcttccataaattttttggcagccttgttagtattttctgcttgagttttaagtacacctttgtttgacagttcttttgccagttgagtaataagcgtaaccagacgtctcaaaactagccaaaaaaatagggaaaatccagaaatgtaaagatttctttgagacctaaaaagtttcatctgtgtgtgttcataggcatcaggtctgctggtggagctcttctcaatggtatgaactgaggaatatttccttacttctctcacagcatctagaaatagaacaatcaataggatgataatggtaaggaaagccttgttccaaaaagttgcaattttaccccagacattaaatgaaaaaatcttctgccatctctgaggaggaataaaaggtaggcagaagaaaaaaatgacactccaatgggctgcagtggcaacctttctttatgccgaaataggactcattttaatcttctgcctaccttttattcctcctcagagatggcagaagattttttcatttaatgtctggggtaaaattgcaactttttggaacaaggctttccttaccattatcatcctattgattgttctatttctagatgctgtgagagaagtaaggaaatattcctcagttcataccattgagaagagctccaccagcagacctgatgcctatgaacacacacagatgaaactttttaggtctcaaagaaatctttacatttctggattttccctatttttttggctagttttgagacgtctggttacgcttattactcaactggcaaaagaactgtcaaacaaaggtgtacttaaaactcaagcagaaaatactaacaaggctgccaaaaaatttatggaagaaaacgaaaaactaaaaaggattttgaaaagccatggtaaagatgaagaatgtgttttggaagcagaaaataaaaaactagtagaagaccaggagaaactgaaaactgaattaaggaagacttcagatgccctttctaaggcacaaaatgatgtgatggaaatgaagatgcagtcagagagactttcgaaagaatatgatcaactcctgaaagaacactctgaacttcaggatcgtttagaaagaggcaacaagaaaagactgtgaactttataaaagacacttgcaatatactgtgtcaaaatgataattttgttatgttagcctctagaaaatttaagttcagaaaaatgcactatgaccggttcgtaatttttttaatgccacacataggttgtattgtaatggcattatcaaaatatttgatgatgtttcagatatattgcaaagtctgtattccagctcttaagaaaaatataagcatgttaaataccatatttacatattgataatgtcattggtatatggtggctgtttaccaataaaaggaaaaaattcattaaccggttgcttccaaaattagatgt

SEQ ID NO: 77113 - DNA, 1135 bp, Homo sapiens; identical to SEQ ID NO: 59654

SEQ ID NO: 77114 - DNA, 5421 bp, Homo sapiens; identical to SEQ ID NO: 59655

SEQ ID NO: 77115 - DNA, 1205 bp, Homo sapiens; identical to SEQ ID NO: 59656

SEQ ID NO: 77116 - DNA, 2116 bp, Homo sapiens; identical to SEQ ID NO: 59657
  misc_feature (1)...(2116): n = a,t,c or g

SEQ ID NO: 77117 - DNA, 2253 bp, Homo sapiens
  misc_feature (1)...(2253): n = a,t,c or g
atagaaagcgttcgaatgcgctaccggttcggaattcccgctgacgatttcgtggcgcggtgagccaggcctcggggcctcggagcaaccacccgagcagacggagtacacggagcagcggccccggccccgccaacgctgccgccgggatgctccagaccttgtatgattacttctggtgggaacgtctgtggctgcctgtgaacttgacctgggccgatctagaagaccgagatggacgtgtctacgccaaagcctcagatctctatatcacgctgcccctggccttgctcttcctcatcgttcgatacttctttgagctgtacgtggctacaccactggctgccctcttgaacataaaggagaaaactcggctgcgggcacctcccaacgccaccttggaacatttctacctgaccagtggcaagcagcccaagcaggtggaagtagagcttttgtcccggcagagcgggctctctggccgccaggtagcgcgttggttccgtcgccgccgcaaccaggaccggcccagtctcctcaagaagttccgagaagccagctggagattcacattttacctgattgccttcattgccggcatggccgtcattgtggataaaccctggttctatgacatgaagaaagtttgggagggatatcccatacagagcactatcccttcccagtattggtactacatgattgaactttccttctactggtccctgctcttcagcattgcctctgatgtcaagcgaaaggatttcaaggaacagatcatccaccatgtggccaccatcattctcatcagcttttcctggtttgccaattacatccgagctgggactctaatcatggctctgcatgactcttccgattacctgctggagtcagccaagatgtttaactacgcgggatggaagaacacctgcaacaacatcttcatcgtcttcgccattgtttttatcatcacccgactggtcatcctgcccttctggatcctgcattgcaccctggtgtacccactggagctctatcctgccttctttggctattacttcttcaattccatgatgggagttctacagctgctgcatatcttctgggcctacctcattttgcgcatggcccacaagttcataactggaaagctggtagaagatgaacgcagtgaccgggaagaaacagagagctcagagggggaggaggctgcagctgggggaggagcaaagagccggcccctagccaatggccaccccatcctcaataacaaccatcgtaagaatgactgaaccattattccagctgcctcccagattaatgcataaagccaaggaactaccccgctccctgcgctatagggtcactttaagctctggggaaaaaggagaaagtgagaggagagttctctgcatcctccctccttgcttgtcacccagttgcctttaaaccaaattctaaccagcctatccccaggtagggggacgttggttatattctgttagagggggacggtcgtattttcctccctacccgccaagtcatcctttctactgcttttgaggccctccctcagctctctgtgggtaggggttacaattcacattccttattctgagaatttggccccagctgtttgcctttgactccctgacctccagagccagggttgtgccttattgtcccatctgtgggcctcattctgccaaagctggaccaaggctaacctttctaagctccctaacttgggccagaaaccaaagctgagcttttaactttctccctctatgacacaaatgaattgagggtaggaggagggtgcacataacccttaccctacctctgccaaaaagtgggggctgtactggggactgctcggatgatctttcttagtgctacttctttcagctgtccctgtagcgacaggtctaagatctgactgcctcctttctctggcctcttcccccttccctcttctcttcagctaggctagctggtttggagtagaatggcaactaattctaatttttatttattaaatatttggggttttggttttaaagccagaattacggctagcacctagcatttcagcagagggaccattttagaccaaaatgtactgttaatgggtttttttttaaaattaaaagattaaataaaaaatattaaataaaacatggcaataagtgtcagactattaggaattgagaagggggntcaactaaataaacgaagagagtctttcttaaa

SEQ ID NO: 77118 - DNA, 1617 bp, Homo sapiens; identical to SEQ ID NO: 59659

SEQ ID NO: 77119 - DNA, 1323 bp, Homo sapiens
gcagcctccgccccctcaaccttcgcggggcgcgggccgcagcttttcggttcacagcgggcagggaaagccgcgggaagggtactccaggcgagaggcggacgcgagtcgtcgtggcaggaaaagtgactagctccccttcgttgtcagccagggacgagaacacagccacgctcccacccggctgccaacgatccctcggcggcgatgtcggccgccggtgcccgaggcctgcgggccacctaccaccggctcctcgataaagtggagctgatgctgcccgagaaattgaggccgttgtacaaccatccagcaggtcccagaacagttttcttctgggctccaattatgaaatgggggttggtgtgtgctggattggctgatatggccagacctgcagaaaaacttagcacagctcaatctgctgttttgatggctacagggtttatttggtcaagatactcacttgtaattattccaaaaaattggagtctgtttgctgttaatttctttgtgggggcagcaggagcctctcagctttttcgtatttggagatataaccaagaactaaaagctaaagcacacaaataaaagagttcctgatcacctgaacaatctagatgtggacaaaaccattgggacctagtttattatttggttattgataaagcaaagctaactgtgtgtttagaaggcactgtaactggtagctagttcttgattcaatagaaaaatacagcaaacttttaataacagtctctctacatgacttaaggaacttatctatggatattagtaacatttttctaccatttgtccgtaataaaccatacttgctcgtatataccccctgcctccttctgttccagtcagccaacatatgtacataaaagaacacacaaattcaagaagttggaagattaaattatctgcttatttagtgtaggatggtcaggtagctagctataagtgaaaggaaattttgctgaagagactgagaaatgggtagtggaatgactatcaagatgacctcaaactatttaaaaacattttaacttgccatgaagaatcttgatgatttttgtataaatgttgtataaaattcttttacagctacagatttttaaataggatcattgtaaagattaatgagataatgttttaacatagtgcctggtccatgataagtgttaaatttttcaattaccctcagtaactgataatgtagcagaaaatactctatattcagacagacctgaatttgaatcccagctctatgacttatctgttgtgactttttctttttttttttgacacggggcc

SEQ ID NO: 77120 - DNA, 1490 bp, Homo sapiens; identical to SEQ ID NO: 59661

SEQ ID NO: 77121 - DNA, 2130 bp, Homo sapiens; identical to SEQ ID NO: 59663

SEQ ID NO: 77122 - DNA, 2761 bp, Homo sapiens; identical to SEQ ID NO: 61062

SEQ ID NO: 77123 - DNA, 1926 bp, Homo sapiens; identical to SEQ ID NO: 59664
  misc_feature (1)...(1926): n = a,t,c or g

SEQ ID NO: 77124 - DNA, 1749 bp, Homo sapiens
cgcgtttttttttttttcccccccccaaaaaaaggggtttttttcccccccatttttttttttttccccccgtttttttcccccccccctttttttaaaaccccccccccaaaaattttttttggcccccaaaaaaaaaaaaattttttccccccccccgcccaaaaaattttttttttttaaaaggccccccccccttttttttttttttttttttttttttttttttttttttttttttatcagctagaagagatttttttattgaagggcgagtctccggcatctgatggcagctacaactggatctcacggaacgcccgcttctccaccagcttcaccttgtacttgcgtttgaacttggctctctctcgaggctcgatcatattcctcctctggaagctcttgaaccggtctcgaaggatgttgccctcgggcttcagggtcctgagcgagtctgtcagctccgagctcagctgcacgtcgatgtcaggtgcctggtacttgagccgccccagccttcggggcttgtcagcctcagcctcccgccgcgcctgccgccgcctctgccgccgcgccagctccgccagcctcagggccacctgggccttgatcccgcgcagccggaacagctcctggtgccggagccgggcggcccgcaacgcggcctgctgtacccgcagcctgtgcacagccttctcccgccgccgctgctgctccgtcttcttctctgtggtggccaggcgggcgggcgtgggacagacctcggcatccccagcctccggcccctcgccctggcctggctccccctcaccatccgactcctccagcagcccctcgcacagctcctggaatgtggactcctgggtggcggcctgctccgtggcgggcagggccagctgccgctccagcttctccgcctccttctgccgctgcaactccacctcgtgggccgctgagagcagggtctggtggtcttcaaaggatggattgtaggaagctccggcaggcgccacctccacggcgggcgcctgggacggcttggtgtgcaggcgtgctggccgcttcactcctttcttcttggtctgctccaggaaaaactcatcctggccaaccaacggcctgtccagggggttgtctgaggcccagaggtcgtagaagggccgctctacggtgtcctggggcccgggcttggcccttgttgcagaagggttgaggagccgggcctgggccctgcgcacctcccggggcagctcgccctgcttggccagcttctcccatagctgctccttccgcctgagcttcttggcgttggggacctggtgggcgaggacgtctttgggggcagggactttggatgtgttctcgaggatgaggtcaacccgaaggggtttcttgagaagcagtgacttcttctggactttggttctcttctttgtcagccctttttccttggagccagtgtccacgaagaagagtttttcatttggggcctctgacaacaagccaccgctcgtgcgctcctgtagccgcacgtcttccaggaactggtcaacctccagccccagcggctcctgagcaagccgccgccagccccgcttcttatttcttgggcctcgccgccgccgcctcagcgctgggtccaccgaagtgggccgcagccccaggaaaccagaatcggcatcgcttttcgagctgcgcttcccaccaacgccactgcctcctgccgccatcttgtcaaaaaaaaaa

SEQ ID NO: 77125 - DNA, 1638 bp, Homo sapiens; identical to SEQ ID NO: 59666

SEQ ID NO: 77126 - DNA, 2254 bp, Homo sapiens; identical to SEQ ID NO: 59667

SEQ ID NO: 77127 - DNA, 981 bp, Homo sapiens; identical to SEQ ID NO: 59668

SEQ ID NO: 77128 - DNA, 1834 bp, Homo sapiens; identical to SEQ ID NO: 59669

SEQ ID NO: 77129 - DNA, 1135 bp, Homo sapiens
accttagagttcctggccagagttgactctaggtagtgatgtgattttcttgggatgtttttctaaatattcttttatgctaaagcacatggcttgatacttctgttgattaagctcgtgtctacttacagtcatctagtgagaacctgtggtgtggtgagatgataacttggtctttggtcttcatcatttgaactagttttggttttgtcttgtcccttccttgagcattttgtgtgtgtttaatcctatttggtaaacgaaccactgtgaaagaccaagttggagaaaacagaacacccccaaaacatttatttttttttttagaaaatcatggctcactatggtagtatacaatattgttttcacacatgtacacttgaaaccaaatttctaaaacttgtttttcttaaaaaatagttgttgtaacattaaaccataacctaatcagtgtgttcactatgcttccacactagccagtcttctcacacttcttttggtttcaagtctcaaggcctgacagacagaagggcttggagattttttttctttacaattcagtcttcagcaacttgagagctttcttcatgttgtcaagcaacagagctgtatctgcaggttcgtaagcatagagacgatttgaatatcttccagtgatatcggctctaactgtcagagatgggtcaacaaacataatcctggggacatactggccatcaggagaaaggtgtttgtcagttgtttcataaaccagattgaggaggacaaactgctctgccaatttctggatttctttattttcagcaaacactttctttaaagcttgactgtgtgggcactcatccaagtgatgaataatcatcaagggtttgttgcttgtcttggatttatatagagcttcttcatatgtctgagtccagatgagttggtcaccccaacctctggagagggtctggggcagtttgggtcgagagtcctttgtgtcctttttggctccaggtttgactgtggtatctctggccagagtgtaggagagggccacaaggagcaagaatgctgacactggaattttctccatggcaactctggatttcctcacccacctgccttgtgtgagtcggcggctaggatgcgg

SEQ ID NO: 77130 - DNA, 1084 bp, Homo sapiens
  misc_feature (1)...(1084): n = a,t,c or g
ttttttttttttatgctcaaaagttaaattttatttaccctgttcactggcccaaacttaaaatccttatatcacataaagatttcatggaccgttccctctccctgccaaaaatacgtattaggaacaaattaagagtaagagttgggttttaaactgcactttatttgttactgtaacattcttttttaactgatcaaccataagcatgcaaaaagttctctgaaactgcttccactgcctgttgtatagaaatgggtaaattataaaggtgattcaatttggagctctttccttttttatagcacttctaagctgtgtgcgcgacacacaccacagaggtaggaaggaccacctttaataaattatcttcttaatcgcagagaatttctgaagataaaactgacaaaatgctaaaccaaggctttgatgagtcccaaaggaccacagatccatcggctcctatttgaagaattcatcccctgtagtgttctagcctttgtagggcactggattacaagatccaccagggctctgaacaactgcgctaagaagccttctaaccactctcatttgccgattctttggaccacccagtcctgctggcagagagggcagcgattgttctgtttcacccacagggacatgcagcagttgtggaaggaatgattacattctccccagaccacaacacagtcctcttgtttgttttcagcttgacatctaagacaggcatccatcacctggaccctgcagatggcgcacgtatcgcactccacgtcccagctccacatggccaccgcgttccacttcttgagggagaacatcttgtcgcctcccgacttggagcctgagctcccggagtgagaggccagggcgcaggtttcctctccgtcttccacgtcggccatggcggcgccgcggagccgacggcggagacgttggcttggggaaggcggaaggctagggcggctctgtggagccgcccgacgggccacagcgccgcccgcaggccgccagccaccgtggtgcttagaccccggctggaattccnccgcnctggcgagatgtctcaaggctcaaa

SEQ ID NO: 77131 - DNA, 2234 bp, Homo sapiens; identical to SEQ ID NO: 59672

SEQ ID NO: 77132 - DNA, 895 bp, Homo sapiens; identical to SEQ ID NO: 59673

SEQ ID NO: 77133 - DNA, 2840 bp, Homo sapiens
ctcacccacctgtgccgccctgccttgttacctggaagcacagccttggggactgagcaggccctcactgtcactttaagaagggaatcagccactttgtgctcaccacctctggggaaggtgtgagaggagagaaggaagtggctgtttggctgctgacaacatgaagacttcctgcgatgagaacagaggcacaggtgccggccctgcagcccccagaacccggactggagggggccatggggcgccggaccctggccctgccctgggtgctgctgaccctgcgtgtcactgcagggaccccggaggtgtgagtacaagttcggatggaggccaccgagctctcgtccttcaccatccgttgtgggttcctggagtctggctccatctccctggtgactgtgagcagggggggccccgatggtgctggggggaccacgctggctgtgttgcacccggaacttggcatccagcaatgggcccctgctcgccaggcccgctgggaaacccagagcagcatctctctcatcctggaaggctctggggccagcagcccctgcaccaacaccaccttctgctgcaagtttgcgtccttccctgagggctcctgggaggcctctgggagcctcccgcccagctcaaacccagggctctctgtcccgccgactcctgcccccattctgcgggcagacctggccgggatcttgggggtctcaggagtccttctctttgactgtggctacctccttcatctgctgtgccgacagaagcaccgccctgcccctaggctccagccatcccacaccagctcctaggcactgagagcacgagcatgggcacccagccaggcctcccaggctgctctccacgtcccttatgccactatcaacaccagctgctgcccagctactttggacacagctcacccccgacagggggccgtcctggtgggcatcactccccacccacaccgcacactggccccagggccctgctgcctgggcctccacatccatccctgcacatggcagctttgtctctgttgagaatggactctacgcttaggctgggcagaggcctccctgcactggtcctggcctcactcttttccctgacccttggggcccagggccatggagggacccttaggagttcaatgagagagaccatgaggccactgggctttccccttcccaggcctcctgggtgccacccccttacgttattcttgggcctctaataagtgtcccacaggtgcctggccaggcccacctgctgcagatgtggtctgtgtgtgtgcatgtgtgggtgtgtgtgggcacaggtgtgagtgtgtgagcaacagtaccccattccagtcgtttcctgctgtgactaagtcagcaacacagttcctctgacatgggccttggctgtgcttctttgggggtgaagagattggggaggaagtctccacccctgggaggcagaagccaggcatagcgcgctggctaggactccagtaccgtgaagggaggcagtgagagcagacatctgtgcctcattcctgatctcaaggggaaagcaagaacaagggaggcttcctcaggatctcgaacctgcggaaggaggaccagtctgtgtacttctgccaagtccagctggacatacagatcagggaggctgtcgtggcagtccatcaaggggacccacctcaccatcacccaggccctcaggcagcccctccacagggcccctctcctgcctggacagctctgctggtctccccgtcccctggagaagaacaaggccatgggtcggcccctgctgctgcccctgctgctcctgctgcagccgccagcatttctgcagcctggtggctccacaggatctggtccaagctacctttatggggtcactcaaccaaaacacctctcagcctccatgggtggctctgtggaaatccccttctccttctattacccctgggagttagccatagttcccaacgtgagaatatcctggagacggggccacttccacgggcagtccttctacagcacaaggccgccttccattcacaaggattatgtgaaccggctctttctgaactggacagagggtcaggagagcggcttcctcaggatctcaaacctgcggaaggaggaccagtctgtgtatttctgccgagtcgagctggacacccggagatcagggaggcagcagttgcagtccatcaaggggaccaaactcaccatcacccaggctgtcacaaccaccaccacctggaggcccagcagcacaaccaccatagccggcctcagggtcacagaaagcaaagggcactcagaatcatggcacctaagtctggacactgccatcagggttgcattggctgtcgctgtgctcaaaactgtcattttgggactgctgtgcctcctcctcctgtggtggaggagaaggaaaggtagcagggcgccaagcagtgacttctgaccaacagagtgtggggagaagggatgtgtattagccccggaggacgtgatgtgagacccgcttgtgagtcctccacactcgttccccattggcaagatacatggagagcaccctgaggacctttaaaaggcaaagccgcaaggcagaaggaggctgggtccctgaatcaccgactggaggagagttacctacaagagccttcatccaggagcatccacactgcaatgatataggaatgaggtctgaactccactgaattaaaccactggcatttgggggctgtttattatagcagtgcaaagagttcctttatcctccccaaggatggaaaaatacaatttattttgcttaccataaaaaaaaaa

SEQ ID NO: 77134 - DNA, 1568 bp, Homo sapiens; identical to SEQ ID NO: 59675

SEQ ID NO: 77135 - DNA, 926 bp, Homo sapiens
aattcgtagggagacccttaggcactccggactaagatggcggcgacggccaggcggggctggggagctgcggctgttgccgccgggctgcgcaggcggttctgtcataagttgaagaatccatacaccattaagaaacagcctctgcatcagtttgtacaaagaccacttttcccactacctgcagccttttatcacccagtgagatacatgtttattcaaacacaagataccccaaatccaaacagcttaaagtttataccaggaaaaccagttcttgagacaaggaccatggattttcccaccccagctgcagcatttcgctcccctctggctaggcagttatttaggattgaaggagtaaaaagtgtcttctttggaccagatttcatcactgtcacaaaggaaaatgaagaattagactggaatttactgaaaccagatatttatgcaacaatcatggacttctttgcatctggcttacccctggttactgaggaaacaccttcaggagaagcaggatctgaagaagatgatgaagttgtggcaatgattaaggaattgttagatactagaatacggccaactgtgcaggaagatggaggggatgtaatctacaaaggctttgaagatggcattgtacagctgaaactccagggttcttgtaccagctgccctagttcaatcattactctgaaaaatggaattcagaacatgctgcagttttatattccggaggtagaaggcgtagaacaggttatggatgatgaatcagatgaaaaagaagcaaactcaccttaaaataatctggattttctttgggcataacagtcagacttgttgataatatatatcaagtttttattattaatatgctgaggaacttgaagattaataaaatatgctcttcagagaatgatatataa

SEQ ID NO: 77136 - DNA, 912 bp, Homo sapiens; identical to SEQ ID NO: 59677

SEQ ID NO: 77137 - DNA, 1623 bp, Homo sapiens
aatacatggaggcagggactttgggtcaaattactgggggaaatggaaaagttaatatgtatgtagtagggaacaggggttatactaggttaggcagagaagccttggagttttctcagaatctgcactgagggttaagggaggtatctatgaaagggtgtgcaacttccccaaaccgcagcaactccagccagtttcccggtactgccttgccctggttttgcaggtgtggctggacccagtttaaatatctggccacaagctcagccagactctggttccctcggctgttcactcccactgggcttctggtcccagccccatctcagtcactgtggttggtcagaagacagtaaatcccaaacttgattagttgcaaagtccatctggcttggttttctgttgctgatagagagaccaggggagtttctgtgtgagagaacgggggactattctcacttcttccaccgcacaagctgctcaaggtgggctgcatggctggtctggctggaaatactgaaacagctctccttcacctacccctagagtaggccggatgtgaccccaggaatgagaatataccagggcagatacagacacagaaatgttttgcctgatggcattaggtttattttgtgggaaagcagaattggggctctctgaaaggcacttgtgaggcatagaagtaaaggttgccacatggctaatggtggacgtcttcctggcatccttgggggtaggggaaagacagacagctcccagggccacagaaaatacctctatcagatagagaaatccgagtcccagtgccttatggtggagccaagggttaagcagatggcctgctttttttatacgaagagtttgcttcctccgggcaatcttaaagtctggcattcacggctggaggtatagggcccatccacttctctcccagcaggtgcgccagcagctccatccggtcagagccaaataacatgtgggtttggccatccacatgggccacggtgatgggcagcccaaaggctccgtatctgcaggctgcctcagtggtctccttgagctggttcttcacctttggcgttgcgatcttttccagaagtccctgggcttgttctgcagacataccagccttctctgcagccgccaggatgctctgcggctcggtgatgtcttcattccttgaccagacgcgcatccacagctcccgggacgctttctccagcatctctggatgctccaagttcacggcggtgaggaaacgcatggcagacaaacttcctttttcaagcatcacagacaagaaatccttggggaagtggatgggaatctggagatggtgtctcaggagctttaagtcatttgccatgtatagtcctttgcggggaagcagacctggaggcttgtttccactgtctttcatgatccctgttatgaggctgggccgcaactgcaggttgatgttccagatattctgataccggcacaggatctcgaagcccagccaggagtagggggacagcacgtcatagaagagctccacggtgcgcggcaggggccccatgctgcaggctccggaagagcagtggcagcaggagctccttttcccggaacccggcagag

SEQ ID NO: 77138 - DNA, 1619 bp, Homo sapiens; identical to SEQ ID NO: 59679

SEQ ID NO: 77139 - DNA, 2191 bp, Homo sapiens
agctgcagcggcagaggcagcatccagcggcggcgccagcagttccagtccgttgctttactttttgcttcaccgacatagtcattatgccgaagagaaagtctccagagaatacagagggcaaagatggatccaaagtaactaaacaggagcccacaagacggtctgccagattgtcagcgaaacctgctccaccaaaacctgaacccaaaccaagaaaaacatctgctaagaaagaacctggagcaaagattagcagaggtgctaaagggaagaaggaggaaaagcaggaagctggaaaggaaggtactgcaccatctgaaaatggtgaaactaaagctgaagagatccacatctctcgctcaactgttaatgtctcaacctccagaggcaccccacccagcacactgtcagtaaaggggcagattgaaacagtgagagttaagggcacagaaaactgaatctgtagataacgagggagaatgaattgtcatgaaaaattggggttgattttatgtatctcttgggacaacttttaaaagctatttttaccaagtattttgtaaatgctaattttttaggactctactagttggcatacgaaaatatataaggatggacattttatcgtctcatagtcatgctttttggaaatttacatcatcctcaagtaaaataaatatcagttaaatattggaagctgtgtgtaagattgattcagcattccatgcacttgctttaaaatttagtcctgtgcatactgtggtgtttttactgtgcatatttgaatttttttgcagacaagtaaaccttttattttaaaccacaaatagtcagcaggtggccacaactatccatgtttcattaaaatcacataaaacctaggtacaaaagcaccactgattattgctctagaaaaactgcatgaaaaattcaaatatgcacagtaaaaacaccacagtatgcacaggactaaattttaaagcaagtgcatggaatgctgaatcaatcttacacacagcttccaatatttaactgatatttattttacttgaggatgatgtaaatttccaaaaagcatgactatgagacgataaaatgtccatccttatatattttcgtatgccaactagtagagtcctaaaaaattagcatttacaaaatacttggtaaaaatagcttttaaaagttgtcccaagagatacataaaatcaaccccaatttttcatgacaattcattctccctcgttatctacagattcagttttctgtgcctgtgaaaaagaaaggaaaaaaaaacatatagttactactgaaactactataagcaaaggaaattgccacccaccaacacacacagttttggaacatttgttttctttttttttttccagctttactgcaaaacctatttcaactttgagtgaagaagacaaggcaggaatatattacacaaacactttgtttcatttaatgctttctgcttttcaaacccccacagaagccttacctgcaagctcccactttttataatgattaaaaaaaaaaaaccaccacactactatctgattctagtcactgcaaacatgcagaattttctactgtacccttaactctcactgtttcaatctgcccctttactgacagtgtgctgggtggggtgcctctggaggttgagacattaacagttgagcgagagatgtggatctgcaataacattacaggcaataaaaagagacattaagaacgtgctatcaccggctgaaggattgagaaatttctttaaagacactgattcaatcagtgggaggtatttatggaaagtacctcttcagctttagtttcaccattttcagatggtgcagtaccttcctttccagcttcctgcttttcctccttcttccctttagcacctctgctaatctttgctccaggttctttcttagcagatgtttttcttggtttgggttcaggttttggtggagcaggtttcgctgacaatctggcagaccgtcttgtgggctcctgtttagttactttggatccatctttgccctctgtattctctggagactttctcttcggcataatgactatgtcggtgaagcaaaaagtaaagcaacggactggaactgctggcgccgccgctggatgctgcctctgccgctgcagctgctcacgcgcagggcac

SEQ ID NO: 77140 - DNA, 1648 bp, Homo sapiens; identical to SEQ ID NO: 59681

SEQ ID NO: 77141 - DNA, 1292 bp, Homo sapiens; identical to SEQ ID NO: 59682

SEQ ID NO: 77142 - DNA, 1782 bp, Homo sapiens; identical to SEQ ID NO: 59683

SEQ ID NO: 77143 - DNA, 2240 bp, Homo sapiens; identical to SEQ ID NO: 59684

SEQ ID NO: 77144 - DNA, 496 bp, Homo sapiens
ttttttttttttaaggtagtaagttttttaatccacttaaaaatacaagagcacaaatccacatttatttattgatttttcgttagtttaaatccttgaggggtacagcatcactcggattctgtgtccaatggccttagcaggaagattgcttcggaatttggcacgaaccatgccactgtttccatgggcccgagttacttttccccagatgactctggttttgtttggtttgccgccaggagtgactgtgttgttctttgctttatatacataagcgcatctcttgcccaaatagaattctgtttcatctcgggcgtaaacaccttcaattttaagaagagctgtgtgctccctttggttccggagaccccgcttatagccagcaaaaatggccttggaccacagccttccagacatagttccttttagaagtcccgctcccagcaggcccccacaggagccaagatggcggtaagagaaagcgggggggggg

SEQ ID NO: 77145 - DNA, 1956 bp, Homo sapiens; identical to SEQ ID NO: 59686
  misc_feature (1)...(1956): n = a,t,c or g

SEQ ID NO: 77146 - DNA, 2243 bp, Homo sapiens; identical to SEQ ID NO: 59687

SEQ ID NO: 77147 - DNA, 1124 bp, Homo sapiens; identical to SEQ ID NO: 59689

SEQ ID NO: 77148 - DNA, 1659 bp, Homo sapiens; identical to SEQ ID NO: 59690

SEQ ID NO: 77149 - DNA, 2530 bp, Homo sapiens
ttttttttttttaacaataataaatctttattgagattttttaacaaaataatttttgaaaacaaaagctcccacatgtaaacaagaacgtaaataagttagatggcattattatgtacattcaagaatcaaaacatgttctggtaaacattccataatccggtaaaatgttttcacccatcactgttaagagaaactgtgtattttatactatcaataacaaaacctaatctttgaacattataaaatggtttacggaatataaactatacagtttacgtttttcattcctcctagcagatccgtggtcacatgtatactgagtcctaagatgtattttgtcagtattagcccaaaatgtccaccatcccaaattaaccaggttacacatatctcctccagtttttatggtaggatgtgttagaacccatatattacaacatcatttttcaaaactaacctaatcctaaattctattctaactagtctggcaatccttcattttatctccctgtctacacattcattagataccaaggcaatttcaccttaaaaaatactgctaatacacatttagatagtaatttctggtaaaactgtagtttatttatcaaaaaatgtgaatttttattttagaaatgtaggtcaagcattgtcatagttgtagtacttaattgagaataatggcttcaatttggaagattcaatatacacattaaacaaaattaaacagtttaaattataattcatataattataattctcatttttagatggccaaaatatattgttttcttactataaagtgttatttattcatcgtctatttttactaattatattcaattcacagtagtgacatcaaagggacaagtcatcataggtctgagaccaggaaaacctggtctgttttaacagaggcgtgtctaaaataagagtacatatttcaattaggcccacagagatagaaaagagccaggataatctttgtattgaggccttgatttcagttttaaatgtaattcttttctgccagctgaaataatttaaagatgtgcacaataggtctgtgctatttaaggcaggtgtcaagcacattttgaaatttaccaactagaatgttctcctaatggaaaaagaaaaaagaaaagttatgacagtttttgtttaagacagatgtttaaatagcactcttctttttgaccatttaaaaataatttggcagctgtaaccacctatggtcataacacataatcacttacaaaagacaagcaacagatacagaattaacgatatacttttaatatttttacaaccctctttaagttggtgcctaatggcatttaacaagatttttatattcagtgaaaaagatttagaacataaactgacatgaagtaaggaatataatttctctgtgccatgcaaaagagaagtcaactttttacacatcatcactcctaaacagttctaattaaaatccaaactgttcccatttttgcatcattgtcattctttggcaaaagattctaaaaacccaggggttaggaaacaactgttcactcatggttttccttttttttttttttgcaaaatacatgtgttttgtaaaagaaatctgcactgtgcttggtttatactacataattataagtaagcaaaatagtatgacttcttttgactaatctactcctaaagccttgagttgccgttcaatctcttcatctgagattgtagcctttgaagtagaggcagatggtaagcttcgagcagctgatggagctttggccatctttccagaaatttcaattccaatttcatcaagaacttgattcacaatatcctggctttcttcttcgtcatcagaaccgtcaaagatgtcatcaagtgtatcattgatcatttcttcagtcatttccattttcatgttttccttctggaaattctgcatggtttgtaatgtcttttgtggatccatcttcttgttaactgcctgcattgtttttgctgtggtagacattgctccagccatcttcatttgggaattcatcacttttgtttgtgtagacatagaagtaacttttgaacttacagcaaaagttctcgtcttctgtttccgtagatgcacaagttgtttggctaaaactttgcaagcttccttattaccaatcttggccattttcttaatttctaattccagctgtttttcttgtttctctaaagctgctcgatctctgattatagccctctgtgtacctcgtaactctcgattctgttcctttattacatcatccacggttttcttcttgaagagggacgccatggttaaagactgcgcccgggcggcccggctcggcccggtccggcccaacgctggcaaaggacaggaggaaaaggacaggaccttggcgggttcggggtggcggagcggagagacagcaggaggaggtcggggtcgccaggcaggacccgcggaaggcttgtatccgcagctaccgcagccgcgtcacccggagctcaggtgaccggg

SEQ ID NO: 77150 - DNA, 2543 bp, Homo sapiens; identical to SEQ ID NO: 59692

SEQ ID NO: 77151 - DNA, 1085 bp, Homo sapiens; identical to SEQ ID NO: 58710

SEQ ID NO: 77152 - DNA, 3637 bp, Homo sapiens; identical to SEQ ID NO: 59694

SEQ ID NO: 77153 - DNA, 1592 bp, Homo sapiens; identical to SEQ ID NO: 59695

SEQ ID NO: 77154 - DNA, 1587 bp, Homo sapiens
ttttttttttttaataaacactttagatttattctgccatttctgaagccacctcatttaatttatacataggatataaatggctatacatttttacacacttttatacaagtttaggttgtactactgagtttgttaaaatgtacccattatttactcaaaatatttattgttacaagaaaaccgtaagaagcttgtgtaacatgaacagcaagtattgaaaacgaatatgtaaagtaaatggttttgccctgactaaatcagcctcagtattttatgcttttagtagaaaagcccattaaacaaaatagaatcctgggggatcaaatcatatgaatgattcatgaaataacacttctgaagcaaccccagaatcatataaatgtaagggttaaaggtcatatgtactaagcatgggtcagaggaatagaatggatttgttaattttaccctaaataaaaggcgcttgtgggcaacagctctgccatcaatacacatgggcagatgtttccgaatccagccattcccagatttcactgacatgcccttttccacaggctccctgctgatgagatttccccagcagcagaagtttgacatcactgctcccggatgggagaatcagagctctcctcatttgggtcaggggtggctggctcacgaggtttggtccaaccagcagaaccagctccttggatcctggaataaaccaaacatcaatggtaccatgcgctctgtgcccagggagtgaaaggcaggtccagggtgggaagaagaggggctgctaccttttggagtgaaaaaaatgaggtttacactgtagtataacaaaatgcctttttgtaaaggccagaagaaattggctgtgctgtggctgccctgaaagcaagaaaaaccttcaatgtacccaggtgaaatgtaaagcctttctccctcccacacacaatggactcacccagtattaccctcccactaccacttttgaccctcataacaggcaccctggcgggggggcagattgatgttatcaccatttaccagatgaggaaactgaggcctgatgggcagtgatttgtgcactgcgacataggactcagtgaagagcctagccagctgacggtcagctgactggtgcactctttccctcaccttctctctcaagggcacagctacactctttctccaccattattaacactcacagggcacaggtagagcgtccccagacctgtgcaatattctacacgaaaacatttggaatgtgagcaatgtctgaacaggggcttgccaggcacatctgatcaccataaatgctcccacccctgcctgtcctcacttgtgctgcactatgcaagcaagcagcaggttctcagaaggccactgtcctgcatgtcacaatgagtggccaactccttcacagaacagcaaatagcagccctggctacaaggtgcagtgtgcaacccccatatgccaaggggcagctgctatcttccagcagagagagaacccccagctctgctccctacctatgccctgcttcctgtgcctcacacagccagccttgctggcctgctggctattgtctc

SEQ ID NO: 77155 - DNA, 2694 bp, Homo sapiens
  misc_feature (1)...(2694): n = a,t,c or g
atgaaggttgagccatggcgggcggggccggggaggcgggcttggagcgagggggcggggcaggcgccacaaaaacgcgctcgcgccggcgccgaaccgcaactcccggcgacccccgcgctcccgggtggcaagatggtggcgcgcaggaggaagtgcgccgcgcgggacccggaggaccgtatccccagcccactgggctacgcagctattccaatcaagttctctgaaaagcaacaggcttctcactacctctatgtgagagcacacggcgttcgacaaggcaccaagtccacctggcctcagaagaggactctttttgtcctcaatgtgcccccatactgcacagaggagagcctgtcccgcctcctgtccacctgtggcctcgtccagtctgtagagttgcaggagaagccggacctggctgagagcccaaaggagtcaaggtcgaagttttttcatcccaagccagttccgggtttccaggtagcctacgtggtgttccagaagccaagtggggtgtcagcggccttggccctgaagggccccctgctggtgtccacagagagccaccctgtgaagagtggcattcacaaatggatcagtgactacgcagactctgtgcccgaccctgaggccctgagggtggaagtggacacgttcatggaggcatatgaccagaagatcgctgaggaagaagctaaggccaaggaggaggagggggtccctgacgaggagggctgggtgaaggtgacccgccggggccggcggcctgtgctcccccggactgaggcagccagcttgcgggtgctggagagggagagacggaagcgcagccgaaaagagctgctcaacttctacgcctggcagcatcgagagagcaagatggagcatctagcgcagctgcgcaagaagttcgaggaggacaagcagaggatcgagctgctgcgggcccagcgcaaattccgaccgtactgagctgtgagagccgcagtgaatggctggaggtgcagggccaggaggaggcgaggcagggcctgcagcggtctctgagaggccgagctctggccaacgggccccaggttgaaggccaccgcgtccaacagccccatcagagtccacacaggccaggagggaaggaccaggccacccctcgggtcttgtgcttcagcagtcctggggacccaggcgtgccgagaggaggacttgtccttcctgcttcttgcctccacaccctcctctccaggaccctggatgaatccgttctgtgcttccttttccctcaatgcaaaagcccttgctggcaacgaaaaagcctcaaaagcagtgagaatacaagaaccttttattttccatccagttgggcagcagggaaaggctaggtgggcccagcccgcccttccttcctccagctggctggagattattagccaggagacagcagccctggaacccagactctgtctcccccttgaggtcacagatgttgaagttggaatctcgctccttcccctgactaccatcctaggctgggcctcaagactagtgaggcctgtccccaccatccctggccttgttgtggggctcaggaactcagagtcccagtgttgagtctgggagcactaggtcttcatagttccaggcccagagctacagctgggctgggagcgtgtgtgtgcactgtaagaaggagctgatgatactggccacgtgctggggttcgctcatgtggacacagtgattgcctgggacttccacaaactggaaccgctggagaggggagggggtgggtagtganatgtggccagaggagcctagggagctccatgggccccggggtcagggccctcccacagcattccagctccctgcaggtcaggagcgcctcccacagtgagtttcccccacactcggctccttggagccccgacagtccatagcaccccaggagatgtctaaccttagggacttggaggcctcccaggggtctaggccagctgagttgtgaagttgcatggcagggacagggcagggccaaggccagggttgctgtgattgtatccgaagtagtcctcgtgagaaaagataatgagatgacgtgagcagcctgcagacttgtgtctgccttcaagaagccagacaggaaggccctgcctgccttggctctgacctggcggccagccagccagccacaggtgggcttcttccttttgtggtgacaacgccaagaaaactgcagaggccccagggtcaggtgtaagtgggtaggtgaccataaaacaccaggtgctcccaggaacccgggcaaaggccatccccacctacagccagcatgcccactggcgtgatgggtgcagagggatgaggcagccaggtgttctgctgtggtttgggagcctataaagtgagactaggctgggcatggtggctcccatctgcaaaaccagcactttgggaggccaaggtgggcggatcgcctgaggtcaggagtttgagaccagcctggccaacatggtgaacccccatctcttaaaaatataaaaattagctgggcatggtggcaggtgcctgtaatcccagctactcaggaggctgaggcacgagagtcgcttgaacccgggaggtggaggttacagtaagctgagatcttcccactgcactccagcctgagcgacagagtgagactccatctca

SEQ ID NO: 77156 - DNA, 1599 bp, Homo sapiens; identical to SEQ ID NO: 59698

SEQ ID NO: 77157 - DNA, 1052 bp, Homo sapiens; identical to SEQ ID NO: 59699
  misc_feature (1)...(1052): n = a,t,c or g

SEQ ID NO: 77158 - DNA, 1793 bp, Homo sapiens; identical to SEQ ID NO: 59700

SEQ ID NO: 77159 - DNA, 2506 bp, Homo sapiens
ttttttttttttaggttgaatcaaagcaagttgtcttcagagactgggatccgagatagaaaacacacagtgaagtttaatcaggaacccaacctccggtcctctgctacaaccacggaaacggctccaaacttgaggggggaccccccaacgcctgcttttggcccaaagctctgccttccagccctcctcatacccactggccacctaggaccaggaaaggggggtagagccctgagaattctgggtctggggtcaccagctcccacacctgtgctccccggccccacacacatgatgcccaggggtgggcaatccctgacagcggtggccggcacttgggagctcctgctcagccacctgccacggcccaccctgggggtccggcaggagccagggcagtgcatggcagcataaggccccgctgcagatcgactgccttcagaaacaaaaagtcccggcgcaaaggcgttcccggagtggcagcctggcctgcaccccagctgtgctgcccctgcagagccccagcagcgaggcacacccaggtcaggggagggggcttgggtaccaggggcctcactggctcttcaccaggaccctgtagagtgagaagctgaggactgcggccacggcggccccgacaacccccagcagcccccggagccagaaggaagagggatgcagctctgcgtggaccaaatgtgggaaggcggccatggtggcgagctgggtgaagatggtggtgctgggctcggctgggccagcacaggagaacggcacgggagcgggtagccggtgcttgcggcaaaactcggccggtgatgggccagacaccgcgacaccttcgggcaggtcggccttggaggagacaaagaggcagggggtctgcccgtccatgtaatggtgcttgtagacgctggcacaatgtgcaaaggactttgggtcactgccatcaaacatcaagcaggcaacgtcacaggtggcgtccagcgatgtggccagcagaccatctgtgcccacctcacagaggatcaagtacttctcctgcccattgacctgcaccgtgtcgatggcgtagccgggaggctgctccctcgtgtcctggtgccccaggccgcggccgagaaaggcctgcaggaaggcagacttgcccactccacgggcccctaccaccttgcacaggaggacgctccgctgcgtctgtcccttctcctggtccagcctcttctcacgagtgactgtgatggcatgggcctggtcctgctcacagagggtggggtagcccaggtagcctaggtgtccaaggcagctccggacgtccaggtaggtcaccagggtccactggcagaggtatccgtgcaggggcaaccggccggcctctgtgcggactgtgcgtgggagctcggggccccagggcgctgctgggaacacactgaaaaggctttgcagctccacgggcgagagggcgccgtcgcggtcctggtcgtgcttctcaaacactctctgcacaaactggtagccaaggtggttgagctccgtgctgcagccggggggcacgtggatcagaggggagagatagtccgcagtcagctccagggcatcgctgtagccgaagcgccgcaggatggtccaggtggtctcgtgccggccgcgctggatgaagagcgtgttcaggaagaggaaaccatccagggtcagctggtcctcccgcacgccgcccgccacgttcctgcacaccaccgtcttcacgtcctccagggcctgcggggccagggggtgcccaaagcaggatttctggaaagcgttgagctcttcgtcactgagcgcctggtccaggtcctgatctgagagcctgaagatgcgcgtcagcgcctgggcgcacgcgggcctcaactgcttggcctcagggtcatagaggggggctgtgggatgcaggacggccttctgggcgtagtagaacagctctgagatgttcctcaggttcttggccgaacactccacgcaggtctcaatctcgggaaactggctcatgatggggagcacggcctccatggagctccccgaccgcaggtctgacttgttgcccactaggatgatgggcaccctgggcccttgcgtggtccccccattcaccagtgggatccacttagttcgaatcttctcaatggtggcctcctcagagacgtcatacaccacacacaccacgtttgccttgtggatctcctcccgcagctcctcgtccgtctgctcggcttctgagtagtccacgatgtgggtgggcaccttctccggggtgacgtccgcggggatggtgatctcctccgcgcggggagggacctcctcggggaactcctcgcccaccagggacaggatcagcgacgtcttccccacctgggcctcgcccagtaacaggatgcgcacgtcccgcctcatagctgccgcccggagccgctccccgacccggaacccggccccgacctggtcctcaagcctttcgcctcgtgcc

SEQ ID NO: 77160 - DNA, 3064 bp, Homo sapiens; identical to SEQ ID NO: 59702

SEQ ID NO: 77161 - DNA, 1641 bp, Homo sapiens; identical to SEQ ID NO: 59703

SEQ ID NO: 77162 - DNA, 2119 bp, Homo sapiens
tttttttttattttatcaatatatttggaaattaaagtttctgactttaattctggcctatcctttgaggctcttgagggtgggcaagttcctgaatccctcaggtggtaaagatgggcaaaggatggggaaaagaagcatgggtgattaactccttttatcccacccctggaaggaaagataagcttctgggaaaacacttaacccaaagtttcagacatgttaaaccactagcccagatttctgcccttgcaccaaggctatgcttggaaatcagtggttgccaggttaggaaagtggctggatgagagatctgaggacagaaatctcaattaacatgctatcccctcccttaaaagccaagttcccccacaattacaaattcttttttattagtcaaaatcacaatcactttgattaaaaggatgggacactccaccctcagcagaaaatgatacagtttatagaaaacctccccgcccctcccacaccccaattaaaaactacaaaaaaatctcccctccttccctacgatgtcatggtagtctgactcctccagtggcactgcagctctggagtggccagctcaccacagcaccctccacttcaccttggggagaggagggatgctggtggttaaggaggttaaaaccattagttccagtaatgccagttcccaaacatgcacttccttcctttcccccaaggtctgggaccaaggagaaagggaccgaaatgaggcccaggccatggaggaagcaacttcgaggagaggaaattattagcccaaggagggttaggaagagttccaatatacctcctccctccccccacctcaaaaaagaaaaaaaggcagtttaagggtatttatcacaccaaaaaatggttccccctcaggcctgaggaaaaagaccaagatgtccagtcttgagggagtactgagaaactcagagctcatctatccttgagcctccattaatttcatctccaggggcattggctaaactaggtccctttttcttggcaacctgcactgtccagaacttggagatgggagaaatacagggcgaggacatcaggagggcaccccaggcccaggggtcccccataggttccctcagtcctcgggtgggatgcgcagggcagaatacaccatcacccgactgtcctcctgccgtcggcacaagaggctgcgctgaatacttcggagggaccctccagctgtgatgaaggcccagagccccatggaaacagtgactgcatagatgggcagcaggctggcctcataccaggggttcaggaatgtcagtcccgatgtcagtaggtgactcccaaccaccaggcccaaagcccagtaccgtctcctctcacaggcatcaaagaacacaactccccaaaaggtatggagcaggataatggctgctgtcagaaaggctgaagtcaggaagtaatagggtgagtctccatggatcccaaccacacctggcccaagtgcatcagccaaaatattgataacagagaagacaccactgatgataccgaaggagagaccagaaacataggccatctggcggatggagatgggtgatcttccgtcctcactcagcgatgctaacccctcatctgccttcttaagcagcttgtagtaggcaaagcggaacacctcctgtagaaggacagagacagcagcaccaaaaatcaggaggccgtactggagccgggcatctgaccggtcggtcacatggaccaagatgaaccagaccacagaggccaggagcagggagaccagccagaaaaatgcccctgcgaccaggatgataacgcgaagcgggtccccagccacagtgatcaagaaaagcgcgaaggccgggccgaacgcgacgaaagtgcagccgaaaaacaccgcagcccccatggctggtcaggtgggaaggtgggtgggggcctgaccaggacaggcaaatgggaggggcgcgccagctggggagtccgcgtggggtggcaacgcgaccccacgaggggcgcggtgcaatgtcacccccagaccccggggaaggggaagggggggaaccgaaaccccaaatgaaggtccgcgccacttcctctacggaagacgaaa

SEQ ID NO: 77163 - DNA, 1499 bp, Homo sapiens; identical to SEQ ID NO: 59705

SEQ ID NO: 77164 - DNA, 2095 bp, Homo sapiens; identical to SEQ ID NO: 59706

SEQ ID NO: 77165 - DNA, 951 bp, Homo sapiens; identical to SEQ ID NO: 59707

SEQ ID NO: 77166 - DNA, 1686 bp, Homo sapiens; identical to SEQ ID NO: 59708

SEQ ID NO: 77167 - DNA, 3381 bp, Homo sapiens; identical to SEQ ID NO: 59709

SEQ ID NO: 77168 - DNA, 2517 bp, Homo sapiens
ttattagtgaaataagtcagtttattttatttctaacaaggcctttttctcctataattaagacaaaccattttacactttataataacataaacttagtttttagtattttcaaaagggaaagattttgggtggggggaatgtaggaagtcaaatattttagaaggagtaactatagaagttactttttcaatcttaatatattaacaggcttgttaccaggtacattacccagcattttttcttacaaggaatctatcaagtactagccaacaaatagtctacatttagaaactgagggtagaaatgtctgtattttaataggaaacaagcatctaaaatacaaatcacatgtctttaacaaggcaatttacataattaggtgtaagtttttaattaactttatgttccttaggatcctagcaaacactcagttgactgtatctcaagttcaaactgcactcacctggctataaaggtaaacatcacaatggaattgggcctgtctgactagggaaaaagatcacttcaatattgcacatttcctttctttaaaaacaaggattaagtcagggccatcttggttctgaatctctccatttttgttgggagaagactaaccatctctttactaagttctagctcaacttctatttcctgggcggcctcaggatgcttttcacagtaatcaacaataaatttgtaatgttccaatgatgttgccaaattttccagctctttcttgggatctgcagtaatgattttgccatagagacgggcaactcgaaacttagctaacatggcagggcgaagaacatcttcccctatatgctcagggaatactttatttgggtctctcagggagtctaagaagagctggtagtacttcagtgctgacttattaagattatttattttttttacaatgtgtgaatcaggatcccttagcctgtcagcaatggcaaccttcaaatccatcatatcatagtaagcatgtgcaatttcaaactggatctgtctgttgaccaacagataatactgtggattcaggtctacagttaggggctctagcatggctattctgcgtttatgcatcttgcaccgtctctccatgtcagtttcaaagaatgcaagccccttaaacagagcactgtggtcttggacaacttcaatatggtcagtgacataaccatcaatctgaaagaactcttttgcctcaaagacatagtgctgacccaataagaaaagttctctggcttcttcaaaatctaaaggtctcaagtagctcactttctcttctactgcagagatggcatcacacagttcaccggttccaaactgcacagcttttttccgaatgctttcctcctcatctagttcttttttccttaaagctctaagttcagactgtttatcaagatcaagctctcctatgttgtcctgcatggagagttgggcattctgcatgagagtcaaacagtatttgatccagcaccttgctatttccccctttctttgatgataaagctctggcacttctccttcagcttcaggagtgtcttctgtggctgagatctttccagtttgaccaaaaatgacattagcagctgataaacagtgcctggcctccataaagcatagcttattgatgtaaaactgtgacaaggtagcagcattgatagcccactctataggatggtaggcattgtgctcaagctggcgttttagtgtactatggcaatagtgagcagccttctcaaacatttccagatgctggtagacttgagctaggtaatataggttatgagtataaaccttttcaaatctttttgatctctcttgttcagtaagtttctcttcttcaggaagaaaacgctcagtaggatcaagaggaggactcccaacctctttcatatactgattatatagtgcttctgatgactctaggtaagcctgtgcagtttcaatttcttctctttcagaccacaagatacccaggttattctgcgcctggatgcagagagagatgcagtcgtgcgagagccggtacctgcgcagcagccgcaggcatttcaccaggtgctcctcccccgccgacagctcctccgtgtcgatgtggttcaccccgaggtggaactcgatgactgccagcctcaccgctcgctgggcgacgggcccctcgggctccaccacctcagccggcagccccagggcgtggtcaccggcacccgggccgtcctcggcctcaggccgctcatcctcgtcctcaggcgcagggccgagcagcgccttgacctcttccagtagcgcccgggcgctgtatttggacttgtatggttccttctccggatttttatgcagttccacccgcgacagagcgagcgccgcctggaatttctcgcagacctctgcccacggaacgttcgccatagcggcctctactgcctggctttcctcaatgtttgcagtcgggactcccgccttccttctgctttgcgacactttacttactggctc

SEQ ID NO: 77169 - DNA, 3379 bp, Homo sapiens
acatttgacctcattacgccaagcttggcacgaggctcagcctcagcactttgacagctttggcctccgtctgcctcgggatatcacagagctgcccgagtggagtgaggggtaccccttctacatggccatgggcttcccagggtatgacctctcggctgatgacatagctgggaagtttcagttcagccggggcatgcgccgcacttacgacgcagggttcaagctgatggtagtggaatatgctgagagtaccaacaactgccaggctgccaagcagtttggagtattggaaaaaaacgttcgagactggcgcaaagtgaagccacagcttcaaaacgcccacgccatgcggcgggcattccgaggccccaagaatgggaggtttgctctggtggaccagcgtgtggccgaatatgtcagatacatgcaggccaaaggggaccccatcacccgggaggcgatgcagctgaaagctctcgaaatcgcccaggaaatgaacattccagagaaagggttcaaggcaagcttgggttggtgtcgaagaatgatgagaaggtatgacctgtctctgaggcataaagtgcccgtgccccagcacctgccggaagacctgactgagaaactcgtcacttaccagcgcagtgtcctggctctgcgcagggcgcatgactatgaggtagctcagatggggaatgcagatgagacgcccatttgtttagaggtgccatcacgggtaactgttgataaccagggcgaaaagcctgtcttggtcaagacaccaggcagggaaaaactgaaaatcacagcactgcttggtgtcttggctgatgggaggaagttaccaccgtacatcattttgaggggaacatatatccccccggggaagtttcccagtgggatggaaattcgctgccaccggtatgggtggatgactgaagacttgatgcaggactggttggaagtggtgtggagacggaggacaggagcagtgcccaagcagcgagggatgctgatcttgaatggcttccggggccatgccacagattccgtgaagaactccatggaaagcatgaacactgacatggtgatcatcccagggggtctgacctcacagcttcaggtgctggatgtcgtggtctacaagccactgaatgacagtgtgcgggcccagtactccaactggcttctggctgggaacctggcgctgagcccaaccgggaatgctaagaagccacccctgggcctctttctggagtgggtcatggtcgcgtggaatagcatctcaagtgagtccatcgtccaagggttcaagaagtgccatatctccagcaacttggaggaggaagacgatgtcctgtgggaaatcgagagtgagttgccaggaggaggagaaccaccaaaagattgtgacaccgaaagcatggctgagagcaactgaagggaaagggaaagcaaatggaactctgatttaaacagctggggatgaaattcctcaagatgattattcctgaaagtgtggatgcgctggatgcgcagggaacatcaggaaaaggccacggggctctgaacagccccggtccagacagcagcctgtacatccatcccaggacacagcccagcccctccccacaccatacaaggtatcagaaaagtctaggacctatcatttcatcagagacatgatcagaaaagaaactgcttctgccccatttcttgttttggagattactccatctgtccatcaaaagaaacctgtaaatatgaaagaacaaaggttatttcctggagaaaagacaatttattcaacaccaacaagggactcatcatatgggcacaactctggtgtccttctatggagaaaacctcaagtaaagttttattctgcctttgaaaatgcttccaaaagtagaccctgtccccacacaggtcaagactacagagaaggctttgtagaaatgtgtcacctatgtacacctgctacttacacatttcctcttttggaaaaatgagatacttagaataacaagaaaattaagacatactggcctggtgccagcagatggcttttctatagacaaactaggttagtgtggaagatataggttaaaataaactatgctgttttatttatcttcccaacctgattggcagctagacttttttagggtctcatttaatggccctgtttttttcattattatatttaatgatagggcaggatttcgtatgcaagctcttgtttctcaggctgcctgcagaagaagtcgctataaattatctgttgtctacatggtacaaggcccattgactcatctgatgcttgttttgttaatttctttaatatttttatcacggggcagtgggagggcttgggcttttagccacagctgttttaagacttctgatctcctgccctgcaggaataggtgggaagtcattgaatttttacactatagtaatttgcattcccacataagtttgagtgttacgaaaacattcctttaaagggatctgtgctacacaaaatatgccaggacctcacagacaaagccattgctagaaatgtcattccaatgatcagatctggaaacaggctgccataaccacttttccttcttgtagactcagctcacctgtatatttaaactgttcttggcatcttgaaacacctatttctactcaggtactcattgtcctgttactgattcacctttctgatccttttcaaccagttttcccccaaggggggaaattttacttaacctctagtatttgaacaactcaatatttgaattgttgccccatttgcttttacctgtactgtattcttggtcatctcaaatggcgtctaaacccagctactttgcattccagaagtttccattccctccaattccacctaatttttcatctgtcctagttactggctctttcttcatgtcttatttctcttgctttgggagcttaaaagattttacaagacctaattttgggttccttccttggagccatagttaccctgccaagaagagtagaaaatgggttcaactcctgtttcgctccaccaacacctctgtgagtctcatcatcagctgagcgatgatgccttacaggttgcatagcactggaactttcctagagtaacggctctgctgccagggtttctctgggctcattcttccactgacttaattatgatctatgcctaacagagccccagtacaactattttgcagaatggctgttaccctagaattactatagcacatattgagatatagttgtactccctagtagataggaactgaccccaacaataaactttgataataaagacaaaaaaaaaaatagggggggcccttcttataatcccacc

SEQ ID NO: 77170 - DNA, 1684 bp, Homo sapiens; identical to SEQ ID NO: 59712

SEQ ID NO: 77171 - DNA, 1164 bp, Homo sapiens; identical to SEQ ID NO: 59713

SEQ ID NO: 77172 - DNA, 1713 bp, Homo sapiens; identical to SEQ ID NO: 59714

SEQ ID NO: 77173 - DNA, 1983 bp, Homo sapiens
  misc_feature (1)...(1983): n = a,t,c or g
tttgattcgtagacctagtccgtgcggtggaattccttccttgcccggattcccagaagctggagaaagagtgccagtcttccgaagagtccatggggtctaattccatgcgttctatcctggaggaagacgaggaagacgaggagccaccaagagtccttttataccacgaaccacgttcgtttgaagtaggaatgctagtctggcataaacataaaaaataccccttctggccagcagtggtcaaaagcgtcaggcagagagataagaaagcaagtgtgctatacatcgaaggacacatgaacccgaaaatgaaaggtttcacagtgtctcttaaaagtttaaagcactttgattgtaaagagaaacagacgcttctgaatcaagccagggaggacttcaaccaggacatcggctggtgtgtctccctcatcaccgactacagggtccggttaggctgcgggtcttttgctggctctttcctggaatattacgcggctgatataagctatcctgtccgaaaatccatccagcaggacgtgttggggaccaagcttcctcaactgagcaaggggagccccgaggagcccgtggtggggtgccccctggggcagaggcagccctgccggaaaatgctccccgaccgctcgcgggccgcccgggaccgggccaaccagaagctggtggagtacattgggaaggccaagggcgcggagagccacctgcgggccatcctaaagagcaggaagccatctcgctggctgcagaccttcctgagctccagccagtacgtgacctgtgtggagacctacctggaggatgaggggcagctggacctggtggtgaagtacctgcagggcgtctaccaggaggtgggggccaaggtgctccagcgcaccaacggcgaccggatccggttcattctggacgtgcttctgcccgaggccatcatctgtgcgatctctgcgggggacgaggtggactacaagacggctgaggagaagtacatcaaggggccttcgctgagctaccgggaaaaagaaatatttgacaaccagctccttgaagagcggaaccggcgccgtcggtgagggagcagccggctgtgctgtcagcggggcctggcggtggaagcgcctccagtgtgcatgagcgtgtctgaagatggggggctcagggggcacgtttgcgtttggacctgtctgtgcgttctcctgccgtggcagttccctgatttccatacttctggagaatccatttcgttaacactgaaagccagttctcttttcctggcagtttttttcattttatttttggcattttttacaagataccgttcgggaaaggcttttgaaaggacggaagcgtattcactgtgcgccagtactcctggctgtgctgtggtttctcccgacgtgcacatcgatctcgtatgtgtggcatctgatattaaacgggaggttttaagaagcgtctgccgtgatcatggagcttcggaagcgggaatggttcttccgggtttgctgttttgtctgtttcccccttgtgtggtttccgcctgcgacagttccagaatttgctctcccactcagtgtgctctgcagctgtgaggaaacagccttcgttagaggcgggagcagagacgagccgctgctctgtgtcgtgtttgctgtggctgcagggagaggagcgggacacgcacctttccaggggcctctgtgtcccgcactgtgtgtgagtggaccgcagcggcagccacatgccctgggttgccatgggccagaccgnctccacctnccccgcccgcctgggncttgttctgagtgcatttccctgcaatgtgtcgtcaatgcacagccagtcaacgcggtcttagtcaatcgggcgcggatgggtaatgttnggggttccaggggtgggccgcaagcanttcaagggtcaattttngggaagcctnggggttggaantgaacaaancgcatt

SEQ ID NO: 77174 - DNA, 1787 bp, Homo sapiens
  misc_feature (1)...(1787): n = a,t,c or g
atgtcgcgccgacctgaattcccggatcgacgatttcgttcccaacccgccagtcgcggtctccggcgccagctacgccgctgccgctgtcactatggcccattacaaagccgccgactcgaagcgtgagcagttccggaggtacttggagaagtcgggggtgctggacacgctgaccaaggtgttggtagccttatatgaagaaccagagaaacctaacagtgctttggattttttaaagcatcacttaggagctgctactccagaaaatccagaaatagagctgcttcgcctagaactggccgaaatgaaagagaagtatgaagctattgtagaagaaaataaaaaactgaaagcaaagcttgctcagtatgaaccacctcaggaggagaagcgtgctgaataggattcttctcagtttgaaagacaatgaaaaatggttttgtatgacttgaatagtttgtatagtatataatcttttctgaacagatgctattggaactcttttaatatgtgtaattcacctatcacactctgttaaaaacacatagaatcatcaataaaaactcaatataactttctttgggtcttaaagcaggagaatccaaagtaaatcctgaacaaaacctaaacacagccatctaactcattaccttaaaagacattctgtttattagtctgattaggaatgatggcactggttgtattttagccaagacagtttagcatggagctattccttggtgcagttcaggatatgaacacagggtacagtcattctttgaacggtgacactggttctgtatattccctataggcagctggagagatctgtgtgacacaagatgcttttgtacggggttcccatgaatcttctgctcttgtttgtgtgacatggaacaaataacttctttgccaccactttgccttagataactgtgtgtgtgtgtgccagtttgaactctgacaccacattttccttctatgcaatcatgcctgtctgataatcttgcattgctttcctctgagctttagtgggtcctagttgcacactggcctttctgtgctgtttttcaatttgcctaataatagcagttaccctgattgtaatttatgtaactttaaacaggatcacactgtaccccctgcctgccttatttgcttactgagcacaggacagaggcaatatacaactctgggttcacacacaagctgagatgagaagaggaatgagccatatattggggaaaatcatagtttgtaggtataattatatagtgcttttctccctcaaagtatttttctagccttgaattcattttatcttcattatccctgtgaagtaggtgggacaagtataaggggaagaggggtgctgaatttttaggccaaagactgatattaatacaaatcactcactaactgtagagccttgggcattatcagtgaactactctgagatttactgtcttcatctgtttaatgagtagaatgtccgtgatgcctacctcacagggttgttgtgagggtcaaatgagaatgtatgtgaaagatttgtaaatggtaaagcactatattcttgtttgttagtcctttttcctttctttgggtagacctacagtcagatgttttgttttatggatcacttattttccttactggtagactgtcgttttatagacatattcctatttcatatattctctccctgttgttagagaacctatctttgtttttggtcaaaacacacatagaaaacanaatgatccaatgaaaactgggttaac

SEQ ID NO: 77175 - DNA, 3273 bp, Homo sapiens
cggctcttctcggctcagtctcagcgaagcgtctgcgaccgtcgtttgagtcgtcgctgccgctgccgctgccactgccactgccacctcgcggatcaggagccagcgttgttcgcccgacgcctcgctgccggtgggaggaagcgagagggaagccgcttgcgggtttgtcgccgctgctcgcccaccgcctggaagagccgagccccggcccagtcggtcgcttgccaccgctcgtagccgttacccgcgggccgccacagccgccggccgggagaggcgcgcgccatggcttctggagccgattcaaaaggtgatgacctatcaacagccattctcaaacagaagaaccgtcccaatcggttaattgttgatgaagccatcaatgaggacaacagtgtggtgtccttgtcccagcccaagatggatgaattgcagttgttccgaggtgacacagtgttgctgaaaggaaagaagagacgagaagctgtttgcatcgtcctttctgatgatacttgttctgatgagaagattcggatgaatagagttgttcggaataaccttcgtgtacgcctaggggatgtcatcagcatccagccatgccctgatgtgaagtacggcaaacgtatccatgtgctgcccattgatgacacagtggaaggcattactggtaatctcttcgaggtataccttaagccgtacttcctggaagcgtatcgacccatccggaaaggagacatttttcttgtccgtggtgggatgcgtgctgtggagttcaaagtggtggaaacagatcctagcccttattgcattgttgctccagacacagtgatccactgcgaaggggagcctatcaaacgagaggatgaggaagagtccttgaatgaagtagggtatgatgacattggtggctgcaggaagcagctagctcagataaaggagatggtggaactgcccctgagacatcctgccctctttaaggcaattggtgtgaagcctcctagaggaatcctgctttacggacctcctggaacaggaaagaccctgattgctcgagctgtagcaaatgagactggagccttcttcttcttgatcaatggtcctgagatcatgagcaaattggctggtgagtctgagagcaaccttcgtaaagcctttgaggaggctgagaagaatgctcctgccatcatcttcattgatgagctagatgccatcgctcccaaaagagagaaaactcatggcgaggtggagcggcgcattgtatcacagttgttgaccctcatggatggcctaaagcagagggcacatgtgattgttatggcagcaaccaacagacccaacagcattgacccagctctacggcgatttggtcgctttgacagggaggtagatattggaattcctgatgctacaggacgcttagagattcttcagatccataccaagaacatgaagctggcagatgatgtggacctggaacaggtagccaatgagactcacgggcatgtgggtgctgacttagcagccctgtgctcagaggctgctctgcaagccatccgcaagaagatggatctcattgacctagaggatgagaccattgatgccgaggtcatgaactctctagcagttactatggatgacttccggtgggccttgagccagagtaacccatcagcactgcgggaaaccgtggtagaggtgccacaggtaacctgggaagacatcgggggcctagaggatgtcaaacgtgagctacaggagctggtccagtatcctgtggagcacccagacaaattcctgaagtttggcatgacaccttccaagggagttctgttctatggacctcctggctgtgggaaaactttgttggccaaagccattgctaatgaatgccaggccaacttcatctccatcaagggtcctgagctgctcaccatgtggtttggggagtctgaggccaatgtcagagaaatctttgacaaggcccgccaagctgccccctgtgtgctattctttgatgagctggattcgattgccaaggctcgtggaggtaacattggagatggtggtggggctgctgaccgagtcatcaaccagatcctgacagaaatggatggcatgtccacaaaaaaaaatgtgttcatcattggcgctaccaaccggcctgacatcattgatcctgccatcctcagacctggccgtcttgatcagctcatctacatcccacttcctgatgagaagtcccgtgttgccatcctcaaggctaacctgcgcaagtccccagttgccaaggatgtggacttggagttcctggctaaaatgactaatggcttctctggagctgacctgacagagatttgccagcgtgcttgcaagctggccatccgtgaatccatcgagagtgagattaggcgagaacgagagaggcagacaaacccatcagccatggaggtagaagaggatgatccagtgcctgagatccgtcgagatcactttgaagaagccatgcgctttgcgcgccgttctgtcagtgacaatgacattcggaagtatgagatgtttgcccagacccttcagcagagtcggggctttggcagcttcagattcccttcagggaaccagggtggagctggccccagtcagggcagtggaggcggcacaggtggcagtgtatacacagaagacaatgatgatgacctgtatggctaagtggtggtggccagcgtgcagtgagctggcctgcctggaccttgttccctgggggtgggggcgcttgcccaggagagggaccaggggtgcgcccacagcctgctccattctccagtctgaacagttcagctacagtctgactctggacagggggtttctgttgcaaaaatacaaaacaaaagcgataaaataaaagcgattttcatttggtaggcggagagtgaattaccaacagggaattgggccttgggcctatgccatttctgttgtagtttggggcagtgcaggggacctgtgtggggtgtgaaccaaggcactactgccacctgccacagtaaagcatctgcacttgactcaatgctgcccgagccctcccttccccctatccaacctgggtaggtgggtaggggccacagttgctggatgtttatatagagagtaggttgatttattttacatgcttttgagttaatgttggaaaactaatcacaagcagtttctaaaccaaaaaatgacatgttgtaaaaggacaataaacgttgggtcaaaatggaaaaaaaaaaa

SEQ ID NO: 77176 - DNA, 903 bp, Homo sapiens; identical to SEQ ID NO: 59719

SEQ ID NO: 77177 - DNA, 849 bp, Homo sapiens
ttttttttttttatagaaaaatataactttaataaggaaattcaactaagggtaggagtactccaggaacaatggtaatccccacatgatgatctgattctcttctgggagcaaaacattgcaaccagacaggatggacaaggcatctaaaaacccagtatccttcaccttccgaaaggagggagggactgtagagttgcccaggaaaaaggtcaagagtcttccttctcctggaacttgcagttggtacaggtgtagaagacagtttgcccttcatcggctgaacgcatctgtctggtgtggtatgccattccttcatgaccacatcgagggcagcgcctgtcaaccacaggtccctggcactcaggcccttcctccaccgacataggcatggctgtccccagttggtggaacacaaccgaagtcttcacaaccttcccctcaaagtcccgaacgttgatgttgaagccacagcgaatacaggtgaccgtatcctgagccccgggcagaggcaggaccgagccgcaatctgaacagaaatccaggtccgactgaaagctggagcaagtattggcgaggtccatgacagacatgcggtcgggtctgaggagggagttggaagtttattaacaaaagagagaagagttcctgtcccagaggtcgtaactattctgtcccaggacctaggagtatataacccgaaccctcctgccacgcacgcctcctgcctctgcgaccaaggagccgaaacgcccggaattcccagacagcgtcgggtactaaagcacttggaaccctttccgaattccccgcgctgtacatggtctcaacctttttttccttacattc

SEQ ID NO: 77178 - DNA, 1001 bp, Homo sapiens
cactagtagctggtgctccaggctggcggcgctcacctttctcctagccgggtgacccaggggatttattatatgttggctttctctgaaatgccaaagccacccgattattcagagctgagtgactctttaacgcttgccgggggaacaggaagattttcgggaccattgcacagagcatggagaatgatgaacttccgtcagcggatgggatggattggagtgggattgtatctgttagccagtgcagcagcattttactatgtttttgaaatcagtgagacttacaacaggctggccttggaacacattcaacagcaccctgaggagccccttgaaggaaccacatggacacactccttgaaagctcaattactctccttgcctttttgggtgtggacagttatttttctggtaccttacttacagatgtttttgttcctatactcttgtacaagagctgatcccaaaacagtgggctactgtatcatccctatatgcttggcagttatttgcaatcgccaccaggcatttgtcaaggcttctaatcagatcagcagactacaactgattgacacgtaaaatcagtcaccgttttttccctacgattacaaaactgccagtcctatatggagtctgatcacaagactgcagtttcttcacagatctcaggaagttgtcgtggggcagaggctttttaaaaacatgtgattagggagctatctttatctgaataataacgaatttttaggtaaaacctgagatagagtactacaaaatcatgttgatgacttcagattttggaagttaaatcatgtctgttatttgcattctttagaaacttgactaagtacctgaattcatatttctattctactgtgcaacatagtgatgattcagaaatttttcctttggggaaaaaaatgaatatgaacatttccattgtgttaagtgtaaaaaggtccagacatgatcataaaatttaaattttatacaattaa

SEQ ID NO: 77179 - DNA, 2249 bp, Homo sapiens
  misc_feature (1)...(2249): n = a,t,c or g
ggaattcctgccaagggctccctgaatggtgtccacacagcgaggaagccacgcttgattcttttatccaggacattctccacactctgccggtcctaactcaggcagcagcataactggtgactcggctgaggccatgccagcccccatgcactgtggcaggaccaggtgttcatgactgactctatgctggagcttctggaatgtgggcgtgcccgggtgctggagcagtgtgcccgctgcatccagggtggctggaggcgacaccggcaccgagagcaggagcggcagtggcgggccgtcatgctcatccaggcagccattcgttcctggttaactcggaaacacatccagaggctgcatgcagctgccacagtcatcaagcgtgcatggcagaagtggagaatcagaatggcctgccttgctgctaaagagctggatggtgtggaagaaaaacacttctctcaagctccctgttccctgagcacctcgccgctgcagaccaggctcctggaggcaataatccgcctctggcccctgggactggtcctggccaatacggctatgggtgtaggcagctttcagaggaaattagtggtctgggcttgcctccagctccccaggggcagccccagtagctacactgtccagacagcacaagaccaggctggtgtcacgtccatccgagcgctgcctcagggatcgataaagtttcactgcagaaagtctccactgcggtatgctgacatctgccctgaaccttcaccctacagcattacaggctttaatcagattctgctggaaagacacaggctgatccacgtgacctcttctgccttcactgggctggggtgatccttggtgcctttgtttccacaaggccttttcctgccccctgccttgccaaagacatttaatcagcacacagctgccagactattcccacagtgctccaaatgcacatgaacaacagtgacggctccagccttcgacccagagccccgtgcccagtgcgtcagtgggcctggggttccaggctacatcaagcactgatggtgtcagggctggtagttaccaaatcagggttaagaaacatcagggccacatttcactaccttcacagatcaaactcagcagcagtcatgactgtctgtcactacactggggatcccaattccacataagcacttttggaagaaaacagccaaagttggcctaaaattggcgctggaatttgggctgggaaaaatcttgtggttatttcctttaaaaaggaacaaaactttagtatttaattagttgatttatttaatgtaatttcaaacaattaaattatgaataatgcaatgtacagtagaatcacgttttgattttattaacactgaccaagtttaactccatatgaagtgtaagcttgatatcgtttatgatgtctatcaactgtaccaaaagtaaaacatttaaaaacaatcatctgaatgtcaagttttctctccataaaggacttgccaccttaaggaccccaagtctgcctgaaacatgagccacatcaatgccggtaaaggcctgcatgacctaatctgcatcctggaaacctcttttgcctgagctccccagccccaaactagctggtctgggagagggagcaggcaggttccaggagtcaagcacacgcttgagcaagcagcacaataatccatcttaagactcctcattctgggatggctccacaattcctaaacagcagtctgcaaactccacaaacaaaggctcttgcatgtaagctctcatgagctttgctttgtcttctccctgatcgaggttgaccatcaactgcctgaggtgtggattgagcaataagcttcttaatgttgcagattcccctaaattctttaaattctgcaaagaaactctgtcttcttcctcatcactattgagaaaatcagctatagagtcatcatcatctttgttttccacaggctttacggttttggtaggaagagctgatcttatttttttctcaacaggacgagtttcagggttgcactgttctttgtgcttccggaagcagactaccgagcagtagggcacgcggcaggctggacagcggtatttgggcttctccaagcagatcacgcagacgacggtgctacatttgagcgacgccatggttttgtggaaggagactgttcactgcgccgccgcgcgcgaattccaccacactgagtatggacatcgatanngacctc

SEQ ID NO: 77180 - DNA, 985 bp, Homo sapiens
ttttttcaggcttccgggtctttaatggggcgggggctgggggcagttcatccaaaggtggctccgaagctgaggtcaaccttggcggctggctctgcagggcaaaggggatggtaagcggcccgtcaggctggggggatcttgaaaggcggaaggagagccccatgggtggcagccacagctcaaagctgaggaggagcttccctggcccagtccccaaagctttcaacacaggcagggcctggggcccaggcagaagcctgcactgccctctggtggcctccttggcaggcgcggcttccccaggtggccgggaccccaggagctggctgggcccacctggcatccctgcccagcccctggccgggcctcgggacaccgggtacgcaccgcctactccagggccttcaccagggcctcgttggcctcgattcggatctggatctctgcccgcgtggcctcgtcagctgtccccaccagctccgcctgggccttctccaagtttgccttggctgcccccaggtccaacatgtccagcgtcacggcctcttcggccaacaactgcaccgaagagtcggcgttcactgcgatggaaccgctgctcacaaagtatttggaggtggtgccgtcctctgcatgcaccacgaccagccccggccgcaggacctgcagcgtgggcacgtgggccgccaggatgccgaaggctccggtcagcgtgggcacgtccacctgccggacgttggcaccgttgaagaacacctgcgtgggagaggcgaaggtgaaggacatctggttggggccagaggcggcagccggggcggcggcggcctcggcataggcacgggcgtggcggacgaggcggccaagtcccgggcggcggagcagcgcggcgggcagcatggcagcggctgtccggcaggatgcgggtagcttgctgacagcgggactccggcgcggcgcgggcggcctggagggcgaggaggac

SEQ ID NO: 77181 - DNA, 1773 bp, Homo sapiens
ttttttttttttcaaaatatgaaaatttattttgcataggaaacaataatctctggtaaacatcattactgcatctaacaaaacaatgccttcaattaaagggggaaagtgagtttttaaacattagggttaatttagaagaaaatacagtatataataatctcaacatcatgtttagggtaaaaatgctataatgtgaaaaaagtccctaagaactggacagaacctacctaacaacaccatttaccgtgtatgttttcaatagacaaaacatattttgtaccaaattccaacagtggtaattctatagttgtggccctttaaaaaatggcagcattgtacttgaatcagaaagcttactgggatttcctcatcgaaagtagagattgcagctaatcctagtaccttttgttagtaattacttaaggcacagtgcaaagttgaaggactgttttggtacaaactcaagccagctacatgtatgcttgccttggtatccttgctagagcacatgcaggtataataccgtattatacacaacaaggccaccctgttgtatctgtgttacaattaaacatcagtcccagaaagtgaaccctagtcatttattataggtgcccacctctgacttggaacaaaatgccactccattcatgttcatttttgtcctggagaggatttatttcctaaaagattctgaaagccaacaaatcaatgtggttcttcatagagaacttaagagtaaggctcaaaatggcctcaaaatgggcttcttggatgacttccaacagtgactggccttctcaacactgcagatgtctgagcactaccataacctaacgaagtgaggaaggaggaggcaaattggtatttttaaacaagaatttaagtggctctttctttcaagtctaaaaaaacctttggctttaaagattataaactgatttactaaatttataaaagaccttaatttagcaaagagcttctttttcctttggttcagttactcaaaatccactgtgtgaaggaataatgtatccatcattcagcctttatagcggtcttccggtagcgaagtactgtcactgttacccatatatttaaagccagcatgatcccaaaacgtagaagaattgtaaaatcattggtggtcattaaggttgtgattattcttgttgcacaggtataggaagagaggctccaagtcagcgcactcacagttcctgagtctctcgtcttccacagacactggagctgtgcaaacttactggccgcgctgatgaaagtacatagattcatggccaggtctatgatccacttctgcagggcaaggatgaaccaagaagacaccaatacagcgatgtaaggagtggcctgcttcacgttcccgttaaaatgaaagatacagagcaggaggatgacatcttgcgcgatgaggatggggtactccaggtaggtcagcggcggatacccatagtaacactggtaccgcagaaacaccaggaatcctgccagctccagaagtaaactcggaaggctgaggccccgcgcgctgcgcgccgctagcacagcggagatctgcggcagcttcagcgcggcgcacacgcccagcgtgctccagttacacagccccagcagcgccgcctccatagcgccacgggcgcgggcacctgggcggccgcagcgagaagggaccgctcagcctcggcggcgcagctctgccgaagccttccgccttcccgggatccgcccgggaccacccggccagggccc

SEQ ID NO: 77182 - DNA, 1250 bp, Homo sapiens
cattgcttgaggttgcccaggtagtttcgccttacacttcttgtcccagtgcaattattagtagagctccctttcactgtcaaatttccggttggggataaattgcattgtcgttttggtttgagataggaagatgaggggaggaaggaggtgaggcggtaaggggcgttctctctcttgggtcccgcgcccaacttccgctggcccaaagaaactataattttgaaccaacagacctctgctggcatctgcgattgcatttttcctgttttaacaacggctgtgctagacgaagtggtgaagcccaaagacttatttttgagctcgctgtaagactgagaaatcacgtagtccttcctgaaaccactaagaggaaaaatgtctgtgacactgcatacagatgtaggtgatattaaaattgaagtcttctgtgagaggacacccaaaacatgtgagaatttcttggctctttgtgccagtaattactacaatggctgtatatttcataggaatatcaagggtttcatggttcaaacaggagatccaacaggaactggaagaggaggcaacagtatttggggcaagaagtttgaggatgaatacagtgaatatcttaagcacaatgttagaggtgttgtatctatggctaataatggcccgaacaccaatggatctcagttcttcatcacctatggcaaacagccacatttggacatgaaatacaccgtatttggaaaggtaatagatggtctggaaactctagatgagttggagaagttgccagtaaatgagaagacataccgacctcttaatgatgtacacattaaggacataactattcatgccaacccatttgctcagtagctatgatagacctggacaaataacttgacaaattgctggaacacacttattgtggtttacccggttttaattatgtcagagattgcatcatccttctgcttgtttacaactatgatcttctatgaaatggtggtaccaaggggcgcccaacagcttttatccccaatcttagagcatattctttattataatgattatccaacatatttctttaattttaatacaaaaaatacatcatttaatttttgttacatatgaacattcatttttaaatgctcagcctcaagtgcaggcatttttgagtggcctgattacatattcctcccacagcaagtccgtatcctggaaaaattaaccccgccccaagttttaaaagttttaaaaaa

SEQ ID NO: 77183 - DNA, 1804 bp, Homo sapiens; identical to SEQ ID NO: 59725

SEQ ID NO: 77184 - DNA, 917 bp, Homo sapiens
  misc_feature (1)...(917): n = a,t,c or g
ttttttttttttcagccttaataaattagtataatactattagaaggggtgggcattttgttctgtttcttagcagcattgtctacatgcggcctgacggtctccttccctgggaaatttaaaaagccgtcccctggttgttagctctgatgtaaaattataaaatagaaatctggtagggtttgttttgtttaaaaaggaaaagccctggtgaggcagggcggtcccaggcagtcctgttagctctggccgttgggtctgcccacggagctccctcctggaggctggatctgaatggagtccaggaggggccgaagtgcctgtccaaagggcgtggagagaacttcagagggcaggtctgtgatgtaagaaggaatcttccgcccagtcaggaactgtgccacttcgttgctgaaggtgttacaattgtgttcaaagaggttgtaggcctcacctcggaacagggactcccccagggaggagaggtactccagaaagatttcttctgtgacttctgtactccccacatcaaccacagagtctggaggcccaagcaatgtccctcccggggggcagctggagataccaccactgccgaagaagaactcatccttgtgcacaactatggatgtgtgccagatgccttccagttgtttccccagcatgatggggctgagccgccgggccaggcctttggacaggtcgtacacgtagagcttcaccggatagagattcggcggctccattgggacccgtggcgacggcggccacgacggccctcgggcacccggcagcggcttgaaccttcccgtacccgacgggagtgcgaagcggagggagagggggggaccgctcgtgccgaattcctgcagagcggtctattaagggcggtcaattnnggggncgggggggggggg

SEQ ID NO: 77185 - DNA, 1593 bp, Homo sapiens; identical to SEQ ID NO: 59727
  misc_feature (1)...(1593): n = a,t,c or g

SEQ ID NO: 77186 - DNA, 2304 bp, Homo sapiens; identical to SEQ ID NO: 59728

SEQ ID NO: 77187 - DNA, 1714 bp, Homo sapiens; identical to SEQ ID NO: 59729

SEQ ID NO: 77188 - DNA, 5260 bp, Homo sapiens; identical to SEQ ID NO: 59730

SEQ ID NO: 77189 - DNA, 710 bp, Homo sapiens; identical to SEQ ID NO: 59731

SEQ ID NO: 77190 - DNA, 1330 bp, Homo sapiens; identical to SEQ ID NO: 59732

SEQ ID NO: 77191 - DNA, 5014 bp, Homo sapiens; identical to SEQ ID NO: 59733

SEQ ID NO: 77192 - DNA, 2114 bp, Homo sapiens
ctgcccgggctgcgcggcgtctgcaggcgccaccgctgcctctttccggctgtgaccctcctcgccgccgccgcttggctgcgtcctccgactccccgcgccgccgagaccaggctcccgctccggttgcggccgcaccgccctccgcggccgccccctggggatccagcgagcgcggtcgtccttggtggaaggaaccatgaactggcatctccccctcttcctcttggcctctgtgactctgccttccatctgctcccacttcaatcctctgtctctcgaggaactaggctccaacacggggatccaggttttcaatcagattgtgaagtcgaggcctcatgacaacatcgtgatctctccccatgggattgcgtcggtcctggggatgcttcagctgggggcggacggcaggaccaagaagcagctcgccatggtgatgagatacggcgtaaatggagttggtaaaatattaaagaagatcaacaaggccatcgtctccaagaagaataaagacattgtgacagtggctaacgccgtgtttgttaagaatgcctctgaaattgaagtgccttttgttacaaggaacaaagatgtgttccagtgtgaggtccggaatgtgaactttgaggatccagcctctgcctgtgattccatcaatgcatgggttaaaaatgaaaccagggatatgattgacaatctgctgtccccagatcttattgatggtgtgctcaccagactggtcctcgtcaacgcagtgtatttcaagggtctgtggaaatcacggttccaacccgagaacacaaagaaacgcactttcgtggcagccgacgggaaatcctatcaagtgccaatgctggcccagctctccgtgttccggtgtgggtcgacaagtgcccccaatgatttatggtacaacttcattgaactgccctaccacggggaaagcatcagcatgctgattgcactgccgactgagagctccactccgctgtctgccatcatcccacacatcagcaccaagaccatagacagctggatgagcatcatggtgcccaagagggtgcaggtgatcctgcccaagttcacagctgtagcacaaacagatttgaaggagccgctgaaagttcttggcattactgacatgtttgattcatcaaaggcaaattttgcaaaaataacaaggtcagaaaacctccatgtttctcatatcttgcaaaaagcaaaaattgaagtcagtgaagatggaaccaaagcttcagcagcaacaactgcaattctcattgcaagatcatcgcctccctggtttatagtagacagaccttttctgtttttcatccgacataatcctacaggtgctgtgttattcatggggcagataaacaaaccctgaagagtatacaaaagaaaccatgcaaagcaacgactactttgctacgaagaaagactcctttcctgcatctttcatagttctgttaaatatttttgtacatcgcttctttttcaaaactagttcttaggaacagactcgatgcaagtgtttctgttctgggaggtattggagggaaaaaacaagcaggatggctggaacactgtactgaggaatgaatagaaaggcttccagatgtctaaaagattctttaaactactgaactgttacctaggttaacaaccctgttgagtatttgctgtttgtccagttcaggaatttttgttttgttttgtctatatgtgcggcttttcagaagaaatttaatcagtgtgacagaaaaaaaaatgttttatggtagcttttactttttatgaaaaaaaaattatttgccttttaaattcttttcccccatccccctccaaagtcttgatagcaagcgttattttgggggtagaaacggtgaaatctctagcctctttgtgtttttgttgttgttgttgttgttgttttatataatgcatgtattcactaaaataaaatttaaaaaactcctgtcttgctagacaaggttgctgttgtgcagtgtgcctgtcactactggtctgtactccttggatttgcatttttgtattttgtacaaagtaaaaataaactgttatgagtagtaaaaataaaaaaaaaa

SEQ ID NO: 77193 - DNA, 1529 bp, Homo sapiens
ggcacgaggcgggctgcgaggtctggctaggctacgggccacgcgccgccgccgctgccgccgccactgtcctcttcggaggcgcgggcccgacggaaaccatgtttgtggctcgcagcatcgcggcggaccacaaggatctcatccacgatgtctctttcgacttccacgggcggcggatggcaacctgctccagcgatcagagcgttaaggtctgggataaaagtgaaagtggtgattggcattgtactgctagctggaagacacatagtggatctgtatggcgtgtgacatgggcccatcctgaatttgggcaggttttggcttcctgttcttttgaccgaacagctgctgtatgggaagaaatagtaggagaatcaaatgataaactgcgaggacagagccactgggttaaaaggacaactctggtggatagcagaacatctgttactgatgtgaagtttgctcccaagcacatgggtcttatgttagcaacctgttccgcagatggtatagtaagaatctatgaggcaccagatgttatgaatctcagccagtggtctttgcagcatgagatctcatgtaagctaagctgtagttgtatttcttggaacccttcaagctctcgtgctcattcccccatgatcgccgtaggaagtgatgacagtagccccaacgcaatggccaaggttcagatttttgaatataatgaaaacaccaggaaatatgcaaaagctgaaactcttatgacagtcactgatcctgttcatgatattgcattcgctccaaatttgggaagatctttccatattctagcaatagcgaccaaagatgtgagaatttttacattaaagcctgtgaggaaagaactgacttcctctggtgggccaacaaagtttgaaatccatatagtggctcagttcgataatcataattctcaggtctggcgagtgagttggaatataacaggaacggtgctagcatcttcaggagatgatgggtgtgtaagattgtggaaagctaattatatggacaattggaagtgtactggtattttgaaaggtaatgggagcccagtcaatgggagttctcagcagggaacctcaaatccttccctaggttcaaatattccaagtcttcagaattcattaaatggatcttctgctggcagaaagcacagctgagtacaagctaactggagtaactttgctgttttgctgcttgttgcatgcacacaggaatggaaagcgagctccttttccccttccccagcgccgtttgacctctcccaagatacaccagcagcctgcttactactaaacgcaatccaaaaggcctttaaaaatacagtgtatattttttgtactagtcagtttattgacactatttgaaacttttgaaatataaacggagaggctttctgttgagacattgtcaccaaaacaattttttgaaatgttcctgaaactaatttgggtttaaagattaaaagggttgttaccattcttatctgagtagttgggaggagg

SEQ ID NO: 77194 - DNA, 7445 bp, Homo sapiens; identical to SEQ ID NO: 59735

SEQ ID NO: 77195 - DNA, 2009 bp, Homo sapiens; identical to SEQ ID NO: 59736

SEQ ID NO: 77196 - DNA, 2670 bp, Homo sapiens; identical to SEQ ID NO: 59737

SEQ ID NO: 77197 - DNA, 2424 bp, Homo sapiens
gtgtctcagctggggaagcagagggagctggtgacacctcgtggggccacagggaaggtcggcgacaaaaccaggcaagccctgtggtcacgcaggaggagttgggaccacgctgcatcagaggaaggctgtggagtattcaatgaatggaatttaatgtaactatgacataaacacacacagggtggggaggacgggtgaccaagcgcagacgtgggtgacacgtggccccgctctctggaccctcagtgggaaaaagtctgaggctggcgtctctcaccaaaccccacctcccctggtgggtcaatactgatctggctgagtgacagcatctcgtgacccaggctggccctgggaaggcgccacaggcgaggcctgcgagtccagggagcaggcagacgctacagtggcccccgagcgcgccaggtgccagcctcgacgtgtaaatggcccgctgcgggcgctgctgggaaggaagacaagaagggtgagggctcgtcctcaccaagtgcttcctgagtgccgtaggacgtgggtgggacatgggggacagtgaagggtaacacaaacagcaacgaatgcacaaagacaagtttccaggaacacccattaaacccataacgttcaacaaaattggcaacaaaacgacgcccctgctggcctggcgaggctggcgccttccttcgtggcagatgccacctgcagctggctggctggcaagcgttggccaagctttttggtacctgggagctcaacagcataaaaggctgtaacctctacacggaaaaatttcacatccttcccctgaaactgacttcaggggcaaagaaacgagacttcttgaagaccagcctcttctgggaaaggggcttctgagacgagtgtcgacggcagagcagatggcctggggaaggcaggggtccctgggcagaggctgggagggtggccagagaccagggagggcccctccatctggtgggtttggcaggtgtgtcccctggtgctgccaccaggagccccgaggccggggtgttggctgcgacagcccctcactgggtccggagctggtaatctccattctgcgtgatataacgcacccagggcagggcctggtacccactcttctcaatgatcttcaggtagcgcacctggatgccggaggtagtgaagtaagggatctcgaacttgacactgatcgggggcttgccctccttgtcttcggcctccacactaggcaggccgaagtgggcccgcatcaggtactccttgccgcccgggaaggacttgatggaccacacgatctcgctgttctcggggacccacttaacgctccccaccgtcgtcttgaacttgggtgagtcggcatcattgggcacgggaatgtggatctccacgttgttggctgttgaccgccgcttgaactggcttttggccttgatcatgtactcgatgcggctgtgggagtgcttctcgatcaccgactcgatccatatcaaaggcttgacgtgggtgttgagacggtaggacatgagctcgaactcgccgtcgggtgggatgaaggagatggtgcggtcattctcgaagcgtgatagccgcacacactggtggaacttcacatcctccagctccacggatttgcttttgccgcggcccgtgttgtcaaagaggaccttgtcgttgaggcccaggcgcagctcgggcatgcccgagaggaagactcgcatcttgatggagcccacgatctcgctgcgcaggacattgccgttggcgctgaccaagaggttgacagactcgatgacgtccaagaacacctcattcttccgatacttgatgccttcggaccgccaggacaccgcgttggtgacggtggctggtggccgcggggcccctgtttccagcttgtggccttcctgagtgatgtactcctgcaggatcttgctgtcggtggtctgggggtagccgaagtccatgagctcgtccagcagctcgtagatgataacaaagttgtcccggatgctctcctcctccagctccttgaagtactcggaaaacacctgcaccaccttatagaggaaagaaaagaccagcgacacgcacgcgttcttcttggatgtggcaaccagatacaggttgttgtgtttgatccacatgaaacggacccccccgtgggccaggatgggcgacagcatcccctcctcctccttctccatcaggatgggcatgaagtgctccacctctgacatgtccacgtcgccacggtagttccggcagatgagcaccttgcccttcaggtccagcacgtagacggcgctggcggacatgatggctgcaggaggcctcggcagcggccgagggcggtggcggcggcagcgacggtggggactgctgggcgttgagcaaggacgggcgccgcccgcgacagct

SEQ ID NO: 77198 - DNA, 1768 bp, Homo sapiens; identical to SEQ ID NO: 59739

SEQ ID NO: 77199 - DNA, 1155 bp, Homo sapiens; identical to SEQ ID NO: 59740

SEQ ID NO: 77200 - DNA, 2091 bp, Homo sapiens; identical to SEQ ID NO: 59741

SEQ ID NO: 77201 - DNA, 4502 bp, Homo sapiens
catcccgccgttgttaaaccacgggccgtgaattgaattttgggggccccataaaaaaaatattcctctgccagcccgcggcgtataacttggatcctttaaaacggccgccccttttttttttttttttggaaaataaaatgtttgtttgtttgtttgttttttcctccagctgaattgactggttgtttgtcggtatggacaaaataaaatgattatttcattgtgagaatacttcttggacagcttctcccatttacaagccaactcttttcagacgagcttgtacacgtacacactccatccttggatatatttctgtgacaccagagcagtttccatgaaggccctgatgcagctgatgaacgacaagaagctcatgagcagcctgcccaacttctgcgggatcttcaaccacctcgagcggctgctggacgaagaaattagcagagtacggaaagacatgtacaatgacacattaaatggcagtacagagaaaaggagtgcagaattgcctgatgctgtgggacctattgttcagttacaagagaaactttatgtgcctgtaaaagaatacccagattttaattttgttgggagaatccttggacctagaggacttacagccaaacaacttgaagcagaaaccggatgtaaaatcatggtccgaggcaaaggctcaatgagggataaaaaaaaggaggagcaaaatagaggcaagcccaattgggagcatctaaatgaagatttacatgtactaatcactgtggaagatgctcagaacagagcagaaatcaaattgaagagagcagttgaagaagtgaagaaattattggtacctgcagcagaaggagaagacagcctgaagaagatgcagctgatggagcttgcgattctgaatggcacctacagagatgccaacattaaatcactagcccttgccttttctcttgcagcaacagcccaggctgctccaaggatcattactgggcctgcgccggttctcccaccagctgccctgcgtactcctacgccagctggccctaccataatgcctttgatcagacaaatacagaccgctgtcatgccaaacggaactcctcacccaactgctgcaatagttcctccagggcccgaagctggtttaatctatacaccctatgagtacccctacacattggcaccagctacatcaatccttgagtatcctattgaacctagtggtgtattaggtgcggtggctactaaagttcgaaggcacgatatgcgtgtccatccttaccaaaggattgtgaccgcagaccgagccgccaccggcaactaacctatgaccttctgacctctgaactcttcacccaatgatgacctgaccatgcctgcctgctgatcagttaactggtaatcgcctttgcttgcctgtcgtcagtgcagcgagctgaggcacttgtccgttcgtcttaccatctaaccaaacaaaagacaaagaaattgttgtcctccaactcagcttttttttttttttttttcctgttggggggaagggggttctagaaactgcactgaatagtagtaaagcaataaggcccaattcatcccacagcactgatcatcttttaatatcccaccctaagcgaacggtaagaaggcctctcttaagaaggggagacagatggtccttaactactcaatgacagaggcagttactgtgagagacttctaggaatctttttcttctcatagcgaagtcaaagctctctctgaatgtactgtgtgatgatgcatcatgcatgaaccttcggtcagggatatcattggtgaagtgatttcaaaaagtattcaaaatttgatatgctgtttagtcactacagtgccctcaaagggcagaagttgcagccttttttatattgcctgccaaaatttgaagtattagaagaaagtgtgccatgagagaaaaacttaaggagttttgaaaagtaatgcaaataacaaaactgcaacactatttttaaaaagataaatatctgagttaaaattactgaatctttattttacacctaaaaaaatatgagaacaaggtacatgcattatgtgtcacattactgggcaaactgttcaagtatttttttttaaacctccctgtatagaaaaaaatcattaaggatgtaaaagccatgcttgcctatttgctgtatacatgtaatgaaattgtagataaagtgtagtgcattgaaacaaatgaacaaaaagtagatacttttactatacaagggtgctggtgcagaaaaaaatatatatatttttggaaatgtagcattttatactttcaagtgttataaaaaaaaaagaaaaagaacaaagaaaccctttatttcattaaatgattttttctggtggttgtcaagaaacaaaagaccaaaagagcctttttgtctttcttttttattttttaagtattggaataagtctaaagaaaagaaagtgccttattttccttcatggttcattcaagtcaagtgtctcataaagatcagctcctcccttcagaatacaagttaatgcatgttactcagtcgcccagtatgtgaaagaagatatgagggagacaaatgagttgatagtttgaattataggatttttgccacgttaccttgatgcaaatttgccaaatctgatactgtgaaaagatttgataacttttctaatgcctgactagtaagttttaaaacatcattctttaaaagaatagtttaatacttttggttattccaatcttcaatgttaacccaaaggattctgagataaaaattatgtgtcatctaaacttcagtttacagacaaaattagagctttgttttatttggagaagggggatgcattcatttgattttgttttttgtttttaattaattgaatataataggatacctagcaaatgttttcacaaaagtgaatctttgtgattttcattctagaaaacaatgttttaaatcacccaaatttaatcacatgtctttatatcataccagataactggtgtagtgtatccttttactgtttcaataacctgtgcctgccccaccccttaactttaaaagaatgtgaaaaactagcatcatagtgcatataaatactcaaccacatttcagcttaagcttctaatttctcaagaagttgaaacagttagttatgtagttgaagcaatttgtgtgcaaagcctacatctaaacacttgagtgaataatcattaactgctcagtaccagacgtggcaaatctcaagtgacagtggaccccccccccaccgcccagcttatcaactcgtcccctcttccacaccttcccagcatcacagtcagaggtcagcaggaagctgagtcattaccttcttggtgacctcccccaccatcttgtctcacttggaaaccgttgtcagtttatttactatgcaatagacattcattgttttgtatccagctagctttggtttaatatgccactgctttgtctttctgttacacatacagttttgatttatttacaatatatgctgtgccattttgatttttatattgtttggttggttgaataaatttgcgacactcaaacacttgaggtgatagttgttaaaaacaataccagtatttgatccagtttcatctcaactatgttatacctggacattttagatgtttatcaaaggtcttttatggggaagaaagtaaatgtatgaaataataaatgtgtgacatttatagggaatgttggctctgaacaaacttttgaaaacttggttgacaaaattttggatcaactgaaaaaagcatgacttttgaaatctctgaatgccttggttctcagtattatcattctttattgaatttatttcttattaaaatatgtagtttttaagactttttttctgacagtattatgtaattttttagcgtgggtagatgggagtgtcgcttgtatgttatcgtacagctgacatgtatttttgtctattctttattatcttagtttcatgctatgtatgtaccataaccaacctattgcctatgagaaacatgtaagataatgtatttacagccattgttacaagtttataatgtatttttctatcttgttttatatgtatgttatataacattcaaaaagaatttttttcttgattgagaaaaggatacaaaatgcaaaatccacaattttgataactgaaaattgccaattgttttgcagtactttattatattgggtgtcttgtcttttttgggcttttagttagctaatgaatgaatacattagacacttttgggttttagttgggattttacatagcttgcattttaattctttggttctttgctgtttctattaacccacaggcattattttaataaatgttataataccaacctactaactctggactttgtctgtttattaacctttatatgtttaattaaaataaccaaataaagccaaaagaatgtaaaaaaaaaa

SEQ ID NO: 77202 - DNA, 1224 bp, Homo sapiens
tcccctcccgcccctctttaaaaagcggcccggggaattaacttttggggcccccaaaaaaaagacattcgttgcacccccgcgggataaaaaattggttctcttaaaacgggggccccctttttttttttttgatataaaacagctttatttgagggtcctagtctgtgaggggtggacagataaaagaggtatttgtgatagggcatgaagaccttaagaccctgagggtgctgtgaacagggaacagtctgatatctggaaccaaagggcaaggaaaggtcctggggctgaagtggggacaaggggcaccaaaaagccagtgggggcaggtggtgctggccaaggtcagaggctgatgcaacaggccctcttctccccagggccaggctcctgtccagcctgggcactgcccagagtgatggcattggtccggatgctgttctgtctctgcttggacaccttcgcaaagatttctttcaggacagtctcaaaggctagctcaacattggtagagtccagggctgaggtctccaggaagagcagtccattgttttcagcgaacattcgggcctcctcagtgggcacttcccgggcctggctgaggtcacttttgttacccacgagcatgacgacgatcgtggcttcagcatggtcatagagctccttcagccatcgctccaccacagcataggtctggtgcttggttaggtcaaacaccaggagggcccccactgcaccacgatagtacgccgaggtgatggctcggtaccgctccaggccagctgtgtcccagatctgagccttgacagcagcggtgcccaacatcacagtgcgggtggagaactcaaccccgatggtggtgcggctgtcgtggctgaactcattgcgcgtgaatcgggagagtagattggtcttccccacacctgattcgccgatcagcaccaccttgaagacaaagttataatcttcctcagttccattccccatcttggctccgcatggagggtgcaggtgtcttcggggacagaggcgacaaatctgtgtgttggctcaatgccctcaaccctcagctctcaaaagatctggtcctgcccctcctctcattgggggtaaggggacttctgcagccagagggattgggggccaactcaaggtttaggcagggcctagggaggatcagctctggcaggtgggggtgctgtaaggaagcagaggtcgacc

SEQ ID NO: 77203 - DNA, 1334 bp, Homo sapiens; identical to SEQ ID NO: 59743

SEQ ID NO: 77204 - DNA, 2821 bp, Homo sapiens; identical to SEQ ID NO: 59744

SEQ ID NO: 77205 - DNA, 1613 bp, Homo sapiens; identical to SEQ ID NO: 59745

SEQ ID NO: 77206 - DNA, 954 bp, Homo sapiens; identical to SEQ ID NO: 59746

SEQ ID NO: 77207 - DNA, 2044 bp, Homo sapiens; identical to SEQ ID NO: 59747

SEQ ID NO: 77208 - DNA, 1606 bp, Homo sapiens; identical to SEQ ID NO: 59748

SEQ ID NO: 77209 - DNA, 960 bp, Homo sapiens; identical to SEQ ID NO: 59749

SEQ ID NO: 77210 - DNA, 2410 bp, Homo sapiens; identical to SEQ ID NO: 59750

SEQ ID NO: 77211 - DNA, 1828 bp, Homo sapiens; identical to SEQ ID NO: 59751
  misc_feature (1)...(1828): n = a,t,c or g

SEQ ID NO: 77212 - DNA, 1597 bp, Homo sapiens
tcctgaaactgaagctttacgcctgaggtaccagttcgcaattccacgccacgcgtccgggcggcgcgtggcggcgatccccacgtggtggctttctcacgctagccctctttggtcctccttgacgtcccgggcctgtgggcccgctttctgccgagatgccgaaggtcaagtcgggggccatcggccgccgccgcgggcggcaggagcagcgccgggagctgaagagcgctggaggactcatgttcaacacggggattgggcagcacattttgaaaaatcctctcattattaacagcattatcgataaggctgccttaagaccaactgatgtagtgctggaagttggacctggaactggcaacatgactgtaaagttgttagaaaaggcaaaaaaggttgttgcttgtgaacttgacccaaggctagtagctgaacttcacaaaagagttcagggcacgcctgtggccagcaaacttcaagtactggtgggtgatgtgctgaaaacagatctgccattctttgatacttgtgtggcaaatttgccttatcagatctcttcaccttttgtcttcaagctgttgctacatcgaccttttttcaggtgtgctatacttatgtttcaaagagaatttgccctccgactggttgcaaaacctggagataagttatactgcagactctcaattaatacacagctgttggcacgtgtggaccatctaatgaaagtgggaaagaataacttcagaccaccgcccaaggtggaatccagtgttgtaaggatagaacctaagaatccaccaccacccatcaattttcaggaatgggatggtctagtaaggataacctttgttaggaaaaacaagacactctctgctgcatttaaatcaagtgcagtgcaacaactcttggaaaaaaactacagaattcactgttcagtccataatattataataccagaagatttcagcatagcagataaaatacagcaaatcctaaccagcacaggttttagtgacaaacgggcccgttccatggacatagatgacttcatcagattgctacatggattcaacgcagaaggtattcatttttcctaggtatttggaaaacagaaattttcaaggtcaagaaaagaaatgaattttgtattttttgtatttgagaagataatgcttttgctttactgagacattatttacttgactatttttggttcaatactactactgttgtcaccatttatgattctgaattttaaagttggaaagttctaagtatcaaagtttttaatatataatgctggtccaatctattcataataatcttcaagttcaggagccgcagagacgcacaactttacacttatcatttctaacagtttattgtataaagatgttactcttctatttactgttatatactgtaaggccttctttaggcctttagctctgttcctccagtaataaaaaagttaaaatatgcttcactagtcacacattccccataccatttcgtgttattcacattccccgtaccatttcttgttattcacatgtacagtaaaacaattgtttcttaaattaaaaaaaaaaaa

SEQ ID NO: 77213 - DNA, 4689 bp, Homo sapiens
cccccagtcacacaacctttatttctctaccaaacagcaggtcagcaggtgggtacagggcccgctcctgctaagacctccccacctccccccaggaaagaagcagagaatctctgcaggcaccagactccctgcctcccccactgcgtttctctcactggccgcccagaacctgtgagagggaggaggggtgaggcgtaggggagggggctacagaacatccagcccattggtctgcaaggcaggctgaggggctttggatgtgggggactaggaaagggatgtgagtcttgatttacatataaaatcatcagtctgcacacgctctaggaggggccaagacatagggacaatccttggtgcaggtttctgctacccctcgctagtttttgccaaagtagcaaaagctgagttaagagaaaaattctgtccatcagaggccatcttcctctcatctgatatgacgtgttcctccagcagggagggagggagagcgggtgcccttggggaatcagccatccttagtgacatcctttcggctcatgggtgtcgtggggagggggcaaggagtgaggccaagagtccaggaagcccaccaggctcagaggcccccagctgtgcagacagcgcggcggccgcacactgggctgggtagaagggcgccacggtcaggaacctgaggatgtcggtggtctcaggtaccagggacgcgggtggcaagttggacctctgcgtggcagtaccgggcggcaagtgtgactctgaacatctcccgagctcaggacggggaaccctgagtccaggaggcgcgcggggctgaggcagtccagccagggctttcccgacttgtctcccgggaaaggacatcctcgctccgccctcctgccggctccttgtgtccgtctctctgacccttcacccgcccgggccctgcacatataaacagaagcagcctcgagctcttcgggagccgactttgtgggaagcagagtggagtggaggggggctgcccaccctcggctgttacacagctggggcccagatgggccctttcttgatccccccaggggcttgaccccagtcccagaccagggaacgaagagagaggtcagagccgttaaggaagggacccccagagtcctccgtcagtgcagaggcaccagtcaccaagtgaacgtccagcttccgaacaagggggagcaagctccagctgcactcgtgatttgggggtgggggggccccggatctctgggtatgctgccagctccggcttcttggctgccccctcccagcctgcagctcctgggccagagctgcagagcagggaacttcccaggagagtccaggagacaggaattacagacctcccaggccagaaggaagtggggacagagaccccaggacggggcccggggatggccattctgacctcgggcctgtcatttatccggcgggacccggtgggcaagtgggcgagtgtggtggcaagggtggggggcggaggcgaacacatgggcaccatcagtctgaggtacacaccggagactccaccctgttcccagcgctcacttctggctcatttcttcgtgcatgtggttccgggacaggtacttgagggcctcatccagcaggatgacaggcagagatatctggagcaccaccacccactggcgcccgctcagtggggtcacctggaaaatgagaggcaggggcggcacgagcaggatgaggaagtgcagggccatggacatggccacagccaccagcagccaggggttcatccagggcggcatccgcagcagcgactggttctccgagacgctgttgagggcattgcacatttcaatggtcacgagcacggacaaggccatggtggtggggaagcgtgactcgaacacctcacagtcgatgccggcaaagagcgggttgtcttcggagcacttcaggaagttcctcagctggtagaagttgatgtgaggtccctcggcgtcatacacaaaccaccaggtggcggcagccactgtggccaggcctacgtacactccgatagccaggtatcggaagaagagccagccactgatgagggcttctcgggggctccggggcagcttctctatgatgtccaggtctggcgggttgaagcccagagccgtggcaggtaggccatctgtcaccaggttcacccagagcagctgcacagggatcagggcttcgggcaggcccagaattgccgtgaggaagatgcagacgacctcgccaacattggaggagatgaggtagcggatgaattgcttcatgttgctgtagatggcccggccctcctccaccgcagccacgatggaggcaaagttgtcatctgacagcaccatctctgccgccgacttggccacggccgtgcctgagcccatggcgatgccgatctctgctttcttcagggctggtgcgtcgttcactccatcgccagtcatagcagtgatctcgttaaaggactgcaggttctccacgatgcgggacttgtgtgcgggctccacgcgggcgaagcagcgggcggtgcggcaggcctggcgctgctgctcggggctgaggtcatcaaactcgcggcccgtgtaggccttgcccgccacgtcttccgtgtccccaaagatgccaagcctgcggcagatggccacggcagtgcctttgttatcccccgtgatcatgaccacgcggatgcccgcctggtagcagcgtgtgatgcaggcagccacctcaggtcgcggcgggtccagcatgcctacgcagcccacgaaggtcaggtccgtctcgtactgcacaaacttgctgcagtcgtccagctccatgtcctccttccttgggggggcgtcccgggtggccagtgccaggcagcgcagcgtgtctgagcctgagccccaatcccggatctttgccaggatctgctccctggaggtgggggtcaggggtgctgtgcggctccccacgcggactgagctacagcgctcgatcacactctcaggagcccccttcacaaacatcttgctgccctggccagtagggtgagggcgggtgggcgtgcagtacacggacatggatttccggtctcgggagaactccagggtgaactccttccgcatcagctgcttgatgaccgtgttacaggcgccagctcgctccacccgggacagagcctgcaggtcggtgtcgaacacgttcatcttctccaccaggcaagtcagagctgtctccgtggcctctcccaccttctcatacacacccttggcctcgttgtagtccagagccgagtcgttgcacagggcgcagatggtcgccagctccaccagcccgtcgaactggccgcagcgcacaggctgatccccctgccgcacttcgccctcgggggtatacgtggtacccgagatggtgaactcgtgcaaaaggcaggagcccgcatcggcctcggctaccacgaacatccggcagacagacatctgattggtggtgagcgtgcccgtcttgtcggagcagatgactgaggtgcagcccagggtctccacggacggcaggcttcgcacgatggcgttcttgcgtgccatgcgccgcgtgcccagtgccaggcatgtagtgatgacagccgggaggccctcggggatggccgccaccgccagggccacggcgatcttgaagtagtagacagcgccacgcagccaggagccaccgtgggccgggtcggcgaagtggccgatgttgatgacccacacggccacgcagatcacagagatggcgtgggacagctgccgtccaaactcgtccagcttgcgctgcagcggcgtccgctcgggctcgactgccgccatctggctccggatcttgcccagctccgtgtgcaggccggtggccacggccacacccaccgctttgcccgatgtgatattggtgccagaaaacagcatgttcttcttgtcctggttcacagctctggggtctgggatggcctctgtgtgcttggtcacggacacagattcacccgtcaggatggactggtccactcgcagcgtggtggacttgatctcgatgaggcggaggtcagcaggcactttgtcccccactgccacttctacaatgtcccctgggacgatgtcccgggcacggatcctctgcacgcccttgcggtccgagcggatcaccttgcccatctcaggctcatactccttcagggcctcgatggcactctcggcgttgcgttcctgccacacgcccacaatggcgttggccacgaggatcagcatgatgaccaggggctccacgaaggcggtcgtggtctcctcgccctcctcgaaccaggccaggacaaaggagacaagggcagccagcagcaggatgcgcaccaggaggtcctcaaactgttccagcaccagctcccacagggacttcccttcctcactcgggagctcgttggggccgtagcgctcccgcgcgccggtcacctgcgccgggctcaggccgccctcggctgtcaccgagaagtggcgcagcacgtcggcggccgggagcagatgcgccgcctccatgccgcccgcccggccgtctgcgccgtccgcaccgtcgaggccgcctctccgccggggggctacaaagcggggcgcgggggactcgggcccgggcgggcgccgcgcgaggccatgtccgtgctgg

SEQ ID NO: 77214 - DNA, 1352 bp, Homo sapiens; identical to SEQ ID NO: 59753

SEQ ID NO: 77215 - DNA, 4790 bp, Homo sapiens; identical to SEQ ID NO: 59754

SEQ ID NO: 77216 - DNA, 1375 bp, Homo sapiens; identical to SEQ ID NO: 59755

SEQ ID NO: 77217 - DNA, 1014 bp, Homo sapiens; identical to SEQ ID NO: 59757

SEQ ID NO: 77218 - DNA, 5707 bp, Homo sapiens
ccgggtacgacccacgcgttcggacacacctttgtcaggacatgtttggaattttagagttgaaagaaacaaggcggagagaaagaaaagtgaacatttttgaaagatcactcagctttaacacaccttggctgggtctggataaaaaaaaagtgagcactgcaaatttctagaaaaaaacatcaggagaagaaagagagagggggatttattcaaagttgtttccaattccttcaaaacctcaaaccaggtggctatggtatggatgtaaccaagaaaaacaaacgagatggaactgaagtcactgagagaattgtcactgaaacagtaaccacaagacttacatccttaccaccaaaaggcgggaccagcaatggctatgctaaaacagcctctcttggtggagggagccggctggagaaacaaagcctgactcatggcagcagcggctacataaactcaactggaagcacacgaggccatgcctccacctctagttacaggagggctcactcacctgcctccactctgcccaactccccaggctcaacctttgaaaggaaaactcacgttacccgccatgcgtatgaagggagctccagtggcaactcttctccggagtaccctcggaaggaatttgcatcttcttcaaccagaggacggagtcaaacacgagagagtgaaattcgagttcgactgcagagtgcgtccccatccacccgatggacagaattggatgatgttaagcgtttgctcaaggggagtcgatcggcaagtgtgagccccacccggaattcctccaacacactccccatccccaagaaaggcactgtggagaccaaaattgtgacagcgagctcccagtcggtgtcaggcacctacgatgcaatgatcctggatgccaaccttccctcccatgtgtggtcctccaccctgcccgcggggtcctccatggggacctatcacaacaacatgacaacccagagctcatccctcctcaacaccaatgcctactctgcgggatcagtcttcggagttccaaacaacatggcgtcctgctcacccactttgcaccctggactcagcacatcctcctcagtgtttggcatgcagaacaatctggcccccagcttgaccaccctgtcccatggcaccaccaccacttccacagcatatggggtgaagaaaaacatgccccagagtcctgcggctgtgaacactggcgtttccacctccgccgcctgcaccacaagtgtgcagagcgatgaccttttgcacaaggactgcaagttcctgatcctagagaaagacaacacacctgccaagaaggagatggagctgctcatcatgaccaaggacagcgggaaggtctttacagcctcccccgccagcatcgctgcaacttctttttcagaagacaccctaaaaaaagaaaagcaagctgcctacaatgctgactcaggcctaaaagccgaagctaatgacctgaagactgtgtccacaaagggcaagaccaccactgcagatatccacagctacagcagcagtggtggtggtggcagtggaggaggtggcggtgttggtggcgctggcggcggcccttggggaccagcgccagcctggtgcccctgcggctcctgctgcagctggtggaagtggctgctgggcctgctgctcacctggctgctactcctggggctgctcttcggcctcattgctctggcggaggaggtgaggaagctgaaggcgcgtgtggatgagctggagaggatcaggaggagcatactgccctatggggacagcatggatagaatagaaaaggaccgcctccagggcatggcacccgcggcgggagcagacctggacaaaattgggctgcacagtgacagccaggaggagctctggatgttcgtgaggaagaagctaatgatggaacaggaaaatggaaatctccgaggaagccctggccctaaaggtgacatgggaagtccaggccctaaaggagatcgagggttccctgggactccaggtatccctgggcccttgggccacccaggtccacaaggaccaaagggtcaaaaaggcagcgtgggagatcctggcatggaaggccccatgggccagagagggcgagaaggccccatgggacctcgtggtgaggcagggcctcctggatctggagagaaaggggaaagaggggctgctggtgaaccaggtcctcatggcccacctggtgtcccaggttctgtgggtcccaaaggttccagcggctctcctggcccacagggccctccaggtcctgtaggtctccaagggctccgaggtgaagtaggacttcctggtgtcaaaggtgacaaaggaccaatgggaccaccaggacccaaaggtgaccagggtgagaaaggacctcgaggcctcacaggcgagcctggcatgagaggtttgcctggtgctgttggtgagcccggggctaaaggagcaatgggtcctgctggcccagacggacaccaaggcccaagaggtgaacaaggtcttactgggatgcctggaatccgtggcccaccaggaccttctggagacccaggaaagccaggtctcacaggaccccagggacctcagggacttcccggtacccctggccgaccaggaataaaaggtgaaccaggagctccaggcaagatcgtgacttcggaggggtcatcgatgctcactgtcccaggccccccaggacctcctggagccatgggacccccaggacctccaggtgccccaggccctgccggcccagctggtctcccaggacatcaagaagttcttaatttacaaggtcccccaggcccacccggcccacgtgggccaccagggccttccattccaggcccaccaggaccccgaggcccaccaggggagggtttgccaggcccaccaggcccaccaggatcgttcctgtccaactcagaaaccttcctctccggccccccaggcccacctggccccccaggtcccaagggagaccaaggtcccccaggccccagaggacaccaaggcgagcaaggcctcccaggtttctcaacctcagggtccagttctttcggactcaaccttcagggaccaccaggcccacctggcccccagggaccaaaaggtgacaaaggtgatccgggtgttccaggggctcttggcattcctagtggtccttctgaagggggatcatcaagtaccatgtacgtgtcaggcccgccagggccccctgggccccctgggcctccgggctctatcagcagctctggccaggagattcagcagtacatctctgagtacatgcagagtgacagtattagatcttacctatccggagttcagggtcccccaggcccacctggtcccccaggacctgtcaccaccatcacaggcgagactttcgactactcagagctggcaagccacgttgtgagctacttacggacttcggggtacggtgtcagcttgttctcgtcctccatctcttctgaagacatcctggctgtgctgcagcgggatgacgtgcgtcagtacctacgtcagtacttgatgggccctcggggtccgccagggccaccaggagccagtggagatgggtccctcctgtctttggactatgcagagctgagtagtcgcattctcagctacatgtcgagttctgggatcagcattgggcttcctggtcccccggggccccctggcttgccgggaacctcctatgaggagctcctctccttgctgcgagggtctgaattcagaggcatcgttggacccccaggtcccccgggtccaccagggatcccaggcaatgtgtggtccagcatcagcgtggaggacctctcgtcttacttacatactgccggcttgtcattcatcccaggccctccaggacctcctggtcccccagggcctcgagggcccccgggtgtctcaggagccctggcaacctatgcagctgaaaacagcgacagcttccggagcgagctgatcagctacctcacaagtcctgatgtgcgcagcttcattgttggccccccaggccctcctgggccgcagggaccccctggggacagccgcctcctgtccacggatgcctcccacagtcggggtagcagctcctcctcacacagctcatctgtcaggcggggcagctcctacagctcttccatgagcacaggaggaggtggtgcaggctccctgggtgcaggcggtgcctttggtgaagctgcaggagacaggggtccctatggcactgacatcggcccaggcggaggctatggggcagcagcagaaggcggcatgtatgctggcaatggcggactattgggagctgactttgctggaggtctggattacaatgagctggctgtgagggtgtcagagagcatgcagcgtcagggcctactgcaagggatggcctacactgtccagggcccaccaggccagcctgggccacaggggccacccggcatcagcaaggtcttctctgcctacagcaacgtgactgcggacctcatggacttcttccaaacttatggagccattcaaggaccccctgggcaaaaaggagagatgggcactccaggacccaaaggtgacaggggccctgctgggccaccaggtcatcctgggccacctggccctcgaggacacaagggagaaaaaggagacaaaggtgaccaagtctatgctgggcggagaaggagaagaagtattgctgtcaagccgtgagctagccatggcaggacagctcctggaccaggtctcataatgcatgtggcacttaggtccaaggtctccagagggtgaaagctggagtctgtcaatgtcctactgagacagcacagccaacctagctagcaacatttgttttagtctgaacaatatatacttatagaattcagtcaaagatacacaatctgaaacagcttcatggggtggactctaacagtagttgcaatgttttagaatgagacttacttctctgctatctagatctgaactccttggcttctttacttagttcaagccccagcctaggaaagccagttacataaaagttggctcaggagtcttagagctttacctaaatatgagcccagaaaacggaggatgggggtggggcgccttcctggaggtgacacttgatgggggtgtgttctggttactgttctaaggctgtgccatcagctccttcctcccctgttcattctgcattctctagtcagttggctaagaagtgactcttgcaactaaaaaaattaagaaattcacttcccctctaggaggtgatgatagggtttctaatggttatatgtatatcacattcccatttgcttagaaagtctgattgtagctatgattgtccataggcccatactagagttcatggatatgttatactgaaccaggccagagcaaacagaaaaagaaggttgagggcaatggacaaggaaggaataaagggagaagagggaaaacagaaaaccctgatgctggggacacagcatcagctcaagacgtcaccctccattctgcactccagaaaatggcacttgggggactttggcgcattggtcctttaaccacttttcaatgtctaaaaacatttgtttgtggtctataagatgaaacatcatttcaatcgtaaaatttcccattaaagaagtttttttttctaaaaaaa

SEQ ID NO: 77219 - DNA, 797 bp, Homo sapiens; identical to SEQ ID NO: 59759

SEQ ID NO: 77220 - DNA, 696 bp, Homo sapiens
tgaatcatgtcatttattttaaactaattgtaagacaatgaatataaagttcaaaaaggtgtaagcaggtgatggttttattggcaaacttataggggtagtgtatgaagtcatttcaaataacagattaagttgctttccttacaactaaaagcttcaattactacatttcaactttaatttaacatcacatctacatggggaagctttaatttcaggtctgggagcagctggtaaaatggaaagttaccacatccattctagttccttggatatgagtatattccccttcacctttcaccctattttcattgaaatttccagtatactttgccccatttgggaatgtgtaagtccccagtccatgaaacatattatccttaaattgtccttcatatactgctcctgaaaaatgctcaagtcttccaaaaccattcatcttgtcatctttccagcttcctgtgtagacaatcccattaggagtggtatgaatacctattccatttctctcgtagattccagaagatgttcttgtacagtcaccatcatacttgtctccatttggaaagataaagctgatcttatacacttctgaagttggccgagaggtgttagagagatcttccaaactctgcgactccccctgggcggccagctctgcggccgggagagaactaggcgctaggacagctccag

SEQ ID NO: 77221 - DNA, 879 bp, Homo sapiens; identical to SEQ ID NO: 59761

SEQ ID NO: 77222 - DNA, 693 bp, Homo sapiens; identical to SEQ ID NO: 59762

SEQ ID NO: 77223 - DNA, 577 bp, Homo sapiens; identical to SEQ ID NO: 59763

SEQ ID NO: 77224 - DNA, 1963 bp, Homo sapiens; identical to SEQ ID NO: 59764

SEQ ID NO: 77225 - DNA, 6769 bp, Homo sapiens; identical to SEQ ID NO: 59765
  misc_feature (1)...(6769): n = a,t,c or g

SEQ ID NO: 77226 - DNA, 1389 bp, Homo sapiens; identical to SEQ ID NO: 59766

SEQ ID NO: 77227 - DNA, 1302 bp, Homo sapiens; identical to SEQ ID NO: 59767

SEQ ID NO: 77228 - DNA, 836 bp, Homo sapiens
cccgggtcgacgatttcgttctcctcagaagtcgcttagctcttcggtggttgtcacacgtccggaggcctagccgtcgcgtacctaggatgccgcgtggaagccgaagccgcacctcccgcatggcccctccggccagccgggcccctcagatgagagctgcacccaggccagcaccagtcgctcagccaccagcagcggcacccccatctgcagttggctcttctgctgctgcgccccggcagccaggtctgatggcccagatggcaaccactgcagctggcgtggctgtgggctctgctgtggggcacacattgggtcacgccattactgggggcttcagtggaggaagtaatgctgagcctgcgaggcctgacatcacttaccaggagcctcagggaacccagccagcacagcagcagcagccttgcctctatgagatcaaacagtttctggagtgtgcccagaaccagggtgacatcaagctctgtgagggtttcaatgaggtgctgaaacagtgccgacttgcaaacggattggcctaatgaagaagttcaacctggagagatggaaaatcagctctcataactaagttaatttagtataaaaatagaattgatagtgagggtataaagtgtaaccatcagttaaacctctcctgtcattcctagcttccttgcttcagaattgaaatggaagtgggggtgtccctactctgtagaatctgggactgggcaaatgtttgtgtggcctccttaaactagctgttatgttatgattttattctttgtgagttaattagaataaagtcattttcttccaaggtaaaaaaaaaa

SEQ ID NO: 77229 - DNA, 975 bp, Homo sapiens; identical to SEQ ID NO: 59769

SEQ ID NO: 77230 - DNA, 2797 bp, Homo sapiens; identical to SEQ ID NO: 61133

SEQ ID NO: 77231 - DNA, 3021 bp, Homo sapiens; identical to SEQ ID NO: 59770
  misc_feature (1)...(3021): n = a,t,c or g

SEQ ID NO: 77232 - DNA, 1625 bp, Homo sapiens; identical to SEQ ID NO: 59771

SEQ ID NO: 77233 - DNA, 1383 bp, Homo sapiens; identical to SEQ ID NO: 59772

SEQ ID NO: 77234 - DNA, 1855 bp, Homo sapiens; identical to SEQ ID NO: 59773

SEQ ID NO: 77235 - DNA, 2165 bp, Homo sapiens
gcccactggccagggagggcgccgcgcggaggcgcgttcgtgtctcctgtcaaaagccatgctcgggaggtctgggtaccgggcgctgcccctgggtgattttgaccgcttccagcagtcgagcttcggctttctgggctcgcagaagggctgcttgtccccggagcggggcggcgtggggacaggggccgatgtaccccagagctggccctcctgcctctgtcatggcctcatcagtttcctggggttcttgctgctgttggtcaccttccccatttctggctggtttgccctgaagattgtgcccacctacgagcggatgattgtgttccgcctgggccggatccgcaccccccagggacctggcatggttctgctcttgcccttcattgactcctttcagagggtggatctgaggacacgagccttcaacgtccctccctgcaagctggcctctaaggacggggctgtgctgtccgtgggagccgatgtccagtttcgcatctgggacccggtgctgtcggtgatgactgtgaaagacctgaacacagccacacgcatgacagcccagaacgccatgaccaaggccctgctcaagaggccgctgcgggagatccagatggagaagctcaagatcagcgaccagcttctgctggagatcaacgatgtgaccagggcctgggggctggaggtagaccgcgtggagctggcggtggaggccgtgctccagccgccccaggacagcccagctgggcccaacctggacagcaccctccagcagctggccctgcacttcctgggaggaagcatgaactcaatggcaggaggtgccccgtccccggggccagcagacaccgtggagatggtgagtgaagttgagccacctgcccctcaagttggtgccaggtccagtccgaagcagcctctggcggaggggctactgactgctctacagcccttcctgtctgaggccctggtcagccaagtcggggcctgctaccagttcaatgtcgtcctgcccagcggcacccaaagcgcctacttcctggacctcactacaggacgaggaagagtgggacacggggtgcctgatggcatccctgatgtggtggtggagatggccgaggcagacctgcgggccctgctatgcagagagctgcggcccctgggggcctacatgagtggacggctgaaggtgaagggcgacctggctatggccatgaagctggaggctgtcctcagggccttgaagtagcagccttggctgactttccagagcccagtcccaagcctggcaccaagcctgaggggcctcttggaggaggaggtgttcatctgcaccacagagagttgaggccctaacaaatttcaggcccagccaagagcccatgaatggaggctgcaggaggctgagtccggctgccatgcacgtctcccctacagtggttctctggacaaggctttgtccatcccggtccccagctgagtgcccagcgctgagctgggtgcacggtgtgattccaggaggagagccaggcctgccctgccctgctggcttcctgactggagagacaggacccacagaaacagcctgacagcagctggtttggtccttgtgtgagggaccaagcatgtggcccaggctctaagctctgcggggattggagagggatggggagggaagggaaggcagctccaagaagaggtccctgtggcgaagttacctggggatcctggctggcccaccttcctggctgcagtccaggcccgtgctggcgggattgggcatgggaaggagcagggcctgctgcttccctggcgctgctcccaaagatttctgactcatctgccagctccgtcctgcatgcctggcgagctggggcccagggcagcatgaaggagagccctgcgttctgtgcttcttaccagaggtttgcaagcctcagacaaataaatgtggtgtttacaatgtaaaaaaaaaaaaaagggggggccgttttaaaggatccaattttacttccgcgggcttgcaaggtaatattttttttttggggcccccaaaattaaattccccgggccggggtttaacaacgggggggggggaaaacccggggggttccccaatttaatcgctttggagaaaatccccttttccccgggggggg

SEQ ID NO: 77236 - DNA, 1333 bp, Homo sapiens
ttttttttttttcttgaggcagggtcttactctgttgcccgggctggagtgcagtgggacgatctcagctcactgcaacctccacctccagggttcaagcaattcttgtgcttcagcttctgcatagctgggatgcccagctaatttttgtattttttttagtatagattttggccaggctggtctcaaactcctgacctcaagcaatcagcctgccttggcctcccaaagtactgggattacaatctgatttagttttacaaatgactaacaaacttcaaaaaacattcatagagtcaataatgtattatacatcttagatttatacatttcatatatgcttttaaagcttcaattaacagttcaatacaaaatttaaaaacaaatatatgcagcagtggttctcaggcacagaactgaggaggagactggagcaagtcttttccctaggcatacattacccgtggatactatgaaccatgagagtggtatgtttccttctgacctagctgcctttttgattgaattttgttacaatgaacagctttaataggtatgatattgctaactggaaacaatgagatttaaaataaattgataacctgtattttcttgaagtctttaagacctaaaatgattacttttctcctaatagagctccagaatcatccaatgaaaataatattgtccataaagcatctagagtatctgcctaagaaccactgcccagggttattcaatgtcttcaggcctcacaggatgaggtaatggtatgatggatttcttctcagtatccctggaaagtgctttcctcatatcataagcgtcctcatcaggctccccgttgctggccgaatagtactctatgaccgtcctatatacactgtagcccaactgcttgtacatgttaactgcaacttggttagatactcttacaaagagatccacaaaaaatccaccctttctttctgaaatctcctctagtaactccataagtttagcagccaaaccaaggcgtcgaaattctggggcaacagacagagctgtgacgtgcccgtgccattcttccctagctactgagccttctgctttacccataatataacccattaattctccaccaggtgcctctgcaacaatgaaatactctggccagtgggcgaggtattgtaggtagaaaggaatcccataagtttctgtaagtggatccaagttaatgttgttgaagcggaacaggtcgtcgcaggtaaaggcccgtagcgtggtcatcgcgccgccgccgcttccgaagaccgttcgccaagaccccgcgcccgccctgccggaagtctcc

SEQ ID NO: 77237 - DNA, 2560 bp, Homo sapiens; identical to SEQ ID NO: 59777

SEQ ID NO: 77238 - DNA, 3369 bp, Homo sapiens; identical to SEQ ID NO: 59778

SEQ ID NO: 77239 - DNA, 3722 bp, Homo sapiens; identical to SEQ ID NO: 59779

SEQ ID NO: 77240 - DNA, 1139 bp, Homo sapiens; identical to SEQ ID NO: 59780

SEQ ID NO: 77241 - DNA, 3395 bp, Homo sapiens; identical to SEQ ID NO: 59781

SEQ ID NO: 77242 - DNA, 4794 bp, Homo sapiens
ggcacttccgggtcgacgatctcgtccggtgggcccgcggaggaaagatactggggagggggagccgcggtgttcagagcgatgattcccccacaggaggcatccgctcgacggcgggagattgaggacaagctgaagcaggaggaggagactctgtccttcatccgagacagcctggagaagagcgaccagctcactaagaacatggtgtctatcttatcatcctttgagagccgccttatgaagctggagaactccatcatccctgtgcacaagcagacggagaatctgcagcggctgcaggagaatgttgagaagacgctgtcctgcctggaccatgtcatcagctactaccatgtggccagtgacactgagaagatcatcagagagggccccacaggtaggctggaagagtacctgggaagcatggccaagattcagaaggcagtggagtatttccaggacaacagcccagacagcccggaactcaacaaagtgaaactgctctttgagcgcgggaaggaggccctggagtccgaatttcgcagcctgatgacgcggcacagtaaggtcgtctcgcccgtgctcatcttggatctgatcagtggtgacgatgatctggaggcccaggaggacgtgaccctggagcacctgcccgagagcgtgctccaggatgtcattcgcatctcccgctggctggtggaatatggccgcaaccaagatttcatgaacgtctactaccagatacgctccagccagctggaccgctccatcaaaggactgaaggagcatttccataagagcagttcttcctctggggttccctactcccctgctatccccaacaagaggaaagacacacctaccaagaagccagtcaagcggccagggacgatccgtaaggctcagaaccttctgaaacagtattcccagcatggtctagatgggaaaaaggggggctctaacctcattcctctggaagggagagatgacatgctggacgtggagaccgatgcctacatccactgcgtcagtgccttcgtcaagctggcgcagagcgagtaccagctgctggccgacatcatccccgagcaccaccagaagaagaccttcgactccctgatacaggatgccctggatgggctgatgcttgaaggggagaacatcgtgtctgctgcccggaaggccattgtgcgacacgacttctccacggtgctcaccgtcttccccatcctgcgacacctcaagcagaccaagcctgagtttgaccaggtgctccagggcacggctgccagcacaaagaacaagctgcctggcctcatcacatccatggagaccatcggtgccaaagcgctggaggacttcgcagacaacatcaagaatgacccggacaaggagtacaacatgccgaaggacggcaccgtacacgagctcaccagcaatgccatcctcttcctgcagcagcttttggacttccaggagacggcaggcgccatgctggcctcccaagagaccagctcttcggccaccagctacagctctgagttcagcaagcggctgctaagcacctatatctgtaaagtgctgggcaacctgcagttgaacttgctgagcaagtccaaggtgtacgaggacccagctctgagcgccatcttcctgcacaacaactacaattacatcctcaagtccctggagaagtctgaactgatccagctggtggcagtgacacagaagactgctgagcgctcctaccgggagcacattgagcagcagatccagacctaccagcgcagctggttaaaggtgactgattacatcgcagagaagaatctacctgtgttccagccgggagtcaagctccgggacaaggagcggcagattatcaaggagcgttttaagggcttcaatgatggcctcgaagaactgtgcaaaatccagaaggcctgggctattccagacacagagcagagggacaggattcgccaggcccagaagaccattgtcaaggagacctacggggcctttctacagaagtttggcagcgtgcccttcaccaagaacccggagaagtacatcaagtacggggtggagcaggtgggcgacatgatcgatcgccttttcgacacctctgcctgagcctgctgctagccctgcctggttccaccagactggcgtgtcattggacagataaaccagtgttagcttgcctctgggctgggtgagcttgaagtcctctgggacagagacctgtctccacgcctccgggagctgtgtccctgagccccctagtcctggctcctgctttttccccacagcccgtgttcccagccgaaccagcactctcccggaagcctggggtccctccacaccttggcttttatgaccctgatggcttctgaaacaggaaaagagagaaggaagacagaggcctgtgcccactgctgctccatgtgtaccaagagcagcagggcagaagggccctccctccagcctaggtcagaggtggggacagagaactcccctacagcccagagatgtggcagggctcagagaagcagccagagctcctggaggaaaggcagtcgggactgaccccctctcttaaaacacattcccgcccgcccacaggcctgaggtctgggacctttccctcccaggagtcccctaggtggctgggggaggcaggctcactggccattttccctagagtccagcacactgcaggaggcgttcggaggaggagttccgccccaccctctacagccttcctcaggcccctgtctctggcccccagcctcagtgcctcttggcccagggccaggcagtcgtggttgcagaaggagcaattaggctgcctgcctgtgggctgggagacagggacaatggggaaaagttaaggagcaaaatgggggttggaagcaaaaaatagggccccacctatttaggacgagattgaagactgacccttgaggcacacttgcactggagatgggtttatttcacgctctgtgcttgtgtgctagcggagggagagctcagggtggcttaatccagaggccctgtcatggcccgcccccagccatgggaaagcaaacttcatcctaaggtgtgcagcccaggccctgcccctttacagtctaggccgcctgccatggggtgcagcctctccaggggctgcgtcagacttgcacgctgcccacatccagattcctgcaaagacgaattgggtgcacagcaccccaaccacatacacgaggaagaagatgcggtcagcagtctcaggccagcttctctgtgacccctttactcctctggagggctctgtggggagagatacagggaaaggagctgttcttcaaggtcccctcaacatgagcggaagagcgaaccccaggggtcatcagcctgtatcgcttcctttcttagattctcagctgatgaaaatttgggtctggcccatttcaggccatcttcagttgaagaaacaccctcttaggctgtgcaaggcatgggttatcaggggattgaggtcacctgggacttcagggaggctcagcttgctccctgccccagacctgtttcttctaagggaggaggacatggtggagaccagggacaggagagccagcagggtggatgcaaggggcctctacccacacctggacctccgtgccctcaccccagccctaggtgtgcacctaggcctcattccttaccccccagcccctgcccaccttcagcaggatgaggccctgggttgccgtgctctcgctgttcccctctcggggctgggctggggccgctcttggccccaaggttgccccgggccagcagcccagccagcagcacagtctctatggtgctgaggaagagcagcagcagcaggatggtgaagtagtaaactgggggaggcagggcacagggagatgctcaggggccagtccctgtgtctctggtgcccagcgagctgagcaccagtgggtgaccggggagaaacagggcagactgggtaagggagcagggcttactgagcagtgggttgcaggaggaggagctgggcagggcctgcaccagggaggagtggaggacgaggtaactcagcagcaatgtcaccttgtagcctatgcgctcaatggcccggaggggcagcaaccccccgcacacgtcagccaacagcagtgcctctgcaggcaccaagagagcgatgatggacttgagcgccgtgttcttcagcctcagctggaaggggaaaagtcagggccttcccggcgggggggaaggaggtgggcatcgggggcatggggcctggcctctggccgtgcatcctcactcccacccgcctccagcagccctctgtcggcctcctcccgacttgactcaccgtcacctggaagcagggcaccagctgctggggtgggacttgggtcttcagatcataaactacgtattccctcttgacactcacaatctcgttcaccacgtgggcctggaactctaactccattgctgaggggtgggaatgagaactatgaaccaggaaggagagatcccagctgccaagtctgggggtagcagactggagcccaggggtgatggagacttttgatggcttttggcagggacagacttggacacaaaaccgatccatagaagggcttcccaaaccttgttttgcaacatcccaaattgtctccagttgaaggaaggcctttatcagattcatagatgagctttcattgtaaaaataaatgtactttgcaccacttcaaaaaaaaaaaaagggggcgccctttc

SEQ ID NO: 77243 - DNA, 3707 bp, Homo sapiens; identical to SEQ ID NO: 59782

SEQ ID NO: 77244 - DNA, 4684 bp, Homo sapiens
tttttttttttaaatttgagatggagtgtcgctttgtcgcccaggctggagtgtaatggtgcgatcttggctcactgcaacctctgcctcccaggttcaagccattcccctgcctcagcctttgagtagctgggattacaggtgcacgcccccccacccaggtaatttttgtatttttagtagagacggggtttcaccatgttgctcaggctggcctcgatctcctgaccttaggtgatccgcccacctccgcctcccaaagtgttgggattacaggcatgagccaccgcgcccggccttcctggtagtttccattccatctccctgtatttttctcttatcactctcgaagtctatctttcttgttcttttcctccctagctttttttttttaaacactcctttcaagctgtgtccaacacccacaaggaatgactatttttaactaatcttactgacctcatttaatctattcaataaaacctctgccctaaggagcaaagaaacttgcagaggaagtaaggcaaactggaagaagcatactgtcagcggattaaattcttgagcaaggcaatactccttatggattcttcccatgtacaatccgtaactcttcccatgggcctttatatcaaccctaagataattacactcctgcctcaaaataaaataaaataaaacccaccacatcttgtattgtagacatcccagctgcatgttaagctgagtgaaagtaccatgctgtcttttaaatcactttatatctacttaatcatcccacagtaacccgagttgaagaagttactttggtttctcataaatgaatatgcacgtgctgaacatatcggaaagaaccacaccctctcactgatgaacacgttggcagttctcccaactgttttatcaagagaagctagaaggtaaagaaaaggaaacagagccctataggaaaaatgattgacttcacacgtttgagcgatttgggcttcagctatgactttgctggagtacagatgggtgccatcagagcacaaagctgagcaaacctctcttcttaccctgtgccctccctgaatttttggatttctgagcttgtctactaccaacaaatgttttaccctccagtgcacctttgacagtatacagctctatttttcaaacggcaagtatgttatccaagttcagagatgcaactgaggaattaacatgaaaaccatctttcactcaataaatcagaagctgctagttaagtaagcctcaagaacctaagaaaaaacaccaaagtgtaagtattactcagtcaccaatctaaagacagaactttgactcaaggtagaaatgaaaccgtaattatataaatatatttataaatatttatacaattatatacttatacataagcacttacacagacttagaaaaaaatttaagaacattaattcaaaaggactcactgaagaataaacagatttttccatgatttccttgaggagatataaaactcattctttagggagagttcctcaaaattcaaccattagaaaccatatcctataactgtgtactagcaacacatggcatctttttttcttcttttcccaaatcccctaattgccaagagagcaatcttaaagtagatgaaaacctaaaggtctctacgcaacatctgaggaacatacgctcctcagataaaagaatcaatctaaatcctcaactgacaaaaaggtccatttaatatttttcattttacaagttaaaagttctagttttgccaccagaatcacgactacccccccttcagaggactccatttaagctcaaaatacgaaatgagcatagggtgaagttgatgtgtaaatggtattctacagattcaagatggcctcttctaaaaacactgaagaaagctttcaccaactctaatttgattttgggttttgttggcagaaaaagcccaagacatctgaaaattactagtaacctccgccatcctccttactaaatgttgtcttctgaatggagttgaaaggtcttccccttagagaggctttccgttttgataccttttgaaagaaaacagcatgcggactcatgttcaattcagtcaccagagccttttagagactattccaaccaggggcaaaaaatgaaccattatttctaaccaaaagaacatggttagcaactctcagctgaatggttttctttttccccagggacatacctaagtatgcctgaaacaacacaggacaatcaataaccatagtggttacaattccaagccattgtactacatgattattgaccagctgccttcctacagatcactgcagactcagacaatggagggctccaaaggaactaatatgctgtgctggcaaaaatagcaagcaccttcctatcccagtcaccacgataggttcacttcatgtccattcttggactagcaggatcaatacagagtaataaggaaaactgtctcaggttaggacaatgaaagtcaccccatgctatatgctccatatttaacactcattctgccaataacacatgtcatggaaatagtccttatagctgggaacatgaaaatcctttgaaaaaggtttttaagtatgatgagcaatcattacaagggatgctttttccacgtaaacaaaagcctggatattttgttaagcgacatttccacatgaagaacacaacaaaaccaaacccatgttagagaatttcttctccctgctaaacacggggacttacaaaaaagggagggttgttcttactctgaatctagccattcctttgcccgaagagtctggggagtaacgttaacatttgatcccaaaaaagtgccgtgcaagagaccacttactggaacacacaattcctgctgctagtactaggagaggtcttatccttacacttcagtttggtcaccagattaggtaagaaagaaaagtgtggggggagggggaggcagaagggtacggagtggggagcgagaaaacagaagaggagaaagaaacaaagggggagaaagagactgattataggagagatcaagaaataagagaaggaaggtgacttgcttgcccaactttggctctgtggtcctatgagccaaaatgcatacttagtgacatgtatctcacaggaaaagggaaaaaaggggtaagctgagagaggtcaagccatggtgttaatttctttcctgtacaaagacagtctcttgaggacaaaggcctgcctcttgcaatgtaatatcatagtccagatgagataatttccttcgaggaaagttggtgagaagttcaaaacgttcatttgggtatcctttagactgcacgtgcttcaccaaagctagcagtttagcttgctctggaagagtgatctgttccctttttccatctggataccgcaacatcagctgtgcttttggtccatttacatctatcccctccactactccatctgctttttcaggtggcatctccagtatctctgaatccacagctggcaatccttggtggtttgtggctgttccaggatcagttctgactggtggctcagtcagcggccttctattctcctcttttctatgccccaaatctttgtggggagactttctggacttggcaagattctctacctcttcttcttcatcagagccacaaacggatatgaactcctcactgccagaaaaaagttcagattcagattcttcatctgagcggctatcctgttttgtctgtgttgaatcaaaatgtgtttcttgtaaggaggctctgatggcagcttctagctggctgtcttcacttgcatctataaggctctctgaacgggcacattttttggggggactgctagaaagtccatccagttgtccatgttcacccagaaatcccgtcacttggtccaagaaagaagatacatctaactggtgccattctactagcttctgacctgtccgtgggtccaatatggaaacataggggaaatcccctaacttataaaactgtatgtatctctgaccttcctcactgtcatgataaaccttccagaaaatgaaatgttcccggataatattcttcacagcttcgttgctccacacatcgcggttgaggcactgacatgcaaagtcttgaacattttgaatgtttatcatcagccacttattttgcatctggccacactctttggctgtttcaaagctgcctttatgcatcaaatcaatgggtggccggaatagatctgcaagggtagttaatttcttatcgatagctcctccatttcttaattcttgttcttgccgaatagtttcagtctgaaaatcccggaaaccatcaaaaattgaacgtgcaggccgtcgtcttttaggagcaccaaataatggttctggttccaccagtatttcctgcttttgaggaattggggcacgaacttcttcttctgtgtgtggtctgacagtagagacacttgctgaactggtactgggctcttcagcgattcctccaccatccaaaaacatagtgactgccatttccagattattgttgcacgcttcaagcatatgttttcctacactttcacttgcaccggtaatggtggtgaactgttgaattaaccccttcagcgccgaggacgccgcggagcccccgtgggcagccatcttaccgccgccacgaaa

SEQ ID NO: 77245 - DNA, 4746 bp, Homo sapiens; identical to SEQ ID NO: 59784
  misc_feature (1)...(4746): n = a,t,c or g

SEQ ID NO: 77246 - DNA, 2139 bp, Homo sapiens; identical to SEQ ID NO: 59785

SEQ ID NO: 77247 - DNA, 1625 bp, Homo sapiens; identical to SEQ ID NO: 59678

SEQ ID NO: 77248 - DNA, 3474 bp, Homo sapiens
gaagtgtcccctcctacttcttgctgcctcacggttgctgttgcagacccaggagtctctgaaggcttccgcggctttggggccggttgtgagatgccaggcagaggccgctgcccggactgcggctccacggagctggtggaagactcgcactattcgcagagccagctggtgtgctccgactgcggctgcgtggtcaccgagggggtccttaccactaccttcagcgacgagggcaatctccgagaggtaacatattcccgaagcacaggggaaaacgaacaagttagtcgcagccagcaacgaggtctccggcgagtgagagacctttgtcgagttctgcagttgccaccaacatttgaggataccgcggttgcctactaccaacaggcatatcggcactctggcatccgagcggccaggctgcaaaagaaggaggtgttggttgggtgctgcgtcttaatcacctgccgacagcataactggcccctaacaatgggggccatctgcacgctgttgtatgcagatttggatgtgttttctagcacttacatgcagatagtgaagctcctgggactggatgtgccatctctgtgcttggcagaactggtgaagacctattgcagcagcttcaaactgttccaagcttcaccttctgtgccagccaaatacgtagaagacaaagagaagatgctgtctcgaacaatgcagttggtggagctggcaaatgagacgtggctggtgaccgggaggcatcccttgcccgtcatcactgctgcgactttcctggcttggcagtcgctgcagcctgcagatcggctttcatgttcccttgcccgattttgtaaattggcaaatgtggacctgccctacccggcgtcctcccgcctgcaggagctgctggctgtgctgctgcggatggctgagcagctggcctggttacgagttctgagacttgacaaacggtctgtggtgaagcacatcggtgaccttctccagcaccgccagtcactggtccgctctgcctttcgggatgggacagcagaagtggagacccgagagaaggagccaccggggtggggacaggggcaaggagaaggggaggtgggaaataattccttaggtttaccccaggggaagcggccggccagtcctgcccttctcttgccaccctgcatgttgaagtccccgaagcggatctgccctgtaccccctgtctccactgtcactggagatgagaacatttctgatagtgaaatagaacagtatttgcgtacccctcaggaagttagggactttcagagagcccaggctgctagacaggctgccacgagtgtccctaaccctccctgatggatatccactgggagcacttcatcctgttctgacagcttgataacattcctgttataaccaaggatggaagtgtacaccagtccgtaggtattgcttttcttgtttgaaggaaccaagaggggctctgccattagttggaccctgggtcctggagtaaagtcaggagtgcagggatgactataggtaggagagattcccatcccttggtgtgggagagcaagttgcctatgtccatgttctgtgagatggctttcctcatagatggatgggaaaatgtcaggctctttgctgctggtttgaattggacacactgctgcggctcctcctgcaggcctgagggggcttccctctgcttgtggagtggttggcattcccagcagtatcaaccctcaaaggagcgggaactggggaattctggccctacgtgcattcacaggcaatgatgggtttgtgtgtatggtgtcatgagatcctctacctcataacaaaaggacagtgggtagactaaggcagtagctcaaagggctttgcaaaattttaatatattaaaacaagaggcatctgctagaaaacattctattgtataaaacccgagttcttaaaaacatgttttctttggcactttcattccctccctcccctttccccagcatattgcaaaaagctctccagtgctaaggcattggcagggtgtgtaaacagcagccagcatatgtggaagaataatacaaagcttttttttttcttctaatatgtctgtgcagcaagcataaataacaggacccattccaaggagtgtgtgtgggttttccccctcccctgtgtcctctgtcaccttggtgatgaggccagagtgatgtgaagactgggagggaaccctaggtcagaccttggtttcctgttgttcttcccaagacccagggttccctcggtttccatttggtcctgtagtgaaatgctggtggttggttttaggttggggaaaagacgggtgctggtgtttaaaaggagtaaaggcataggcccctcatgacctgcagggaccccagccactgcctctgggcttggcttgagctcctgggagtcgggaagctggtttgacattttgtaggtttctctctactgtggagctggagatcaaatgattgggatggttcttcctctggccttacggaggcaaggaagtgctcttccttagtcccgtggtgttgtaaggctgagactagggagatgggtcttgtaactgaaaagtaactgcttctccaaacaccacctgcagctatctggggcaccattgtttacaggactagctttagggcatgactagattctgccccagttccacctgccctctccctctactcccctcagttcacccacaggcacctggcagtcagctgttgaggtgcagggcctcagctttgtcatcgtgtgccacctctgaaccctgctgtctggtttaagtaccactcctgtgggaatggtggcattgttcctagttgtgccccggttcccactcccctcccccaggactggttgatgtctagagctgcctttcacgtggccccaccctcccctcttgcatagtggatctgaaaagcagcaccttgtgacttaacatcacctgcttcatgtgctgggctagctctcgtgccagccaaactcgggaggaaaagggacctaggatctaggcaggggctgggctgaaatcagtagagggcagggaggaaagaacacagttcccacgctctcatctctgctttgctggtgaggctgatggcccccagtgaggccgcatggacagtaggcggggtgggagtacttggggagggtgcacctgggatgtgctgtgccctttcacacagacggaggccttccccgttcctgggagggcaccgacagtcagactgccccgggctggacggaaatgtattatgcgtgtttctgggattgtctgtcgctaccccagagggatgccctctaggcaagtggggaacatccgcctgtgggcttcctccagccatcggctcctctgcctccaacctgctgactacggagacaccttggagggccccgaggagcgggggaacgagccgcgtggccagcccgtctaccgcg

SEQ ID NO: 77249 - DNA, 1973 bp, Homo sapiens; identical to SEQ ID NO: 59788

SEQ ID NO: 77250 - DNA, 1465 bp, Homo sapiens; identical to SEQ ID NO: 59789

SEQ ID NO: 77251 - DNA, 1812 bp, Homo sapiens; identical to SEQ ID NO: 59790

SEQ ID NO: 77252 - DNA, 405 bp, Homo sapiens; identical to SEQ ID NO: 59791

SEQ ID NO: 77253 - DNA, 1976 bp, Homo sapiens; identical to SEQ ID NO: 59792

SEQ ID NO: 77254 - DNA, 3629 bp, Homo sapiens; identical to SEQ ID NO: 59793

SEQ ID NO: 77255 - DNA, 920 bp, Homo sapiens; identical to SEQ ID NO: 59794

SEQ ID NO: 77256 - DNA, 860 bp, Homo sapiens
ttttttttttttcacagccacatatatgtttattctgcgagtccgtgtcccacagtctgagactcttcttcccctccccttcccgccccgtgaagtggcccggggccgagccccgcctccatcttggctcagccaattcccacccagtttccaggagtctcatttgcatttccgggagcagctgtccaatgggaaggcagcaccctgcccccccccacaagggggcggcactcctggtggatcgcaccactcttgggatccagggatggggggaacgggcttccactgaggtccgggtgacaggagggtggtcttccctcaaggcagggttggagttcagtggaggagggagttctggccttggaagaggcccagcagtccgctgtctggggcgggctccttgatgagtttctggatctccttgaactgggggtggacggcatcgcccacaagctgcagaatgagcccttcgctggtggagaggaaggcaccactctgtctcatgcgggccagagccaccagccggtccacctggctgcgtgaggagcaggcgtccaccaccacatggacctgcagcccccggtctaggaggtccagggtcgtgttcttgagcatgcgggcagccactgagacgatctgtgggaagtaggcgatgttgtggcggaacttctcctgcatgtcacacaggaacaggacagaggatcctgggaggactcggcccaggctgggcctggcagccgccattttccggaaggtgccgggttcgagcccggaacggcccctctgcaggtgaggcgggggcaccctcacctctcggcgctcggacggccaccgctgaggcctcttgcgggcttcccagg

SEQ ID NO: 77257 - DNA, 4670 bp, Homo sapiens; identical to SEQ ID NO: 59797

SEQ ID NO: 77258 - DNA, 2624 bp, Homo sapiens; identical to SEQ ID NO: 59798

SEQ ID NO: 77259 - DNA, 1544 bp, Homo sapiens; identical to SEQ ID NO: 59799
  misc_feature (1)...(1544): n = a,t,c or g

SEQ ID NO: 77260 - DNA, 7086 bp, Homo sapiens; identical to SEQ ID NO: 59800

SEQ ID NO: 77261 - DNA, 1883 bp, Homo sapiens; identical to SEQ ID NO: 59801

SEQ ID NO: 77262 - DNA, 1144 bp, Homo sapiens; identical to SEQ ID NO: 59802

SEQ ID NO: 77263 - DNA, 790 bp, Homo sapiens; identical to SEQ ID NO: 59803

SEQ ID NO: 77264 - DNA, 1783 bp, Homo sapiens; identical to SEQ ID NO: 59804

SEQ ID NO: 77265 - DNA, 1331 bp, Homo sapiens; identical to SEQ ID NO: 59805

SEQ ID NO: 77266 - DNA, 1612 bp, Homo sapiens; identical to SEQ ID NO: 59806

SEQ ID NO: 77267 - DNA, 2701 bp, Homo sapiens; identical to SEQ ID NO: 59807

SEQ ID NO: 77268 - DNA, 816 bp, Homo sapiens
ttttttttttttgagagtgacaaaaaggtttattcctgtgcttctcgcagcattaggcaggggataaaacttggagagaagggccttggtgtggaggtggagggactcctgtgggcttcactctggtaggaggagagcatcagggcaggcctttaggctgttgctctgggcagggggtgggggtgcgggggcttacagtgggggcccttagttggcacaggttcggaagggccccaggcagacatgaattctcctgagacttgaggtaggttgcttcagccagcccgggcggagaagaagggcagagagcgaacataggagtccagtcgggagcgaaagagctcactttgcacagtttggcccagcgggcacaggggattcttcaccaccagctccacatacagcgcactgtagatgtggtgcagcacatctcggatgggtcccacgcccaagtcagtattcatgacaactttgatcccagtgggcgtctcgtagtaatggagtttgtaacggctagtttggaaggccaggaagccatccttcatgtctagcggggacatcttgctgacaaacgagcggatagagaagagcatcccgtacatcagcttatactcctcctccttgggaatccctgcttgcttcttgcggtgccattcgctgtagtgcagacacactccattccggtcaaacaggtacaggttgtggacagtcatctgcagggcagggagtgtgagcctcgctccggggccgcccccactccttgggctcgggttcccggacccacagccttccaaccaggtggggaccccacccacg

SEQ ID NO: 77269 - DNA, 2262 bp, Homo sapiens; identical to SEQ ID NO: 59809

SEQ ID NO: 77270 - DNA, 772 bp, Homo sapiens; identical to SEQ ID NO: 59810

SEQ ID NO: 77271 - DNA, 1038 bp, Homo sapiens; identical to SEQ ID NO: 59811

SEQ ID NO: 77272 - DNA, 1575 bp, Homo sapiens; identical to SEQ ID NO: 59812

SEQ ID NO: 77273 - DNA, 805 bp, Homo sapiens; identical to SEQ ID NO: 59813

SEQ ID NO: 77274 - DNA, 3484 bp, Homo sapiens; identical to SEQ ID NO: 59814

SEQ ID NO: 77275 - DNA, 2089 bp, Homo sapiens; identical to SEQ ID NO: 59815

SEQ ID NO: 77276 - DNA, 755 bp, Homo sapiens; identical to SEQ ID NO: 59816

SEQ ID NO: 77277 - DNA, 984 bp, Homo sapiens; identical to SEQ ID NO: 59817

SEQ ID NO: 77278 - DNA, 1344 bp, Homo sapiens
ttttttttttttcttgatacagggcctggctactgttggcccaggctggagtgcagtggagtaatcatggctcacctcagctttgacctccagggctcaagtaatcctccctaatacgggcatttctctcatcgcttcagaacccgccccacaaccaaacattcagatgcttattaaggcaacaaaacaagtgacagacgggacaatttttccaattctagatctaattgattaggctatgtctcatgaggagactgtacttgacctctaagctagcatctggaatacaatcttccagcggcttagggaaggtcggtgatagtagtatcgtcaggatcaattccgaagtgcagcttgccgtccttggcggctgcccagggcatggaggtggaggtccactttgccacccagtctcctgttttgctaaccacgatgaggccacctaaacctttaacccttgacttcatataacccaacgataggtccgcagcctcttctaccgtctttccttgttctatgtggaacagggtgagtctagccaggttcaccttcaggatgctttccccatgccctgtggttgagacggctccgatgtcattgtcggcataacctccagctcctagacacggtgagtccccaacgcggccgaccattttattaacgataccgcctgtggaggttgcgtaggctacattccctttgcagtccaaggcaacagcacccacggttcccaagtttttttgacaatctgttttctgagcacctttttcatgcttctctttttccaggcgctttttgtttctctctgtcaccagtttttctccaggaatctctggaacccccatagctgctgcaaactgcgctgcgccttggtcagtcagaaagcaatgaggtgtcttttccatgacaagccgagcaagtttaatgggatttgctatacactggactgcggacactgctcctgcagacaggtcttttccatccatgatactagcatccatttcaacctcaccatttgtgttcaagacagacccacaacctgcgttgaactcgggatcgtcttccagggcgacgacagctccctctacggcatccacggcgctcccgccctcccggaggatgccgtagcccacggtggcggctctgaccatgccctggtgcactcgctccttccgatccttggagatgggaccggctccgccgccgtggaccactacgatgggattcatgtcggcggatcccagggcaccgcaggacgcggacgccgagacctcaagctgggtcgagccagccccgcagccgcccggtaccgccgctccccgacgccggctccccacgcgtccg

SEQ ID NO: 77279 - DNA, 1708 bp, Homo sapiens; identical to SEQ ID NO: 59819

SEQ ID NO: 77280 - DNA, 1793 bp, Homo sapiens; identical to SEQ ID NO: 59821

SEQ ID NO: 77281 - DNA, 2342 bp, Homo sapiens; identical to SEQ ID NO: 59822

SEQ ID NO: 77282 - DNA, 1346 bp, Homo sapiens; identical to SEQ ID NO: 59823

SEQ ID NO: 77283 - DNA, 1554 bp, Homo sapiens; identical to SEQ ID NO: 59824

SEQ ID NO: 77284 - DNA, 1519 bp, Homo sapiens; identical to SEQ ID NO: 59825

SEQ ID NO: 77285 - DNA, 3826 bp, Homo sapiens
ccacgcgtccgggggtgctgggcctggcgggcaaactaaggctgcggaccgttgggcggttccgcggggcgttgtccggagagctgcgaggccggggttcccagggttcacgccacactctaggaagtgcctgagctagtgagctggccaacgagctccgcgggctgggaccatgggctgcttcttctccaagagacggaaggctgacaaggagtcgcggcccgagaacgaggaggagcggccaaagcagtacagctgggatcagcgcgagaaggttgatccaaaagactacatgttcagtggactgaaggatgaaacagtaggtcgcttacctgggacggtagcaggacaacagtttctcattcaagactgtgagaactgtaacatctatatttttgatcactctgctacagttaccattgatgactgtactaactgcataatttttctgggacccgtgaaaggcagcgtgtttttccggaattgcagagattgcaagtgcacattagcctgccaacaatttcgtgtgcgagattgtagaaagctggaagtctttttgtgttgtgccactcaacccatcattgagtcttcctcaaatatcaaatttggatgttttcaatggtactatcctgaattagctttccagttcaaagatgcagggctaagtatcttcgacaatacatggagtaacattcatgactttacacctgtgtcaggagaactcaactggagccttcttccagaagatgctgtggttcaggactatgttcctatacctactaccgaagagctcaaagctgttcgtgtttccacagaagccaatagaagcattgttccaatatcccggggtcagagacagaagagcagcgatgaatcatgcttagtggtattatttgctggtgattacactattgcaaatgccagaaaactaattgatgagatggttggtaaaggctttttcctagttcagacaaaggaagtgtccatgaaagctgaggatgctcaaagggtttttcgggaaaaagcacctgacttccttcctcttctgaacaaaggtcctgttattgccttggagtttaatggggatggtgctgtagaagtatgtcaacttattgtaaacgagatattcaatgggaccaagatgtttgtatctgaaagcaaggagacggcatctggagatgtagacagcttctacaactttgctgatatacagatgggaatatgaagtgcaatgtggaaccaggacttggtattaagcctttcccaacttgtgaatatagaatttgataatacacttttgtgtattagcaatggtttttactaatgctaaaacttttaaagtttattttttaataaattgttgagtattacatcatttacttgaggttcaaaaataattcattttaaattaagtagttttaatcagcttaaaagctatttaacccattttaataagcttgcagttttgtttctctgcatatgatattcttattagaaaacagaagtagctaaaagtttattattttaatcctatttaaatgttctttcaaatctctaataatttaaactttcctcagtgctccatgatactttttttgagactccatatcattgcttattttacctttttcaattaagagggatttgttactagtcgatcaattagaatgaacctatgcacatttttatgtacacatatccagttatataattgcttcctagttgcattatatggcaaatgagattttgtacatggagttgacataatactttgtaaattgaattttttaaagaaataggcatttgataaccagcttggcaagtaactctactaacagatgttggtatagctatttaaagactacttcgtaagtagtatgattatttgaataaattacacattgtttagttttttaatacaactgctatatgactcttctgcttcctgataagaaaaggtatatgcaatgctaaaactgtagaagcccaatcaccagcagtttttaaaaaggtgataacttttattagctcttgtgggctatcaagagaattagaccaaacccttgtgacttttaggtaagaaataggcatgatgataagctatgcagattattaaaaagcttgatacatttgatttttcattagatatgccattcatatcaagtaatgttcaagtatgataaaattattttggttgctttaaagcactgtttcccaaatctacctgatcataataatttaccaggaagcagaggagagctacttgtttaaaaatccacattcttggacccaatcctcagatgcacggattcagtcttcaggggaaactctgttttaaggggtatgttgtaatctaaagtaattggttcaggaggtgtcaataggttgaacttgtgagaaggcactgaatctgccatccacatcacatatagcagctattatgaaatcagctttcataggcctatttttaaaaggaatctgaaatttaattctattttgataaaactaagactgaaaataaccacttgtaaacattcctatgattgttactaaaatgtattttcatgtttaaaatgtttttggatatttttgggttaataactactacattgaattgcatgttaaggtgcagaaataatacattaaaagattttcactttaaattaattagtaatattgagcgctcaccctgtgcgtggccttgtgctaaccattagcactgcatcatttcaattcttttataagggcattcaatactacaaaatcaacatgatttcataaggtgcaaataaaagttggtgacagatttaatataattttgatcacaatttacaaatgatctttgcaaatagtggtcagacggcattagtttttcccttagttaagctaaattaaagggactccatcctgttatgattatattattattattattattattatttttgaggtggagtttcactcttgttgcccaagctggagtgcaatggcgcgatctcggctcaccacaacatccgcctcctgggttcaagcgattctcctgcctcagcctcctgagtagctgggaatacaggcatgcgccactacacctggctaatttttgtatttttagttgagatggggtttttccacgttggtcaggctggtctcgaactcctgacctcaggtgatccgtccacctcagcctcccaaagagctgggattacaggtgtgagctaccgcgcctggccatgatgatattattaaacaccattattcacatttcaaataataacaatactttttgtttttcaaaaataaaatgcaatgttatataaagctataaactaagttctttatgatatttgagcaacaactcaggaatataacatataagggagatgttaatttaaaaatttccactacacttattatctattaaccaaagcttaaaattttgtattcttctgttagataagaccttttacccatttaatttgtctttaaggacagtcatttggcttctgaatgtttgaaacgattttaaaaaataagtagtgctatggttgtttctataattctaacctttgatagtaatcagaatgtattacatttcatttctgaatagcttttgaatttatgaaaaattattaacaatgaaaaattggtaattttattaagttatatgtgtttaaatattatattagcttatttctcttgcattaatagtactgctgttttttgttttgcttctttatatttatgtctagcttttatatgtaatttatcttagtgtttataaaatgtgatttgtaataaatgttgttaaaatgaaaatggaaaaaaa

SEQ ID NO: 77286 - DNA, 1837 bp, Homo sapiens
gtacacccaccgggtcgacgatttcgtctagcggcggcgggagcggcgccgttggccgtttggcacgcgggcgccaggaccggccgaacgcagaggttgattcttcaccacactgaaaccattaggaaaaatccttgtggttaacagcagaggcttcagagtgtaacctgtactcgggcctagaaattatttaaaatggcgactgatacgtctcaaggtgaactcgtccatcctaaggcactcccacttatagtaggagctcagctgatccacgcggacaagttaggtgagaaggtagaagatagcaccatgccgattcgtcgaactgtgaattctacccgggaaactcctcccaaaagcaagcttgctgaaggggaggaagaaaagccagaaccagacataagttcagaggaatctgtctccactgtagaagaacaagagaatgaaactccacctgctacttcgagtgaggcagagcagccaaagggggaacctgagaatgaagagaaggaagaaaataagtcttctgaggaaaccaaaaaggatgagaaagatcagtctaaagaaaaggagaagaaagtgaaaaaaacaattccttcctgggctaccctttctgccagccagctagccagggcccagaaacaaacaccgatggcttcttccccacgtcccaagatggatgcaatcttaactgaggccattaaggcatgcttccagaagagtggtgcatcagtggttgctattcgaaaatacatcatccataagtatccttctctggagctggagagaaggggttatctccttaaacaagcactgaaaagagaattaaatagaggagtcatcaaacaggttaaaggaaaaggtgcttctggaagttttgttgtggttcagaaatcaagaaaaacacctcagaaatccagaaacagaaagaataggagctctgcagtggatccagaaccacaagtaaaattggaggatgtcctcccactggcctttactcgcctttgtgaacctaaagaagcttcctacagtctcatcaggaaatatgtgtctcagtattatcctaagcttagagtggacatcaggcctcagctgttgaagaacgctctgcagagagcagtagagaggggccagttagaacagataactggcaaaggtgcttcggggacattccagctgaagaaatcaggggagaaacccctgcttggtggaagcctgatggaatatgcaatcttgtctgccattgctgccatgaatgagccgaagacctgctctaccactgctctgaagaagtatgtcctagagaatcacccaggaaccaattctaactatcaaatgcatttgctgaaaaaaaccctgcagaaatgcgaaaagaatgggtggatggaacagatctctgggaaagggttcagtggcaccttccagctctgttttccctattatcccagcccaggagttctgtttccgaagaaagagccagatgattctagagatgaggatgaagatgaagatgagtcatcagaagaagactctgaggatgaagagccgccacctaagagaaggttgcagaagaaaaccccagccaagtccccagggaaggccgcatctgtgaagcagagagggtccaaacctgcacctaaagtctcagctgcccagcgggggaaagctaggcccttgcctaagaaagcacctcctaaggccaaaacgcctgccaagaagaccagaccctcatccacagtcatcaagaaacctagtggtggctcctcaaagaagcctgcaaccagtgcaagaaaggagtaaatttgccggcaaggcaaatccaccatgaagaggtctt

SEQ ID NO: 77287 - DNA, 1042 bp, Homo sapiens; identical to SEQ ID NO: 59828

SEQ ID NO: 77288 - DNA, 800 bp, Homo sapiens; identical to SEQ ID NO: 59829

SEQ ID NO: 77289 - DNA, 1290 bp, Homo sapiens; identical to SEQ ID NO: 59830

SEQ ID NO: 77290 - DNA, 2190 bp, Homo sapiens; identical to SEQ ID NO: 59831

SEQ ID NO: 77291 - DNA, 1123 bp, Homo sapiens; identical to SEQ ID NO: 59832

SEQ ID NO: 77292 - DNA, 2608 bp, Homo sapiens; identical to SEQ ID NO: 59833

SEQ ID NO: 77293 - DNA, 2795 bp, Homo sapiens; identical to SEQ ID NO: 59834

SEQ ID NO: 77294 - DNA, 2198 bp, Homo sapiens; identical to SEQ ID NO: 59835

SEQ ID NO: 77295 - DNA, 2244 bp, Homo sapiens; identical to SEQ ID NO: 59836

SEQ ID NO: 77296 - DNA, 4223 bp, Homo sapiens
ctcagggagggcaggagagcctgaggagtggcggggccgccagataatagattctaaggagacatggattcctttcaactctgaggattcacagcagctggaagaggcatatagctctggaaaaggttgtaatgggagagttgttcctactgatgggggcagatatgatgttcatttgggggagaggatgcggtatgctgtatactgggatgaactggcatcggaagtgagacgatgtacgtggttttacaagggggacaaagacaataagtatgttccctactcggagagcttcagccaagttttagaggaaacttacatgcttgctgtaactttggatgaatggaaaaagaaactggaatctcccaacagagaaattattattttacacaatccaaagcttatggtgcattaccagccagttgcagggtctgatgattggggttcaacacccatggagcagggtcgaccaagaactgtgaagagaggagttgagaacatctctgttgacattcattgtggagaacctttacaaatagatcacttggtttttgtagtccatgggattggaccagcttgtgatctccgctttcgaagcattgtacagtgtgttaatgattttcgcagtgtttccttgaacttgctacagacacattttaagaaagcccaagaaaatcagcagattgggagggtagaatttcttccagtcaactggcacagtcctttgcattctactggtgtggatgtagatctgcagcgaataaccctgcccagcattaaccgcctcaggcacttcaccaatgacacaattctggatgtcttcttctacaatagtcccacctactgtcagactattgtggacacagttgcttctgaaatgaaccgaatatacacactttttctacagaggaaccctgatttcaaagggggtgtatccattgctggtcatagtttaggttcgcttatattgtttgatatcctaacaaatcagaaagattctttgggggatattgacagtgaaaagggttcgctaaatattgtaatggatcaaggagatacacctacactagaggaagatttgaagaaacttcagctctctgaattctttgatatctttgagaaggagaaagtagataaggaagctctggctttatgtacagaccgagatcttcaggaaataggaattcctttaggaccaagaaagaagatattaaactatttcagcaccagaaaaaactcaatgggtattaagagaccagccccgcagcctgcttcaggggcaaacatccccaaagaatctgagttctgcagtagcagtaatactagaaatggtgactatctggatgttggcattgggcaggtgtctgtgaaatacccccggctcatctataaaccagagatattctttgcctttggatctcccattggaatgttccttactgtccgaggactaaaaagaattgatcccaactacagatttccaacgtgcaaaggtttcttcaatatttatcacccttttgatcctgtggcctataggattgaaccaatggtggtcccaggagtggaatttgagccaatgctgatcccacatcataaaggcaggaagcggatgcacttagaactgagagagggcttgaccaggatgagtatggaccttaagaacaacttgctaggttcgctgcggatggcctggaagtcttttaccagagctccataccctgccttacaagcttcagaaacaccagaagaaactgaagcagaacctgaatcaacttcagagaagcctagtgatgttaacacagaagagacctctgtggcagttaaagaagaagtcctgcctatcaatgtggggatgctgaatggaggccaacgcattgactatgtgctacaggagaagcctattgaaagttttaatgagtatttatttgctttacaaagccatctatgctactgggagtctgaagatacagtattgctcgtcctcaaagagatctaccaaacccagggtatcttccttgatcagcctttacagtaaaaatgacccatctatggctgcttaatacggacattgagggatccttccccagaaaatccacctgtttgttgctgcaattttcctctcctcagctgcgtcatttcctgcatgttgcctgccacttactcaccactggggtctttggaagataatcttcctctttggaaatgaatggaaaagcaaaaggccctattacttttaaccactggcttcatataaacacttgccatttttttctgcatagctgggggtggtttgtgtctttaattctttgatgatagtttatagttgccacactttattgattagtacttgacagggtgtaaagcctattttgggtttgatttgttttgggtggggtagacatgtttttaaggaacttattgcttatctttagaaaatgttctagtttggaaacagattcttgagattcagaaggcattttggagtacacttatctcttgtttgtgttgaactgaaggctaagtctcagtggacatggaaaagacttttgggtgatttatttttgaacctgcatttctttcttatgtgtagtgtatgaagaaagactagaatgtagctttaaaaaagtgttgtttactctcttagaactgacagacttattgccagaaatcactgatgttcattgtttttgcaactgtttgagctgctgtaagagtctaaagttgacaagttagttcatgttaggtgcatctttataaagcaaagatgttgtatatcctaggcctcccttttatatttgatagaagttatttgctaatagcttctattcttacgttgaaaatagttgtaaaagctgatgaacctgaaattgtgtagcctctacaggctgctgaggttctaaataaaaccttttagtggtgcctttatggtgaaacagaatttgtcacctgccatttctacttgagctaaggtagtattgtgtatcctctttccttcttaggtatccataatccacaaagcatatttaaaaggctcttggcacgggcagcattggttgagcaggtaggtttggctagggggaaatgtttaacttgttctgaaagaaaaacttatgtctgtagggtccaagaaacagctattccagagtcagtgtcagctgagtctggaacatatgaagtgaggtttacttctaagaacacaagtgactgcacactaattttgtcaaggcatcttttcactactttgctgtagatttttcttcttcattggtcagtttgtcattgtctttgtagttctctttatgataatcctttatacttgctctcagattccacaggcctctgtttatagagtggcaaaggcaggcgagctgtggtttattgtttataaatttttttataaatgttatggtattcaaagccactgacatttaatatttactgaagccattccttagacagcagtggtctttatccctttctggaaagaaaaggaaaatgaagggtaattactgtcaccatggagattgtagaggtaaggttggggtataggtcaggcctggcctttctttgtcatctgcttatagtctagtgctaagtatgccactaagtttcagatatatggaatactttatttttttaaaggtatataaactctgagttattgagaattaagtattcactgtatattaaggggaagcttttgccaagttgtggtcttcaaatttatgtttactcttcctattggcagaataggtgctatttaagagtaaaccaaaggataagcagagggagtccctataaccaaagatggacagcatagccctggatagccagataaaccactctttgtattaagaaatgtttctttcctagtggtgaggggtgggtaactgtgaaagagctttatatcttgtctattcatggtattatagctgtatattcccaggatgataagcttgattgaaatcctgtatttagtcatatattatttgcgctgcttcatttgtatcatgtgcaatctctagaccaaccctatttttaaactctggtacagcatcattttgtacatattcccagctgcagaactagtatcacttatctcagcaaaagagattgtttgcatggaaagattaatagcactgattagatttctaatattttgcatttttgaaatgtttgttttctacgtgattatatttaaaactttagtaaatactaaaatg

SEQ ID NO: 77297 - DNA, 1207 bp, Homo sapiens; identical to SEQ ID NO: 59837

SEQ ID NO: 77298 - DNA, 1479 bp, Homo sapiens; identical to SEQ ID NO: 59838

SEQ ID NO: 77299 - DNA, 1617 bp, Homo sapiens
  misc_feature (1)...(1617): n = a,t,c or g
gctttatttgggaagagtgcggttctgctcggccctgatcagctctgccctgcccaccccatctcagccaggcggctttacttcttcctgatcttcaggtctttcttcttcctgatttccttggccagctccccaatcaatctccagtactcattgaacttgagctccgagtcctgattcacatccaagctcttcatcttctcatcaagagagcccacatccttgagcagatggggcaactgctgggtaaccagctctttgaactcgttgacgctgaggctatccttccggccctcctgccttgcaaaggtgaagaaggtggtgaccacggtctcaatggactcctctagctctgtcagtggttctgctgccattaggaccctgaggccaaagctgatgtcctcaaggggctagctgacctttgtcagggctgacctgtggaagagagaaggagcagagagggagagtcagggagccccaagatgcaggaatggttcagaaggtccctgccttggtgttatcacatcagtctcagcctggagggggcatatggggaaagagggagaggacaggggttgagcttggggcagcagaccaggcaacggcatctcagttttggtgggggcaggagattcagctccagaaaccccctcttctgtaggtctcacaatccgggatcctttttaaatgtctgtggcttagggacccctctgtggtgatccctcgatctggagacccctctacttgagaggaggtcttcagttgaaggtccttcttggagtccttcaagtctggtggcccctctgtggcgtgtctgtctcaagaatcccttcttgtctcacccagactcacaggtcataaggttgtttgtctccaaagcttgtttatgttgggccctggtctccggccactcgcatccgcccacacacactctaaccgctcctcccagcagagaagcacagggtctggcaaatgtcccctgtggtcagagctggctccgtctgaacagacccattttctctgccccgctccacccttacctctcctcagcggcagcagggcagagtgctgaacccaggaccccacagatcctccccgctcctgtctcccggtgacaagggtcctggaacggggcgtctctgactccctgctccaggacgggtttagtacaggcactcacaaccccctggggtgcggcgggtggggctggaagaggcattctcttttctgtccaccccgtcacacactcctgcacgcgctgttgctcgatcatccaaagctccttcctgaattcctgtctgagctggctctgggggagggacctgggagcccaggaagaaaaaatgatctccagcctccctccagggtcagccatgagactcacccggcaaggagatggggtagagtgagctggagcctcagggctgaggtttataagcagcggggaaggaggagagagctgcttccaagcccggaggtgtcaaatttccgtggtcgattcgggctcaaccagcacagccagccacaggtactgcaagaaacagcttggggtaagacatccagtgtccctcccaggacctccttccccggaaanccaccncgcggttttacgaaggt

SEQ ID NO: 77300 - DNA, 4569 bp, Homo sapiens; identical to SEQ ID NO: 59840

SEQ ID NO: 77301 - DNA, 2256 bp, Homo sapiens; identical to SEQ ID NO: 59841
  misc_feature (1)...(2256): n = a,t,c or g

SEQ ID NO: 77302 - DNA, 1715 bp, Homo sapiens; identical to SEQ ID NO: 59842

SEQ ID NO: 77303 - DNA, 2303 bp, Homo sapiens; identical to SEQ ID NO: 59843

SEQ ID NO: 77304 - DNA, 775 bp, Homo sapiens; identical to SEQ ID NO: 59844
  misc_feature (1)...(775): n = a,t,c or g

SEQ ID NO: 77305 - DNA, 4458 bp, Homo sapiens; identical to SEQ ID NO: 59845

SEQ ID NO: 77306 - DNA, 1598 bp, Homo sapiens; identical to SEQ ID NO: 59846

SEQ ID NO: 77307 - DNA, 1385 bp, Homo sapiens; identical to SEQ ID NO: 59847

SEQ ID NO: 77308 - DNA, 1790 bp, Homo sapiens; identical to SEQ ID NO: 59848

SEQ ID NO: 77309 - DNA, 1166 bp, Homo sapiens; identical to SEQ ID NO: 59849

SEQ ID NO: 77310 - DNA, 2135 bp, Homo sapiens; identical to SEQ ID NO: 59850

SEQ ID NO: 77311 - DNA, 1481 bp, Homo sapiens; identical to SEQ ID NO: 59851

SEQ ID NO: 77312 - DNA, 1260 bp, Homo sapiens
cccacgcgtccgggagaggccgcggccccttcccgttgcctgcggccaccggccggcattcagagcccctcgcctggcgctaaatttaaaaacgtaacacgagcagcaggctggtctcggaaacgaaacgaaattcggtccctgggcctcctcccgggcgctgccggtccctcagcgcgccgcgccacccggaacagacccttctcccgccattttcggcggggctgggagactgaggcccgcggcgctgagcctgcggcgccccggaagaggcgggcggcatggccgctggcgtggactgcggggacggggttggcgcccggcagcacgtgttcctggtttcagaatatttaaaagatgcttcaaagaagatgaaaaatgggctaatgtttgtaaaactggttaacccctgttcaggagaaggagccatttacttgttcaatatgtgtctacagcagctgtttgaagtaaaagttttcaaggaaaaacaccattcttggtttataaatcaatcagttcaatcaggaggtcttctccattttgccacacctgtggatcctctatttctgcttctccactacctcataaaggctgataaggaggggaagtttcagccccttgatcaagttgtggtggataacgtgtttccaaattgcatcttgttgctgaaacttcctggacttgagaagttacttcatcatgtgacagaggaaaaaggtaatccagaaatagacaacaagaaatattacaagtacagcaaagagaagacattaaagtggctggaaaaaaaggttaatcaaactgtggcagcattaaaaaccaataatgtgaatgtcagttcccgggtacagtcaactgcatttttctctggtgaccaagcttccactgacaaggaagaggattatattcgttatgcccatggtctgatatctgactacatccctaaagaattaagtgatgacttatctaaatacttaaagcttccagaaccttcagcctcattgccaaatcctccatcaaagaaaataaagttatcagatgagcctgtagaagcaaaagaagattacactaagtttaatactaaagatttgaagactgaaaagaaaaatagcaaaatgactgcagctcagaaggctttggctaaagttgacaagagtggaatgaaaagtattgatacctttttttggggtaaaaaataaaaaaaaaaattggaaaggtttgaaactttgaaaataaaatctagcaaaaataaaaaaaaaa

SEQ ID NO: 77313 - DNA, 656 bp, Homo sapiens; identical to SEQ ID NO: 59853

SEQ ID NO: 77314 - DNA, 519 bp, Homo sapiens; identical to SEQ ID NO: 59854

SEQ ID NO: 77315 - DNA, 4285 bp, Homo sapiens; identical to SEQ ID NO: 59855

SEQ ID NO: 77316 - DNA, 2159 bp, Homo sapiens
tcacccagtgaagacactgtaagtctggaggtaggggacagcaatcagaggccctttggtcactgcacagttcctttaactgcaaccctaggctggcctgacccagctgctgcaggaaggggaggggccatgggagggggtcagagcccacagcaggactgttgcataatccttggggcctggccttgggcaatccaccctggttctgaagtttgtgctttgtgtctggttccttccttttctgccttctctcctgctttctagctctgggctttcccagctccgaagtcaatactgagatcccagatgtgtccagagacatcctgaagaggctcgggggtggaggagccttagtgtgtccacaaagggactcctgaaactgactgagagccagtggatttgccagcagtctgagcttctaccgagtcttcccccacctcaatccctgttgctatggagactaccaatggaacggagacctggtatgagagcctgcatgccgtgctgaaggctctaaatgccactcttcacagcaatttgctctgccggccagggccagggctggggccagacaaccagactgaagagaggcgggccagcctacctggccgtgatgacaactcctacatgtacattctctttgtcatgtttctatttgctgtaactgtgggcagcctcatcctgggatacacccgctcccgcaaagtggacaagcgtagtgacccctatcatgtgtatatcaagaaccgtgtgtctatgatctaacacgagagggctgggacggtggaagaccaagacacctggggattgcgtctggggcctccagaactctgctgtggactgcatcaggtctcagtgtccctatctgtaagatcaacaagaaacacggttaagggaggtcgtcactggggtgggagaagaggggctggtagaccgaagccttgtgcataaggattttttcccaggaaaagatagactttataaacagtgggagcccatgaacaaacatataaaagtagcaacagataatgaccaataactggttcagtggctggagtattaggggcctggggattggagaacggagaagaagttgtagcagagggaaatgagacaggaagatgctctggggacacattttttatgtgttatcttcagccatgagaagcagtgatgactatcccatatcacagatatgatttaccaccaccaccctgcccccgctcccgtgaagaaagcagggcaagtgctgtgctgcccatttgggcctgcatagtgccatgattggaacccaggaactctggtctccttgcctagtgcttttcaaaactctgtgctacacaggagtggatccaggcctgaaggtcatccaaatctgggggactctcttttaagaaaaagaattctaaaatatcttacttttgcaaacattatgaaaatatactgccacattaatatgttgctagggcccctgctaggaccttaagaaggagctcatgtgagtcaggaccctgaaatgttaggcctcgttagctctatggttcatatgcttcttgaaccaagtcacagggcacttcccagccacattgccaggcaacaggactaaactacctccaaagcaagcagtcttttcagttttgactgagtgatgtgagaaacttcttttcttttcttttcttttttttttttgaggcagtctccctatgtcacccaggctgtgttgcagtgagccaagatcacaccactgcactccagcctgggcaacagagcaagactctgtctccaaaaaaaaaaaaaactctgctaaggaccataagcatatttcatcacttgcagagaggcatcactgtcaccccaatttacagatgggaaactgagcagaaagttgttaaaacacccagcactttgggaggccaaggtgggtggatcacctgaggtcaggagttcaagaccagcctggccaacatggtgaaaccccatctctactaaaaatacaaaaattagctgggcatggtggtacatgcctgtaatcccagctacttgggaggctgaggcaggagaatcacttgaacctgggaggtggaggttgcagtgagccaagatcacgccactgcactccagcctgggtgacagagcaagactctgtctcaaaaaaaaaa

SEQ ID NO: 77317 - DNA, 1822 bp, Homo sapiens; identical to SEQ ID NO: 59857
  misc_feature (1)...(1822): n = a,t,c or g

SEQ ID NO: 77318 - DNA, 742 bp, Homo sapiens; identical to SEQ ID NO: 59858

SEQ ID NO: 77319 - DNA, 1503 bp, Homo sapiens; identical to SEQ ID NO: 59860

SEQ ID NO: 77320 - DNA, 1678 bp, Homo sapiens; identical to SEQ ID NO: 59861

SEQ ID NO: 77321 - DNA, 1368 bp, Homo sapiens; identical to SEQ ID NO: 59862

SEQ ID NO: 77322 - DNA, 3031 bp, Homo sapiens
ccagtttctccgtcagcctgcgggtcccggctggcggctgcttccggtaggagagcggtgtagagcgagcaggtctcagctcctcgtcatgtcatacggtcccttagacatgtaccggaacccggggccctcggggccccagctccgggacttcagcagcatcatccagacgtgcagcggcaacatccagcggatcagccaagccactgctcagataaagaatttgatgagccagctaggaactaagcaggactcaagcaagctacaggaaaatctgcaacagttacaacactccacaaatcagctcgccaaggaaacaaatgaattgctgaaagaattagggtccttgccccttcccttatctacttcagaacagcgccagcagagacttcagaaggaacgcctcatgaatgacttctctgcagccttaaacaatttccaggctgtgcagagaagggtatctgaaaaggaaaaggagagtattgccagagcaagagctggatctcgtctttctgcagaagagaggcaaagagaggagcagctggtctcatttgacagccatgaggagtggaaccagatgcagagccaggaggatgaggtggccatcactgagcaggatttggaacttattaaagaaagagaaacggcaattcggcagctggaggctgacattttggatgtcaatcagatatttaaagatttggccatgatgatccatgaccagggtgatctgattgatagcatagaagccaatgtggaaagctcagaggtgcacgtcgaaagagccactgaacagttacagcgagctgcttactatcagaaaaaatctcgcaagaagatgtgtatcctggtgcttgtcctgtcagtgattattctaatcttgggacttattatctggctagtttataaaacgaagtgattgcctccgatcgttctcccgctgagctgttttcaagggcaagtgcttgttgaagtcttgccagaacaaactgatcacaagaagacagcatatatcagaacgtcctgtaatcatttagttagaaactaactactaactagtctttggaattcgtgacctatggagacagtaattatcaatttattgattctattgatttctcaaattaggaattaacttatgtggattttgcttcctcttgtattctgattgcccttcatcccaagtgtttactgaaaattccattctagatattcttgttttgacaaatgacactacagtctcgtaatattgtcttttatgtatatacaaaatttacctttttactagcatctgagatagagttactttctggtacccagtatattggagtctgtcagaaactctataataggccaccagtttttattatttaacatttttatttgaatttctaagaagcctattctctatctattttgaaagattttggcactatatttaattggaaggtaaaatattgtacatgtgatccagagtaaatgagaagtctctatctgagctggtcagttactggagtacatgttactaatctgggtttaaagtttacttcattatctgctagtgtcatccacagcagttcatcctcatccacactaagccatcctgttagcttttaaaggaagttaatttaattaacattaatatactctatgggctccctctcccacctgtctgcatagaaaggcagaattagacatagcatgctttggaaaagcaaataggaattgttgggaatgatttaatcttgttgttgttgttgttgttgttcacttgtggttctacattcctggtgaatgatgaatgttgctgtcaaagggctgccccctaccttataagggttgctgggcatttgaaggcaggaagatttttaaagatagattgaggttggtttaaaattattcctgtaaaccaacaataaagcaaagaagaggttcatttttgtaaataacactggtttcaaatagtgatgttagacttaacctaatttataaacaagagattaatatctccatgcatagttttagacaaaaaaagatgtttcaataaaattactgtcttgtaatataaatgttgtccacttcccttttccacaggcctagaacagttaaagggaacataatttgtttaggctcccacataaatgtgaatctggccaacaactttggttcatcctttagtgaattagaggatttggctaccctgagtatatttatattcatttcttctgttctccttctgttattatacttaatcttctaaactaaactaatgtgaacagtagggaagcaagggcccaaatgcataagtttctttgcactgttgcacttacttaatacaaataaatgttttttaaagcttttgtagtatgtttttatgagttaacatcctaatgtggtaggtattaggtaatgtgctgtcatgagaaaaattgagacttccaagaaaactggacaccaggtgagggttggtttggagacggaataggtgtagctgcctttccttgaaaaacagtgtgtagagatggctgagtgcaatggctcacacttgtaatcccaacactttggaaggctgaggcgggaggatcagtatatcggtacgtctgagcccaagagttcaagatcagcctgggcagtatagcaagaccccatctccattttttttttaatgattttttaattaaaaaaaagaacaacaggatagagctgttggggtggcacagtggcccaaagagcagcttcagagataattccttggttctatgatccctgtttaactccaaattacagtcggacttggatacatcatttgtaacattgtaggaaagaaaaaagtcttggttgtgaaaaacgatttgcatttgggtaaaataaagtgaccatgcttttgttctgtaatactgtgtgacctgtggttgttgtaatggtgatcatggagagcaaatatgaacttggcctggattttaaatggcctagaatttgtggtagttgccaaagaggttctcctaggtggtcttaataaacctattcacag

SEQ ID NO: 77323 - DNA, 1768 bp, Homo sapiens; identical to SEQ ID NO: 59864
  misc_feature (1)...(1768): n = a,t,c or g

SEQ ID NO: 77324 - DNA, 2948 bp, Homo sapiens; identical to SEQ ID NO: 59865
  misc_feature (1)...(2948): n = a,t,c or g

SEQ ID NO: 77325 - DNA, 2327 bp, Homo sapiens
ttttttttttttagaaatgcaggagctttattataaatcatttaatattcttgaagttaacaactgataaactcatttaggcaaacattttggatttaatgatctaaagctcacagatgcatgccacatctagctaaaagtacataaaaagcgcacctctggaaataacagccctccctctggctgaagactgagaagcattaaggatgcttctggatttctgcagcggcagggcaggggtctgcacaggcctgacctggtgttgctggagcgcggcatcccctcctgggtgctgctccgaaaggcaggctgggaggtgcttgctggggtgttccatggcagcgctgccaaccaagtctgggtctctaaaagccaccctcagtttataccaactgatcaggaaataggtggtgacagggccttgaagggtacatgccggcttcccttaagttgattagatgggaaaccaaacaccgtctttcaagtgtgaggctgtgccatgctccctcagggaggaggggcgctgggtctgaccaggtctgcctctgccctcaccagctggcagacgtgaactggagaacagcaccagaaaggctggtggttggcagctgctcacgacacagttgctgacctgcagcagatcggctgtgggtgagcaggacagtcaggccctccacaagcactgttctggagtttcgtctgactaggtgaaccctctggcttttcgaggacgcagggtaccctactgccaccagccagtgagcagactaggacatctctagacaggaaactcatctaaaaatcggaggacaacctgatgcacccaagtgacaatggacccaggcagctgtgcaacacccaggtgggaggcgtttggaacagttagactcatcagtggataggtttttctagcacaaatggaatgtggtgtctcatgtccctagggagacaaagggcaggtttcttatctggtctttccaagctttcaactctctggctcaagtgtcccagaatgaactagaagtctattcctccaccctggtccgtggtcacttccagaactctgaagtggctcaggaggtgactcctgaaaggcagcccttgcttgatctcctggtggagcctgtctgggctgaggcgatgctgggcttgccgtgccgagatctcatgccagaagtcctccctcggagctacctgtctccagcctcattctttggcatgttgactcctggaattgaggggctatttttaagatgcatgctttttcggcttttctcatgggtgcctcatcagcctgcacaggatcccccatctcacgagagagggaaatttggcattgctgttccctgcctctaaggtcctttatgaggggccgcccaaactcattcccttagttcttactctcccacaggtgttgagattttattggcccatactaaaaagcatgcaatgactgaggttttctcctaaccttaatctcatcttctcaaatgtgtgccttcttgtttttaagaccatagacaaggacgtcaggtgactgctgaaatagaactaaagctaaaatttttctcggatcttggcaaattctgctaatggcacctctaggggcacaatgatcctcaaatgacatccaaccagactccccataaacaaggtttgggctggagctgtttctagttttaaatatggaaatgtaaggcaaaggacagagcacttggttttgccttagatttcccagcagagtaggatttgggcgaaactgctggttctctctgtcagggaaataccaagtgcagcagagccggggccatggggcaggctggtggactccaggctcacttgcgtggctgctggatgtgctgggttcttggggaaggatgcttgtccatggaggcatgcggcttctggtgagccacctgcgcagccgccggggggaaatctttgtcaccccgggcgatgaccccagagatgaacacagtgggtttaggtggactggggctttcccattcctggtcatccttgtctttctcttctttggtgtctcctgtatgtgggtgtttctgcacaattcgcattccaccagctttcacggcgggcgggtgtccagctttagtctctagtttcccttcgggaggcgaagacatggcgcggcggggcttccgcggggccgaggcggcggcgcggttctcgggccgggcgggcgtgcgcgagtgagctcaggtgtgagcgccggggagcgagcgggcgggagaacgacgcgcgcgcgtggggcgccggggccgcgcgagccgggtgagtgccactgccgttaacgggggcgcggccgc

SEQ ID NO: 77326 - DNA, 3343 bp, Homo sapiens; identical to SEQ ID NO: 59867

SEQ ID NO: 77327 - DNA, 1942 bp, Homo sapiens; identical to SEQ ID NO: 59868
  misc_feature (1)...(1942): n = a,t,c or g

SEQ ID NO: 77328 - DNA, 1232 bp, Homo sapiens; identical to SEQ ID NO: 59892

SEQ ID NO: 77329 - DNA, 6517 bp, Homo sapiens; identical to SEQ ID NO: 59893

SEQ ID NO: 77330 - DNA, 1481 bp, Homo sapiens; identical to SEQ ID NO: 59894

SEQ ID NO: 77331 - DNA, 2321 bp, Homo sapiens
acgggggagccggggcgccggggggccgcggcgctgctagcgctgctgtgcgtggcctgcgcgctgcgcgccgggcgcgcccaatacgaacgctacagcttccgcagcttcccacgggacgagctgatgccgctcgagtcggcctaccggcacgcgctggacaagtacagcggcgagcactgggccgagagcgtgggctacctggagatcagcctgcggctgcaccgcttgctgcgcgacagcgaggccttctgccaccgcaactgcagcgccgcgccgcagcccgagcccgccgccggcctcgccagctatcccgagctgcgcctcttcgggggcctgctgcgccgcgcgcactgcctcaagcgctgcaagcagggcctgccagccttccgccagtcccagcccagccgcgaggtgctggcggacttccagcgccgcgagccctacaagttcctgcagttcgcttacttcaaggcaaataatctccccaaagccatcgccgctgctcacacctttctactgaagcatcctgatgacgaaatgatgaagaggaacatggcatattataagagcctgcctggtgccgaggactacattaaagacctggaaaccaagtcatatgaaagcctgttcatccgagcagtgcgggcatacaacggtgagaactggagaacatccatcacagacatggagctggcccttcccgacttcttcaaagccttttacgagtgtctcgcagcctgcgagggttccagggagatcaaggacttcaaggatttctacctttccatagcagatcattatgtagaagttctggaatgcaaaatacagtgtgaagagaacctcaccccagttataggaggctatccggttgagaaatttgtggctaccatgtatcattacttgcagtttgcctattataagttgaacgacctgaagaatgcagccccctgtgcagtcagctatctgctctttgatcagaatgacaaggtcatgcagcagaacctggtgtattaccagtaccacagggacacttggggcctctcggatgagcacttccagcccagacctgaagcagttcagttctttaatgtgaccacactccagaaggagctgtatgactttgctaaggaaaatataatggatgatgatgagggagaagttgtggaatatgtggatgacctcttggaactggaggagaccagctagcccacagcaaccaaagagacttcctcttggcgttcaggaaacacagattctttgtccttttcccaacagcccaggctgttgatacctcagagccttctctttactctccaaagtgaaagggaagcccccgtctctctaactgcatgtcatcaggggtgagcctgcctttcctatcttcacacctgccacctcatgttcacacctatctttctcaccttttttttgagatggagtctcgctctcttgcccaggctggagtgcaatggcacgttctcagctcactgcaacctccgcctcttgggttcaagcaattctgctgcatcagcctcccgagtacctgggattacaggcatgtgccaccacgcccggctaattttgtatttttagtagagacggggttttgccatgttggccaggctggtctcgaactcttgacttcagatgatccatctgccttggcctcccacagtgctgggattacaggcgtgagccaccatgcccggcctctttctcacctttacacctgtcttcttatcctcacatctgttttcacaccttcatccctgtcttcctcatgttcacacttgtcttccccatgttcatagctgcctttcttaccattttggtttgaagggcagtcttctctggcttgtttttttgtttttcccagaaaatcagtattattttttaaataagaaaaacattcctagaagatgataattgtgaaaacctcctttggcttatttgcttttccagattttagtctcctttctccccatccgggaaagatggtggaagacataggctaaatttctccagcctcacaatggtcttcacttggtctgacttgtaccaattctagcacccactgaaaaacaagttgagtagagagtgtagagtgcagaaatgtggcttttgccccactttgcatctccaaaattacaacggttggccgatcccatttgaggacaatgcttagttataagtctccgagttggaaaaggaagaaagccagagctgtctagtttcattcattctttcagtaaatatttattgagtacctactgtgtgctaggcattgacctgggaactagagatacttcacagaatag

SEQ ID NO: 77332 - DNA, 1318 bp, Homo sapiens; identical to SEQ ID NO: 59897

SEQ ID NO: 77333 - DNA, 1235 bp, Homo sapiens; identical to SEQ ID NO: 59898

SEQ ID NO: 77334 - DNA, 1202 bp, Homo sapiens; identical to SEQ ID NO: 59899
  misc_feature (1)...(1202): n = a,t,c or g

SEQ ID NO: 77335 - DNA, 852 bp, Homo sapiens
tttttttaccccattgtagaagaggaataatttatttctataaggattttaataatgttccctaagtaattagtaatcaagattttcttcaaattcaaattaacaaatatgtttgttaatctaaataatatacatatttatgtatttatatatgtatatattttaatctttctgtaattcagtctttaactgtgaacttttacatgatggaagcagtgaaggactcaatgtcatagtacattttgatagtatttgataggctttttcaggtcaattaatttagttgcttgcaaatataaatcaagcttgctccagttccacaaggactccaccacagtctttaggatggagaaaaatcactggttttccatgtgctcctattttgacctcttcacttagactgcggatcttcttttttttcaaatccatcacagctgcattaatattatccacctcgatgcagatgtgatgcattcctccagccttgtttttctgcagaaaacctgcaattggactgtcacgtcccaatggatgaagcagttccatcttggtatttcccaggttgacaaaaacaacagatactccatgttcaggaagagggaccgcttcacttacctgggcccccagaatattcttataaaatgctgcagccttttccaaatctggcactgctatggctacatggttgagtcgacccaggttccacacagaacctgtcacttgatccaagggctgtgatgtggaagaagctcttactgttggaatgggagcttgaagtctggaaaaaagccctacggcattcgcggctgcagccttcagcacccgctcgtgccgaattctgggcctatacgg

SEQ ID NO: 77336 - DNA, 1593 bp, Homo sapiens; identical to SEQ ID NO: 59901

SEQ ID NO: 77337 - DNA, 647 bp, Homo sapiens; identical to SEQ ID NO: 59902

SEQ ID NO: 77338 - DNA, 1674 bp, Homo sapiens
agattaatttagataacctagtggttaatatgctcatgaacatcagcaacaaccgtgcattccttggcagatgggatgcgatggaaaccaaaggtttccttaaggcaagcacttcacaactagttttctgtcaattcttgcgtaaatcacattctgtattcatacaaaaactttgtttttctctgacaaactgtacacatagaaacaaatttccaaatggacaggaacttaaatttgtggagatgccccatgtcttgtgagacttaaaaaaaaagaaaaagatcccagcttttatcttcacaaaacaacatgggagttggggcaatgagggtggacaggacagggccagccaggctggtagctggcagcagtctcttcatcttgaagacctcattgagggttcctgggattcaggtgcccagaaaagagttcagggctacaatggtgcaggcttccttttgtttctcttggtgagtccacaagaagttcttacatactgtccagagaggcctcagggtactcagttccagcttctaccgaccccttccaccaccccgtgaagctcctcgcctcggcgggccagagttcatgttactccctctaccccagttactgccactccggccccctcgagaaggggtgccactgcctggagggcccccaaaaggttcatctctgtggtatccatcgtggtgctctccgtctaaggagctggaacgcccagatttgggcactctctgagcaggtcctgggccccctcggcctttgcctcctcggtcttcagaagggcctcctggggcctccatctctctgtgctcagaagtgcctgggccatcatgccaggggcgctttcggggaggtagggatgccatgtccatgccttggagagaagaggagcgttctctgctggctggggaatgaccgtcgtgagggggatgatcagggcggggagtatcacgaaaatgttcatgacctggcccaggctctctgtttccatcccaggaatctggcttccgccctccttcaaagcgagggaactcgtcaggagtgggaagtaaacccttccttcctcctcgtggggtaccccgacctcgacctctgagatctcgtcctcgggccggcttcctcagaagcatcaaaattctcctctggaccaaagtccttcaggaccaggaaaaccatcccttccctctggggggagcacggccctcatgcctcggcggggctcctcttctgaaactttcttctctgcgccctcgaaaacgtgggtcctcgggatcccgggggaaacgttcatctccgggcctgcggccttcccatgcccccggagggcctcgggctgcaccccggccatccccctcgctgaattccctgtgatcagggggaaacggaggcccagggccccctcgcctccacttctcttcatgcggtaaaggtcctcctcgcccctcaaattcacgtaaccggtggccaaagcgcttgtcagggtggaagtcatctggtctgctgaagtcatcggggaagtctgggtgagggccacgcctatcagggggacccctgcagtcctggccaccccgcaaaggccccctctcgggcccatgctcaggcccgccgctctgctcatgccgcctctctgacatcgggcccatgtgatgcctcgtgccaagcttggcg

SEQ ID NO: 77339 - DNA, 3773 bp, Homo sapiens; identical to SEQ ID NO: 59904

SEQ ID NO: 77340 - DNA, 2181 bp, Homo sapiens; identical to SEQ ID NO: 59905

SEQ ID NO: 77341 - DNA, 3967 bp, Homo sapiens; identical to SEQ ID NO: 59906

SEQ ID NO: 77342 - DNA, 1856 bp, Homo sapiens; identical to SEQ ID NO: 59907

SEQ ID NO: 77343 - DNA, 715 bp, Homo sapiens; identical to SEQ ID NO: 59908

SEQ ID NO: 77344 - DNA, 1051 bp, Homo sapiens; identical to SEQ ID NO: 59909

SEQ ID NO: 77345 - DNA, 714 bp, Homo sapiens; identical to SEQ ID NO: 59910

SEQ ID NO: 77346 - DNA, 712 bp, Homo sapiens; identical to SEQ ID NO: 59911

SEQ ID NO: 77347 - DNA, 733 bp, Homo sapiens; identical to SEQ ID NO: 59912

SEQ ID NO: 77348 - DNA, 1703 bp, Homo sapiens
  misc_feature (1)...(1703): n = a,t,c or g
ttttttttttttccaagatagaaaatggattcaatttttattaaataatgtaaaggattttctttggcacttattcacattctcttgnctctgagtaaaaaaacgccgcgtttatctgcattggtagcagagggaaagctactggagcaaacgctaagtgaatgggttcccgtgccgagggtgtcctcattcttgggctctgtcaggcctccccttgtctgcaggactgggacaggccaccctccccaggccctgcccttgccgcgagcgtgtccttccatacagacaacagccttgctgggtcacctggaggagctgcgctctttgctgacacagtcgtcctgggaggtggtgtccccgtttcccaccatgctgcacgtcctcctcttcttcctgcggtgcactgtcccatcgccctcggatccagactcgcactctgagtcggagtctgacgaactggagctggaggagctggaagagtcgctggagctgtcggaagctatccctgtggactcctgaaggtcaaccgagtctgcgaggactgccaactcggggtgctcttgcttcaaaatcctataccatttccttgataactttggtctccctcttaccgtcttgtgccataccacagggaagttggtgctgctggcaaaattttgggtgatggcgatagtagtgtcgagattgaggacaacatgccaccagcctcctggtacaaagacagtctctcctggtttttgtaagatttccaggggtttgaattcaggtggccaggttggaagctgtgtccggggataaataacattaaaccaggtaatagcttcgtcttgctggttccctccttcgtctcgggtcactttgatgagttccctgggagtgctggtaggaaacaggcaccagcgcttgtggccctgaactaaggcattccaggcactggttcccagagggtcgatgtgaatcccagttccggagcgtggtggccccatcacaaaccacctgtaagggggcctgcgcttctccccagcatactggaaaaggtcatcagtgaaaaactttggcaccttgtagtcttccaaaagtttccttcttttagggtgttcaccatagctgctgtcaaagatgtaaaggggactatcatctcgagtgctctccatgtactcgatgtagtatttcatcttcatcttcactgagtagccatcgttatcctcaccacacttgaacttctggttccgatatttcctttttaggcgctccagagtccatttctcctgcgcagaccagccctcttgcgcattcaacaaaaccacgggcttgtaaggtctttcataccgctccacaaattcttccacagacagctgtaaagcatctgccctttccacgttatccgccacggccgccgggctcagcgagaagctctcgtagtagttgtgccgggtccaatccagcgagtccttgagctccggccgcgcactccgcttggcctcgcggatgcgcttcttgctcttgtggttcattctgcggggtcgccagctggttccgctacgacctcggcgcagcccgcttcctgacactaacgcacccctccccggcctgggcggcggcgacggcagtacccaaacgcccttcgctcagtcccggcgcctttaaagtcgccttccaaaaaattcactccccagccacctcccgagcctcgggttgggcaa

SEQ ID NO: 77349 - DNA, 1605 bp, Homo sapiens; identical to SEQ ID NO: 59914

SEQ ID NO: 77350 - DNA, 1076 bp, Homo sapiens; identical to SEQ ID NO: 59916

SEQ ID NO: 77351 - DNA, 2247 bp, Homo sapiens; identical to SEQ ID NO: 59917

SEQ ID NO: 77352 - DNA, 4177 bp, Homo sapiens; identical to SEQ ID NO: 59918

SEQ ID NO: 77353 - DNA, 946 bp, Homo sapiens; identical to SEQ ID NO: 59919

SEQ ID NO: 77354 - DNA, 2224 bp, Homo sapiens; identical to SEQ ID NO: 59920

SEQ ID NO: 77355 - DNA, 1577 bp, Homo sapiens; identical to SEQ ID NO: 59921

SEQ ID NO: 77356 - DNA, 661 bp, Homo sapiens; identical to SEQ ID NO: 59922

SEQ ID NO: 77357 - DNA, 716 bp, Homo sapiens; identical to SEQ ID NO: 59923

SEQ ID NO: 77358 - DNA, 1389 bp, Homo sapiens; identical to SEQ ID NO: 59924

SEQ ID NO: 77359 - DNA, 1803 bp, Homo sapiens; identical to SEQ ID NO: 59925

SEQ ID NO: 77360 - DNA, 1253 bp, Homo sapiens; identical to SEQ ID NO: 59926

SEQ ID NO: 77361 - DNA, 1315 bp, Homo sapiens; identical to SEQ ID NO: 59927

SEQ ID NO: 77362 - DNA, 488 bp, Homo sapiens; identical to SEQ ID NO: 59928

SEQ ID NO: 77363 - DNA, 977 bp, Homo sapiens; identical to SEQ ID NO: 59929

SEQ ID NO: 77364 - DNA, 1829 bp, Homo sapiens; identical to SEQ ID NO: 59930

SEQ ID NO: 77365 - DNA, 1644 bp, Homo sapiens; identical to SEQ ID NO: 59931

SEQ ID NO: 77366 - DNA, 2293 bp, Homo sapiens; identical to SEQ ID NO: 59932

SEQ ID NO: 77367 - DNA, 3421 bp, Homo sapiens; identical to SEQ ID NO: 59933
  misc_feature (1)...(3421): n = a,t,c or g

SEQ ID NO: 77368 - DNA, 1483 bp, Homo sapiens; identical to SEQ ID NO: 59934
  misc_feature (1)...(1483): n = a,t,c or g

SEQ ID NO: 77369 - DNA, 2646 bp, Homo sapiens
tttcgtgtggagcaagatggcggctcatctgtcctacggccgagtgaacctaaacgtgttgcgcgaggcggtgcgtcgcgagctgcgcgagttcctggacaagtgcgcaggaagcaaggcaatagtttgggatgaatacctaactggaccctttggcctgattgcacagtattcactattgaaggaacatgaagtggaaaaaatgttcacacttaaaggaaatcgtttgccggcagctgatgtgaagaatataattttttttgtcagacccaggctagagttgatggatataatcgctgaaaacgtgctcagtgaagatagacgaggcccaacgagagattttcatattctgtttgtgccacgccgtagcctgttgtgcgaacagcggttgaaggatctgggtgtcttgggatcctttattcacagggaggagtacagcttagatctcattccattcgatggggatctcttatccatggaatcagagggtgcattcaaagagtgctacctggagggtgaccagacgagcctgtaccacgcagccaaggggctgatgaccctgcaagctctgtatggaacgatcccccagatctttgggaaaggagaatgcgctcggcaagtggccaatatgatgatcaggatgaagagagagtttacaggaagccagaattcaatatttcctgtttttgataatctcttgttgcttgatcggaatgtggatttattaacacctcttgccactcagctgacatatgaaggactcattgatgaaatttatggcattcagaacagttatgtgaaattacctccagagaaatttgcacctaaaaaacagggcgatggtggtaaggacctccccacggaagcaaagaagctgcagctgaattctgcagaggagctctatgctgagatccgagataagaacttcaacgcagttggctctgtgctcagcaagaaagcaaagatcatctctgcagcattcgaggaaagacacaatgctaagaccgtgggggagatcaagcagtttgtttcccagttgccccacatgcaggcagcaaggggctcgcttgcaaaccatacctcaattgcagaattgatcaaagatgtcactacttctgaagacttttttgataaattaaccgtggaacaggagtttatgtctggaatagacactgataaggtcaacaattacattgaggattgtatcgcccaaaagcactcgttgatcaaggtgttaagactagtttgcctccaatccgtgtgtaatagtgggctcaaacaaaaagttttggattattacaaaagagagattctccagacatacggctatgagcacatattgaccttacacaacctggagaaggccggcctgctgaaaccgcagacggggggcagaaacaattacccaactatacggaaaacattacgcctctggatggatgatgttaatgagcaaaaccccacggacatatcgtatgtgtacagtgggtatgccccgctcagtgtgcggctggcccagctgctttcccggcctggctggcggagcatcgaggaggtcctccgcatcctcccagggccccactttgaggagcggcagccactgcccacaggactgcagaagaaacgtcaaccgggagaaaaccgagtgactctgatatttttccttgggggcgtaaccttcgctgaaattgctgccctgcgatttctctcccagttggaagatggaggtacagaatatgtcattgccaccactaaactaatgaatggaaccagttggatagaggctctgatggaaaaacctttctaggatgttcagaggagacttaacaagtgtactgcagaataaactacctctttgaagaaattgctgaaaggaagtaaaaccccatagaagaaacatgggaatacagaatatattctggggtcagcttcttaaattatactactgtttactgctttctccgtctcttttgtattcccttttttttttcctttgaaacggagtcttgctctgtcacccaaactaaagggcaggggcacggtctcacctcacttgcaacctccacctcctaggttcaagcaattctcctgcctcagcctcctgagtagctgggactacaggcatgcaccaccacacccggctaatttttgtatttttagtagccatgggtgtttcaccatgttggccaggctggtctcaaactcctgacctcaggtgatccacctgcctcggcctcccacagtgctgggattacaggcctgagccaccgtgcctggcccctaatctgctgaagaaagaagaatagaagaaaatcaacctgagtaaaagcagcactggttttgagttttctaagctcagggtcttcattagagacctctggaaatacattaaggatggtgggggtagataatccattcagccagacaaacggggccagctcttaaaataagaaagctgagactgaggaggtgaaactgaaaataaaaagagaaagttcatcctctaatccccagtgctgtatttcttcaaggtgcatcaggcctaggacagtggttaagtgttgggagctggagatcattttatcactgagttgagatttctttttcctgcagagtgtgggagattatatttagggtcattgtatt

SEQ ID NO: 77370 - DNA, 3048 bp, Homo sapiens; identical to SEQ ID NO: 59936

SEQ ID NO: 77371 - DNA, 1570 bp, Homo sapiens; identical to SEQ ID NO: 59937

SEQ ID NO: 77372 - DNA, 1104 bp, Homo sapiens; identical to SEQ ID NO: 59938

SEQ ID NO: 77373 - DNA, 3205 bp, Homo sapiens; identical to SEQ ID NO: 59939

SEQ ID NO: 77374 - DNA, 957 bp, Homo sapiens
aattcccgggtcgacgtttcgtcacgcgatcactcttaatttaaattagctgggctgttgttggggagggggtaaggaacgttttttgtagttatttgtgcaacccctgctctagaaatagtttgggtaactgtttcctttccaaaaggactctctgggtacgccgtctttctctttgcctcagccacttccttccttggcctcaccctccccagtgcactgaagaaggtaaccgggtccagacccacgcggcgccagttctccggcgggaaggaaaaccgcgcagagaggcagcaatgaatgtggatcacgaggttaacctcttagtggaggaaattcatcgtttgggttcaaaaaatgctgatggaaagttaagcgtgaaatttggggtcctcttccgtgatgataaatgtgccaacctctttgaagcattggtaggaactcttaaagctgcaaaacgaaggaagattgtaacatatccaggagagctgcttctgcaaggtgttcatgatgatgttgacattatattactgcaagattaatgtggtttacatatctttatgtactgccattttttgtttctggtaaactggaatataaagtgaaagaacaaacatttgaacatacttaatgtatttttatagaactttgtaaacgaaaggagattcatgttttagaagtctgtccttttttatatcttgaaagaaaatctatgtatgatgctataaaataaatcctattatttttctcaggaatctggttaggaattgcaggcaatgagattttttgcggggcagggatgggaatgtttgttcataaataattagacattttctatagatatttgacattctgcgaaagcaacaagcaaactgaagaccaactcctatgagaaatattatgatgtttatgtaataaagacatgtaactgtcttaaatttgcaaaaaaaaaaaaaa

SEQ ID NO: 77375 - DNA, 2279 bp, Homo sapiens; identical to SEQ ID NO: 59940

SEQ ID NO: 77376 - DNA, 1849 bp, Homo sapiens; identical to SEQ ID NO: 59941

SEQ ID NO: 77377 - DNA, 1971 bp, Homo sapiens
tttcgtccttgagcccagtgggtcaaggctgctttgagccgtgatcatgccactgtactccagtctgggcaacgggaagactctgtaaaagcgaatgattaaaaataagtgttgggattatattttctttggatttctcttttctatttaaagattgccctatcagaatcccatcttcatttttttgttctttctgacataggttttcaagggacatgagtgacccgaggatggtgttgagcctctctttgtaagggttgtttctttgttactcacgtactggtaattatcttaccatctctgcagagcccacccacctttgggttcctgttggacatcgatggagtgcttgtgcggggccacagagtgatccctgctgctctgaaagccttccgaaggctggtgaactcccaggggcagctgcgggtgcccgtggtttttgttacaaatgctgggaacatcttacaacacagcaaagcccaggagctgtcagccctgctggggtgcgaggtggatgcagaccaagttatcctctctcacagccccatgaagctcttctccgagtaccatgagaagcggatgctggtgtctggacaggggcccgtgatggaaaatgcccagggactgggcttccgaaatgtcgtcaccgtggatgagctgcggatggcctttcctctgcttgacatggtggacctggagcggcggctaaagaccacgcccctcccgaggaatgacttcccccgcattgaaggggtgctcctcctaggggagccggtccgctgggagaccagcctgcagctgatcatggatgtcctcctcagcaatgggagccctggggctggcctggcaacacccccctacccccacctccccgtcctagccagcaacatggatctcctgtggatggctgaagccaagatgcccaggtttggacatggcacctttctgctgtgcctggaaaccatttaccagaaagtgacgggcaaggagctgagatacgagggcctgatgggcaaacccagcatcctcacttaccagtatgccgaggacctgatcaggcgacaggcggagaggcggggctgggccgcccccatccggaagctctatgctgtgggtgataaccctatgtctgacgtatacggcgccaacctgttccaccagtacctgcagaaggcaacgcatgatggggcgccagaactaggggccgggggcacacggcagcaacagccctcagcaagccagagctgcatctccatcctggtgtgtacaggcgtctacaatcccaggaacccacagtccacggagcctgtccttggaggaggggagcctccattccacgggcaccgagacttatgcttcagtccagggctcatggaggcctcccacgtggtgaatgacgtgaatgaggctgtgcagctggtcttccgcaaggagggctgggctttggagtgagggcagtgcggtggaggtgagggggtgagcctggacctgtgggcgagtcccattggctgggctctggcctgatcactgggctcaggtcagggcttggttcccttgccacccttcttgctgccccatgagtgtggcattactggtcacttggaagaagacagtgactctttttccctgctgggtagcattttgtatggaacggttggaattttctgggcccagttcccacgtgcctttcgtggcagtctaacctcaggccattctcttcccctgtgtgcctcagtgtccttctcatttcagtagggacttctgaaatgggggaggcagtgtggaatactgtggatgtctgtgcagagcctttgccggcactgaaggcatgcagcctgtcggcagagtgtcttaacaccagatgctactttttactgtattgtagtttattgcccggagatgtggggctttttttttaaataaaataatcataataaatgttcatgatgctgactcttgtgaaaaaaaaaa

SEQ ID NO: 77378 - DNA, 5365 bp, Homo sapiens
tgatcgaccgccctggaattcccgggtcgacgatttcgtcacgaacctaattcatctctccagcaaaggacacatctctccagcaaaggacacctctctccagcaaaggacacctgcagagatgtccccagtccttcacttctatgttcgtccctctggccatgagggggcagcctctggacacactcggaggaaactgcaagggaaactgccagagctgcagggcgtcgagactgaactgtgctacaacgtgaactggacagctgaggccctccccagtgctgaggagacaaagaagctgatgtggctgtttggttgccccttactgctggatgatgttgctcgggagtcctggctccttcctggctccaatgacctgctgctggaggtcgggcccaggctgaacttctccaccccaacatccaccaacatcgtgtcagtgtgccgcgccactgggctggggcctgtggatcgtgtggagaccacccggcgctaccggctctcgtttgcccaccccccgtcagctgaggtggaagccattgctctggctaccctgcacgaccggatgacagagcagcacttcccccatcccatccagagtttctcccctgagagcatgccggaacccctcaatggccctatcaatatactgggtgagggccggcttgcgctggagaaggccaaccaggagcttggtctggctttagactcttgggacctagacttctacaccaagcgcttccaggagctacagcggaacccgagcactgtggaggcctttgacttggcgcagtccaatagcgagcacagccgacactggttcttcaagggccagctccacgtggatgggcagaagctggtgcactcactgtttgagtccatcatgagcacccaggaatcctcgaaccccaacaacgtcctcaaattctgtgataacagcagtgcaatccagggaaaggaagtccgattcctacggcctgaggaccccacacggccaagccgcttccagcaacagcaagggctgagacatgttgtcttcacagcagagactcacaactttcccacaggagtatgcccctttagtggtgcaaccactggcacagggggccggattcgagatgtccagtgcacaggccgcggggcccacgtggtggctggcactgccggctattgctttggaaatctgcatattccaggttacaatctgccctgggaggatctaagcttccagtatcctgggaattttgcccggcccctggaggttgccattgaagccagtaatggagcttctgactatggcaacaagtttggggaaccagtgctggctggcttcgcccgctccttgggcctccagctcccagacggccagcggcgtgagtggatcaagcccatcatgtttagtgggggcattgggtccatggaagctgaccacataagcaaggaggccccagagccaggcatggaagttgtaaaggttggaggtcccgtctacaggattggagttggaggtggagctgcttcatctgtgcaggtgcagggagataacaccagtgacctggactttggggctgtgcagcgaggagacccggagatggaacagaagatgaaccgtgtgatcagggcttgtgtggaggcccccaagggaaaccccatctgcagccttcatgatcagggcgctggtggcaatggcaatgtcctaaaagagctgagtgacccagctggagccatcatttacaccagccgcttccagcttggggacccaaccctgaatgccctggaaatctggggggctgagtaccaggaatcaaatgctcttctgctgaggtcccccaaccgggacttcctgactcatgtcagtgcccgtgaacgttgcccggcttgcttcgtgggcaccatcactggagaccggagaatagtgctggtggacgatcgggagtgtcctgtcagaagaaatggccagggggatgcccccccgacacccccgccaacccctgtggacctggagctcgaatgggtgctgggcaagatgcctcggaaggagttcttcctgcagaggaagccccccatgctgcagcctctggccttgcccccagggctgagcgtgcaccaggctctggagagggttctgaggctgcccgccgtggccagcaagcgctacctcaccaataaggtggaccgctccgtgggaggcctggtggcccagcagcagtgcgtggggcccctgcaaactcctctggcagatgtagcggttgtggcactgagccatgaggagctcataggggctgccacagccttgggagaacagccagtcaagagcctgctggacccaaaagtcgccgcccggctggccgtggccgaagccctcaccaacctggtgtttgctctggtcactgacctccgggatgtgaagtgtagcgggaactggatgtgggcagccaagctcccaggggagggcgcagctttggcggatgcctgtgaggctatggtggcagtgatggcagccctgggtgtggcagtggatggtggcaaggactccctcagcatggctgctcgggttggcactgagaccgtgcgggctcctgggtcactggtcatctcagcctatgccgtctgcccagacatcacagccactgtgaccccagacctcaagcatcctgaagggagaggccatctgctctatgtggctctgagccctgggcagcaccggctcgggggcacagctctggcccagtgcttctcccagcttggggaacaccctccagacctggaccttcctgagaacttggtgcgggccttcagcatcactcaggggctgctgaaagaccgcctcctctgctcaggccacgatgtcagtgacggaggcctcgtcacatgcctgctggagatggcctttgctggaaattgcgggctacaggtggatgtgcctgtccccagggttgatgtcctgtctgtgctgttcgctgaggagccaggcctcgtgctggaggtgcaggagccagacctggcccaggtgctgaagcgttaccgggatgctggcctccattgcctggagctgggccacacaggcgaggccgggccccacgccatggtccgggtgtcagtgaacggggctgtggttctggaggagcctgttggggagctgcgagccctctgggaggagacgagtttccagctggaccggctacaggcagagcctcgctgtgtggcagaggaggaacggggcctgagggagcggatggggcccagctattgcctgccccccacctttcccaaagcctccgtgccccgtgagcctggtggtcccagcccccgagtcgccatcttgcgagaggagggcagtaatggagaccgggagatggccgatgccttccacttagctgggtttgaggtatgggacgtgaccatgcaggacctctgctctggggcaattgggctggacactttccgtggcgtggccttcgtgggcggcttcagctatgcagatgtcctgggctctgccaaagggtgggcagctgctgtgacctttcatcccagggctggggctgagctgaggcgcttccggaagcggccagacaccttcagcctgggcgtgtgtaatggctgtcaactgctggctctgctcggctgggtgggaggcgaccccaatgaggatgctgcagagatgggccctgactcccagccagcccggccaggccttctgctacgccacaacctgtctgggcgctacgagtctcgctgggccagcgtgcgtgtggggcctgggccagccctgatgctgcgagggatggagggcgccgtgctgcccgtgtggagtgcgcacggggaaggttacgtagcattttcttctccggaactccaagctcagattgaggccaggggcttggctccactgcactgggctgatgatgacgggaaccccacagagcagtaccctctgaatcccaatgggtccccagggggcgtggctggcatctgctcctgtgatggccgccacctggctgtcatgcctcaccctgagcgggccgttaggccttggcagtgggcatggcgaccccctccatttgatactctgaccacctccccctggctccagctctttatcaatgcccgaaactggaccctggaagggagctgctgactggccacaggggctcacctgggccccatggcttttcacctaagtgggtcctgccccctcccccatgaccttcaggagcaccccatattatttccaaaaatatcttggacagacaaggaccaaaatgccaaaatctcagcggactcgatgatctgcctgctgatgttccttctgtggctgtgtctattttcagttctgctctaacatggcatgccctttctcagcccaggaaacagcatgtggttcagagaaaagagcgacaaggaaaagttaggactcctgaggtccgaacaggggcttctgttgcccacttcacaacacccagtgatcaccggtgtgcaattgcctccttggctctgagggatgttttgcgctcccttttctcatcattggggttagcgggtgcagacaaattcagcaatagtatgcagatcagcccctcaccacctcattgttctcatctggaactgaaactttctggatttctcttgaagtgctacactgcactgaatgtaaggaattgttgcttgtggaagtttctcagcgtttctggctgtcttagggctggcctcagaacccagcattcctgttatttgcttctaaattagcagctctctttttttttttttttttgaggcagtctcactctgtcacccaggctggagtgcagtggcgtgatctcggcccactgcaacctctgcctcctgggttcaagcaattttcctgcctcagcctcccgagtagctgggagtacaggcacacaccaccacacccagctaatttttgtatttttagtagagatagggtttcaccatgtctcccaggctggtctcaaactcctaacctcaagtgattcgcctgcctcggcctcccaaagtgctgggattacaggtgggagccactacagctggcccagcagctctgtttctgatagaggtggttggggctctcatccctagatcctaaccctttagtatgctggaattctactcttcacttactgcattgactgttgttgattagttattattgcaaagcactgtcaccggcctcagggagtttatgtgtaatagaattaaaaataatagctgtgtataacacttagctcaagccacgcatgtgtgaggcatttggtatgtatctgaattaattctcactaaaattcagcaaaggacttgatagcctctccccgccttttcaataaaggatgaatgaagaaaaaaaaaa

SEQ ID NO: 77379 - DNA, 581 bp, Homo sapiens
ttttttttttttcaaatgagttggtttaatttcaggtgatacaaagtttagggtagaacaaggaccaaagaacagactctggcaagattctgagctggttttactttaaattcacagttatggtaggaatgacttagtgaaaacaactaaagagatgatgagccactgtaagatttttctttttttacaaaagtttattcttaaatgtacaacagctccaagacaacacttaattccagctatacgtggcaaaagatgttatggcagggaatagagaggtttaaatacagatgaaataaagggtcaccatctcctcaggcacaaggaacagcttactttttgccagatttcttaattccacctgtggccaagggccccttccccgcggccttcgcttttagctcctcgagtttcttctgctcctctttttgtttctgcttgaaagccttatcttcctcgtccatctccttggcctgcttcttgggctgtttcagtggcttcttcttgccaccttcgcggccggacatggcgcctgccgccgcttccccagaccctgccaccggaaagctccttcagaaaag

SEQ ID NO: 77380 - DNA, 1682 bp, Homo sapiens; identical to SEQ ID NO: 58672

SEQ ID NO: 77381 - DNA, 1938 bp, Homo sapiens; identical to SEQ ID NO: 59948

SEQ ID NO: 77382 - DNA, 1743 bp, Homo sapiens; identical to SEQ ID NO: 59949

SEQ ID NO: 77383 - DNA, 2682 bp, Homo sapiens
ttttggtccaaggggtttaaatgggggaccccccgggttttcccctccccgcggtgttaaaacccgggcccgggaattgaattttggggccccataaaaaaaattttaccttgccagcccgggggcgttaaacttggttccttaaaacgggcccccccttttttttttttttcatttttgtcatttattaacctggaagcaaatatgacaaaacagtcatactagtaagtcatctgaattttttaaatctcttaataaaacaaccaaatcccacgcaaatcagtccacaagggaggcccccgcctccacagtgcagggtgactgagtgtacaactacgggccaacccccgcctctcaaccggaagggagggcactcaaaagaggaatttagagaaaaggcggagagggcggacctcgggaaagggtctgggcgggagccccacctggctccccacccctcccgaaaccaggggaaaagcctgtggcgtggcgctgctgtctcccattagcagttacagggccgaggcttcccgctgattggtggaaattccgatcttctgatccctgatttgcatagagactggggcctgcacccccgccccccaccagcagcaatcggccaacgccaacggtgctgcgccaggagcgttctgggctcggcgccgcccagtcctcctggtcatctcggaagctgttttcttccagctgcttgggacagcttttgtgaatgcctcccttagggatgttcgaaagaggagtggcccgacactgctagaaactggtcctttccttcccacctgtggtaaggatagtttctgctacggcaagcactcaaactcaggctggtttgaagctaaaggattcagacgacttccaagtatcaagaatgaaagaaaaagaaacataataaggagcccaccaccaagacttgtagttatttcctcagaaagcccccatgccccatttgtgacaaaatccattcctgaagactgattctagaagaaaccaagtaagatctagaactttccccaccagcatcactttccaaaatgtaggcagaagtttaccaaatacaatttattcaggaaaaaaataaattttaagaacttatttttattttattttagaacttaaaaataaatttttaagaactaaaaaagtgaaagagcccagtggctgagcagaaaacagcttactacaaggagtaccagatcagggcagagacttcccagctgggtaaggcatgctttgagggaagactccaccagccctgccaggaaagggcagcaggcgcagtgcccctatggggcccacatggctggtaacagcagcaggacacctcttccaaagctgtccaccagccccactaggggctcctactcatggcaaaaaagactacatgagcccacaactgtcaactaacacagtgccacctcctcccaaagcaaacacatatacatacaatgttaagaacctattatcagaacagcagtgcagcagaccctggccttggtctctgaaagtcctgtgtcactggctgtaaggacgcttggccacaggttcctcctccttctcccgcttcagccattgctctaggagtcctgcagtgcctctcttggtggggagtggactcttctgcaggaactgactggaccactggggaacatctgactcttccttttgaggtgtttttgagtcttcctttttgggtgactttgtggccaaccactgcaacatcctctggctactgccacttgccctgagctcctttttgaccaccaagtcgacaggagccagacactcaggagtgttgtttcgcgagttgttcaccacagaagagactgcatggaaggtgatgttctctgttgggtggattaatttcagagcttcctgagttgagacttcaccaaagtcaagccatttagaaactgcctcctctccatctaatatggcaggcatcctgtggtggatgtcactcaagcctttgcaggaatccactgtgatgatggtataggaatacaggacatctcctccctctgggggctcccagcagtcaaagatcccggccattgtcagcagcctccagttgtcccagactttctcccagttctcaggactatctgcagcaccaatgctacctgacttctctgtcttgatttgaggaaaatagatgaagtatggctgcctctggtttgttccctgacatcgctgccactcatagaatccatctgctaaaacgacacagcgtcttccctttcccagaggcaccttaaatgaccgtttctccattacggtatcactacgacagttggtagtattgaactgcagcttggaaggatcactttctttgaaccaagaagggaccaagccccagcgcatgggagcaatgatacgctcagatgagtctgcatccttctcaaagtgcagtcgagacagaagcactgggctgttggattgaggactcttgttgtaagaggggcagtacttatcagggtccctccactccgggagccgctgctggccccgccgatcctggtaggcgcaagctctcgtgagaacatctctaggtaagtgacaggatgttcgcccacacattcttcaacaccgcccctcgcaacctcgccccggcagcgcgcgtcacctccctcgactctcctcacccccgctccgctccgctttggc

SEQ ID NO: 77384 - DNA, 1568 bp, Homo sapiens
cggacgcgtgggttttcgccggaagtggaagaccaggcagcccagctgaaggcagtaagctcggctcacagtcgcaggagagttctggggtacacgggcaaaggggcttgagaaggcccggaggcgaagccgaagagaagcaactgtgccccggagaagagaagctcgcccattccagactgggaaccagctttcagtgaagatggcagggccagaactgttgctcgactccaacatccgcctctgggtggtcctacccatcgttatcatcactttcttcgtaggcatgatccgccactacgtgtccatcctgctgcagagcgacaagaagctcacccaggaacaagtatctgacagtcaagtcctaattcgaagcagagtcctcagggaaaatggaaaatacattcccaaacagtctttcttgacacgaaaatattatttcaacaacccagaggatggatttttcaaaaaaactaaacggaaggtagtgccaccttctcctatgactgatcctactatgttgacagacatgatgaaagggaatgtaacaaatgtcctccctatgattcttattggtggatggatcaacatgacattctcaggctttgtcacaaccaaggtcccatttccactgaccctccgttttaagcctatgttacagcaaggaatcgagctactcacattagatgcatcctgggtgagttctgcatcctggtacttcctcaatgtatttgggcttcggagcatttactctctgattctgggccaagataatgccgctgaccaatcacgaatgatgcaggagcagatgacgggagcagccatggccatgcccgcagacacaaacaaagctttcaagacagagtgggaagctttggagctgacggatcaccagtgggcactagatgatgtcgaagaagagctcatggccaaagacctccacttcgaaggcatgttcaaaaaggaattacagacctctattttttgaagaccgagcagggattagctgtgtcaggaacttggagttgcacttaaccttgtaactttgtttggagctggcacctcttgaaataaaaaggaggatgcacgagctggcaggcatgcagcaaggcttgttcttgtctgggctgggttcccctttatgtttgaaactagaggaaataggagtatgctgggcaacttgttatttttaaaatgttgtaaatgttccttctggtgactcttagtaatgaaagtcggagaaagggggaaacctcaggctactgataatatataaaatcttggccgggcacagtggctcacgcctgtaatcccagcactttgggaggctgaggcgggtggatcacttgaggtcaggagttcaagatcagcctggccaacatggtgaaaccccgtctctactaaaatacaaaaattagccgggcgtggtggcaggcgcctgtaatcccagctacttgagaggctaaggcacgagaatcgcttgaacctaggaggcggaggatgcagtgagctgacatcgtgccactgcgctccagcctgggcgacagagcaaaactccatctgaaaaa

SEQ ID NO: 77385 - DNA, 3252 bp, Homo sapiens
tttttcaaagttagcaagcatcctccttcattaaaatgaaaacccaggaattctgcatccaggaattaatccagcaaaaaatactgggtacttcctaaatgctcttcaagagataattggttacacaaattatgtgatatctaagagacagcagagcagggacatggaaacttaacacagacaaccttcaagttgcacattttaatttacaatttttaccaataaaaaggattagtttacaaaaagggaagtcctttatacaaaataaggattttttttttccatttgtaaagagaatccactgtcatgttttgccttgtcaagtcaaaactcaaatagcttgttttggtaaaattattccagaaacataatccagacaaaatcaataacgtcatcagcttcctaaccatgtttaagaggaataacttcatgaacattttgccctgaactgaagagttctaaatacttgtaaacctttaggaaaaaatgactgctcgcaggcagctgactggtaagagggtacaccagagactccgggtcactcactgtcagaatattcttatacatacaatgagtctccacgcctgtacaatgagtgtacgtgcaacataattggagtaatggcctctaaaattttacaagtaaactttattgtggccacagatgaacaacaaaacatgacagttaaggttcagactctccccacctattttatcatataaattaaatatggagaggtacacacaaactctattcaaaatgagaagttgtttgccaactctcatttcctaggataacacacatcacactgtttaagagtgggggaaagaatagtcatactgttagagcacaatgtttcctgaaaagaaactgatcaaaacgtttgaagcctttttagttgcctcaaagtgtgacagccactcaatactgctcctaacagtctgctttcagataacgtcataaaataaaataactgtgtgaaaagccatggccttcaaaaaactttatttggttatgagccaagctctgataggaaaagcccacctacgaaaaaaaggtgtgggtatttaagctggtatgattcacagagcttgtacattcatgactcaaaataacacaccctcaaacccaaatgattctaaagccatttcaaccttaaatcatgttattcccttagatgtgcttacattagctttaaaaaatgatctacgtgcagagaggagctgcgccttcctcacaattaattgaaacatgaccaaaaaacgggggataggcaaaaaagtgacatttaaatagcgtatgagggtctctcctcctttactcaatgaacacatatccagaatgagattgaaatggaatcaatgcccaggagcctctcaaagagagcatctccctgtagccaacatgatctggatcctcctaacacaaagcaacccaactactccagctacacaaagccagtaggcctacatatgaaacgcaaaggggttgcatcccccacggtttaaacctaacccatgttagctgcaactccactacagtcttgatcacttagctcaggaaacaaacacccagcaacaaccctcgtatctcattaataccaatctgtggccctcactgactcagtggtacttttttataaaaatatctgaagaagtggcaaacggttacaacggatgtcaggtcgaagcaattccaaaagctgagaaaacgcttcatccgctgcttgtcttctccccctattgctacagttctgccaccaaagggggaaaattacgtgaatatgattgttgtgaccaagccttggcaaaagtcaataaataacagaacctgtcaagggcagagcaattttatgggcaacctcttctagttgcaaatgtgggggttgggaaaagtgggagagaggcatgtgtgcaagaaagagataagggtccttttgggaagggtttggtgacccagccccagctcaatgccagcagactaggacccgctaaaacccattattcagacggaaaggggagaagagaagacaccaaaaaatgtagtcagttttgcaatttgcacagttggtatttgttcttcacagcagtaaggacttgaatgagaatcgtgaaacttgtggaacacttatatttttcttcgggatttaagaaactttgtctcgtactgaaagactacattcagtgtgggtcaggtccaacagtgttagccagaacgcagttgttaagtgcacccagcactgggagtaaatgtggcttgagaggagcggctgcccgaggccgccccttcactggtctccaagtcgaaagccctggccccagttgtgtctcccgcctccgccattctgatcagcagctcgcctcatgctagcagggggcacaccaaatcctgatactcctcctctcctactgggcagccagcggtacaaaaactgaggtgtggatagaaaatttcttcctcccaagtccattgggtatctgaacattaggaaaaaataaagatgtccaaccagatttccaataagctcattgattaccgagcctccgatgatatagttgaatccaaggataacccagggtaaatagcaggccttaaatcgtgttccaaaccaaaatgatacaatcatgtctctgttcagctgggcccagacataaagtactgacatgatcagaggaatcatcagcaactgcatatccattgctaagccagtaatcacgatgcaaatccagttaaagaggagcatgaataaatagtctgctggcctcccatcaaaagctcctgtttcaagtcgcgtagaatactgatataagaaatataaattgaccaaataaagaaatccagttcctggacccacagggaaataaaaggtggcagtgattggcctccaaatctgaaagcgataaaggaaggcttcgggccagaggaagaggtaggccgggctgatgaggccgagtttgccgaccaagggcacggcgacggtggcggcgaaccaatagcgcgtgatcgccgggatgctcctgaaccagtctccgatgtccgacatcttcgacccacaggtagccaagatgcacaagaccgcccgactccccgtgccgaccccctcacgacgcggccggctccgcgactgttaggtgtctaggtggaagccgccgaagccgcgatgcagaaggcggagacgggcggacgtggcgccaccgaattcggaccagcgaggcagccttctgaggcgaaacttccccttccggcacgaaa

SEQ ID NO: 77386 - DNA, 899 bp, Homo sapiens; identical to SEQ ID NO: 59954

SEQ ID NO: 77387 - DNA, 2418 bp, Homo sapiens; identical to SEQ ID NO: 59955

SEQ ID NO: 77388 - DNA, 2047 bp, Homo sapiens; identical to SEQ ID NO: 59956

SEQ ID NO: 77389 - DNA, 1958 bp, Homo sapiens; identical to SEQ ID NO: 59957

SEQ ID NO: 77390 - DNA, 721 bp, Homo sapiens; identical to SEQ ID NO: 59958

SEQ ID NO: 77391 - DNA, 1806 bp, Homo sapiens
ggaattccttgtggctggggactaagggagaaagattaaggggtatggctgaattcccccgtcaccccttgccctcaggcttccttcttcctttccctttggctaatcctgcatgggattagctgaccatcctgttttccatcccagagcctcccaaggctgggaaagtagggctgaagggctagatgtttggtctcaggaagtggggcccacccattcccagaaggagcttctttacctcttagccctgaggtttcctccttcccatcttctgtgcttccagagaacaactttgttcctatggtcacccccactatccccatgaccgcatgaagaggcagttattgctttagtctttcattgcaaccactgggctccctttgaacccggcccaatctttggtcccagcattttcccactccagtgtatccagggtgttccaggtgagctggggaaggaagtgagcatggcctcagctgcagatctcctggagcagcggcatcatggcagacaggccctggatgtgctggatttggtacccgtaggcctcattaatgctccggagctcagccagcaggcctagcaacttcgcatacagaaaccgatcccggggccttcgctgctggcccttgatgtagctttgcagagtcagtgccatctcctcttgcagctgatcaatctcatctctctgggtaactccaggtcggtctgtaagatagggagcaggagagaagagggccatggcagccaagagcacatactcaggctcttggagctgcagttttcgtagtgttccatggaagtgaaagagcaactccaaaaactctacctggaaccccacacgggctccatcttcaattgtgtagcgaagaggcccgcagaggaagttttgtgtttggagacagaaagtggtattgagtacgatgtgacagatttccacagctgctcccttgagaagggagatctggtcttcaatgggcagggaacggaagacgggcaggtccttagtaaacttgatgacttgcagtaccatgaaagtgttgatgtctgcgaagtgtgtgaccagaggcagcacaggggccagggtgggcaagggctggtgatggatgaacagatgagctggaggcctaaactgcacaaactgttcaaacatggtgcccatgtggcgggtgtgggcccccaggagtgtccggatcagctcttcttgctccttactcagttgcacaggtgtttgctgtgcccgccgctgggcctgctttgctcgccgcaatgccagggcttctgccgacagtatcatgtctttcctcatgccagcatctaagcacttctgcaacctgcaggctgggcagtggcgcctctgagtcttgctgacttcacagcttccagcaaaggggcaggtgggaccaatgcttttgctgactgttctcctgaagaaacccttgcagccctcacaagtcagcgcattaaagtggtagcctgtggcttggtccccacataccacacagttcctcagctcatcttccctactggccatgacgtcacgtgttggggtggctgtcacagactcctgcttctcttaggcagcatgtcacctgcaggccacagaatctggtatggaatgcctctccccaaactcccacgctgttgctggttttcctctgatctcaggagttgccagtgattggagttaggattatcatccctcctgctgcccagcagtggtcagtcatttttcatgagggatggactaggaaaatgaagtgtctattataaggagagttcctgtaacttaaggagcaagctcac

SEQ ID NO: 77392 - DNA, 1617 bp, Homo sapiens; identical to SEQ ID NO: 59959

SEQ ID NO: 77393 - DNA, 1585 bp, Homo sapiens; identical to SEQ ID NO: 59960

SEQ ID NO: 77394 - DNA, 485 bp, Homo sapiens; identical to SEQ ID NO: 59961

SEQ ID NO: 77395 - DNA, 2031 bp, Homo sapiens; identical to SEQ ID NO: 59962

SEQ ID NO: 77396 - DNA, 5525 bp, Homo sapiens
tcgacccacgcgtacgcggacgcgtgggatgacgggcccggtgctgaagggcagggaacaacttgatggtgctactttgaactgcttttcttttctcctttttgcacaaagagtctcatgtctgatatttagacatgatgagctttgtgcaaaaggggagctggctacttctcgctctgcttcatcccactattattttggcacaacaggaagctgttgaaggaggatgttcccatcttggtcagtcctatgcggatagagatgtctggaagccagaaccatgccaaatatgtgtctgtgactcaggatccgttctctgcgatgacataatatgtgacgatcaagaattagactgccccaacccagaaattccatttggagaatgttgtgcagtttgcccacagcctccaactgctcctactcgccctcctaatggtcaaggacctcaaggccccaagggagatccaggccctcctggtattcctgggagaaatggtgaccctggtattccaggacaaccagggtcccctggttctcctggcccccctggaatctgtgaatcacgccctactggtcctcagaactattctccccagtatgattcatatgatgtcaagtcgggcggagtagcagtaggaggactcgcaggctatcctggaccagctggccccccaggccctcccggtccccctggtacatctggtcatcctggttcccctggatctccaggataccaaggaccccctggtgaacctgggcaagctggtccttcaggccctccaggacctcctggtgctataggtccatctggtcctgctggaaaagatggagaatcaggtagacccggacgacctggagagcgaggattgcctggacctccaggtatcaaaggtccagctgggatacctggattccctggtatgaaaggacacagaggcttcgatggacgaaatggagaaaagggtgaaacaggtgctcctggattaaagggtgaaaatggtcttccaggcgaaaatggagctcctggacccatgggtccaagaggggctcctggtgagcgaggacggccaggacttcctggggctgcaggtgctcggggtaatgacggtgctcgaggcagtgatggtcaaccaggccctcctggtcctcctggaactgccggattccctggatcccctggtgctaagggtgaagttggacctgcagggtctcctggttcaaatggtgcccctggacaaagaggagaacctggacctcagggacacgctggtgctcaaggtcctcctggccctcctgggattaatggtagtcctggtggtaaaggcgaaatgggtcccgctggcattcctggagctcctggactgatgggagcccggggtcctccaggaccagccggtgctaatggtgctcctggactgcgaggtggtgcaggtgagcctggtaagaatggtgccaaaggagagcccggaccacgtggtgaacgcggtgaggctggtattccaggtgttccaggagctaaaggcgaagatggcaaggatggatcacctggagaacctggtgcaaatgggcttccaggagctgcaggagaaaggggtgcccctgggttccgaggacctgctggaccaaatggcatcccaggagaaaagggtcctgctggagagcgtggtgctccaggccctgcagggcccagaggagctgctggagaacctggcagagatggcgtccctggaggtccaggaatgaggggcatgcccggaagtccaggaggaccaggaagtgatgggaaaccagggcctcccggaagtcaaggagaaagtggtcgaccaggtcctcctgggccatctggtccccgaggtcagcctggtgtcatgggcttccccggtcctaaaggaaatgatggtgctcctggtaagaatggagaacgaggtggccctggaggacctggccctcagggtcctcctggaaagaatggtgaaactggacctcagggacccccagggcctactgggcctggtggtgacaaaggagacacaggaccccctggtccacaaggattacaaggcttgcctggtacaggtggtcctccaggagaaaatggaaaacctggggaaccaggtccaaagggtgatgccggtgcacctggagctccaggaggcaagggtgatgctggtgcccctggtgaacgtggacctcctggattggcaggggccccaggacttagaggtggagctggtccccctggtcccgaaggaggaaagggtgctgctggtcctcctgggccacctggtgctgctggtactcctggtctgcaaggaatgcctggagaaagaggaggtcttggaagtcctggtccaaagggtgacaagggtgaaccaggcggcccaggtgctgatggtgtcccagggaaagatggcccaaggggtcctactggtcctattggtcctcctggcccagctggccagcctggagataagggtgaaggtggtgcccccggacttccaggtatagctggacctcgtggtagccctggtgagagaggtgaaactggccctccaggacctgctggtttccctggtgctcctggacagaatggtgaacctggtggtaaaggagaaagaggggctccgggtgagaaaggtgaaggaggccctcctggagttgcaggaccccctggaggttctggacctgctggtcctcctggtccccaaggtgtcaaaggtgaacgtggcagtcctggtggacctggtgctgctggcttccctggtgctcgtggtcttcctggtcctcctggtagtaatggtaacccaggacccccaggtcccagcggttctccaggcaaggatgggcccccaggtcctgcgggtaacactggtgctcctggcagccctggagtgtctggaccaaaaggtgatgctggccaaccaggagagaagggatcgcctggtgcccagggcccaccaggagctccaggcccacttgggattgctgggatcactggagcacggggtcttgcaggaccaccaggcatgccaggtcctaggggaagccctggccctcagggtgtcaagggtgaaagtgggaaaccaggagctaacggtctcagtggagaacgtggtccccctggaccccagggtcttcctggtctggctggtacagctggtgaacctggaagagatggaaaccctggatcagatggtcttccaggccgagatggatctcctggtggcaagggtgatcgtggtgaaaatggctctcctggtgcccctggcgctcctggtcatccaggcccacctggtcctgtcggtccagctggaaagagtggtgacagaggagaaagtggccctgctggccctgctggtgctcccggtcctgctggttcccgaggtgctcctggtcctcaaggcccacgtggtgacaaaggtgaaacaggtgaacgtggagctgctggcatcaaaggacatcgaggattccctggtaatccaggtgccccaggttctccaggccctgctggtcagcagggtgcaatcggcagtccaggacctgcaggccccagaggacctgttggacccagtggacctcctggcaaagatggaaccagtggacatccaggtcccattggaccaccagggcctcgaggtaacagaggtgaaagaggatctgagggctccccaggccacccagggcaaccaggccctcctggacctcctggtgcccctggtccttgctgtggtggtgttggagccgctgccattgctgggattggaggtgaaaaagctggcggttttgccccgtattatggagatgaaccaatggatttcaaaatcaacaccgatgagattatgacttcactcaagtctgttaatggacaaatagaaagcctcattagtcctgatggttctcgtaaaaaccccgctagaaactgcagagacctgaaattctgccatcctgaactcaagagtggagaatactgggttgaccctaaccaaggatgcaaattggatgctatcaaggtattctgtaatatggaaactggggaaacatgcataagtgccaatcctttgaatgttccacggaaacactggtggacagattctagtgctgagaagaaacacgtttggtttggagagtccatggatggtggttttcagtttagctacggcaatcctgaacttcctgaagatgtccttgatgtgcagctggcattccttcgacttctctccagccgagcttcccagaacatcacatatcactgcaaaaatagcattgcatacatggatcaggccagtggaaatgtaaagaaggccctgaagctgatggggtcaaatgaaggtgaattcaaggctgaaggaaatagcaaattcacctacacagttctggaggatggttgcacgaaacacactggggaatggagcaaaacagtctttgaatatcgaacacgcaaggctgtgagactacctattgtagatattgcaccctatgacattggtggtcctgatcaagaatttggtgtggacgttggccctgtttgctttttataaaccaaactctatctgaaatcccaacaaaaaaaatttaactccatatgtgttcctcttgttctaatcttgtcaaccagtgcaagtgaccgacaaaattccagttatttatttccaaaatgtttggaaacagtataatttgacaaagaaaaatgatacttctctttttttgctgttccaccaaatacaattcaaatgctttttgttttatttttttaccaattccaatttcaaaatgtctcaatggtgctataataaataaacttcaacactctttatgataacaacactgtgttatattctttgaatcctagcccatctgcagagcaatgactgtgctcaccagtaaaagataacctttctttctgaaatagtcaaatacgaaattagaaaagccctccctattttaactacctcaactggtcagaaacacagattgtattctatgagtcccagaagatgaaaaaaattttatacgttgataaaacttataaatttcattgattaatctcctggaagattggtttaaaaagaaaagtgtaatgcaagaatttaaagaaatatttttaaagccacaattattttaatattggatatcaactgcttgtaaaggtgctcctcttttttcttgtcattgctggtcaagattactaatatttgggaaggctttaaagacgcatgttatggtgctaatgtactttcacttttaaactctagatcagaattgttgacttgcattcagaacataaatgcacaaaatctgtacatgtctcccatcagaaagattcattggcatgccacaggggattctcctccttcatcctgtaaaggtcaacaataaaaaccaaattatggggctgcttttgtcacactaggcataggggatgtgttggaaatttaactttgtaagcttggtatgtggttgttgatccttttttttccctacagacaccccataataaaatatcatattaaaattcaaaaaaaaaa

SEQ ID NO: 77397 - DNA, 1913 bp, Homo sapiens; identical to SEQ ID NO: 59964

SEQ ID NO: 77398 - DNA, 1216 bp, Homo sapiens; identical to SEQ ID NO: 59965

SEQ ID NO: 77399 - DNA, 4394 bp, Homo sapiens; identical to SEQ ID NO: 59966

SEQ ID NO: 77400 - DNA, 2782 bp, Homo sapiens
  misc_feature (1)...(2782): n = a,t,c or g
ctcaggggccgccgcctcctgagccgcccagccccggggccgccgcgctgcgccgaccgccaccgccgccgccgccatgaacattttccggctgactggggacctgtcccacctggcggccatcgtcatcctgctgctgaagatctggaagacgcgctcctgcgccggtatttctgggaaaagccagcttctgtttgcactggtcttcacaactcgttacctggatctttttacttcatttatttcattgtataacacatctatgaaggttatctaccttgcctgctcctatgccacagtgtacctgatctacctgaaatttaaggcaacctacgatggaaatcatgataccttccgagtggagtttctggtggtccctgtgggaggcctctcatttttagttaatcacgatttctctcctcttgagatcctctggaccttctccatctacctggagtccgtggctatccttccgcagctatttatgatcagcaagactggggaggccgagaccatcaccacccactacctgttcttcctgggcctctatcgtgctttgtatcttgtcaactggatctggcgcttctactttgagggcttctttgacctcattgctgtggtggccggcgtagtccagaccatcctatactgtgacttcttctacttgtacattacaaaagtactcaagggaaagaagctcagtttgccagcataagtgccaaagaccatcaccagcatctgtccttcagggtgctcggacagaattcttaccacagcaaaggcataagatgcttgatacggaaaatcagaaacttaactcttttgttgcagatagtcatcagtggctctgtaaaaacgcagaggaaaagagccagaaggtttctgtttaatgcatcttgccttatctttttttattactgtgtacaaagatttttttacacaaagaaacttaatgctgtattaataaattcagtgtgtagcttcaattgggatagttccaaaagtgaagattttgtgaggaataagtgcaaattttttttttattttaaaaaattctttgaaactcttaagtctttgtgtctgcaatgaaattgtactccttgacagttgatagattatatattcttccatccctcaaacttgcattccactatatttattttttggcaaaagatgagctgtatttgtttgaaatctgagacactatgttcaattggatgtatctgttcaaatttattcccacgtgacgtggaagtccttcgttggatgtcacaacactacatttaaggttggtaaggatgacttggaggtccatggttttcattaccaacattttaagattctgaatgtcgatggagtctcactgaagagtcaccaaaggtgcctgccctcctcccctgctgggaagtgtcagttggagactgtcccaagggtgctgaagaatccagtggcaggggttctggctgctttccatctgagtgtgggatgggaggggtgttcatgatcatttggatatagcaatctactctgagaaatggaacacaaggagttacctatcactttcacttataattccaaaagatgactacaaccatgtccatgctcagattcaaacagttttccatatcacttttgggtggtaagatgatttacagttttttttttaattggcagcaccactaaccattccttacattcttttttgtatgtgtggttttctttttatttaacccgcagccgacatcgtagtttcttgttttgttttgttttacagagctgttgcatgacttatgttaccatcctaaaaaacactatattaaacatggaataaattgtctttttatgaattaggctttttgaacatcctgtgttgggatttttttgtttttcaattggcaacaaaagctctgtagggctgcagacatttaaagttcacataatcatctgtaagacattatgtattttgtggaaatactagaatttttttcctgattttgccattatatggatttgctattttttgattaatgcaaaagtatatgactttgttttttatgtgatacaccataaatattaaagtgttgaatactaacagtgctgactacaagaaggatgtagtattttggctttctgcattacaacgtcttctggaggaagggagcaggatgggtttcatttgtatctagtgtgtgtcttaacatctttctaaatcggcagtgtaactgcatagtttaacttcctgtctgtctccctcattttactcttccctccttgtcttatgttttggcttttgtgtatcagaggcatctttctttgcagcatccttagtcttgcttcagcnttctgtgggtctctttttcatcctgccttgaaagaattcggagtgtggaagggaggctaggaagtctggtgcagtaggtgagcagacctcttgctgccccagcccaagggtgggtggggcgcacacctgtctttgtgcatgcaaatctgatacacctggcgcatcctctggagagcacaacgcatggaaaggtctggaagctctgtgtagccattccttctgcagtcatcctacccaagtaaaagtaaccttggctatgttaccaccgttttggtcacccaggaggacatcttagcaagggtgcctgcgagggagtgtgggactgggcctcatcctcgccggcgttggaaaccaaggccttgtatgccacgccttatgaagcactgtttcacagttactttcacttcccgaataaaggttaccaggtaattaaaaaaaaaa

SEQ ID NO: 77401 - DNA, 1543 bp, Homo sapiens; identical to SEQ ID NO: 59968

SEQ ID NO: 77402 - DNA, 1669 bp, Homo sapiens; identical to SEQ ID NO: 59969

SEQ ID NO: 77403 - DNA, 3803 bp, Homo sapiens; identical to SEQ ID NO: 59970

SEQ ID NO: 77404 - DNA, 840 bp, Homo sapiens; identical to SEQ ID NO: 59971

SEQ ID NO: 77405 - DNA, 1037 bp, Homo sapiens; identical to SEQ ID NO: 59972

SEQ ID NO: 77406 - DNA, 2587 bp, Homo sapiens; identical to SEQ ID NO: 59990

SEQ ID NO: 77407 - DNA, 1927 bp, Homo sapiens; identical to SEQ ID NO: 59991

SEQ ID NO: 77408 - DNA, 1100 bp, Homo sapiens; identical to SEQ ID NO: 59992

SEQ ID NO: 77409 - DNA, 632 bp, Homo sapiens; identical to SEQ ID NO: 59993

SEQ ID NO: 77410 - DNA, 2309 bp, Homo sapiens; identical to SEQ ID NO: 58770

SEQ ID NO: 77411 - DNA, 1490 bp, Homo sapiens; identical to SEQ ID NO: 59995

SEQ ID NO: 77412 - DNA, 1491 bp, Homo sapiens; identical to SEQ ID NO: 59996

SEQ ID NO: 77413 - DNA, 1651 bp, Homo sapiens; identical to SEQ ID NO: 59997

SEQ ID NO: 77414 - DNA, 1730 bp, Homo sapiens; identical to SEQ ID NO: 59998

SEQ ID NO: 77415 - DNA, 1794 bp, Homo sapiens; identical to SEQ ID NO: 59999

SEQ ID NO: 77416 - DNA, 2650 bp, Homo sapiens; identical to SEQ ID NO: 60000

SEQ ID NO: 77417 - DNA, 2027 bp, Homo sapiens; identical to SEQ ID NO: 60001

SEQ ID NO: 77418 - DNA, 1549 bp, Homo sapiens; identical to SEQ ID NO: 60002

SEQ ID NO: 77419 - DNA, 2579 bp, Homo sapiens; identical to SEQ ID NO: 60003

SEQ ID NO: 77420 - DNA, 557 bp, Homo sapiens; identical to SEQ ID NO: 60004

SEQ ID NO: 77421 - DNA, 4913 bp, Homo sapiens; identical to SEQ ID NO: 60005

SEQ ID NO: 77422 - DNA, 2861 bp, Homo sapiens; identical to SEQ ID NO: 60006

SEQ ID NO: 77423 - DNA, 1756 bp, Homo sapiens; identical to SEQ ID NO: 60007

SEQ ID NO: 77424 - DNA, 2041 bp, Homo sapiens; identical to SEQ ID NO: 60008

SEQ ID NO: 77425 - DNA, 1302 bp, Homo sapiens; identical to SEQ ID NO: 60009

SEQ ID NO: 77426 - DNA, 839 bp, Homo sapiens; identical to SEQ ID NO: 60010

SEQ ID NO: 77427 - DNA, 2540 bp, Homo sapiens; identical to SEQ ID NO: 60011

SEQ ID NO: 77428 - DNA, 3387 bp, Homo sapiens; identical to SEQ ID NO: 60012

SEQ ID NO: 77429 - DNA, 1084 bp, Homo sapiens; identical to SEQ ID NO: 60013
  misc_feature (1)...(1084): n = a,t,c or g

SEQ ID NO: 77430 - DNA, 1871 bp, Homo sapiens; identical to SEQ ID NO: 60014

SEQ ID NO: 77431 - DNA, 1376 bp, Homo sapiens; identical to SEQ ID NO: 60015
  misc_feature (1)...(1376): n = a,t,c or g

SEQ ID NO: 77432 - DNA, 1464 bp, Homo sapiens; identical to SEQ ID NO: 60016

SEQ ID NO: 77433 - DNA, 2648 bp, Homo sapiens; identical to SEQ ID NO: 60017

SEQ ID NO: 77434 - DNA, 1870 bp, Homo sapiens; identical to SEQ ID NO: 60018

SEQ ID NO: 77435 - DNA, 1221 bp, Homo sapiens; identical to SEQ ID NO: 60019

SEQ ID NO: 77436 - DNA, 5207 bp, Homo sapiens; identical to SEQ ID NO: 60020

SEQ ID NO: 77437 - DNA, 2407 bp, Homo sapiens
ttttttttttttgccttttgtacaaagtttttttatatatatatatatgtatatatatttatgtacacagacacaagggtataaaatccagtgagaagggctcacacatgcccaggtaagggatgggagtagctataattgccagggttgaggccacagtagaggcacacaggaagtggtagagtagcagcctccctccatcctcctacctcgggccaaagggaggaaatgggaggaaggacaagtatacaaaggaagatggaagatactggaaaggcatactccaccttttactaaattcctgaaagcccctaaatgcctcacaggacagatcactctcacacctcctggcaggacagatcactctgaggcctcctggcaggatagatcacttccatgcctcctagcaagatgctgaggctacagtaggtctggcctcaagctgcttcaagctaaggtctgaggctggcttctcaatgcacgtccatgctatctcccagggcccttgtagcagaaagagcaccttcaaggttcacccacaaactcagtcctcttgattcagaggtcctaagggttttccttgacagactaaaggttaaaggtacaggaaaaggagagaggtcagttccttcagttaatgccatatggccttcccaatgggggagaaattgaggaatcactaaggtgttggaaagggcaagaaggtaatctcagagacgatacacatggagaaacaggtattcaatgcaggtgtggattctgttctcttcaactggtggctttgctcagcagagtccatttccagtgggaccatgggcaggagcttttcttggtatcttaagggtggccccaatttcctcagagacaatgtccatgccctcaggatggcttggtccacaaaatggagaaatggggccatggaagagtagatgtgaagtggcaggatccagaggcacaaggaggcagtatactgtgccactgatttacatggtctggggggtaaagaggctggagagctgcaaacactgggaggcaaggttcagggctggactcagagcagtcagagctgctggattcagggcccccaagggaactgctccattcagttgcaaggcagcagcctgggcggcggcggcggcagcagcagcagcagcagtgcttggcagttggattccagcgccttctgccagttttgccatgagctgaaaacgtccacctgctgatcccagatccagctcctggtccccatcaggaaaagtgatgtctgtgccaccatccagtcgctcagtcacatggccaaccctcataggtcgaccagcaagctcaaacccattcaactgttccagggcccgccgggcacactcagaatcagagaacgtgatgaaaccataacctttagagcggcctgtatctgagtccttcatcaggacaatattatcaattttaccaaagggctcaaagatgccccggagcatgtcttcagtgatattgaagtgcagggaacccacatagaggcgcattggtccaccattgcccttttgcaggttgttggccatggctgccagtcggtttttctctgcctgtgaagcctgtacaatgataggcactcccagcaaccgctgcccagtcagcccaatggccagtggcacagactggatttcacagaattccacgtaggcaatgcccttagaacgacgtgagttccgatctgaaatgatacgtacatcgcgaaccttgcctacagcagagaaaaagtcctccagatctcgaggccgaattcgggcagctaactgcatacagaaaactgtgcgggcatcacgctcctcaggactcagattatcaactggctccctgactgggctcttctctctgaaatgaggactcttactgtgtccatatctataaccagtggcaagtggaggactcctgtaatgcacacgatcctcacgacgatggtcccgacttcgcgactcactaccatgtcgacgatcccagctacggctacggtgacgacactgccgacctggacttcggctccgactatttctccgtctataccgatcccgatctcgactacgattgcttgtctccccgatggtgctgcttccactggtctcattgccactgttgctggtgctgctggtggtattgctaggataatcctttttaacttctttcctttgttgctcatcctcttcttttttatagggagcttccagcatggcctcaatcactatgtcaaagtcatcagatgccatcctgtcagatcagttccgggtcccgcagggggggtcccggttctctccgttcctttgagtatgttgtggggagtggagctcggatagttcctagagtctaggcaagaaaagcagcactgcaggtacagcgcctcctcttcccgcaaaat

SEQ ID NO: 77438 - DNA, 4120 bp, Homo sapiens; identical to SEQ ID NO: 58869

SEQ ID NO: 77439 - DNA, 797 bp, Homo sapiens; identical to SEQ ID NO: 60022

SEQ ID NO: 77440 - DNA, 1845 bp, Homo sapiens; identical to SEQ ID NO: 60023

SEQ ID NO: 77441 - DNA, 2238 bp, Homo sapiens
cctgcaccttcgccccgcgtacctactcctgccccgccctgccattcctctcccctcccttctctctgcgacccctccctgttaggccccagcctcttctcccctcacaggtcttctctgtcctggcctcaccgccttatcctattcctctcccttgccctgtgtcttgtctcagagccccctcggggtgggagtaggttgtggagcagcacaactgggctcaccccaaagcagaacttctcaatccatgaggacaatggggaggcctttaggccagcccacatgtgacaatggagggctgcggcttccttgcggagagcacaagtgagctcactgccctggactccagggaatcagagttctggccgcggggtgacccagctcctctgctaccatgaatagggcccctctgaagcgggccacgatcctgcacatggcgctgaccggggcctcagacccctctgcagaggcagaggccaacggggagaagccctttctgctgcgggcattgcagatcgcgctggtggtctccctctactgggtcacctccatctccatggtgttccttaataagtacctgctggacagcccctccctgcggctggacacccccatcttcgtcaccttctaccagtgcctggtgaccacgctgctgtgcaaaggcctcagcgctctggccgcctgctgccctggtgccgtggacttccccagcttgcgcctggacctcagggtggcccgcagcgtcctgcccctgtcggtggtcttcatcggcatgatcaccttcaataacctctgcctcaagtacgtcggtgtggccttctacaatgtgggccgctcactcaccaccgtcttcaacgtgctgctctcctacctgctgctcaagcagaccacctccttctatgccctgctcacctgcggtatcatcatcgggggcttctggcttggtgtggaccaggagggggcagaaggcaccctgtcgtggctgggcaccgtcttcggcgtgctggctagcctctgtgtctcgctcaacgccatctacaccacgaaggtgctcccggcggtggacggcagcatctggcgcctgactttctacaacaacgtcaacgcctgcatcctcttcctgcccctgctcctgctgctcggggagcttcaggccctgcgtgactttgcccagctgggcagtgcccacttctgggggatgatgacgctgggcggcctgtttggctttgccatcggctacgtgacaggactgcagatcaagttcaccagtccgctgacccacaatgtgtcgggcacggccaaggcctgtgcccagacagtgctggccgtgctctactacgaggagaccaagagcttcctctggtggacgagcaacatgatggtgctgggcggctcctccgcctacacctgggtcaggggctgggagatgaagaagactccggaggagcccagccccaaagacagcgagaagagcgccatgggggtgtgagcaccacaggcaccctggatggcccggccccggggcccgtacacaggcggggccagcacagtagtgaaggcggtctcctggaccccagaagcgtgctgtggtgtggactgggtgctacttatagacccaatcagaatacggtggttgagaaggaaccagtgtttacaagtaatatcagaaagttgaaggaaccagtgtttacaagtaataccagaaagttgccaaacccttctctatcctctcgtatttctgagtttttgtccttcccgagggagcaccctagtgagagttgaaccccttccttctgcctccagggcctgtctgcctccacatcactctgaggacagggacaggcaacaaccttgaagggacagcaatggcaaagccacaaaggcttcactgtactcaggggagatggccctaccacagccacctggagagggttgggaagccttccgtctgcggtgggcaggcagcctcaccctgggcccacagaccggccttcctttggaggaaagtgtggcctggactgagggaggaaatgagcgagttccctctgacaccagcagatccccaggggctgctgggcagtggcctgggaatggggtggattgtgagaaagtgctcaccatctatacaccctgtatgtccagcttttgaacacaagggaaccatgcttctctttagaggtttaaagcagggtcatttaacatcctcccccagtccctaacatcacattgtcctgcgtg

SEQ ID NO: 77442 - DNA, 1659 bp, Homo sapiens
  misc_feature (1)...(1659): n = a,t,c or g
ctgagacgggaagatagtcttcaggaaagacacacaaaggtaacttgtgcagagggagatggcaaatttatancttctcagaaacccagtaatgataagtaaccaaggacttccaccaaagtcagtcccacgatgacgatggtcagccagagtattgataacctcttagaatcatccagaaacaagtcactcttcatctgtccagcaaaggcctgctcagcgtggaggcctcagaacgtgaggaaggagctgtccagcacggatgagtccaggcagctgtcgacgtccagcacctgctgcccggcaggtgtggggctcgggctcccagccaccttgctccgggacatccggaagagaaagaggatggccaggtagacgggatagacaaccacgctggacatccagagggccacctgctgcgttctcctcatctgcctcttcctgggcgccaacgccgtgtggtacggggctgttggtgactctgcctacagcacggggcatgtgtccaggctgagcccgctgagcgtcgacacagtcgctgttggcctggtgtccagcgtggttgtctatcccgtctacctggccatcctctttctcttccggatgtcccggagcaaggttatcaatactctggctgaccatcgtcatcgtgggactgactttggtggaagtccttggttacttatcattactgtgtttctgagaagttataaatttgccatctccctctgcacaagttacctttgtgtgtctttcctgaagactatcttcccgtctcaaaatggacatgatggatccacggatgtacagcagagagccaggaggtccaaccgccgtagacaggaaggaattaaaattgtcctggaagacatctttactttatggagacaggtggaaaccaaagttcgagctaaaatccgtaagatgaaggtgacaacaaaagtcaaccgtcatgacaaaatcaatggaaagaggaagaccgccaaagaacatctgaggaaactaagcatgaaagaacgtgagcacggagaaaaggagaggcaggtgtcagaggcagaggaaaatgggaaattggatatgaaagaaatacacacctacatggaaatgtttcaacgtgcgcaagcgttgcggcggcgggcagaggactactacagatgcaaaatcaccccttctgcaagaaagcctctttgcaaccgggtcagaatggcggcagtggagcatcgtcattcttcaggattgccctactggccctacctcacagctgaaactttaaaaaacaggatgggccaccagccacctcctccaactcaacaacattctataattgataactccctgagcctcaagacaccttccgagtgtctgctcactccccttccaccctcagctctaccctcagcggatgataatctcaagacacctgcggagtgtctgctctatccccttccaccctcagcggatgataatctcaagacacctcccgagtgtctgctcactccccttccaccctcagctccaccctcagcggatgataatctcaagacacctcccgagtgtgtctgctcactccccttccaccctcagcggatgataatctcaagaaactaaggaagaataaataaataatataaaaataaaatgaatactgcagtcaaaaaa

SEQ ID NO: 77443 - DNA, 3629 bp, Homo sapiens
  misc_feature (1)...(3629): n = a,t,c or g
gcggccgccgcgagtctggtatcctgagcttcgtgagttgagcgctgctgctccgcggtggagtcaccgcaccgctcccgggatcatggtgttctacttcaccagcagcagcgttaattcatctgcctacactatttacatgggaaaagataaatatgaaaatgaagatctgatcaagcatggctggcctgaagatatctggtttcatgtggacaaactctcttcggctcatgtataccttcgattacataagggagagaatatagaagacatcccaaaggaagtgctgatggactgtgcccaccttgtgaaggccaatagcattcaaggctgcaagatgaacaacgttaatgtggtatatacgccgtggtctaacctgaagaaaacagctgacatggatgtggggcagataggctttcacaggcagaaggatgtaaaaattgtgacagtggagaagaaagtaaatgagatcctgaaccgattagaaaagaccaaagtcgagcggttcccagacctagcagcagagaaagaatgcagagatcgtgaagagaggaatgagaaaaaagcccaaattcaggaaatgaaaaagagagaaaaagaagaaatgaagaagaagagggaaatggatgaacttaggagctattcatcactaatgaaagttgaaaatatgtcttcaaatcaggatggcaatgattcagatgaattcatgtaaaaggagaaaaggagaaaaggacctttgaaagatgtgaatgtagagacaattgcagaccttttggtttcatctgtgttctgaagtataaaatacaaccaaaattctaccttcatcctacccagaaattattgattttcaagttttaaaaaaattgtaccttttttgctgacagaaaaggatcagatatgtataaaatagttgaacttgacagcatataacttaaagtgaaaatgtttttgccagaacatgtcttggtaccttgtgaaagcaggctgcccttgttcttgagatagactttaaaatgaaccagctctgaaaagtacttctgctgctctggtctatccctgaaaacagatgtcttgaaacacttttcatattcttaaaataatcttcacttctgttaagaagaacatgttggtgggtaattatgcgaatgtttccctgtccctgatttctcgattaggcgtatgggttttgaaaaagagatttttcagaagattgtcagcttcagtattcacgttccatcgtgtcatctgggtctgttagtgtagtgaccctcagtgcagtctgtcccagcgtttatgtccttgcttcctctgagcagaggcctccatcttagtatcaacatatttaaagaaattgatggtgttcatcaagctggggcctgtggcagttgttgcctgagcaccaagtaacccaagccacctatgtgacaacttctgggcccaggagtaatttctcagcattgagggtaaaataggatggagtgctctgttgatcatttgggagatgtaggttacctgatttgtgccttaggatgcagcgtgaagcagaagtccatattgcaattatgattttagaaggaactaagcattttactcacacccacagcagcaagaatgacctcctgcagcagatattccacctgtaatagcactttggaactgtgggcaaaaccaaaaggctagtgtttccatttattccatgttggtgtatggggttgaactggaaaattccctgaggcaaaactcactggccaaattttgagagggtatagaaaatgactttagagatgagtggttttgtgtatgtgtctgatgatattcagtctgatgttccgcaattttaaaagttataataaaataccatttttttaatctggaaggacattgatatatgaattcttagaatttgctattaaaaagggtagcccccattccacaagctggttttgagggtgatcttgctctaaaaaacctcattcatcataggctcagtctgacaggttctgtacggggctatcatctttctcctcctctgctaaatgcctctttcttccagctgctcactgggtcaaagggatgtcctttctcagatgtattcttgatacatctcagatgtattcgtagctgtgctccttccatacttccaaggagtccggcttctacagaattcctctgtacctcacactgcaacacatgtagatagcgcttttgaaaaatacatatatttttactatagtatgagaggtcctggggctcaaactttaaacatttcctaactcagcttacactggtttaaaatgtccaggtctctgctgaattctcttgttgaattcatagctctgtgttgattcctatgcccctaaccctgcagcctctttgttttatttttttccccatctctgttggtcccagggaaagcaaggaaattttcttttgaggacttataggttgattgcccacaggtcaaactgttggcattgaactcctctcatttcttgccattggattgtttcctaaacgttggataggagaattcgaaattgttgctatttttatgagctgtgcccttgatcaaatctgtgctgtgggtctgagtcactttgccaatgtcgtcttcagtttcaacactctgatcagcatgcaggcgaggggcatgtttaatttacttcactaactgctatattctatagctttagacttcatatttcttatccacctttgtctaggctcacgatctttgggcaagggagctttgtcaccgtggttgggctagaacaaatattgagaagtttaccaacacagatgttgagaagtttattgaaaggcactgacattagcagaataagtgatggacattagttgaaccccttcagtgtctatgtgttttattgtattgtctttaactcgttcttgaagcacagatttcagcgagcctttcagctattcagtgccagcggttttccccactcaggaaagatggtgtgagccatacacacagcaggattagacggggagagtttcagctgcagcttctagtttaagaccaaagcccttcctcccgctgctgcatctgtctgagaggggaagctcttgttttccaagctggaaccgtttatgaggaaaactgagcagggtggcaaaatggaaaaggaacaattttctagtttttcctacgcgtgatattgaggcgtggctttttctttgatttgaggtacagcatgtaaataaccaaatttcccatattccaaaatgatcatattagagtgactgagtgaccttttggatttttgaagcagacttaaaatctgaccagaccacaatgaaaagtataaaattagaaactttaaattccaagctaaatttcatgntcagctttgacccaccttaactccagtgaataggtggcagctcagaaacaaggacagcactgctgcttgccagagcaagcttcacatccagctgggcacttcgtgagagctccttcctgccgggcacgtgtgagttcagcgtgggcaagagacttttatgcacattctgtcattcaaaagggaaatgatgccaaccccagatgcagcatgtcctgaatgaatgatctgtaaaatacaataataaaagcttatagtttgagtaga

SEQ ID NO: 77444 - DNA, 721 bp, Homo sapiens; identical to SEQ ID NO: 60026

SEQ ID NO: 77445 - DNA, 2008 bp, Homo sapiens; identical to SEQ ID NO: 60027
  misc_feature (1)...(2008): n = a,t,c or g

SEQ ID NO: 77446 - DNA, 1333 bp, Homo sapiens; identical to SEQ ID NO: 60028

SEQ ID NO: 77447 - DNA, 1209 bp, Homo sapiens; identical to SEQ ID NO: 60029

SEQ ID NO: 77448 - DNA, 1699 bp, Homo sapiens; identical to SEQ ID NO: 60030

SEQ ID NO: 77449 - DNA, 1545 bp, Homo sapiens
ggtcgacttttttctttctcctctttttgagacggtctcactctgtcacccaagctggagttgcagtggcgtgatctccactcactgtagcctctgcctcagttcaagcgattctcctgcctcagcctgagtagctgggactacagtggtgcgcctggctaatttttgtatttttagtaaagacagggtctcaccgtgttggaccaggctggtctcgaactcctggcctcaagtgatccacccaccttgctcagcctcccaaagtgctgggattacaggcctgagccaccgtgcccggccatgttgcttttataattgagatatttcatttgttttgggggttaggcaaatttaatttgccattcctcaaactcagtaacttcaaatataaacaatgcctagaatgaatatggttcctcattatttctatcaaactactacaaatactgaagaatcccaaagtagttttccacagaggcagaaaagcagttcaggggttgaaaatcttcaatattaataagccctgggacattcaaatggcacttcatatttcaaggtaatgcaatatgaatcataattcattatatattgtccccaagagttacttcaattccgtattcaccagttcttacgatttggaaaaaaaaacttgaatgtttccagatgaaatgtaatccccaagccttgtgtgtcaacattctagtgaatctctatttaaatgagaggcgctccaaaacacttcctgcaccactcgacactggcacttggtggagcatcaattttctgcaacctttcaagaatctctgaagacagactattgtatgcaattccatattcattgtcaaatgcctcaatatcaatattctctcttcctagagacactaatgataagaagaggatttctctgtataaactcctttgtcttttcatgcctggcttcatttgctgtgaaagtaggttgatgggtttaagaacattattgtgctgaatactctgcctgatggtttctactaaagtgcttgtttcttgttgttcctctgacaggagagatgatttcttttcagaattaaaattcctccatgagacatacagaggttctcttggttcctgatgaaggttgatattatcccataacagctgaatatacacaagtttgctatcctgggacagagatgacagaggaagctgtacaccttcattacaatgttcagatgtgaggataagtcctggcaagttactaggaaggtccaaacgtctgaaataccaaacgagggtccagaaaatgattggatgttgattgatgaaagaagatgtatgaatcacctgatcaccttcattttctagcaaagattcaagttctttacggagtactagaggactcaagtagggcacagaaacaggggagcagtgggtctttgtcgtaaagcatcagcatcttcccgcacactacgtggtagactgacggccaggatgccatgtatcggtcgctggatagagtcaatattctgcagcgggcctgcgtcactgtgcgtacgtgttgttcag

SEQ ID NO: 77450 - DNA, 1295 bp, Homo sapiens; identical to SEQ ID NO: 60032

SEQ ID NO: 77451 - DNA, 783 bp, Homo sapiens; identical to SEQ ID NO: 60033

SEQ ID NO: 77452 - DNA, 1325 bp, Homo sapiens; identical to SEQ ID NO: 60034

SEQ ID NO: 77453 - DNA, 867 bp, Homo sapiens; identical to SEQ ID NO: 60035

SEQ ID NO: 77454 - DNA, 2645 bp, Homo sapiens; identical to SEQ ID NO: 60036
  misc_feature (1)...(2645): n = a,t,c or g

SEQ ID NO: 77455 - DNA, 1227 bp, Homo sapiens; identical to SEQ ID NO: 60037

SEQ ID NO: 77456 - DNA, 1788 bp, Homo sapiens; identical to SEQ ID NO: 60038

SEQ ID NO: 77457 - DNA, 895 bp, Homo sapiens; identical to SEQ ID NO: 60040

SEQ ID NO: 77458 - DNA, 630 bp, Homo sapiens
cagccggcaggacgctgtgagttggcgtgctagtgggatggcagatgaggaagaagaccccacgtttgaggaagaaaatgaagaaattggaggaggtgcagaaggtggacagggtaaaagaaagagacttttttctaaagaattgcgatgtatgatgtatggctttggggatgaccagaatccttatactgagtcagtggatattcttgaagatcttgtcatagagtttatcactgaaatgactcacaaggcaatgtcaattggaagacaaggtcgagtacaagttgaagatatcgtcttcttgattcgaaaggacccaaggaagtttgccagggttaaagacttgcttactatgaatgaagaattgaaacgagctagaaaagcatttgatgaagcaaattatggatcttgacactttttgtagtttccgaaaattaccatctggggaaaccatatataataattgtatattttctaaagtaagattctgatatctagccatgtaaatgaaagatggagaaacacaaagttttcagcctttatttttatgcctttgattttagggtgatattggtgcatgtaattgcctgcctttatattaccatacttgaattacttactgggttttaa

SEQ ID NO: 77459 - DNA, 2285 bp, Homo sapiens
agaagcgtacaccgagtagcttgagcgcctcttccggttaccttttcccagtgccagaggcgcctagggttggggtcctcgctcaggcacagagacccgacaccgagcggcggcttccccgggatcgagggacgcgcacgccagaggagacgaaaggaacccgggtcggaccagatcggaaccactgaccattgcccatggcggccctaggccctagcagccagaatgtcactgaatacgtcgttcgagttcctaagaatacaaccaaaaaatataacatcatggcttttaatgcagccgacaaagtcaactttgctacgtggaatcaggctcggctggagcgggacttgagcaacaagaaaatctaccaagaggaggagatgcccgaatcgggcgcgggcagtgagttcaaccgcaagcttcgggaggaggctcggaggaagaagtacggcatcgtcctcaaggagttccggcccgaggaccagccctggctgctccgggtcaacggcaaatcaggcaggaagttcaagggcatcaagaagggaggcgtaacagagaacacgtcctactacatcttcacccagtgccccgacggggccttcgaggccttccccgtgcacaactggtacaatttcacaccgctggcccggcatcgcacgctcactgccgaggaggccgaggaggagtgggagaggaggaacaaggtgctgaaccacttcagcatcatgcagcagcggcggctcaaggatcaggaccaggacgaggatgaggaggagaaggagaaacgtggccgcaggaaggcgagcgagctgcgcatccacgacctggaggacgacctggagatgtcgtccgatgccagtgatgccagtggtgaggaggggggcagagtccccaaggccaagaagaaggcgccgctggccaagggcggcaggaaaaagaagaagaagaagggttcagacgacgaggccttcgaggacagcgatgatggggacttcgagggccaagaggtggactacatgtcagacggctccagtagctcccaagaagagcctgagagcaaggccaaggcgccgcagcaggaggaggggcccaagggtgtcgatgagcagagcgacagtagtgaggagagtgaggaggagaagccgcctgaggaggacaaggaggaggaggaggagaagaaggcacccaccccgcaggagaagaagcgcaggaaagacagcagcgaggagtcggacagctcagaggagagcgacattgacagcgaggcctcctcagccttcttcatggcgaagaagaagacgccacccaagagagagcggaagccgtcgggagggagctcaaggggcaacagccgcccaggcacgcccagcgcagagggtggcagcacctcctccaccctgcgggcggctgccagcaaactcgagcaagggaagcgggtgagcgagatgcctgcagccaagcggttgcggctggacacgggaccccagagcctgtctgggaagtcgacaccccagccaccatcaggcaagacaacacccaacagcggcgacgtgcaggtgactgaggatgccgtgcgccgctacctgacacggaagcccatgaccactaaggacctgctgaaaaagttccagaccaagaagacagggctgagcagcgagcagacagtgaacgtgttggcccagatcctcaagcgactcaaccccgagcgcaagatgatcaacgacaaaatgcacttctccctcaaggagtgaggcttggtccaatacatggctctgccccccagaacttaaggctctcactgccccttcgccatcctagagtgaggctctgtccaatacatggctctgccctccagaacttcaggctctcagtgacccttcgacatcctgcttgctccctgactcccagggccccgtagttagcaattctggaaaagttaagccatctcctcctctggcccttccttctggaatcttcagatgcctgttaggccttcttattgtcctcctcctcctggctcggcctccctcacactgaccaagggcctgtgctgcccactgggtaacttctacagttctcccttccacttccctaagtctctcttcagctgtgacttatccaccacatagcccagtaagtcttcagttttggctgggcatgatggtgagcgcctgcagtcccagctacttgggaggctaagcccagttcaaggctgcagtgaactatgatggtgccactgcattccagcctgggtgacagaatgaaatcctggcacaaaaaaaaaa

SEQ ID NO: 77460 - DNA, 1622 bp, Homo sapiens; identical to SEQ ID NO: 60042

SEQ ID NO: 77461 - DNA, 2309 bp, Homo sapiens; identical to SEQ ID NO: 58770

SEQ ID NO: 77462 - DNA, 1854 bp, Homo sapiens; identical to SEQ ID NO: 60044

SEQ ID NO: 77463 - DNA, 1262 bp, Homo sapiens; identical to SEQ ID NO: 60045

SEQ ID NO: 77464 - DNA, 1627 bp, Homo sapiens; identical to SEQ ID NO: 60046

SEQ ID NO: 77465 - DNA, 4976 bp, Homo sapiens; identical to SEQ ID NO: 60047

SEQ ID NO: 77466 - DNA, 2981 bp, Homo sapiens; identical to SEQ ID NO: 60048

SEQ ID NO: 77467 - DNA, 2513 bp, Homo sapiens
cgacccacgcgtccggccgccgctgctacagccgccgccgccgctgttgccgcggcttgttattcttaaaatggcgccgctagacctggacaagtatgtggaaatagcgcggctgtgcaagtacctgccagagaacgacctgaagcggctatgtgactacgtttgtgacctcctcttagaagagtcaaatgttcagccagtatcaacaccagtaacagtgtgtggagatatccatggacagttttatgacctttgtgaactgttcagaactggaggtcaggttcctgacacaaactacatatttatgggtgattttgtagacagaggttactatagtttggagaccttcacttaccttcttgcattaaaggctaaatggcctgatcgtattacacttttgcgaggaaatcatgagagtagacagataacacaggtctatggattttatgatgagtgccaaaccaaatatggaaatgctaatgcctggagatactgtaccaaagtttttgacatgctcacagtagcagctttaatagatgagcagattttgtgtgtccatggtggtttatctcctgatatcaaaacactggatcaaattcgaaccatcgaacggaatcaggaaattcctcataaaggagcattttgtgatctggtttggtcagatcctgaagatgtggatacctgggctatcagtccccgaggagcaggttggctttttggagcaaaggtcacaaatgagtttgttcatatcaacaacttaaaactcatctgcagagcacatcaactagtgcacgaaggctataaatttatgtttgatgagaagctggtgacagtatggtctgctcctaattactgctatcgttgtggaaatattgcttcgatcatggtcttcaaagatgtaaatacaagagaaccaaagttattccgggcagttccagattcagaacgtgttattcctcccagaacgacaacgccatatttcctttgaggccttcgcccatcctgctgacccatttttctgccctcttcttaccccaattttcttgtattaccctctacaatatactttttattgagcactttgctgctgaaatgctgcctcttgccttttttttttttaaattttaaattatctaaatttattgttggtggggggtgtctatagcaaagtttttctatcaattttcccccatcccatccccaccctggactcatttgagaagacttgagaaatgtcttaatactcacactgctgcatgtagctcttgcttatttactggtctgggaaacaggatgtgtttcctttttttaaaagccaattgacagattacacctaaatactcctccttttgtatcattcagccttttgttttagtttggtaagttttaagaaatttcagcagcaaagttgttattcagtgggcacgatggactccaaatgcctcaagttatgtatacctgtcccagatgtaaacttcattgtcctttgttggatgatattttaaatggatataaaataaattggtctaaagggctgccctccttgttgtgtttttaaattttagttaaaaactgctacagcttatgactttgtactttaagataattgtattgatcttttttcagattccttgtattttttaataaagtaatcttaaataaaactcagataggttaagtgttagaaattttaaacagcttacattgttagcgtaaagttatcttttcttttttcctaatcagagttcttgaccctttggttattgagtttaaaacttcaattgaaattcaatagtatttatttttgaaaaaaatcactaaactgtgcctaaagaacataactgccatattaatgttttggtttatatcctctatagtaatagaaaaacatttaatacttgtaatgctgatgtgttaatttgataccagttgagtagaatgtgatcaatccagtttacaatctatcatgagtattattaactaaaatctatgtgcttttcaataggaatcattcttctcttgctgtaacacttgaccttaacttttagaaagtgttcatttttaaactgcaactggaaaggttgaaaagttaggactcttgtatttgtgaactgtaatctgaagcagattatttaaagtgtagaaaaagaaacaagttcttttttgcaaaggtctgtgataccatatttcagctttgtgtaagtaatttgaatatccaaagggttgggatgatcagttctgaatatgcaactgtccacttaataaggacaagtattccagtatctcttatgactgtagtcataaatgatgttggaatgtacattttgtgaaatagttggtatccctttactatgattaatttttgttattccaggaaatacttgtgaagccagccaattaataaagcactttagcatctgttcaggtagttttgaaaaccaacttttccccttcaggataagaacttccaggttacctaaaaatgcaataaaaatctttatagtctaagcttt

SEQ ID NO: 77468 - DNA, 2249 bp, Homo sapiens
gcgaccgcaccccccggccgggccgtgcttctgcccctacaaggtttgggccgaggtgggggagggtcctggttgccggccccgcccggtccctccccgccttttaggcgcccgcgtggccgggacgtcccagtcccgctccgtcctcctcgcctgccaccggtgcacccagtccgctcacccagcccagtccgtccggtcctcaccgcctgccggccggcccaccccccaccgcagccatggacgccatcaagaagaagatgcagatgctgaagctggacaaggagaacgccatcgaccgcgccgagcaggccgaagccgacaagaagcaagctgaggaccgctgcaagcagctggaggaggagcagcaggccctccagaagaagctgaaggggacagaggatgaggtggaaaagtattctgaatccgtgaaggaggcccaggagaaactggagcaggccgagaagaaggccactgatgctgaggcagatgtggcctccctgaaccgccgcattcagctggttgaggaggagctggaccgggcccaggagcgcctggctacagccctgcagaagctggaggaggccgagaaggcggctgatgagagcgagagaggaatgaaggtcatcgaaaaccgggccatgaaggatgaggagaagatggaactgcaggagatgcagctgaaggaggccaagcacatcgctgaggattcagaccgcaaatatgaagaggtggccaggaagctggtgatcctggaaggagagctggagcgctcggaggagagggctgaggtggccgagagtaaatgtggggacctagaggaggagctgaaaattgttaccaacaacttgaaatccctggaggcccaggcggacaagtattccaccaaagaagataaatatgaagaggagatcaaactgttggaggagaagctgaaggaggctgagacccgagcagagtttgccgagaggtctgtggcaaagttggagaaaaccatcgatgacctagaagatgaagtctatgcccagaagatgaagtacaaggccattagcgaggaactggacaacgcactcaatgacatcacctccctctgagccccacgccagcgtggccacctcagctctcttctctcctctcctttccattctctctatggggaggggagcaggcaggaggagcagaaattgccaacattgcacagccaggctgggagcagcctagggagagcccccatcatgcccaccacccactctggcactggcttcatcctttacctatccccttccaccctcctttgctgcttaataaattctgaacttggactccatgctgttttcctgccctccagagagcacctctatcgccaccacggagcactggttcactcctgacaccctggcacttactgacacccccagcccctgcactgagcccacccacaaaacaccatggcccacgctgaaacccctctgcacaggcactccctggctgtcgctctctgattcaccactgcatgtgggcacgtgtggccccatcaaaccatgaccgcctctggtgccaatccctgacctcagagcacttagctggggttccaggatcaaacagagtgactggaaaggaagtagggtggtgaggtgcaggacaggggcaagaaggttgcaaaaggtctggaatggagcttggaaaaatgttggatatcagcaacatggggctttcactgcagcagcaggtctgttttctacctcaagtctgtctgtctggcccttcctttcctggcgcagtctttgtcttaccttctgtctccaacttccttaaaccttctaaagaagaggataaagtagtttatgactcagccctccccaccccacctctatgaccccaaggccttgatctgaggcatccacgtccgtcctgttcccctcatcctagtcagtccatctggtttgtccctgccatggggccctgaaggtccgtgaatgcatgtgtcttccttgaaccactccgatgtctatatgtcaccttcccctggccctgcctccccacgtctcccccttgtggtttcccttctccctcacctgctgcttcccctcacagagaccttggccagtgccaaggaggagaacgtcgagattcaccagattcttggaccagaccctgctggaactcaacaacctgtgagggccagccccacccccagccaggctatggttgccaccccaacccaataaaactgatgttactagcctctc

SEQ ID NO: 77469 - DNA, 3176 bp, Homo sapiens; identical to SEQ ID NO: 60050

SEQ ID NO: 77470 - DNA, 1615 bp, Homo sapiens; identical to SEQ ID NO: 60051

SEQ ID NO: 77471 - DNA, 1143 bp, Homo sapiens; identical to SEQ ID NO: 60052
  misc_feature (1)...(1143): n = a,t,c or g

SEQ ID NO: 77472 - DNA, 1125 bp, Homo sapiens; identical to SEQ ID NO: 60053

SEQ ID NO: 77473 - DNA, 768 bp, Homo sapiens; identical to SEQ ID NO: 60054

SEQ ID NO: 77474 - DNA, 698 bp, Homo sapiens; identical to SEQ ID NO: 60055

SEQ ID NO: 77475 - DNA, 1549 bp, Homo sapiens
aattcccgggtcgacgatttcgtggccgtcatggcgccccgaaccctcgtcctgctactctcgggggctctggccctgacccagacctgggcgggctctcactccatgaggtatttcttcacatccgtgtcccggcccggccgcggggagccccgcttcatcgcagtgggctacgtggacgacacgcagttcgtgcggttcgacagcgacgccgcgagccagaggatggagccgcgggcgccgtggatagagcaggagggtccggagtattgggacggggagacacggaaagtgaaggcccactcacagactcaccgagtggacctggggaccctgcgcggctactacaaccagagcgaggccggttctcacaccgtccagaggatgtatggctgcgacgtggggtcggactggcgcttcctccgcgggtaccaccagtacgcctacgacggcaaggattacatcgccctgaaagaggacctgcgctcttggaccgcggcggacatggcagctcagaccaccaagcacaagtgggaggcggcccatgtggcggagcagttgagagcctacctggagggcacgtgcgtggagtggctccgcagatacctggagaacgggaaggagacgctgcagcgcacggacgcccccaaaacgcatatgacccaccaccccatctctgaccatgaagccaccctgaggtgctgggccctgagcttctaccctgcggagatcacactgacctggcagcgggatggggaggaccagacccaggacacggagctcgtggagaccaggcctgcaggggatggaaccttccagaagtgggcggctgtggtggtgccttctggacaggagcagagatacacctgccatgtgcagcatgagggtttgcccaagcccctcaccctgagatgggagccgtcttcccagcccaccatccccatcgtgggcatcattgctggcctggttctctttggagctgtgatcactggagctgtggtcgctgctgtgatgtggaggaggaagagctcagatagaaaaggagggagttactctcaggctgcaagcagtgacagtgcccagggctctgatgtgtctctcacagcttgtaaagtgtgagacagctgccttgtgtgggactgagaggcaagagttgttcctgcccttccctttgtgacttgaagaaccctgactttgtttctgcaaaggcacctgcatgtgtctgtgttcgtgtaggcataatgtgaggaggtggggagaccaccccacccccatgtccaccatgaccctcttcccacgctgacctgtgctccctccccaatcatctttcctgttccagagaggtggggctgaggtgtctccatctctgtctcaacttcatggtgcactgagctgtaacttcttccttccctattaaaattagaaccttagtataaatttactttctcaaattcttgccatgagaggttgatgagttaattaaaggagaagattcctaaaatttgagagacaaaataaatggaagacatgagaaccttccaaaaaaaaa

SEQ ID NO: 77476 - DNA, 1192 bp, Homo sapiens; identical to SEQ ID NO: 60058

SEQ ID NO: 77477 - DNA, 1681 bp, Homo sapiens; identical to SEQ ID NO: 60060

SEQ ID NO: 77478 - DNA, 3730 bp, Homo sapiens
ttttttttttttccattataatagccatctttatttgtaaaaatccagatataaaatgtattctttcagtctttccgggtgttccttttttacaaaaacaaaaaggcacataaaaaccttccccgctgtcatttccacagatggatggttttcaggcagccctcccccctccccccatagagctacatgcttcattccaggacgtcttgcttccccacatgctgcggtgctttcctaccagggtagagttccaaactccaagactgaagtacacaaagagggggtgggtgtcggatgcagagtgtgtggcctgatgctccacggcgtgcaggacggggggctaatagtaggtttccttctccacccagccgccagggcgtcgcctgatgatgagttttctgacttcgtcatatacgaagatgagaagagagtaggggaaggcacagaaccaccaggtaggtttgaggggatacatcctaagagcaacacccattccagggcagtaggaaaggaaagcagccagggctgtctcttcaaagaggccaaatatcaagatcttgttcttcatcccctgctggaagaccgaattcctcctggtcttacagatgaccaagtcggcccactgcaccaccacgatactgacgaagaaggctgtgtggcaggtgaactccacgattttcctctgctcataggtccactgctgcccgtagctgtcttccacatcgttgatccagcggtcatcccagtccactcggaggcccaacaggtgaattgggaggaagccgttctcagccagaatcacaaagtaagtaaagaagcctcccagggcctggatcattccaatctgcccataggccatgctgatcagccgctcattcacaagtttgtctgttttgggatttctgggctgtctcttcatgatgtcactctcagcctgctcataagccagggagatggcaggaaccatgtcagtgcccaagtcaatgcagaggatggtgacagtccccagtggtagtggaatgtttgcaataataaatatcaggaacggggtgatctcgggaatgttactggttaaggtataagcaatggatttcttcaagttatcaaagatcagacgaccttcctctactccagtcacaattgaggcaaagttgtcatccagaagaatcatgtcagcagcttgcttggacacatctgagccagcaatccccatagcaaccccaatgtctgctttcttcaaagctggagagtcattcacaccgtcaccagtcacagccacgatagcaccctgtctttggcagccttccacaatgatgagcttctgctgaggggaggtcctggcaaacactatctcagtgtggtacttcaaaatgtcatccagctgctcggaggtcatgtcctttagatcactgccgtgtactacgcaggccttggcatccctggggttcacctggctgactgggatgttgaggcgggcagcaatgtcttccacggtctcattgccttctgagatgatgcccacacctttggcaatagctttagctgtgattggatggtctcctgtgaccatgatgaccttaattccagcacttcgacatttgcccacggcatcaggaacggccgcccgtggagggtcaatcatggagatgagcccaacaaagcacagattatcgatagggaaattcacatcgtcagtgtcaaactggaacccttcaggaaactgttcatctggcagaaagaggtggcagaaacctaggactcgttctccgaggccccccagctccaaataggcgttctgaaaggcgtctttcagctcctcatccaggggctgctccttgccgtggaggaggatagagctgcaacggtctaggatcctttctggggcgcccttcatcaccaacaggtgttggggctccgatgtgttggggttcttatgaatagacaactggtacttgttggtggagttgaagggtatctcgacgattttggcgtatctttctctcatctccttcacggaaccacagcacagctctatgcactttaagagtgctgactcagaggcatctcctgcaactgcccgcttaagaataggtaggttttcctggttagcctgaaacactgccctgttacaaagacctgcaattctggacagagcaagccaggtagctgaagtcttgtcaaaagagacaccactctgattctctgtcgtatcagcttcatggatttgattgtcaaaccacatgtgggccactgtcatccggttctgagtcagagttccagttttatcagagcagatggtggacgtggaccccaaggtctccacagcttctaagttcttcactaagcagtttttccttgccatgcgtttggcagtaagtgtcagacagaccgtgacagtggccagcaaaccttccggcacattggctacgatgataccgatgaggaagatgacagcctcaagccaggtgtactcaaggatgagagaaaggatgaagaaagacacacccaggaacacagccacacccgtgatgatgtggataaaatgttcaatttctgcagcaatgggggtctggcctccttccagcccagaagcaagtgtggcaattcttcccatcacagtgcgatccccagtgtagacaacaataccacgtgcggtgccttcaacacaatttgttgaaaagaaggcaatgttcctcgtctccagggggttttcatttgtgaaatctggagacctagtctggggttctgattcaccagtgagcgaggagttatccaccttgcagccatttgcagatatgattctgaggtcagcaggaattcggtctcctccttttacttccaccagatccccaaccacaacttcctccgcatttatgctcattttctcaccatttcgaatcacaagggcttgctgagggaccatgtttttgaaggattccatgatctttgaacttttagcttcttgatagtaggagaagcaaccagttatgattacaacggctgatagcaccacacccaggtacagattatcgttttgaggttcctcttctgtagcagcttggatgctataagccaagaaacaaagaatcgctccaatccacagtaacattgagaaccccccaaagagctgccgacaaaacttgatccattcaggagtagtgggagggggagtgagggcgttgggaccatctcgcgccaggatctcagctgcacgagcagatgttaatccccggctcaagtctgttccatatttacgatgaagttcatcaaggctaagtttatgatcatccatagaaacttctttcttcagttcatccatgtccctgtcttttttgccctttttgccctttttatcaccttgttctgaaacagctgcaggctcatacttatcacgtccaacccccttccccatggtggcggtgctcagtgcccggcgccgggtcctgtcgctggagaatcagagagaaaagcacagagcagctcccggccgagcgagcgggaccaggggagccaagtggagggagctagggctgccgcggggcgggagggtgggagcgggccgcggctcgggccgatgccgccgccgctgttgctgccgccgcccgggctcgtaccgctgttgccacgtgtccgttcctctcaagatgctttcgaacagcaactgctttcttaattaaatggtagagatcttcaggaagatcaggagcaagtcccttagacttaagaattc

SEQ ID NO: 77479 - DNA, 1517 bp, Homo sapiens; identical to SEQ ID NO: 60061

SEQ ID NO: 77480 - DNA, 1256 bp, Homo sapiens; identical to SEQ ID NO: 60062

SEQ ID NO: 77481 - DNA, 500 bp, Homo sapiens; identical to SEQ ID NO: 60063

SEQ ID NO: 77482 - DNA, 2325 bp, Homo sapiens; identical to SEQ ID NO: 60064

SEQ ID NO: 77483 - DNA, 1519 bp, Homo sapiens; identical to SEQ ID NO: 60065

SEQ ID NO: 77484 - DNA, 2195 bp, Homo sapiens; identical to SEQ ID NO: 60066

SEQ ID NO: 77485 - DNA, 1761 bp, Homo sapiens; identical to SEQ ID NO: 60067

SEQ ID NO: 77486 - DNA, 1803 bp, Homo sapiens; identical to SEQ ID NO: 60068

SEQ ID NO: 77487 - DNA, 2176 bp, Homo sapiens; identical to SEQ ID NO: 60069

SEQ ID NO: 77488 - DNA, 2312 bp, Homo sapiens; identical to SEQ ID NO: 58748

SEQ ID NO: 77489 - DNA, 2840 bp, Homo sapiens; identical to SEQ ID NO: 60072

SEQ ID NO: 77490 - DNA, 1630 bp, Homo sapiens; identical to SEQ ID NO: 60073

SEQ ID NO: 77491 - DNA, 1950 bp, Homo sapiens; identical to SEQ ID NO: 60075

SEQ ID NO: 77492 - DNA, 1535 bp, Homo sapiens; identical to SEQ ID NO: 60076

SEQ ID NO: 77493 - DNA, 1120 bp, Homo sapiens; identical to SEQ ID NO: 60077

SEQ ID NO: 77494 - DNA, 831 bp, Homo sapiens; identical to SEQ ID NO: 60078

SEQ ID NO: 77495 - DNA, 1141 bp, Homo sapiens; identical to SEQ ID NO: 60079

SEQ ID NO: 77496 - DNA, 1916 bp, Homo sapiens; identical to SEQ ID NO: 60080

SEQ ID NO: 77497 - DNA, 1916 bp, Homo sapiens; identical to SEQ ID NO: 60082

SEQ ID NO: 77498 - DNA, 1849 bp, Homo sapiens; identical to SEQ ID NO: 59941

SEQ ID NO: 77499 - DNA, 1098 bp, Homo sapiens
ttttttttttttgggagttgagattttaatatcataaatcggtgtggggccacacctctcactgccaggcccgtgggcctcctatcttcatattgcctggaaggctgcctgcagccagggcttcccccatcccctaggaaggatccagcaccagcctgagaagggaggcaacagcagctaaaggggtgggaggaggaggagacagaagcatgtgctgcaggcgcatgtgtgtatgtacttacatgtgtgaacacatataaagtgtcaggtttacagaccctggctcaaggacagtctaggatgggaaaggaggtagggcgagaagaagcacatattttctccctggtgcttcagcctcaccctatccaagggacagacatatggggtgtgagaaacccatccccaggtcccagccttcaggactggagtccttttgagtctggtggagtcacagatccagtctttgggggacactgggtctgtctccttttgaaagccctggaaaggtgggaggtaagaagtaaagggagacaggtccctgctagaagaacttgacgcctcgggccatcgctgacagtgatgatctcggccttgtgctcctgctgtagggcctgcagagcccgcagtagagtggcttcatccagcccgtggaactcctcatcctctgtgtcttccccattagtcagttcatacagggtaaagacggagttgttctggccactcctggaaacccactgatagatgagtttcccccattcttctggcctccgccacatgatcaggaagctggacttgctcttatccaaccactcgaggttccctttcttcctcagttcctctaatacaatctggatcgactccacaggaagctttcgctgtagcttgacgttgttgaagagcgggctctcctgagcttccatcaccgtcatgctggactgtttgtgcaggcggcagaaggacaggaccagcgagcaccaggcggccagctgcttctgccgagtgtccacattcggttgtaacgtaaagaagggtgggaagcgatactgccacggccactcgaaactcatcgccatcgtagtagcccagcggacgcgtggg

SEQ ID NO: 77500 - DNA, 2657 bp, Homo sapiens; identical to SEQ ID NO: 60084

SEQ ID NO: 77501 - DNA, 1244 bp, Homo sapiens; identical to SEQ ID NO: 60085

SEQ ID NO: 77502 - DNA, 1467 bp, Homo sapiens; identical to SEQ ID NO: 60086

SEQ ID NO: 77503 - DNA, 1425 bp, Homo sapiens; identical to SEQ ID NO: 60087

SEQ ID NO: 77504 - DNA, 4588 bp, Homo sapiens
gcggccgccgcgcgctcaggctcagcttcgctgcccgcccaggtagtgcccgctggagctcgcgcgctcatccggcaccactccagggctccaggctcctcgggcttccggagtcgagacgtggtggagttggctcgggctgaacttctttcggggggctgcctgtcctggaatcgtgcgacctttcctttgccatccttctttttgcagaagatgaatccgggctcggcgccccctccgctcccgccgcctgggcagcaagtgatccacgtcacgcaggacctagacacagacctcgaagccctcttcaactctgtcatgaatccgaagcctagctcgtggcggaagaagatcctgccggagtctttctttaaggagcctgattcgggctcgcactcgcgccagtccagcaccgactcgtcgggcggccacccggggcctcgactggctgggggtgcccagcatgtccgctcgcactcgtcgcccgcgtccctgcagctgggcaccggcgcgggtgcctgcgggtagccccgcgcagcagcacgcgcacctccgccagcagtcctacgacgtgaccgacgagctgccactgcccccggggctggggagatgacccttcacgggccactggcccagaggtacttcctcaatcacatagaaaaaatcaccacatggcaagaccctaggaaggcgatgaatcagcctctgaatcatatgaacctccaccctgccgtcagttccacaccagtgcctcagaggtccatggcagtatcccagccaaatctcgtgatgaatcaccaacaccagcagcagatggcccccagtaccctgagccagcagaaccaccccactcagaacccacccgcagggctcatgagtatgcccaatgcgctgaccactcagcagcagcagcagcagaaactgcggcttcagagaatccagatggagagagaaaggattcgaatgcgccaagaggagctcatgaggcaggaagctgccctctgtcgacagctccccatggaagctgagactcttgccccagttcaggctgctgtcaacccacccacgatgaccccagacatgagatccatcactaataatagctcagatcctttcctcaatggagggccatatcattcgagggagcagagcactgacagtggcctggggttagggtgctacagtgtccccacaactccggaggacttcctcagcaatgtggatgagatggatacaggagaaaacgcaggacaaacacccatgaacatcaatccccaacagacccgtttccctgatttccttgactgtcttccaggaacaaacgttgacttaggaactttggaatctgaagacctgatccccctcttcaatgatgtagagtctgctctgaacaaaagtgagccctttctaacctggctgtaatcactaccattgtaacttggatgtagccatgaccttacatttcctgggcctcttggaaaaagtgatggagcaaagcaagtctgcaggtgcaccacttcccgcctccatgactcgtgctccctcctttttatgttgccagtttaatcattgcctggttttgattgagagtaacttaagttaaacataaataaatattctattttcattttctgcaagcctgcgttcttgtgacagattatacagaattgtgtctgcaggattgattatgcagaatacttttctctttcttctctgctgccccatgggctaagctttatgggtgttaattgaaatttatacaccaattgattttaaaccataaaaagctgaccacaggcagttacttctgagggcatcttggtccaggaaatgtgcacaaaattcgacctgatttacagtttcaaaaactgtattgatgacagtagtaccaaatgctttaaaaactatttaacttgagctttaaaaatcattgtatggatagtaaaattctactgtatggaatacaatgtaattttgaatccatgctggctctgatggctcttattagtctgtatttataaaggcacacagtcctattgtagcttatctttcgttattttactgcagagcatctagacaacttagtccctccagcgggaaagtagcagcagcagcattagtcacagttcttacactacagatcttgtgaaagagaccagtttggtactaattatgagcattttattcaaacaaaagtttttgaaatattacaactggggatttaaaaaattgcagcttagaatctgatggttttttttttttcttgatgttgttggttggtttttgaaatcgagttttgctcttgttgtccaggctggaatgcaagggcacaatttcggttaactgcaacctttgccttttgggttcaagcgattctcctgccttaccctcccgagtagctgggattacaggcgcctgccaccacgtccggctaattttttgtattttgagtagagacggggtttcaccataatggtcaggctgttctcaaactcctgatctcaggtgatccacccatctcggcctcccaaagtgctgggattactggcgtgagccaccgcacccggccttgatgtttattttataaagcactgtaattttgtagctgatgacaaaaggcagccaaatgtttttgataaatcagtggcaactgtatttttgtcttttgaaataactctgaaaacatcaggacaacatagatttcaacctgatagcacaccacacacagtgagctgttgctttttaaattctgaagccttgtcaggtttgcttcctagatttcaagtgtttaaaataattctatctatgaaactgaaggatgaagcagatctctgactgacatgtaaaaaaaaaatgccctttgagggtgtatggtggagataaatgtttctgaattcagtaaaattgattcctaagtatattatcctaatcctgtttgctacagttggtataaaaaggcatgaaatatgtattcaatacctcttatgtaaccaaaaccatttttaattagcttttaaggactgagagagcatcatgttcaactggcatgcagtctgcctgcattgccaatgaagtcctcaactgtttaatattttgaactaatattatttataatctatgaatttaatcttttttgaaagactttaataatttgagtctctgagaggatactttcaatttccatgggggacttatttgttggggatcttaaataagattccttttgatctaccggaatatacatgtacagagtacattggatcatgttggaaagaaggcaagtgaaaaggtcagagatgaagtagcgaagttatggaatatcgtggaaaggatactagttgtgaaatggaaagagacaagttatagtaccccaaaagcaaaacaagcaggagatgcaagagatgccccaaaaggacaaagcaacaattttctgttgccacctttataccggaagactctgttgtagaagaaaagaaggctttggtgcaccttatgtgggaggaggaggggcagggcatgctgatgctgagcgtacaggcagacaagagcgtagcctgctgttgcctccatcactatgaaatgacttattttacctgaaggacccatggtttatgttcctctaattcctttcactctccctaagccctctgagagagatgaagatagatgattttattgctactaaattgaagggagcactatttctttttgtcttttgttagcaaaaaattgcaaaaagaattgtacattcttgctaaaaataaataaataaataaaaaattaaaaacaagggacctaacaaaactcagcagtgttactgtattttttaaaaatatttttatagactcattttcaggttattaaatgtaagagaaacagatacccctcttttttaaagtaggtaaatcattgatgatttatattaccaatttttagaagtaattttctagtaagcttgtggcatcagaaaatactagaagatttttttagttaaattagttagaacatttatgaatgaatataataaatattttttcagaataaaatatggaccctttgtgtttactaatagataaagccagatataattttttgtttttaaggccacaaaatatggcctttgttaaagaacactaaagttagaaatctaaagttagagcaactttttaatggctatttcctattattgtaagtgttaaaacccctgcagaattcttgataaggtgctatttatactatatttcttattataagataactgtctttagtcttcttagtactagtctttttagtactaaatcaatcagtaaacatcatcatttcaccccaaaattttgtcacagaaaaggcgtatcaaatgaaaaataatttcagagatctttctttcaagatattttttcctgataaaatacattgtcttgaagtaaatacattgtcaaaacctaattgccaattctgttaaatctaagtaatttttagacagtgtttcaccgtattatttaggatgtgaaatgccatttctttcactggattacaccatatacagggaaacagggtaaaacagtggaaaactttattggtgctgggt

SEQ ID NO: 77505 - DNA, 6057 bp, Homo sapiens; identical to SEQ ID NO: 60089

SEQ ID NO: 77506 - DNA, 1565 bp, Homo sapiens; identical to SEQ ID NO: 60090
  misc_feature (1)...(1565): n = a,t,c or g

SEQ ID NO: 77507 - DNA, 2825 bp, Homo sapiens; identical to SEQ ID NO: 60092

SEQ ID NO: 77508 - DNA, 725 bp, Homo sapiens; identical to SEQ ID NO: 60093

SEQ ID NO: 77509 - DNA, 660 bp, Homo sapiens; identical to SEQ ID NO: 60094

SEQ ID NO: 77510 - DNA, 2846 bp, Homo sapiens; identical to SEQ ID NO: 60095
  misc_feature (1)...(2846): n = a,t,c or g

SEQ ID NO: 77511 - DNA, 932 bp, Homo sapiens
tctccggaccggacttcccgggtcgacgatttcgtggtacctagtgtctgagcggcacagacgagatctcgatcgaaggcgagatggcggacgtgctagatcttcacgaggctgggggcgaagatttcgccatggatgaggatggggacgagagcattcacaaactgaaagaaaaagcgaagaaacggaagggtcgcggctttggctccgaagaggggtcccgagcgcggatgcgtgaggattatgacagcgtggagcaggatggcgatgaacccggaccacaacgctctgttgaaggctggattctctttgtaactggagtccatgaggaagccaccgaagaagacatacacgacaaattcgcagaatatggggaaattaaaaacattcatctcaacctcgacaggcgaacaggatatctgaaggggtatactctagttgaatatgaaacatacaaggaagcccaggctgctatggagggactcaatggccaggatttgatgggacagcccatcagcgttgactggtgttttgttcggggtccaccaaaaggcaagaggagaggtggccgaagacgcagcagaagtccagaccggagacgtcgctgacaggtcctctgttgtccaggtgttctcttcaagattccatttgaccatgcagccttggacaaataggactggggtggaacttgctgtgtttatatttaatctcttaccgtatatgcgtagtatttgagttgcgaataaatgtaaacacagcaagttccaccccagtcctctgttgtccaggtgttctcttcaagattccatttgaccatgcagccttggacaaataggactggggtggaacttgctgtgtttatatttaatctcttaccgtatatgcgtagtatttgagttgcgaataaatgttccatttttgttttctaaaca

SEQ ID NO: 77512 - DNA, 417 bp, Homo sapiens; identical to SEQ ID NO: 60097

SEQ ID NO: 77513 - DNA, 1007 bp, Homo sapiens; identical to SEQ ID NO: 60098

SEQ ID NO: 77514 - DNA, 1404 bp, Homo sapiens; identical to SEQ ID NO: 58848

SEQ ID NO: 77515 - DNA, 2211 bp, Homo sapiens; identical to SEQ ID NO: 60100

SEQ ID NO: 77516 - DNA, 5961 bp, Homo sapiens; identical to SEQ ID NO: 60101

SEQ ID NO: 77517 - DNA, 1583 bp, Homo sapiens; identical to SEQ ID NO: 60102

SEQ ID NO: 77518 - DNA, 2799 bp, Homo sapiens; identical to SEQ ID NO: 60103

SEQ ID NO: 77519 - DNA, 4210 bp, Homo sapiens; identical to SEQ ID NO: 60104

SEQ ID NO: 77520 - DNA, 1319 bp, Homo sapiens; identical to SEQ ID NO: 60105

SEQ ID NO: 77521 - DNA, 841 bp, Homo sapiens; identical to SEQ ID NO: 60106

SEQ ID NO: 77522 - DNA, 2137 bp, Homo sapiens
cccggaatttccgggtcgacgatttcgtagattacaacggtgatggcgggcaagcggtccggctggagccgggcggctctcctccagctccttctcggcgtgaacctgggggtgatgccgcccacccgggcccggagtctgcgcttcgttaccttgctgtaccgccatggagaccgttcaccagtgaagacatatcccaaggacccctatcaggaagaagaatggccccaggggtttggtcagttaaccaaggaggggatgctacagcactgggaactgggccaggccctgcggcagcgctatcacggcttcctaaacacctcttatcaccggcaagaggtttatgtgcgaagcacagactttgaccggactctcatgagtgctgaggccaacctggctggactcttccctcccaacgggatgcagcgcttcaacccgaacatctcgtggcagcctattcctgtgcacactgtgcccatcactgaggacaggctgctgaagttcccgttgggcccatgtccccgttatgagcagctgcagaacgagacccggcagacaccagagtatcagaatgagagttctcggaatgcacaatttctggacatggtggccaacgagacagggcttacagacctgacactggagaccgtctggaatgtctatgacacactcttctgtgagcaaacgcacgggctgcgcctgccgccctgggcctcaccccaaaccatgcagcgtctcagccggctaaaggacttcagcttccgcttcctcttcggaatctaccagcaggcggagaaggcccggcttcaggggggagtcctgctggctcagataaggaagaacctgaccctaatggcgaccacctcccagctccccaagctgctggtttactctgcgcacgacactaccctggttgccctgcaaatggcactggatgtctacaatggtgaacaagccccctacgcctcctgccacatatttgaactgtaccaggaagattctgggaatttctcagtggagatgtactttcggaacgagagtgacaaggccccctggccgctcagcctgcctggctgccctcaccgctgcccactgcaggacttccttcgcctcacagagcccgtcgtgcccaaggattggcagcaggagtgccagctggcaagcggtcctgcagacacagaggtgattgtggccttggctgtatgtggctccatcctcttcctcctcatagtgctgctcctcaccgtcctcttccggatgcaggcccagcctcctggctaccgccacgtcgcagatggggaggaccacgcctgacaaccactcagcccccttccctccacctcctaggggaggtgggctgggccctcgctcctgactgttgctgctccccagcccatggacaggagatcctgggttgggcctccctctgatgaccccagccagatgagcgagtggggctcagcgtggcccatggtgcctgtcactcagcattcccatgcctgatgtttaccaagtgctgtgttggacactggctttctccaaacaggatttgcctcctccacgctccctacacacctgagatgtaaactggcagtcagtgttcactcaggacctaggattagaaaatggcagagttggtgctggatccaccttgcacttctatcaagccctgttctttttcctccagcctgaagtcttcggcaaatagctcagagggacatggtcttgcctctcagtgcttattttagtgggaaaaacagctaataccaggggtacaaacattggctcccaaggaactggatcacccaacagccagccagccacatttccctgtgtctggctagagccaccattagactcagacagaatgcttcaggaatcgttgtcaccccttcaactggagcaggacggaaggttgtctgtacttgggagggagtggggagtggtgggaagggagttgcttgtcacacgaatcaggaaactgctctccctcagctgggctggggtctccagggacctgagctacatgcaggttgtgagctggaaaagaaagttctagactgtggcccagaatagggctggggcagctcccagagaatgaatagtgctgtttcctattggactgataaaaaaaaaa

SEQ ID NO: 77523 - DNA, 2366 bp, Homo sapiens; identical to SEQ ID NO: 60108

SEQ ID NO: 77524 - DNA, 1915 bp, Homo sapiens; identical to SEQ ID NO: 60109

SEQ ID NO: 77525 - DNA, 1816 bp, Homo sapiens; identical to SEQ ID NO: 60110

SEQ ID NO: 77526 - DNA, 1232 bp, Homo sapiens; identical to SEQ ID NO: 60111

SEQ ID NO: 77527 - DNA, 1418 bp, Homo sapiens; identical to SEQ ID NO: 60112

SEQ ID NO: 77528 - DNA, 1073 bp, Homo sapiens; identical to SEQ ID NO: 60113

SEQ ID NO: 77529 - DNA, 3379 bp, Homo sapiens; identical to SEQ ID NO: 60115

SEQ ID NO: 77530 - DNA, 2432 bp, Homo sapiens; identical to SEQ ID NO: 60116

SEQ ID NO: 77531 - DNA, 1095 bp, Homo sapiens; identical to SEQ ID NO: 60117

SEQ ID NO: 77532 - DNA, 977 bp, Homo sapiens; identical to SEQ ID NO: 60118

SEQ ID NO: 77533 - DNA, 1723 bp, Homo sapiens; identical to SEQ ID NO: 60119

SEQ ID NO: 77534 - DNA, 4928 bp, Homo sapiens; identical to SEQ ID NO: 60120
  misc_feature (1)...(4928): n = a,t,c or g

SEQ ID NO: 77535 - DNA, 1087 bp, Homo sapiens; identical to SEQ ID NO: 60121

SEQ ID NO: 77536 - DNA, 886 bp, Homo sapiens; identical to SEQ ID NO: 60122
  misc_feature (1)...(886): n = a,t,c or g

SEQ ID NO: 77537 - DNA, 1939 bp, Homo sapiens; identical to SEQ ID NO: 60123

SEQ ID NO: 77538 - DNA, 2054 bp, Homo sapiens
attcccgggtcgacgatttcgtctcgctggctagtaggagagactggtgcttgccccgcccggtggactaactcgcttaattttaaataaaaagtcgaggacacggcggtcgttttcccgaagacatgggccctcccatgggccatttgctccctggaggccctcgcgtcttgctgagcccggggagttaggatgacgcgagcggtgagggagcccggaacgattccttcgcggaacaattgaggcgaggcctttgggagtactttgtgggacggaccctggcgggccctgccagacgcacagggatggcggcggaggcggccgatttggggctgggggccgccgtccccgtggagctgaggcgggagcgacgcatggtgtgcgtggagtacccgggagtggtgcgtgatgtggctaagatgctgccgactctgggcggcgaggaaggcgtctcccggatctacgcagaccccaccaagaggctggagctgtacttccggcccaaggacccatactgccacccagtgtgcgccaaccgcttcagtaccagcagcctgctgctccgcatcaggaagagaacgaggcggcagaaaggggtgctgggcactgaggcccactccgaggtcacatttgacatggagatccttggcatcatctccaccatttacaaatttcaggggatgtctgacttccagtacttggctgtgcatacggaagcaggcggcaagcatacgtcaatgtatgacaaggtgctcatgctccggcccgagaaggaggcctttttccaccaggagctgccgctctacatccccccacccatcttctcccggctggacgccccggtggactacttctaccgaccagagacccagcaccgggaaggctacaacaatccccccatctcaggtgagaatctgattggcctgagcagagcccggcgcccccacaatgccatctttgtcaactttgaggatgaggaggtgcccaagcagccactggaggctgcagcccagacgtggaggagagtctgcactaaccccgtggaccggaaggtggaggaggagctgaggaagctgtttgacatccgtcccatctggtcccgaaatgctgtcaaggccaacatcagcgtccacccagacaagctcaaggtcttgcttcccttcatagcctattacatgataacaggcccctggcgcagcctatggattcgatttgggtatgacccccgaaaaaacccagatgccaagatttatcaagtcctcgatttccgaatccgttgtggaatgaaacacggttacgcccccagtgacttgccggtcaaagcaaagcgcagcacctacaactacagcctccccatcaccgtcaagaagacatccagccagcttgtcaccatgcatgacctgaagcagggcctgggcccgtcggggacgagtggtgctcggaaaccagcttccagcaagtacaagctcaaggtcagccttcagacactgagggactctgtctacatcttccgggaaggggccttgccaccctatcggcagatgttctaccagttatgcgacttgaatgtggaagagttgcagaagatcattcaccgcaatgacggggcagagaattcctgcacagaacgggatgggtggtgcctccccaagaccagcgacgagctcagggacaccatgtccctcatgatccggcagaccatccgctccaagaggcctgctctcttttccagctcagccaaggctgatggcggaaaagagcagctgacgtacgagtctggggaagacgaggaggatgaggaggaggaggaagaggaggaggaggacttcaagccatccgacggcagtgaaaacgaaatggagacagagattctggactacgtgtgacagggcccaaggctgggcctccctgacccggccagactggtgtctggcctaatgagggagccggggctccccattgccacccacagtgcccggaatggccctaggaggccctctgaggagagctagagtcccagcaaagggtgcagctgaccctagcactggctgtga

SEQ ID NO: 77539 - DNA, 2564 bp, Homo sapiens; identical to SEQ ID NO: 60125

SEQ ID NO: 77540 - DNA, 2201 bp, Homo sapiens; identical to SEQ ID NO: 60126

SEQ ID NO: 77541 - DNA, 721 bp, Homo sapiens
ggcacgagggcatggcgagcggatcatccgcttccggagtcgaggttttcgggcttgtaccgcttggcggtgcggcctggtgtcggcttgcaggttctttctgtgtttgttctctgccctgccaaggccgtagagctggtgcgtgcgggtagcggggctctccgaggagccgcacgccggcggcaccatggtccacctcactactctcctctgcaaggcctaccgtgggggccacttaaccatccgccttgccctgggtggctgcaccaatcggccgttctaccgcattgtggctgctcacaacaagtgtcccagggatggccgtttcgtagagcagctgggctcctatgatccattgcccaacagtcatggagaaaaactcgttgccctcaacctagacaggatccgtcattggattggctgcggggcccacctctctaagcctatggaaaagcttctgggtcttgctggctttttccctctgcatcctatgatgatcacaaatgctgagagactgcgaaggaaacgggcacgtgaagtcctgttagcttctcagaaaacagatgcagaagctacagatacagaggctacagaaacataaatgagctgactttagtgagcatagcagtgggaacaaggtcaaggtccttttgaaacactgcagcgatcttaattttgttagatttggagttcaataaatggagtatcctgaaaaaaaaaa

SEQ ID NO: 77542 - DNA, 2144 bp, Homo sapiens; identical to SEQ ID NO: 60128

SEQ ID NO: 77543 - DNA, 2078 bp, Homo sapiens; identical to SEQ ID NO: 60129

SEQ ID NO: 77544 - DNA, 1255 bp, Homo sapiens; identical to SEQ ID NO: 60130

SEQ ID NO: 77545 - DNA, 831 bp, Homo sapiens; identical to SEQ ID NO: 60131

SEQ ID NO: 77546 - DNA, 2716 bp, Homo sapiens; identical to SEQ ID NO: 60132

SEQ ID NO: 77547 - DNA, 1102 bp, Homo sapiens; identical to SEQ ID NO: 60133

SEQ ID NO: 77548 - DNA, 1132 bp, Homo sapiens
tttcgtccgccgcctgggctcctagggactgtggcctcggcggtatgtcccttgctttcccttgaagcgggagaagacccggcagaggcgctctgtccgctgcagccgcgcgggtggaggaggcagagtctgaggtgtgaccccgaccaagtttgacgcttctgtcctcctagggagcaagctcggctgaaggcccacgtcgtagaccgggacaccgaggcgtggcagcgagaccccgccttctcgggtctgcagagggtcgggggcgttgacgtgtccttcgtgaaaggggacagtgtccgcgcttgtgcttccctggtggtgctcagcttccctgagctcgaggtccttcttgtggatggaaacggggtactccaccaccgaggctttggggtggcctgccaccttggcgtccttacagacctgccgtgtgttggggtggccaagaaacttctgcaggtggatgggctggagaacaacgccctgcacaaggagaagatccgactcctgcagactcgaggagactcattccctctgctgggagactctgggactgtcctgggaatggccctgaggagccacgaccgcagcaccaggcccctctacatctccgtgggccacaggatgagcctggaggccgctgtgcgcctgacttgctgctgctgcaggttccggatcccagagcccgtgcgccaggctgacatctgctcccgagagcacatccgcaagtcgctgggactccccgggccacccacaccgaggagcccgaaggcgcaggaggccagtggcatgccccaaaggagactccggagagtcctcaggtggagcacccagtccccaaagacaggctgaccgcaccaccccagggggacgccgcagcacagcccagcaccaggtggggcagaggtgaccacggcccctctttgctccgtcatcggctggtcagctgtggtcacggtgcctcagaggacagatctctatgggggcaagtgccagatcctgagagcgcatgagacgctttcccggagccgacgaaggggactcggagctgcagcctgcacgacccctgcagcctgtgctttgcccacccctttcaatagatggaacttgcttgctcttttcaaaaaaaaaa

SEQ ID NO: 77549 - DNA, 1031 bp, Homo sapiens; identical to SEQ ID NO: 60134

SEQ ID NO: 77550 - DNA, 3758 bp, Homo sapiens; identical to SEQ ID NO: 60135

SEQ ID NO: 77551 - DNA, 597 bp, Homo sapiens; identical to SEQ ID NO: 60136

SEQ ID NO: 77552 - DNA, 1163 bp, Homo sapiens; identical to SEQ ID NO: 60137

SEQ ID NO: 77553 - DNA, 3220 bp, Homo sapiens
tttcgtctgagaggtaagagagggcggggggaaggaagaggaggcgggatccgggcgctgcgttggctgcggcctggcaccaaaggggcggccccggcggagagcggacccagtggcctcggcgattatggacccggtcgaggcggtgctgcaagagaaggcactcaagtttatgaattcctcagagagagaagactgtaataatggcgaaccccctaggaagataataccagagaagaattcgcttagacagacatacaacagctgtgccagactctgcttaaaccaagaaacagtatgtttagcaagcactgctatgaagactgagaattgtgtggccaaaacaaaacttgccaatggcacttccagtatgattgtgcccaagcaacggaaactctcagcaagctatgaaaaggaaaaggaactgtgtgtcaaatactttgagcagtggtcagagtcagatcaagtggaatttgtggaacatcttatatcccaaatgtgtcattaccaacatgggcacataaactcgtatcttaaacctatgttgcagagagatttcataactgctctgccagctcggggattggatcatattgctgagaacattctgtcatacctggatgccaaatcactatgtgctgctgaacttgtgtgcaaggaatggtaccgagtgacctctgatggcatgctgtggaagaagcttatcgagagaatggtcaggacagattctctgtggagaggcctggcagaacgaagaggatggggacagtatttattcaaaaacaaacctcctgacgggaatgctcctcccaactctttttatagagcactttatcctaaaattatacaagacattgagacaatagaatctaattggagatgtggaagacatagtttacagagaattcactgccgaagtgaaacaagcaaaggagtttactgtttacagtatgatgatcagaaaatagtaagcggccttcgagacaacacaatcaagatctgggataaaaacacattggaatgcaagcgaattctcacaggccatacaggttcagtcctctgtctccagtatgatgagagagtgatcataacaggatcatcggattccacggtcagagtgtgggatgtaaatacaggtgaaatgctaaacacgttgattcaccattgtgaagcagttctgcacttgcgtttcaataatggcatgatggtgacctgctccaaagatcgttccattgctgtatgggatatggcctccccaactgacattaccctccggagggtgctggtcggacaccgagctgctgtcaatgttgtagactttgatgacaagtacattgtttctgcatctggggatagaactataaaggtatggaacacaagtacttgtgaatttgtaaggaccttaaatggacacaaacgaggcattgcctgtttgcagtacagggacaggctggtagtgagtggctcatctgacaacactatcagattatgggacatagaatgtggtgcatgtttacgagtgttagaaggccatgaggaattggtgcgttgtattcgatttgataacaagaggatagtcagtggggcctatgatggaaaaattaaagtgtgggatcttgtggctgctttggacccccgtgctcctgcagggacactctgtctacggacccttgtggagcattccggaagagtttttcgactacagtttgatgaattccagattgtcagtagttcacatgatgacacaatcctcatctgggacttcctaaatgatccagctgcccaatctgaacccccccgttccccttctcgaacatacacctacatctccagataaataaccatacactgacctcatacttgcccaggacccattaaagtttgcggtatttaacgtatctgccaataccaggatgagcaacaacagtaacaatcaaactactgcccagtttccctggactagccgaggagcagggctttgagactcctgttgggacacagttggtctgcagtcggcccaggacggtctactcagcacaactgactgcttcagtgctgctatcaaaagatgtcttctatcttttgtgaatgattggaacttttaaacctcccctcctctcctcctttcacctctgcacctagttttttcccattggttccagacaaaggtgacttataaatatatttagtgttttgccagaatctctcttgctttgccattaagcagaagaactagtttccctgtatagcctgctgggagagacccacttctagggtatgggggatgcagcttcaagcccagtgcccagtgtctccctgttaactgcaggaatgccaagcacctggccagagcagcccagccccaatatgcttaggaggagacagagttccctctgtatagcctctgggacaagaaaaagaaaacacaagaatgtatacactggaagatttgggcctcctgcctgccttctctttgtttctgttcctcttcccatctactcccctacgccccttcaaccttttttctctgtctgcttcacctgagaagaaagtgtatgaagagagtgtcctcctctcgcatgagcccagatcagcccagaaaatgccaacacttggaagagttaaatgcctgttcagtgaagatttccagccccaggcctttgcctgcaaagtgacccctgtggcaaacaagtggattcctcagacatgatactctcatcatatttgcaactcttctctctctttccttcccccacaccccaagaggaggattggtggtagggggcaggcagagggggtggggagaagtttcctgggctccatcaatggctgcatcttttctggactcagcagtctccttgattccatgtagagtgttggaaaggagttgctgattgcatttcctctcattaacaattgggtgtgtaataaaaagcattggtacttcatcttaaatcactggtaaggctcagcctacagaaagataaaaaatggccagagccaatcgcttggtgcattctgcgtaatggtttccatctccgatttcctcatcagggcctgtgaatacccaggtgcctgtatctttgccaagaccgtgatcaaggtagctttaagagagatggtcaggagaaaacactgtttttgttttttttgttgttttgttttgttttggccagttaaatatcatctctcaaaatattgatctcaaccgtgtcaacct

SEQ ID NO: 77554 - DNA, 1066 bp, Homo sapiens; identical to SEQ ID NO: 60139
  misc_feature (1)...(1066): n = a,t,c or g

SEQ ID NO: 77555 - DNA, 623 bp, Homo sapiens; identical to SEQ ID NO: 60140

SEQ ID NO: 77556 - DNA, 966 bp, Homo sapiens; identical to SEQ ID NO: 60141

SEQ ID NO: 77557 - DNA, 850 bp, Homo sapiens
ggacgtagcgtcgccgcgccaggtttttagcagctgccgctgagccgccggacggacgctcgtcttcgcccgccatggccgagagcgactgggacacggtgacggtgctgcgcaagaagggccctacggccgcccaggccaaatccaagcaggctatcttagcggcacagagacgaggagaagatgtggagacttccaagaaatgggctgctggccagaacaaacaacattctattaccaagaacacggccaagctggaccgggagacagaggagctgcaccatgacagggtgaccctggaggtgggcaaggtgatccagcaaggtcggcagagcaaggggcttacgcagaaggacctggccacgaaaatcaatgagaagccacaggtgatcgcggactatgagagcggacgggccatacccaataaccaggtgcttggcaaaatcgagcgggccattggcctcaagctccggggaaaggacattggaaagcccatcgagaaggggcctagggcgaaatgaacacaaagcctcgaaatcagtgcgctccagctgatctcgttccgccggttccccttggccgccagttccgttctcctcacgggccgaacggaacaaggggtccagcttgcgggggaccctccccagcccattcctgctgtcaaacaaacaaaaccttgctcgtgccgaattcggcacgagggaacagaacctttgatgagagcgttcacagggacactgtctgggggtgcagtgcaagcccccggcctcttccctgggaacctctgaactcctccttcctctgggctctctgtaacatttcaccacacgtcagcatctaatcccaagac

SEQ ID NO: 77558 - DNA, 3026 bp, Homo sapiens; identical to SEQ ID NO: 60143

SEQ ID NO: 77559 - DNA, 1061 bp, Homo sapiens; identical to SEQ ID NO: 60144

SEQ ID NO: 77560 - DNA, 952 bp, Homo sapiens; identical to SEQ ID NO: 60145

SEQ ID NO: 77561 - DNA, 591 bp, Homo sapiens; identical to SEQ ID NO: 60146

SEQ ID NO: 77562 - DNA, 998 bp, Homo sapiens; identical to SEQ ID NO: 60148

SEQ ID NO: 77563 - DNA, 2428 bp, Homo sapiens; identical to SEQ ID NO: 60149

SEQ ID NO: 77564 - DNA, 1884 bp, Homo sapiens; identical to SEQ ID NO: 60150

SEQ ID NO: 77565 - DNA, 2718 bp, Homo sapiens; identical to SEQ ID NO: 60151

SEQ ID NO: 77566 - DNA, 1810 bp, Homo sapiens; identical to SEQ ID NO: 60153

SEQ ID NO: 77567 - DNA, 1521 bp, Homo sapiens; identical to SEQ ID NO: 60154

SEQ ID NO: 77568 - DNA, 1655 bp, Homo sapiens; identical to SEQ ID NO: 60155

SEQ ID NO: 77569 - DNA, 2323 bp, Homo sapiens; identical to SEQ ID NO: 60156
  misc_feature (1)...(2323): n = a,t,c or g

SEQ ID NO: 77570 - DNA, 2794 bp, Homo sapiens; identical to SEQ ID NO: 60157

SEQ ID NO: 77571 - DNA, 2318 bp, Homo sapiens
attaatcccccctccttcccggtcggctcagtggccctgagaccctagctctgctctcggtccgctcgctgtccgctagcccgctgcgatgttgcgcgctgccgcccgcttcgggccccgcctgggccgccgcctcttgtcagccgccgccacccaggccgtgcctgcccccaaccagcagcccgaggtcttctgcaaccagattttcataaacaatgaatggcacgatgccgtcagcaggaaaacattccccaccgtcaatccgtccactggagaggtcatctgtcaggtagctgaaggggacaaggaagatgtggacaaggcagtgaaggccgcccgggccgccttccagctgggctcaccttggcgccgcatggacgcatcacacaggggccggctgctgaaccgcctggccgatctgatcgagcgggaccggacctacctggcggccttggagaccctggacaatggcaagccctatgtcatctcctacctggtggatttggacatggtcctcaaatgtctccggtattatgccggctgggctgataagtaccacgggaaaaccatccccattgacggagacttcttcagctacacacgccatgaacctgtgggggtgtgcgggcagatcattccgtggaatttcccgctcctgatgcaagcatggaagctgggcccagccttggcaactggaaacgtggttgtgatgaaggtagctgagcagacacccctcaccgccctctatgtggccaacctgatcaaggaggctggctttccccctggtgtggtcaacattgtgcctggatttggccccacggctggggccgccattgcctcccatgaggatgtggacaaagtggcattcacaggctccactgagattggccgcgtaatccaggttgctgctgggagcagcaacctcaagagagtgaccttggagctgggggggaagagccccaacatcatcatgtcagatgccgatatggattgggccgtggaacaggcccacttcgccctgttcttcaaccagggccagtgctgctgtgccggctcccggaccttcgtgcaggaggacatctatgatgagtttgtggagcggagcgttgcccgggccaagtctcgggtggtcgggaacccctttgatagcaagaccgagcaggggccgcaggtggatgaaactcagtttaagaagatcctcggctacatcaacacggggaagcaagagggggcgaagctgctgtgtggtgggggcattgctgctgaccgtggttacttcatccagcccactgtgtttggagatgtgcaggatggcatgaccatcgccaaggaggagatcttcgggccagtgatgcagatcctgaagttcaagaccatagaggaggttgttgggagagccaacaattccacgtacgggctggccgcagctgtcttcacaaaggatttggacaaggccaattacctgtcccaggccctccaggcgggcactgtgtgggtcaactgctatgatgtgtttggagcccagtcaccctttggtggctacaagatgtcggggagtggccgggagttgggcgagtacgggctgcaggcatacactgaagtgaaaactgtcacagtcaaagtgcctcagaagaactcataagaatcatgcaagcttcctccctcagccattgatggaaagttcagcaagatcagcaacaaaaccaagaaaaatgatccttgcgtgctgaatatctgaaaagagaaatttttcctacaaaatctcttgggtcaagaaagttctagaatttgaattgataaacatggtgggttggctgagggtaagagtatatgaggaaccttttaaacgacaacaatactgctagctttcaggatgatttttaaaaaatagattcaaatgtgttatcctctctctgaaacgcttcctataactcgagtttataggggaagaaaaagctattgtttacaattatatcaccattaaggcaactgctacaccctgctttgtattctgggctaagattcattaaaaactagctgctcttaacttactgggtaactctttgtccatctcaataaccaaaggaaggtgggcatggtggctcgcgcctgtggtcccatagtgctgggattgcaggcgtgagccaccgtgcccggccaactgtagggaccagccccacagggtcggtgggtttttctccccatgtgcggagacgagagattgtagaaatatagacacaagacaaagaggtaaaagaaaagacagctgggcttgggggaccactaccaccaagaggcggagaccggtagaggccccg

SEQ ID NO: 77572 - DNA, 2795 bp, Homo sapiens; identical to SEQ ID NO: 60159

SEQ ID NO: 77573 - DNA, 2350 bp, Homo sapiens; identical to SEQ ID NO: 60160

SEQ ID NO: 77574 - DNA, 5653 bp, Homo sapiens
ttttttttttttgggtttctactgaaacttattatttgccattaagaattgcaaactatactactaagaatgaacaacattctcttcattaagcctttttcaaaacacacgagacaaagctcccctttggtcaaggtgtcccacacattcccactgcagctcccagcacagcggcgcaccatgaactcggacgcggagcccaaggaatggagatcgcaccagccttccctgcttccccaccccaactacacccaagggagaaaggatacgaggaaatacactatgtcttcaatgcttggggggctgggggtgtcctctgctaccaggtgggccggtcagtgccgactgtccggcgcgcgtcctcggggatctccggctccccgacctacacaagcagcagcagcagcagcagcgagtcctgccaacgccgcagtagctgctcatgagaaaagtgcccacgctccccaagccctcctgtttacatttcctagtggggcaaagctactttcccaggacaggcagcagagcagtggggcagagtgcactctgggacccgggacagcaggttacacagggtcaggcggtggtgggtgctggaatcggggctgaggttctggaaatgccaccaggtgatgccaccctgtggtgtctgcccaccacacaccacaagactcaagtggttttccccttttggccctaaaccacctaacacctcagcggcatgggagggcaattctcagcaaggcaaggacatggggaaggctcctgggagaggcacgccgtccaccctcaagcctgactgtcacaggtggaggccccgccccccccccgtcaccacacctggggaagctgccacagaatgccacagcactggaaagggacactctgagggcaggctccagcagcagctccaggacagccagccgcccttctgcccaggccgaccacgctgtgtcctgtgcacgccatcttcaggtttcccacacacccacttcctgaatacttttctccccaaagcaaggaggaacctcgccttcgttcctccaacctcatctcccactgaggtagcccttggtaagccaggctgggcagagaggacacagcggtgggcgcgcccccctcgagagcagcccagtccttgggcgtggggccgcagtgtggctgccgctcctctcacgccagcctgcacaggtcttctgagactgactcagggagcgccccagaaattcatgtctgtgtctgacaacttcaaacaggactttaattccaaaccaaccacagaaccggcgcctgggagcaagtgggactgaggcccaggtgctaacacggggctggcagtgtcgagagaacgctctggaagctcctaacagacggctccgcgtgcggatgcacaggccctgacgggcactctgagctgggcagtctgacaccaagcagtaaggcctcccgggcagcgcagcctcagtccacgagcacagcgggtggccctctggggggaggcagcacggggcgcagccctcggcaggcgagcgggcgggatggatgaaacgcagcggcaccaggagccccaggctctcacaggtgccacccccgaccccaggattttcaaagggacaggatttcaaagtcttcatcttctgagtcgaagaatctttccagtcgctctacatcagaagaatctagaaggaacaggacatagcgcatcaggcatcttgggtgggccacctgggtgtgagtcaagggcccttggcgtggggcagactgagcagtgcctgctctgcagcccacagacagctgtccccatgcgggtgtgaacaggtccgggggttgtgcagacctgcgaatatggggggagggagcagagaagaggagcagggcagggtgaggagggcagggggcggccggcacaatctcaggcctgaggggcctctgtcccgcgtctgaccctcgtggtcatcaggagtggttccattgccattgccttgtttgtagagtttcccacagggagacagagatgaggaggacgcgctcacggccactcacttcactgcacgagcccaggccggctcctgcggcacgctggccatggtccgaggggtctacgccacccatggccagtggtgcccaagtgaaccagtcccccacccaggactgcgtcaccacagagcctgcatgttctgtctgctccagacccctgaggactccatggtagcacgcccagctccacagcgccccggcaggcagcgctggtggggaagacgaggtgggtcctgggctgctgggcgcaagcttggaggaggggacgctccactccatacctggtctcacaggcgaaccactgccaagtgctcacggctcaggctcacacacaccttaatggtcaaaaccaagggggccaggactggggaagcaagggcacagatcgtacctccgagggaccccacctggacttggcagctctcacctagggacaggttcaggacgtcggggcaggccagatgtgaaggctgctgctccaccagctcaaacatgggcagggcacctccaagcagagacagctttttgacttgctggcaccaatcactgaagtcatcttcagtcttacagaaaaacccctaaaacgaaatgacgatgagcagaacacgacacccccatctgcagtcggataagaggtgggggcttccattcccactgccagtggcgcagcagaggcccccagcatgcaggtgctggacattccagcctgccttggctcctgtggccgggaatggagctccgagggtgccctgtgcatggtcccctgcaccagtgcccggctcccctcaggctccactgcgttgctgtgccttgattcgcccacgagatgttacgtggtgtgcatctctcaaacctcaccgagtgttccgggattggggcaggttatgagttagggccaagtggggagctcttctctctgtgactgtgagacagggccgctgggtctcagccttcgcccagcagctccctggaagcttggcggcaaaggccaccgagaactgcccaaggacaccgtgacacagggagcctcctgctgaggagccaggagacaggggaccggccaagggtcaccggcaatcacatccttaaagctgccgcctgtaatgacagtcactaggaattctcaacgctgccagatgcgcagatgttaacacaaaaagaaacgaaatggggggagaagctcaaactgggcactctcttcccctgaagacaccattctgccgcctcggcgctggtgtaggagcactctcccccggggacaggggacattcctcctcctcacgggtgaggacagttatcccaccaggtggcccctttggtctcaactcaacgttcacgcgtccactcctctgtctgcggtggctggctctctagcctgacctgactgttagagtgccaatcactgtaagccaccaagctgcgtttacagtaacaaacatacctaattctagttcgacgaggaattcgtgactaggttctggtaagaagtgtgcgccaggctgcgcgcagtggctcacgcctgtaatcccagcactttgggaggccgaggtgggtggatcatgaggtcaggagatcaagaccatcctggctaacacagtgaaaacccgtctctattaaaaatacagaaaattagccaggcgtggtggcgggtgcctgtagtcccagctaatccagaggctgaggcaggagaatggcgtgaacctgggaggcggagcttgcagtgagccgagatcgcgccactgcactccagcctgggcgacagagtgagactccgtctcaaaaacaaacaaacaaacaaaaagtgtgagccacagagctccagcccatgttccccactactgccaccctgcccaggaggtgcatggagcgtggtgtgcactctggggctgcgccacagctcagagaccgtcccatttcaggcccagatctgccttcttcctcctaaatggggcggagcatccacaacagagcccccgattcggttaactgcttccctgagcatgtcaccgtcattcatgatttctaggggggttttttggcctctttccccatcaaatatatttgagggcaggcaggtctgcataaatcacacaccaaaaatcacaactaggtaatcaaaatggaaaaacagggaagctccttcttaggaaatcccccagagaggtcaagtcagagcctccggaaaacaaaaggtggtgcaggagtgggtgggtggaggggccgcccgtgtttaaatgtgggtgtgacgaaggtggtgcaggggtgggtggaggggccgcccgtgtgtttaaatgtaggtgtgagggggacacactcaccatggctcacactcatccatgcacactcagcacgcgcccacacacgctcacatccagacacacgctctctgggccactcgaaggccatgaaggctgcacaggaggtggtgcctgggggagggacgtgagggtgcaaggacacagttccggctcttatacccttcagattcccaaccacgtgaacacagtacttatcccaacatgctgaaaaaaaaacgcaaaaatccgaaagttttcctcgtcattcccaaacagcattcagcaccaaatgcctgtgtgctcaggtggccgccacgtaccacagcgatggacgggtcaagctccgcgatgctcatgcggcacggcgggtgctggcagtggaagctctcgtccgggatgaagcagccatcagtgggctccacggctggctgcgtggtgtgggggtccaggtagatgagctcctcaccaacgtagccgatgaagtagtgggcgctgttgggcttccctccgatgacgcccagggactggggcatcatgaagcagtgcttcagcgtctccacgtaggcctcgttgatgtccgtgagccccaggcgcaggggaatgagaagtaccaggggtctccatggcgacggcctgttggtgacctcagctccggcagggaatccgttgcagtgccggtcggaatctgcaggaaacgcagtggcgcctgcacagggaacgctggtcctgcacaaccttctgatttcctccatcacaacagtgttgtccattgcaatgtggaccgccaaggagctccacgtatcgaagacagcaagcttcttcaggacctgggcgacagtgttgggcccgtaccactggcctatggacttgccttcgccaactcccatttgcgctatctggtgaatggagtagtaactgtccttcctgtcgatgaatgcgttgaggacgctgaagtagctgtctggctgcctcttcctttgtgtccacctccaatctcggcctaggtgccggcacaccagggcttgggcaaagatcatctgtccacaccgcagcatgcagccccagcctgtgtccgaggtggggcctgtccccccaatggctggaaagtttttcctgtatgtaaaccaaagtctagatgccacatcagacaagatctcgtccttttctgtgaaaatgctgtattttctacccagtatccaaacgggctctgaggtctcaggaaaatcttcaaactcagcaaaccggagagtgtcgtaggtcagagtagctgcgtccatcttcccagtccggccgccgactgacccgagcggcgtcgctcc

SEQ ID NO: 77575 - DNA, 2992 bp, Homo sapiens; identical to SEQ ID NO: 60161

SEQ ID NO: 77576 - DNA, 983 bp, Homo sapiens; identical to SEQ ID NO: 60163

SEQ ID NO: 77577 - DNA, 1932 bp, Homo sapiens
gaaggattaaaaatatataatcaaattttttttttatttttctacagcaaaataaaaacattattttaaaaaagcaatattctacattaaatacattaagatattgacaattttataaatacaatcattttaaacagtaaacatgataaatttctgatacaaggttttacatacgttaattgtgaaaatataaaaactttacacacttctcttaaaaagcattcaacggtaatcaattttacaaaattatcaatttaaaaagtgttaggatatgcttctattttgttcccattattagggccaatggataggcatatcagatcttaaaaaagaaatggtgaattagggcctaagacatccctatattgcctaaaaacgaacatttcagagactttcttaggcactgagttcaaaaccagtgaaggttgccttctccctaggcaccactacccctcatggttgtccgaatcaggagacttcttcctggctacccttagggagagtcttctacacctattatttcctagtttctaggagaaagggtttcagaaagaattttgacatttaaattctatgccagtactgaaactctcccaaagattgaggcattctgcatttgaattttatacagaaagtcatgaatctaattccaaaagaaaagagtgcacttcatttggtcacttaatttcataccacttggcgaggtaggataactttcttctttgacaactgtctcgactatataaatggtgattataccggaaagggttctaatgccttttccacattcttccagttgtgaaaattctctctgtaccattcaattgttttctttattccttctttccaaggcactttaggtctccatcctaagccatgtattttttctgacttcattgggtatctcatgtcattggtgggtctatcattaacataatcaacccaattttccatttcagactctgaattggtctctttgatcagttgtattagttctttggcaagctggacaactgacatttcaaaattggttccgatgttataaatttcacctggtttcccttttttgaggacagtgagaaatgcttctacaacatcagtagcataaaggaagtttcttgtttgaagccctgacccatgaatgcaacatttcctgttgtgctgtagcaaagatataaattttggaataaccttttctggatattgatgtggtccataaacattactgcttcttgtgatgacaactggaaacttatattgttcccagtaagactgtacaaaacattcagcagctgctttagatgatgcataaggatttgtaggttgtttgggtgaagattcatcaaattccttatcaagactgccaccatatacttcatctgtgctgacataaataaacttctccactctggcttcatgagcagcacttaccaaaacgtgagtgccataaacattaacataggtaaactcaaaggcacgtacgaatgaaagatctacatgtgtttgtgcggcaaaatgtagtactatatctattttctctgtttcaaaaagcagtttcacaaagtgagaatcacatatgtcaccctgtataaatttgtagttctgtttgttagaaatggtttcaagattcttcaagcttgcacagtaatccagcttgtctagatttatgatcatatagtttggataatcttccactaaagagacaatcatatgtgatgcaatgaaaccagcaccgccggtcaccaggacccgcttcgcaaagccgccgggaagaccccacggttcctcccaacacgccgccgacatctcccagctcagcagtgcctagtaccgtaaagagtatggtctgaaaagcgcagggaagttccgccgcgaccttttgcgtacgcgcctcgctcgcgggacacgttaacagagcagccagagacgaaa

SEQ ID NO: 77578 - DNA, 425 bp, Homo sapiens; identical to SEQ ID NO: 60165
  misc_feature (1)...(425): n = a,t,c or g

SEQ ID NO: 77579 - DNA, 1458 bp, Homo sapiens; identical to SEQ ID NO: 60166
  misc_feature (1)...(1458): n = a,t,c or g

SEQ ID NO: 77580 - DNA, 1271 bp, Homo sapiens; identical to SEQ ID NO: 60167

SEQ ID NO: 77581 - DNA, 1805 bp, Homo sapiens; identical to SEQ ID NO: 60169

SEQ ID NO: 77582 - DNA, 1390 bp, Homo sapiens; identical to SEQ ID NO: 60170
  misc_feature (1)...(1390): n = a,t,c or g

SEQ ID NO: 77583 - DNA, 1959 bp, Homo sapiens; identical to SEQ ID NO: 60171

SEQ ID NO: 77584 - DNA, 1145 bp, Homo sapiens; identical to SEQ ID NO: 60172

SEQ ID NO: 77585 - DNA, 2018 bp, Homo sapiens; identical to SEQ ID NO: 60173

SEQ ID NO: 77586 - DNA, 1467 bp, Homo sapiens; identical to SEQ ID NO: 60174

SEQ ID NO: 77587 - DNA, 4120 bp, Homo sapiens; identical to SEQ ID NO: 58869

SEQ ID NO: 77588 - DNA, 1419 bp, Homo sapiens; identical to SEQ ID NO: 60176

SEQ ID NO: 77589 - DNA, 2531 bp, Homo sapiens; identical to SEQ ID NO: 60177
  misc_feature (1)...(2531): n = a,t,c or g

SEQ ID NO: 77590 - DNA, 2103 bp, Homo sapiens; identical to SEQ ID NO: 60178
  misc_feature (1)...(2103): n = a,t,c or g

SEQ ID NO: 77591 - DNA, 2040 bp, Homo sapiens; identical to SEQ ID NO: 60179

SEQ ID NO: 77592 - DNA, 1664 bp, Homo sapiens
ttctgtgaattaaattaaaagtttatcattccgtacaaacgcactcattttcaacaaacaagttttttacacgagccgcggttggccccggttggtggcacgtggggagcggccccgcggcggcgttctcgcgggcggggtcacagcggctccaggtcctcgtccccgcatgcgtactcgtacaggtccacggcgcccagcggtgagggcgcctcgaagaagggcctctgggccagcggggagcgcagcgcactcagcttctgctccacggggctgagctcggcctcgaacccgtcctcccagggctctcccgcggtctcctcggccaccaggatgtcgtactcctcggccgcgtacttctcccagtccgagagctcggggccgccgctgtcaccgtccctgagcagggagatctgctctttctgctcgtggtcgaggtacttctcgatgttgaagaaggtgtcgaagaagacgttggccagcttgcagcgcttcaggtcctgcagcgtgatcttcccttcagtcctcggcttgaccaggtccagcatctggcagaggcagtcctggaagggcagggcctcgatggccatgctgtccagccttcggcactgctcctcgtagaagtactcgagctcgaacatggacagggcgccgtccccgtccaggtccatgcagcggaaccagtactcgatgctggtcggtgtttttttgtcttcctcagagatcaaaaaccagacaaagtcggcatagctgatcttcccttccttctgcacttttctgcctcgtgtgactgctcctgagaagatcctgtctatcatcttggtagaaagggcgtggtcattgtgccgcgccaggtcgtccgcgtcgatgagcaggtcgtggtccgtgtccagctcccagaacttgcagtagatgacgtagaaatgctcgtacgagaagaattcggtcagctggttgatgtccgcctcctcctccagcagcgccacattctgcaggaaggagctcctccgcagctcggcgcaggtgatcctgccggaccaggaccggttcacggcgtagaagatccgctggatgaccgtggtgatgtagcgcgagtggaactcggacgcctccttcaggaacgacagccccgggtgcgtgttcaccacgtcctgcaagaaggggacaaagtcctcctgcaccaggtagttgcagccggggctcatgagcagatggacgaacttggccgcgtcgtcgtggcagttctggaggatttttctccacatggcgacgaacttgtggacggacacggagcccgtgcgctccccgccggcgccatagaagagcggccccttccagtagagggggcagccgcaggccttggccaccaggcccatgtcgtccatggtggccctctcgtgggggaaccgggcgaaggtgctctcgatcttgctgatgacggcatccacgttgacggagtcctgcgggcgtcctctagggaagtagaaggtcggaatgctttggctcgtggccgggggcagaggctcttctttccgtgtctgaacctgctggaaggccttcagacgcttcttgactcgagagggcagcacgaagtcgcagccgcgggccagtgagaccagctcctggcgcaggtcggggtcctggcgcagcgagcgctcgcggag

SEQ ID NO: 77593 - DNA, 1390 bp, Homo sapiens; identical to SEQ ID NO: 60181

SEQ ID NO: 77594 - DNA, 2196 bp, Homo sapiens
agcctcccaagatggcggtgtgcatcgcggtgattgccaaggagaattaccccctctacattcgcagcacccctacggagaacgagctgaagttccactacatggtgcacacatctctggacgtggtggatgagaagatctccgcaatggggaaggccctggtcgaccagagggagctgtacctgggcctgctctaccccacggaggactacaaggtatacggctacgtcaccaactccaaggtgaagtttgtcatggtggtagattcctccaacacagcccttcgagacaacgaaattcgcagcatgttccggaagctacacaactcctacacagacgtgatgtgcaaccccttctacaacccgggggaccgcatccagtccagcagggcctttgataacatggtgacgtcgatgatgatacaggtgtgctgagtgagctgtgctgccagccatcgcagaggagcccgcgcacgactgtggtggggccgtcggtctgttctggttgcctcttcctgaatgggacgcctggggctttcagggcaggcagctgtgcatgttctctcaactaaaggtcttgtgagaggagatttggctttttccttccgtgtcagccaaggatttaattaagaagaattcaactaaggacttttctggggtgtgggcagaggtttgggatcagatggcgcaggtagcctgtcctcagttgtcccaaaggggcagaggcaggggtgcctggagccaagagttcctgagcctgcaggacctgtgaccatgtgggtcacccactggctgaacaggtgggctggtctggagggggtggcctcctgagcccagaaccagcctaggatctaggggcacaaggggagccggcgtggcttcccacaggggagggccctcctctttctggacttggcctccattctttgcatctggctcaatggctggattccgcccggccttaaaaggagcccttgtgaaacctgggaagcctcgtggccccgcggcgttggctcagctgcagccctggtcctaaaccttggagcgcagacttgaggcaccccctcctgcctgttggtgctgagggggttgggtgctgtgtcacttgatgacgtggctgactaccacccagggcagcggccgagcccatagtggcgtcagtgccgccggcgtccttggggtccagcggtcaaggctcagcccgctgaggggacccccccggagttggttccagcactggtccaggactggagagtttctcaaggaccttgaggaccccagaagcccttgcagcaggaaaggctgtaagggggggtcagcctagggcaggacctagggaggggaactttcttgatacgtatttgccttttcatcccatctagcaagcacagtgttaattttagaaattatagaagaaaaaatcagcaaggagtgtgggaaaactgcatgccccaggcctcccccgccccagggtgaattggaagccctggaatgggccgaggcacaccaggcagctgatctgggtgcatgtgggccacagaccactctcacaaggttaaatctttaacaagagcctcatgtttgttaggagaaggtgggaccccagcccaagcacttccccattgcagcctggcatgaaatctttgccttttagtggggatcactcctgcccgagtcctggctgtggtggggactctgcaagttgctaacccagcgtccattctctttcctccgtactaacagaaccccggtgcctctgccccagttccaatagcgggcagacgagagccatgtcctgggctcccttgcagcccggggtgtgcagctgtggcgtggaggtgggtggtgctgggagagacttgcagggaagctcctgtgaaggggactcagctgccacatgcaggacccttcccctttgccttcttcctgcctggaacatggatgtgatggctggtgctgggacagctgtcctgagagcgtgaggaaagggtcacaccctaaggacagtggagcagaacacaggaaggaccctgggcctttgctgacgcagaacgcgggaaggacgctgggcctttgctgacgcagaacgcgggaaggaccctgggcctttgctgacataccagccccagactacttaaattcagcttttttttaatgtgagaaaataaatgcacccctctctggtttaaaaaaaaaa

SEQ ID NO: 77595 - DNA, 3039 bp, Homo sapiens; identical to SEQ ID NO: 60183

SEQ ID NO: 77596 - DNA, 2181 bp, Homo sapiens; identical to SEQ ID NO: 60184

SEQ ID NO: 77597 - DNA, 2242 bp, Homo sapiens; identical to SEQ ID NO: 60185

SEQ ID NO: 77598 - DNA, 1034 bp, Homo sapiens; identical to SEQ ID NO: 60186

SEQ ID NO: 77599 - DNA, 1458 bp, Homo sapiens; identical to SEQ ID NO: 60187

SEQ ID NO: 77600 - DNA, 795 bp, Homo sapiens; identical to SEQ ID NO: 60188

SEQ ID NO: 77601 - DNA, 1363 bp, Homo sapiens; identical to SEQ ID NO: 60189

SEQ ID NO: 77602 - DNA, 1449 bp, Homo sapiens; identical to SEQ ID NO: 60190
  misc_feature (1)...(1449): n = a,t,c or g

SEQ ID NO: 77603 - DNA, 1120 bp, Homo sapiens; identical to SEQ ID NO: 60191

SEQ ID NO: 77604 - DNA, 888 bp, Homo sapiens; identical to SEQ ID NO: 60192

SEQ ID NO: 77605 - DNA, 2091 bp, Homo sapiens
  misc_feature (1)...(2091): n = a,t,c or g
aggcgcccgcccgccgcgcgtgattctcgcctcgccgcagcccagccctgcgcgccttgcccggcggcccccgcccggccgctccgggcccctggccccgcggagcgatgctgctgctggctgccgccttcctcgtggccttcgtgctgctgctgtacatggtgtctccgctcatcagccccaagcccctcgccctgcccggggcgcatgtggtggttacaggaggttccagtggcatcgggaagtgcattgctatcgagtgctataaacaaggagcttttataactctggttgcacgaaatgaggataagctgctgcaggcaaagaaagaaattgaaatgcactctattaatgacaaacaggtggtgctttgcatatcagttgatgtatctcaagactataaccaagtagagaatgtcataaaacaagcacaggagaaactgggtccagtggacatgctggtaaattgtgcaggaatggcagtgtcaggaaaatttgaagatcttgaagttagtacctttgaaaggttaatgagcatcaattacctgggcagcgtgtaccccagccgggccgtgatcaccaccatgaaggagcgccgggtgggcaggatcgtgtttgtgtcctcccaggcaggacagttgggattattcggtttcacagcctactctgcatccaagtttgccataaggggattggcagaagctttgcagatggaggtgaagccatataatgtctacatcacagttgcttacccaccagacacagacacacctggctttgccgaagaaaacagaacaaagcctttggagactcgacttatttcagagaccacatctgtgtgcaaaccagaacaggtggccaaacaaattgttaaagatgccatacaaggaaatttcaacagttcccttggctcagatgggtacatgctctcggccctgacctgtgggatggctccagtaacttctattactgaggggctccagcaggtggtcaccatgggccttttccgcactattgctttgttttaccttggaagttttgacagcatagttcgtcgctgcatgatgcagagagaaaaatctgaaaatgcagacaaaactgcctaatcttcttaccccttggaagaagactgtttccaaataatttgaacagcttgctgctaaatgggacccaatttttggcctatagacacttatgtattgttttcgaatacgtcagattggaccagtgctcttcaggaatgtggctgcaagcaaggggctagaagttcacctcctgacagtattattaatactatgcaaatatggaataggagaccatttgattttctaggctttgtggtagagaggtgaaggtatgagaattaatagcgtgtgaacaaagtaaagaacaggattccagaatgatcattaaatttgtttctatttattcttttttgcccccctagagattaagtccagaaatgtactttctggcacataaagaaatcttgaggactttgtttaaaccttccataaaaaaacaattttcggtttctcgggttctctctctctctctctctctctctctgtctctctgtctctctggctctctgtctctctctctctctctctctctctctctttctttctttgtgtattatattcaagaagagttggacccattgccagtgagtctgaatgtcactgacagccctgtgttgtgctcaagactcactctgccgctggtgggaaactcatggcttctctctctctttgatcccataaagctacgagggggacgggagaggggcagtgcaatgggaaataaagaggatattttcccngtagggaaaaggcaatgctttccttgtctttacactcaaatgcttaggggaacgttttcatttcttcattcatggggggaaaggcagcctccttaaatgttttcctgaagagcgggtaaaatctagaagcttaagaatttacagttccttcaataaccatgatgacctgaagttcacctatcccattttagcatctacttgttttttcccatctcttcctttccaattttgacttatactgctgtaatatttttgtaaaaaaaaaa

SEQ ID NO: 77606 - DNA, 1077 bp, Homo sapiens
gcttgtggctgggcactcgcgcagaggccggcccgacgagccatggttgctgggagcgacgcggggcgggccctgggggtcctcagcgtggtctgcctgctgcactgctttggtttcatcagctgtttttcccaacaaatatatggtgttgtgtatgggaatgtaactttccatgtaccaagcaatgtgcctttaaaagaggtcctatggaaaaaacaaaaggataaagttgcagaactggaaaattctgaattcagagctttctcatcttttaaaaatagggtttatttagacactgtgtcaggtagcctcactatctacaacttaacatcatcagatgaagatgagtatgaaatggaatcgccaaatattactgataccatgaagttctttctttatgtgcttgagtctcttccatctcccacactaacttgtgcattgactaatggaagcattgaagtccaatgcatgataccagagcattacaacagccatcgaggacttataatgtactcatgggattgtcctatggagcaatgtaaacgtaactcaaccagtatatattttaagatggaaaatgatcttccacaaaaaatacagtgtactcttagcaatccattatttaatacaacatcatcaatcattttgacaacctgtatcccaagcagcggtcattcaagacacagatatgcacttatacccataccattagcagtaattacaacatgtattgtgctgtatatgaatggtattctgaaatgtgacagaaaaccagacagaaccaactccaattgattggtaacagaagatgaagacaacagcataactaaattattttaaaaactaaaaagccatctgatttctcatttgagtattacaatttttgaacaactgttggaaatgtaacttgaagcagctgctttaagaagaaatacccactaacaaagaacaagcattagttttggctgtcatcaacttattatatgactaggtgcttgctttttttgtcagtaaattgtttttactgatgatgtagatacttttgtaaataaatgtaaatatgtacacaagtgaaaa

SEQ ID NO: 77607 - DNA, 2303 bp, Homo sapiens
aaaaacaattgatgtaggaataaggggaatggataaagaatggtacatgcttattctaaagcaggagagcctacagattgttgtcaaagctcatgtctatctctgtcctcgaggcctccacaccatctccctctccctcctccagaatccaagggatgagcccgtttccctttatgagacgaggtggagcagtacctctagtttttggctgctcatggcctcagagttgctgtttggaaaggaaaaagagcagcagaggcagcaaagaaaagtactagggcagcacctttaggttagaaatagattccacagttaaaagcacaagtataatatgcattaaacagagaagggcctcaatagaatggtcacaatatgcaagtgtgtcccactcatttacaatattaggattccaggagctgccagaaataagtcatctcattaacatacctacctgcagttctgatgtctggctattagtaaacaaggcctacgtttgtttctctaaaatttagaatcttaaactaaatcctttatttcaaaaacaaacataaaataatttcccaggcagagaaaaggtttgagatggaagcgttcttgttagcagtcccttcctgcataaatggggttggagagagaggagagagggaatggccaagggtatggaaagctttcacaatgcatgccgagtgtgaagtgacacccccagcagatggggtttatcatctttacttagtcacacaacatcaaggactggttagttccagggaagggctccatttcattacctgggtcagttctcttcccccgcatgctccacaatgcagtagaaccaaacaacacattcatttacaatagaatgtttaaataacacctgtccaataactgcccttacttctttgtgctgtcgggaaaagaaaaaacagaaagcaataaaacccaaaccctttggcaagccagccggtgcctattctcctggggcatttttagtggaacttcggctgggccttgccctcctcccaatatcagtgaggaaagtggcagcgggacaggtttggtcatctgcagtggagtagaaagaggaaccaaacacgattcgggccacaggtggattctggcacatttttagattggattggttaaaaatgtcatgttgtacacaggatgcaggcaaaggagtttttttttgagggacataatgcctataggcagcatgaacggtccgatctacccttggggaggagctccctgtgtagggacggagaaactagggggcctcgaggaaggtgttggttcggaagatggaggagacaatctttccggtggcattgatggtgccttcgctgtctgagctggactcggagtcgctgctcccagagtaggcacccaggcctgggaggatgccgatacatactgcagcagaggggcagtggatggaggggccactcagggaggtgtttccgagagacttgcaggatgagggctcttgattcttgtcatctggctcagggtccggtttcagtcttttcacactgttgccactctctgagctcttatgcttcacagctcctgccaacagcttcgcctgggagaacttgttcttggtttctataggcttcacagtcagtttcttttccacttccttcttgttctcttgagaaattccaaccttcttgaggttatttctgtattccttcagttctttcagttcttcttctcttcgttgcttttctattagttcctgctgtcgagaaacctcatcaaggaagttggtctcatcttcatctaagcctcttaccatgtttttgaatttgaactgttcctcgtactcctgctgcttcctgtccttctgttcctgtagcctttcatatagagatcgagggtcataaacctcctctggacattcttctggatcttcaggttttcgaactttctcccattcttcttgcctccttttgcgccgttcatctagttctgcctcagacacaaacctctttttgataataaggttaccatcatcccctccatccataatgaaacaaccaatctagcagaaaattggggaaaccccattaaacgcccggcagtgttgggcccgcctgaaagggtcctcgccgcgacccagatgtcttcccgcgggcaccctcagctcccctcaggctgggcccgcaagccccaggcttcggctactccggacaaggagcgggtgcgcgcactgagaacaggcctggccctaaccctaacagcagccgcagctcatctattccgtaaggaagctggaacccaggtgtcgccgccagaccaaa

SEQ ID NO: 77608 - DNA, 1530 bp, Homo sapiens; identical to SEQ ID NO: 60196

SEQ ID NO: 77609 - DNA, 2815 bp, Homo sapiens; identical to SEQ ID NO: 60197

SEQ ID NO: 77610 - DNA, 977 bp, Homo sapiens; identical to SEQ ID NO: 60198

SEQ ID NO: 77611 - DNA, 2231 bp, Homo sapiens; identical to SEQ ID NO: 60199

SEQ ID NO: 77612 - DNA, 1151 bp, Homo sapiens; identical to SEQ ID NO: 60200
  misc_feature (1)...(1151): n = a,t,c or g

SEQ ID NO: 77613 - DNA, 1154 bp, Homo sapiens; identical to SEQ ID NO: 60201

SEQ ID NO: 77614 - DNA, 2216 bp, Homo sapiens; identical to SEQ ID NO: 60202

SEQ ID NO: 77615 - DNA, 658 bp, Homo sapiens; identical to SEQ ID NO: 60203

SEQ ID NO: 77616 - DNA, 1260 bp, Homo sapiens; identical to SEQ ID NO: 60205

SEQ ID NO: 77617 - DNA, 2405 bp, Homo sapiens; identical to SEQ ID NO: 60206

SEQ ID NO: 77618 - DNA, 2182 bp, Homo sapiens; identical to SEQ ID NO: 60207
  misc_feature (1)...(2182): n = a,t,c or g

SEQ ID NO: 77619 - DNA, 582 bp, Homo sapiens
tttcgtgcggcggcgagagcgacggtcccatctttcccaccctcttggttgccgctggccacacgccctccgctggcggcgacttctcagctccgtgcgcccgggctggacagtgagcctcgagaggagatgcgggcggctagagccggagtggggcgagccgcggaacccggccgggagccgcgcgaggcgtgatcggagggtatggttggcatggaattgaatttcatctgtctgtgggaattgtaagcaagattgccatcacgaaagccaaagtggatttctccagtgtggtgtgcctgcccccttccgtcattgctgtgaatgggctggacggaggaggggccggcgaaaatgatgatgaaccagtgctcgtgtccttatctgcggcacccagtccccagagtgaagctgttgccaatgaactgcaggagctctccttgcagcccgagctgaccctaggcctccaccctggcaggaatcccaatttgcctccacttagtgagcggaagaatgtgctacagttgaaactccagcagcgccggacccgggaagaactggtgagccaagggatcatgccgc

SEQ ID NO: 77620 - DNA, 1272 bp, Homo sapiens; identical to SEQ ID NO: 60209

SEQ ID NO: 77621 - DNA, 805 bp, Homo sapiens
ttttatttttagattttttaattttcaacaaattgaacatttacaacattgttacaactgagaacattgacaacacagggattttcaacagagtacatttagcaaggatttttttcagaagaaaacaaaatgtcagtacattttgtattccatagcattgctctgtggaaaattagctggcatccattttaaatgaaccctgctgaccttcttccattccgtggcctgaataaaaaatatcctcgactttgacttgcaaagggactttggaattcttcgtccactctgaatctcttcattcttctctcatgcaggtgaggaacgagctgcagcaacggatgcacaactgacgacacaacatttgacttgcccaacttctgtgtcttcgaataatgaaataagaaccttttagtattatctttttcatcttgttcctgaggctttggtagcattcccataatcataaagcaaagctcctccagtgcgttggatgcctgaggctgagaatcaatggacagaaaagacgaacaagtatcatctatctcattccacaactgtagctgttgttcaggctgtaatccttgaggtaatattggagcacctcggcaggcgcccgcgcaccaggcgagcagcagcagcagcagcaggagcggggacgcctcggccacctgtccggcgggcgacctggggcggcagctctctgttcgcagcatctcggcggctgcgggaggctcggtgctagggacgctgcgctgcgccacgcgtagctggtgctccacctggtgccctggctgtgcctcggggc

SEQ ID NO: 77622 - DNA, 5616 bp, Homo sapiens; identical to SEQ ID NO: 60211

SEQ ID NO: 77623 - DNA, 371 bp, Homo sapiens; identical to SEQ ID NO: 60212

SEQ ID NO: 77624 - DNA, 2059 bp, Homo sapiens; identical to SEQ ID NO: 60213

SEQ ID NO: 77625 - DNA, 2652 bp, Homo sapiens; identical to SEQ ID NO: 60214

SEQ ID NO: 77626 - DNA, 3234 bp, Homo sapiens; identical to SEQ ID NO: 60215

SEQ ID NO: 77627 - DNA, 3326 bp, Homo sapiens; identical to SEQ ID NO: 60216

SEQ ID NO: 77628 - DNA, 1486 bp, Homo sapiens; identical to SEQ ID NO: 60217

SEQ ID NO: 77629 - DNA, 449 bp, Homo sapiens; identical to SEQ ID NO: 60218

SEQ ID NO: 77630 - DNA, 409 bp, Homo sapiens; identical to SEQ ID NO: 60219

SEQ ID NO: 77631 - DNA, 1918 bp, Homo sapiens
aagggataggagggctcaaagccggcacacatctgagtcctcatggacgggaggatgatgagaagcatgaggctgagagaggaggagtcacccggacccagccacacagcgtcctgcctctgcggctctgccccctgcatcctgtgcagctgctgccccgccagccgcaactccaccgtgagccgcctcatcttcacgttcttcctcttcctgggggtgctggtgtccatcattatgctgagcccgggcgtggagagtcagctctacaagctgccctgggtgtgtgaggagggggccgggatccccaccgtcctgcagggccacatcgactgtggctccctgcttggctaccgcgctgtctaccgcatgtgcttcgccacggcggccttcttcttctttttcaccctgctcatgctctgcgtgagcagcagccgggacccccgggctgccatccagaatgggttttggttctttaagttcctgatcctggtgggcctcaccgtgggtgccttctacattcctgacggctccttcaccaacatctggttctacttcggcgtcgtgggctccttcctcttcatcctcatccagctggtgctgctcatcgactttgcgcactcctggaaccagcggtggctgggcaaggccgaggagtgcgattcccgtgcctggtacgcaggcctcttcttcttcactctcctcttctacttgctgtcgatcgcggccgtggcgctgatgttcatgtactacactgagcccagcggctgccacgagggcaaggtcttcatcagcctcaacctcaccttctgtgtctgcgtgtccatcgctgctgtcctgcccaaggtccaggacgcccagcccaactcgggtctgctgcaggcctcggtcatcaccctctacaccatgtttgtcacctggtcagccctatccagtatccctgaacagaaatgcaacccccatttgccaacccagctgggcaacgagacagttgtggcaggccccgagggctatgagacccagtggtgggatgccccgagcattgtgggcctcatcatcttcctcctgtgcaccctcttcatcagtctgcgctcctcagaccaccggcaggtgaacagcctgatgcagaccgaggagtgcccacctatgctagacgccacacagcagcagcagcagcaggtggcagcctgtgagggccgggcctttgacaacgagcaggacggcgtcacctacagctactccttcttccacttctgcctggtgctggcctcactgcacgtcatgatgacgctcaccaactggtacaagcccggtgagacccggaagatgatcagcacgtggaccgccgtgtgggtgaagatctgtgccagctgggcagggctgctcctctacctgtggaccctggtagccccactcctcctgcgcaaccgcgacttcagctgaggcagcctcacagcctgccatctggtgcctcctgccacctggtgcctctcggctcagtgacagccaacctgccccctccccacaccaatcagccaggctgagcccccacccctgccccagctccaggacctgcccctgagccgggccttctagtcgtagtgccttcagggtccgaggagcatcaggctcctgcagagccccatccccccgccacacccacacggtggagctgcctcttccttcccctcctccctgttgcccatactcagcatctcggatgaaagggctcccttgtcctcaggctccacgggagcggggctgctggagagagcggggaactcccaccacagtggggcatccggcactgaagccctggtgttcctggtcacgtcccccaggggaccctgcccgcttcctggacttcgtgccttactgagtctctaagactttttctaataaacaagccagtgcgtgtacc

SEQ ID NO: 77632 - DNA, 2466 bp, Homo sapiens; identical to SEQ ID NO: 60220

SEQ ID NO: 77633 - DNA, 1810 bp, Homo sapiens; identical to SEQ ID NO: 60221

SEQ ID NO: 77634 - DNA, 2317 bp, Homo sapiens
gtcctgctcagtcgtcagggcccggccaatccggagggcgctcggcgcgtggtcgggggccaggagcgcgtctggcctgcagtgcgcagaggacgcggcgggagcatgttccggctcctgagctggagcctgggccgaggcttcctgcgggccgcggggcggcggtgccggggctgctccgcgcgcctgctcccggggctggcaggagggttcggggcccgaggtgcaggtgccgccatcccgagtcgcgccgcacggccggggcccaggcctgctgccgctgctggcagcgctcgcctggttctcgaggcccgctgcggcagaggaggaggagcagcagggagccgacggggccgctgccgaggacggggcggacgaggccgaggcagagatcatccagctgctgaagcgagccaagttgagcattatgaaagatgagccagaagaggctgagttaattttgcatgacgctcttcgtctcgcctatcagactgataacaagaaggccatcacttacacttatgatttgatggccaacttagcatttatacggggtcagcttgaaaatgctgaacaactttttaaagcaacaatgagttacctccttggagggggcatgaagcaggaggacaatgcaataattgaaatttccctaaagctggccagtatctatgctgcgcagaacagacaggaatttgctgttgctggctatgaattctgcatttcaactctagaggaaaaaattgaaagagaaaaggaattagcagaagacattatgtcagtggaagagaaagccaatacccacctcctcttgggcatgtgcttagacgcctgtgctcgctaccttctgttctccaagcagccgtcacaggcacaaaggatgtatgaaaaagctctgcagatttctgaagaaatacaaggagaaagacacccacagaccattgtgctgatgagtgacctggctactaccctggatgcacagggccgctttgatgaggcctatatttatatgcaaagggcatcagatctggcaagacagataaatcatcctgagctacacatggtactcagtaatctagctgcagttttgatgcacagagaacgatatacacaagcaaaagagatctaccaggaagcactgaagcaagcaaagctgaaaaaagatgaaatttctgtacaacacatcagggaagagttggctgagctgtcaaagaaaagtagacctttgacaaattctgtcaagctctaaatccatttttgtgtagggagaataatgtctagtaatgtggaagaatagctatcattcctgtctctgtggcacccgatcaatggcttaaatctgtcgtttttgatattcaggtttcctcaatttagccttagtgaaggaggggttgtacacactgccatttttgtattttaaaggaaaaatgactttcattcccaactgattatgacctttcaggatgtcgtcaagtgatgctttcagttgtaacacgtgacttggtgctgtccctgctggtctaagtagaactgtagattcatatgggctggtgttcctgtgcgctgtgggtgtggtgattcagcctggcatttctaccataagtttttggtctgctgatttgctgccctgtcttctcttactttactttatcaatacctggcaaactgaccataattaccttcctcatggcaaagggggattatggtgaattgttgaatattatagtctgtttcatgaagcacaagtggaatttaatacataaaagagaaaaatatcttagtttgctaccagcattccagcatgaagttgtaaagtggggattaggcacgtgacagtatagcacccatttgaatttaaataaaacgtgaaccatatttatctggttatataaaactaaaaatgggggtgtttatataaaactaaaaactaagaatgatgtaaccttttgtctgtgttatctgaacactctacttcctttgcagccttagtcacacaactgagtcatctcaagtactctttaaggacacacagcccaggctgttctgagtcagaataggcccctacaggtatattttaaaactcttcgtaattctaatgtgtactgctggtatagctgaactactgacctggatcttagtcctagcctttttgcttttgcaatttcagtatcttcatctctaaactagggaaacactgggattctttcttagctgtgggggaaagtatttggttagatgactttgaatgaatagactgctgtgctgaaagagctttatcacactgtctcaaagtatgtaaagatacataggtggatgc

SEQ ID NO: 77635 - DNA, 2286 bp, Homo sapiens
ttttttttcttatttctacatatgataaattttgggtatttgtttcaaaaattagcaatactagtgactatttaataatcaaaaacataaagcatctctagaagtaaaaggaaatttttggttagaaacaatttgatactataaaatttttaaaactgaaaatagtaacgaccatatttagcatttgaaaacattatttaatacagattttggtaacattaactaatacttattccaagattatatggtaaatatttatatttatactgccagactacatagagaaacagggatttaattctaagttatattaccccaaaaagaaatactttctaatattgaattcaacaagatgtaccaccaacagagacagtgaatgtatttcaccttcctaaacagcctatttttatatgaaaatcctaaattatctacatcagtcaatgactggcatttcaagagtaaatgattcattttacttacaatgcatcaagataaaaaggttacactgaacaactagaatgtttactgaaattaatcttattaaagtaaaacttaaaaaacttatttgggacattttcattgcttacactcaacgaacgtgaaacagagaaaaacagtcacagaatcgtgctaagtttataataaataattcacatacaacataggttaaattatcaaagaaattaaactgacatctttataccttttgcagatttaacacatttctaatccaccacatacggatagcagtaggtatatttcttgacatcattcagtctatttcaaaaatagatttgattgtttagaggcataatttataaagcaagataaccaaattaaacaacagaattttaactaatattggctttttgggatttcttaagaaaagattcacaagcattgctcagctactggagaataattaaatctcttctttactcaggcacttttaatgcagtaacctcaggcttcattttaaagtactggttaaaacgaacaattgcatacccaaggaaatcaaactcaatagtggagtatttggcttgaatcaaagcccacaatccccaaaagaaatgagaagccaatgcaaactgattgacttgaatgaagagtatttctacctccttttcagtaacttcagtcccaaagcccttaaattctttgtaggcttcaaggtaagcacgcagccactgactctgtagttctctatctggatacagactatagtctacatcactcacacctgcaaattcattgaaatgatttccaatatcatatgccaggtagttgtatccagaatattcataatcaatgaactgtacatcaccttgtttctcattgtagattatattcttacacaataggtcattatggcaaagcacaacaggtgagcccaggttggaaagaatctccttcatccaagtcatctcttcctggagaatctgagagcttgggatatcacttaggaaccttttattaatgtcttcatctgcaaatcctgtgggaatgagagagaaatactttcccatctttagccaaagattagatttggggatccagccattgtgtgcatgaatagcatggattttagcaagctgacgagctattagcctgaaaatggctgggttgcagacatgctttggatccagtgcttctccttgtataaattcatagcatagtccattattgaaggtacagtagagttgtggtgcacacccatgagcctgcaacactcgaaaactctttacttcctcatctcgatcgactaataactcagtcttattgccataaattctcaccaggactacatcctccatggtgtttcccacgtaacagccaataagtttatttgtgattccatctgtgaagagctgcagggtcacctcctgggggtcccagtgaggccgcaggtgttgcaggaggctcagggccccctcccggcagcgatgctcctcctgatcctgaacggtgacgttcagcttgggcacctccggggagccgggagggacgtggatgtaattggccatggcccaggcgacggcggagactaccaccacgacgacggcgacggcgaccacgagaacggcgggcgccgacagactggtggatccttccgtcccggggcgccctcgcgggagggctgggggcgctgggacgggcgggcgagcggcaggagaacgtctggaggcggcactgttgccgatccgggtctggacagcagctgaactgagcccggcccgctctcggagaaaattcctgttgtcggagctggatcgcgggcggccg

SEQ ID NO: 77636 - DNA, 1488 bp, Homo sapiens; identical to SEQ ID NO: 60224

SEQ ID NO: 77637 - DNA, 1349 bp, Homo sapiens; identical to SEQ ID NO: 60226

SEQ ID NO: 77638 - DNA, 6529 bp, Homo sapiens
  misc_feature (1)...(6529): n = a,t,c or g
ttttttttttttagtttttttcaaacatttactgaacacaaacaccattttttccttttacacagcaagattgttagtttcaaattagctgagttattaggactgtcaattgccatgaaactaaaaatgactctacatgtcaaactcaaatagaaaatgtcatgcaatatataaatcactaatggacctctggtgcagtcagcaagtttactatgtttattaaagtcacataaatggtttgacaaaagtgcacaatagaatgacatcaccggtttgttataaatcacagtgaattactagaatacaacagtgtagttcctctgcacggaggattgcaggatggggtgaaaaggacagggtcttttccatcgattaggccagtcagattttactccccaactgtgtacctttgaaaagactgtgaggaaagctgagtttctttcctcatcttttctcctctaccagttactaagcaacaacaacaaaaagccatgcacaaattttacaacgcctgataaaaaatagatacaaaatcttgttcatttcatcatttggcaagcttgcatcttcgctccttcacttttttgattaggccattcatcacatgactcacccctggaattaaaggctngtaaataatttaggcaatacttacccctatacacacatcaggatacactccccataaccatcaagtcactgtctcttcccctacacattaacacaaaggtacacaccacaaacctagagaccacatttactttacagttttaaaaattaatatatctccactatcaatagtgtagtatttatttcagatcccttatttgggggagggcatgctgtataacccagcccatctaaagatttgggcaagtctgccagaaatacataagaaagccctgcaatgtgataaacacataggagttttctactttcaagagatgacatccagaacaaagctatgcattttcagagtaggaatggacacacagcttaaaacctctggactaaaaatatttcatagcacaaaaggcagagttttgttttctttaacccctttttaatgttatatagtcagtgagaaaaacagaatagtcatgtgtgcatcaacacatctaatttgaaaaggaacatttaagattcttacagaaaatctatcataaaaaacaagtcctttatactttcattcatttactcactaattcagccactggctgtttctaaaccagcaaactaatcaaaggtctggcaactccctttcccatcccccccctttcaaaaaaaaaaaagaaacgcttctgcttaaataacccaaagtggtcttattcataaagtagctgcctcaactatagtgaaaactcttaacagggtgttgctcacttgaaattttaattttcaaaacatttgtcaaacagagttggtatttagaaagctgctgcccccaaatcatattttacttcaaacaatgttatcatacctaagttctcacaattaccaattattagtccactattagtataatgaaataaaacccttctcagaaacaagcagaccaaagcttacagatggtctgctttggggtttggtttatttaaaattcccacagcaaagaaccttaacgtgattgggctgtgggctactagagcaaccagggtggactgaaaaagctatgttttcagtgtcagttctaatgtaaaaatgttccccttctttatcaatcgaggggatgggtttgccgcccattccttgagttaaatagttaacttcatagttcaattttgccaactctatcaagtgcataaaacccacttaagtttctcatgatttgcgaatgaaaacatccacctgggcctccctagctcatccagatttatataacaattactgaacaggacagagaagttttggttgaatctgtaataccatcaatgaagatttacaattcaaagcataagtataccaatagtaaacatcaaatgaccaaagtggctgcaaaatggagacagcctagagttcacagagggctgagatatacaactatcattttcttacctattttccttttttaaaaaaaaattaagttggggaagggtctggctaaacatattttcaaacaattctaccaaaaacattttaaaaaaacaggcatgtagatcacttatttcaaaaatgattttatacaggtgtttcacaatacacatttggattgattttacaagatagaattagattctcagcaagatactacacaatttaccactatactaaacaaacaaaaaatctaattaccattagcatagttcatagtttattccactgtcttcaaattcgttctccaccctgtcagcatttcaatcaacagttttactttcttcagcattgtcttcccttctcaaaatagaatgtcattaaattttgatgtctgaatatgtacatataatcattattctcattttataaataagcagtgtcttaaatagtgctggtcctgggtagccaaagggatgaaatgtgtttttaaaacatgcaacattatctgatattttaagttttgatgtttaaataaaaataatatacattaataatggaaccaactgaataccaagtatcaaagctattccttagactgtccaataagcaggccttgtagtttgaaaaataaagggtctgatctgaactgtggaaaaagcatgattcactcaccttgaagaagtgcattttctctttcaggccactgagagttgctaagagcaaggtacagtatttccttgattcataccaggaggatcaagtctggtaattttcaaattagggctcactcaaataaatacctccatttaagccaacctaaaaaccttccttgtaaaatctcaggttaggaaaataggtatctattaccatgacagaatttaccatcaaaaccttcctaactgaagcaagaagacaaagtataatgatagcaactgtaaaaagtatcttgcatccttgggggatagtccccccttctgtcccctcccatccttcaaaatatttcattttgtggggtatctctattttatttaaggccctagggtgctgattttggcttggtcattgttttatactgatccaactgcaacctttctcttacactttacaaagcattatccatatataaaatgttaattgaaacctttttttttaagtttatatctgatgctgctacatcattataatgcttttcattaaagaaaaaaaaaaaagctacaggtcttcacttacagtaccatgcactatgagtagctaaggcattcatttggcactagagagaaaattacagatacagctaattttgctttcattatcatttttaacatcaatagaaataagcatataactttcacttgaatttctgtaatgcttaaaagataatcacagaatacccttttagtttgacagttacaatgttgccattaaaacaaaacaaaaaaaccataaagacctctgtatagcctgtaggaataagtgacattttgtggttgaaaaatttgcagctctcagacacaattacctttcaagtggcattgagaattattttcatcataaaaaaccatgaagttcctataccacactagtgatatttctacttcttgtcacagactaagaaagtgaaaaaattcaaacatatcctggttccttttcatctgtcataagtaaaataccttattagggaggcataaataatgccttctggaaaagtagtttccaaattttaaaagatacaggagaaaaagggaaaaggggacaaaaatagaatgtataactacactgtgacaatttgtttcataagaaaacagcattcataatttttacatgtctatgagctgaatcaaatagactgctgcaatttagataaatttcattaaaatagactttgaagaattcaagcctaaaggcagagtccatcaagattctctgaaaagttggtttaagatgataaccattttgtatatactacccagcataatgcaacaatttcaaatggatttaaatttataaatttgtaactattattaaattagcacattttccagattaatctgcagctattttttaaaaatcctcctgaatgctaaaatgtgctgcatcactccgtataaataatggaagagtgtaaactatctacagcagtttggcatgtgcagaacacctggatatcccattcctcttaatgttcctttttagctctttttcttcataaaatcctcaaaactgctgcatggataacatgctgacataggcttaacagaaatacttttgtaagcagctgtttaaaacattatcaacttgaaattataaatgtcccttgttacataaacaaaacattttatatctgttcctttaaaaaaaagaaagacaaataggtaaccaatatgcaaataccttatagttacaccaaaacaatgtggttttgttaaagtctgtctgaaatcaattaccatgaggcaagaaaaacaaatacagaactaaggaaggatgggatgggaggaagggtagtggaaagaaaagcagaatttatgaacacataattctactgtctgtgattaaaagtcctttactttttagcaccacattaaacgactttacatatccagtcacttaatgaaatccaacaaactcttcaagagttctggggatctggtcttggtagttaatgtcattagcccgaactgctcgggcagccaggcacttgagactcatcttcatttgagttttaagcagtatttcagataccccagttgtacttttgtctagcggagtcttattctgtttattcgtcatgtcagtgtgagctccggcttcaactaggctaatgatgatggagtgcaaggtcaaaaaatcactgatgggcctgttgtactgaacgataatatgaagggcactgtttccctcattgtccacggcattcacctcagcaccacagtccagcaggagctttgtgacaagtgcatttggaaagctgcagacgtcattggtgtggaaatcatcaactggagtattggagttgacagccagatgcagcaaggtgaaaccttcacgagttctgggatcaaggtgaatcaggttgtagatctgcttgttaattttgcactgatcttcttcgctgcactgtgttttggtagagatgcacactaaatacagaaaggtatagagattacattcataattgtccatagcattgtggacatcagcatctgaaatatttttcactctgttcatactttgttctatttccaaaacactgcatctcaaaacacattctatgtctggggccttcacagtttcattcaaatgtatcatttgtgagaaaacttgagcaaatcgaagaagatccttgtgggtgttcctgttacctttttgtctgaggtgcagggcatgaagccacaacttgatacactgctcaaattccatattatccgcataaacagctcctctgtaaatgatgggatgagaaacatcaatattgtcagcacctaaaatccgttcccgaactataaggccttccatatgaagagcatctctgtcttgccgaatggactccagttcctgaggatttctacattcagttctattcccataagcatggattggtggaagaacctctttttcgagaatgttatcaccatcttggaacctctctaacatggctaaatatagatagtggtatgtctttatgatgtcatagttctcacggtcatttgcaaaggaggcacccaagagttccaaagcttcaatccgacttcttcggtcgcaatcagcatgagagagtaacagttctacgacatcagctttacagctttcggcagctactttcaatggcgtcatcccatggccattcactactatagcagcacgccattttatcagctctttcacaatatctatgtgcccagcttcagctgcaaagtgcaatgctgtggctccacaatgtgctttggcattgggatcagcacgttgttctaaaaggtatctgaccacatcagtgtgtcccttatatgccgcaatcattaggcaggtgttgtcatatttgttggcaatgctgatgttggcattattttcaaccaagtatttcacaatgtccagtctgccatcaaagcatgctgcccgcaggggggttgaattagttactgtggtatggttcacgttggctccatggctgactagaagtttaacaacttcaaaatgtcctgctccagctgcacaccaaagagcagtggcaccatcaatgacatacccgtcgaagcggacggtgccagtctgctgagtctgcacccggtaatgttctaagagcaagcgtaccacctttgcgtgtccattgcgggctgcgatgatgaggggcgtggagcgctgccctccctgctggctgacatagccaagcagatagcggatgtcgctttcagaccggttgagaagcaaggcggccagagtcagcaccttgccctcgctggccgccttgtatacatagccagccaggccctccacgaaa

SEQ ID NO: 77639 - DNA, 1200 bp, Homo sapiens; identical to SEQ ID NO: 60228

SEQ ID NO: 77640 - DNA, 906 bp, Homo sapiens; identical to SEQ ID NO: 60229

SEQ ID NO: 77641 - DNA, 7439 bp, Homo sapiens; identical to SEQ ID NO: 60230

SEQ ID NO: 77642 - DNA, 2269 bp, Homo sapiens; identical to SEQ ID NO: 60231

SEQ ID NO: 77643 - DNA, 2836 bp, Homo sapiens; identical to SEQ ID NO: 60232

SEQ ID NO: 77644 - DNA, 2565 bp, Homo sapiens; identical to SEQ ID NO: 60233

SEQ ID NO: 77645 - DNA, 5002 bp, Homo sapiens; identical to SEQ ID NO: 60235

SEQ ID NO: 77646 - DNA, 1707 bp, Homo sapiens; identical to SEQ ID NO: 60236

SEQ ID NO: 77647 - DNA, 4389 bp, Homo sapiens
ggttctgaggactgggtttgggtgcagacgttgttgcttgggcgcttctccgctgcgtgtaggtgaagggggcttcctgaccgagacatggatttaggtgctattacaaaatactcagcattacacgccaagcccaatggactgatccttcaatacgggactgctggatttcgaacgaaggcagaacatcttgatcatgtcatgtttcgcatgggattattagctgtcctgaggtcaaaacagacaaaatccactataggagtcatggtaacagcgtcccacaatcctgaggaagacaatggtgtaaaattggttgatcctttgggtgaaatgttggcaccatcctgggaggaacatgccacctgtttagcaaatgctgaggaacaagatatgcagagagtgcttattgacatcagcgagaaagaagctgtgaatctgcaacaagatgcctttgtagttattggtagagataccaggcccagcagtgagaaactttcacaatctgtaatagatggtgtgactgttctaggaggtcaattccatgattatggcttgttaacaacaccccagctgcactacatggtgtattgtcgaaacacgggtggccgatatggaaaggcaactatagaaggttactaccagaaactctctaaggcttttgtggaactcaccaaacaggcttcttgcagtggagatgaatacagatcacttaaggttgactgtgcaaatggcataggggccctgaagctaagggaaatggaacactacttctcacagggcctgtcagttcagctgtttaatgatgggtccaagggcaaactcaatcatttatgtggagctgactttgtgaaaagtcatcagaaacctccacagggaatggaaattaagtccaatgaaagatgctgttcttttgatggagatgcagacagaattgtttattactaccatgatgcagatggccactttcatctcatagatggagacaagatagcaacgttaattagcagtttccttaaagagctcctggtggagattggagaaagtttgaatattggtgttgtacaaactgcatatgcaaatggaagttcaacacggtatcttgaagaagttatgaaggtacctgtctattgcactaagactggtgtaaaacatttgcaccacaaggctcaagagtttgacattggagtttattttgaagcaaatgggcatggcactgcactgtttagtacagctgttgaaatgaagataaaacaatcagcagaacaactggaagataagaaaagaaaagctgctaagatgcttgaaaacattattgacttgtttaaccaggcagctggtgatgctatttctgacatgctggtgattgaggcaatcttggctctgaagggcttgactgtacaacagtgggatgctctctatacagatcttccaaacagacaacttaaagttcaggttgcagacaggagagttattagcactaccgatgctgaaagacaagcagttacacccccaggattacaggaggcaatcaatgacctggtgaagaagtacaagctttctcgagcttttgtccggccctctggtacagaagatgtcgtccgagtatatgcagaagcagactcacaagaaagtgcagatcaccttgcacatgaagtgagcttggcagtatttcagctggctggaggaattggagaaaggccccaaccaggtttctgaagataattttcatattcctgagaaactggactttttacaagtctttacaaaactgtcaataataatggcagtactaagagatttataatcataatgtttacaatgcagcctactggattgtctctagatctgtttttcttaaacactaacagaataattctttataaataggtaagccttacacttgttaaagaaatttacctctaatttcagtctcactaatgtaaaatactgggacttaagtatacaattcagtcactaactgtacagttttatgtggggaacaattcatgcaggctactggaaaattaaatcttattaccaactccttgtgatatctttgccatcaccatcacatgagcaagatgatgttttgcagcattccccattgctgatacaaatggagagggcagagaagactttatacaaccagtttttccattgcagagtcttaagaaagattattagatgacttacctatatggactaatgccatccaggaactccagaggtatgaataggggggtggtccatccctcttcccatactgaggtggagatgctcatgcaatacttttaaggatgcatggtccagccttcagttattcttcactgctcttggtgaagggtatgtgggagaaaaacctaattataatacgtttccccagccctctgatggagaaggaacacccattctgatacccagaacatggttaataaggaaaagagaaaaatccccaaccaatcttaattgaaccaagtctgaaaccaatggaaaaaaaaaaatgggtagtgtatatttttgcaggtttaaggacaacttcagggacaataaaaacaatgggactttacatgtgtatatatatagctctcttaggcaccataatcagtatgagccaacaatatttaaacttgattcaggccacattcagacatttgctcttatatacaaatatttaaattaaatacaatctgaaatgtgttctgttacatacaaaaaaggaaaaactatacaacgcagagcagtgtgtgtgttttaaataattacatttacatgtaagctaaatggaaccagcaatggtgctcaagtttttatcatcccttccagaaaatctttttctaccatctcttctattttttgcctggctttgctggaacatggtttgtggttctccagtttcatgtccttattagggaaggcatttgagtagaggataggactccctgagtgtcctccacatcggcttgtgactttgctgttgaagacttgactgagcacattgaagaacggcaggagctgctccatactgcgcacggtgcagatggtgagcagcaagtgccctggctcccaacccaatgttctccctgagttgtcttcctctggatttttctgcagaaaacaaaaagtgaactggtattaatacaacagacaatgtggtatgttagaaaaattaaaaatatataaactttggcaattggtcaagaaatgaatacaaatgacattaagtttctaactcctgacctgatcaaaacccttggtgcttctgagaccttttactgccatttattagttttacatggagcagtctaacattgtagtaatagttcccaactagaatgcgcagataagcttagttaacagaaatagctttgaacaggaatagagtcaaacataaaagttttatgttgtgctttgtatttactcaaaaagctcccaggtttctgaaccctcactactgtaaccaaggactaggtcacaaaattactacagaaaaaaggaacaaagtgctttatacatttcataatatatccccttttattataattagttaattcccttttatctaaatggcctaaatttgccatgatggtagcagtgtccaaagtgaataattactgtcagtactgcatcacagagaaaggaagggatccctcaggagacactgctgtctccttctgggttgtgctaaacaacatagggaggaaagctggacctggagtcaaaggaattgagttagtgtgctggctctgccatacttacggcacccttgggcaggatatacaaaggttcctcacttataaaatgggacagtctaaaactaccttttagtagagaagtcaaatgagaaggtatgtgaaaactctgtcaactaaatataaagactaataatttgggtattaagaggctagtttgagaagccacctgaattacacaaacacagctacagacatcattctgtgtagagaaagataagagagaacaggttggttgaacttgggcagaatcacagatacctttccacactaaagaatgaaaataagctatgaactttacagaaggaagaaatcatgaagacttaggaagcagaattacaatctgtcatattaacaaatggagtttgccttctaagatcagatgttgctcagaaactttcattgtttacctaataatttaatatcactagtttcctagtgggtcaagcagatgcaaaatccagcttattttcttctatgtgctctcaagcttattgcttattttaaagtaaaatcctgaaaaaggaaaatattaggttggtgcaaacgtaattgcggtttttgcattgttgaaatttgccgttttatattggagtacattcttaaataaatgtggttatgttatacatcaaaaaaaaaa

SEQ ID NO: 77648 - DNA, 3230 bp, Homo sapiens; identical to SEQ ID NO: 60238

SEQ ID NO: 77649 - DNA, 2987 bp, Homo sapiens; identical to SEQ ID NO: 60239
  misc_feature (1)...(2987): n = a,t,c or g

SEQ ID NO: 77650 - DNA, 2562 bp, Homo sapiens
ttttttttttttttacaaatccaagtaacaactttattgtagtatacagcacaatttttacatacatattagtggttttgacagtgttacttttgagtagaccttaaatgaatccacaaagttaatatattaaaaataaaatatacacagtaaaacaacaggcatccagatgttcagaatcatgcagataggagtggtttggttggtgttatcactgggtaccttgcctatttaactcgccagcaaataccacttcttctgtttctcattcccatataattcatcaaaatcagagagttctaaacatatacaaaataaacctcttttaaagccacatcagtaaaaaatttcaattaataaggttatcatcaaaccaagaattccactgatcatttgatcagcccattactaggaaacaggcaatatcagcacccgatctaaaggcaagcctatttcatttattaaaacaccaacaagagagattaatcaacaaagcaactattaacaacatgttaatcttaatataagacactgagagaaaagtaaaaataatacataaatatcactccactgagccaggatataactcatggactacagatacatgagtttcctacctgtcaaacaatgcctttaaaaaatttttttaggaaaaaaaaaaaaaacacaatatatgagaagatgcaaaggaaaggcagaaatgtgaatttatgcatctagttccacaatttaaaataaatatcaaactgacaatataaagctaagtgacaatgacttaaccattgggcaccaaacaggcaatacaactgctcactgtaatacataatgctcttcaggagtttccagcagatggccatcacaacaatactgtcataatacagaaaaaacatttatccactgtggaaagagaccctgaagagaatgtggcaaaggcatagagaaaaagttggatcttttgaaaaagttaatgatatcaaaatacttttccatcactggtaaaccaagctaggtcaagtatatgtcccaaagcagcactgaattcagagtaagaggttggcagaaaagtttggaaaactgcagtttttaaaaattggcaatttctccatgcttaataaaactatcagaagaggtataatgtttgtgcgtttgtggaatgttgactgcttgctgcaaaaatttacaacatgaatgaggacctgcagagatgcatatcaatgaaatatttttttaaaaatttacaaaaaactaaagtttctatttaaaaaagaaccatgttatgccaagatgaaacatggtaaaaagtagtgtaagttctgtccatgattctttacctagtgaatgggaaagtaatagaaacaattttcttcttaaaaaggaaggtttgttattgcactgacttttacaacctgacatagtaatttagaaaaatcatgtagtaaaatctgtaaaattaaaatataaaagtctggtttgtaaacatcagttggccaagtctattcagagtccttcatgatagtggaatggaatgaataattaattcactaccttatttatttgctgtgaggcagaaaattccagaacacagcctttatactttcacagtaattatattcaaaagatataaagtcagtgcagttattttttttctttccctgtgcaatgtttagctctcaccccactcccaagtgccataattgaaataatactggtttggagaattagtacagattggtcataaatgccgcataaagtccgtaggacttcggtaaaggtatttccaaatggcgtagtaatgcactgcagctgccgtggccacaaacaggtgccagatggcgtgggcaaatggaatgatgccatcactcttgaagaacacaactcccaagcaataaattaagcccccacaggcaagttcctgaagtccatcggtgttgttcattgatgtcaccaccaaggctggagagaatcccattgtgagatagaaaaagagttcaacccccttatatttttcatggtagagaaatacataaatggttcctccagctgccatgagccagataaaccaacgcatatgagatgccaggggtccaagttcacgaagatttaaccatggagcataagaagcagcaatgaagaaatagataaccattctatcacacatgtgaaaacaatgctccactgtccttaagtggctctttttccatgatacaatgtgaaatactgtagaaacgatgaagagggcacagagtcccattccataaatccatgctgttatcttttcccagcagtcatcagacagccgatggaggagggcactgcccacgatggccggaacaatgaggaatgcgtgtgtgtaacagttagcagcatgttcatagcaagttggcttgtagcggccattggctggagctcgatggttcatgaaccgctggaatcgattcttgaaccgcattgatcctctgctcctcctcgggggccaggagctccgtctcgtcagcaccggcggccgggcgcgcggccctcatgggcttgggctgctccggaggccgcctgcgtgtccagcgg

SEQ ID NO: 77651 - DNA, 841 bp, Homo sapiens; identical to SEQ ID NO: 60241

SEQ ID NO: 77652 - DNA, 5493 bp, Homo sapiens
cagtgcgcccatcgcgcggctcctcggggcacctgctgccttggcgcctttccccttggccttcgcctcgcccgcagcgccctccgcagagggccccgcccgctgcgcgcgcatccccgcccccggggcgatctgtcagagcacctcgcgagcgtacgtgcctcaggaagtgacgcacagcccccctgggggccgggggcggggccaggctataaaccgccggttaggggccgccatcccctcagagcgtcgggatatcgggtggcggctcgggacggaggacgcgctagtgtgagtgcgggcttctagaactacaccgaccctcgtgtcctcccttcatcctgcggggctggctggagcggccgctccggtgctgtccagcagccatagggagccgcacggggagcgggaaagcggtcgcggccccaggcggggcggccgggatggagcggggccgcgagcctgtggggaaggggctgtggcggcgcctcgagcggctgcaggttcttctgtgtggcagttcagaatgatggatcaagctagatcagcattctctaacttgtttggtggagaaccattgtcatatacccggttcagcctggctcggcaagtagatggcgataacagtcatgtggagatgaaacttgctgtagatgaagaagaaaatgctgacaataacacaaaggccaatgtcacaaaaccaaaaaggtgtagtggaagtatctgctatgggactattgctgtgatcgtctttttcttgattggatttatgattggctacttgggctattgtaaaggggtagaaccaaaaactgagtgtgagagactggcaggaaccgagtctccagtgagggaggagccaggagaggacttccctgcagcacgtcgcttatattgggatgacctgaagagaaagttgtcggagaaactggacagcacagacttcaccggcaccatcaagctgctgaatgaaaattcatatgtccctcgtgaggctggatctcaaaaagatgaaaatcttgcgttgtatgttgaaaatcaatttcgtgaatttaaactcagcaaagtctggcgtgatcaacattttgttaagattcaggtcaaagacagcgctcaaaactcggtgatcatagttgataagaacggtagacttgtttacctggtggagaatcctgggggttatgtggcgtatagtaaggctgcaacagttactggtaaactggtccatgctaattttggtactaaaaaagattttgaggatttatacactcctgtgaatggatctatagtgattgtcagagcagggaaaatcacctttgcagaaaaggttgcaaatgctgaaagcttaaatgcaattggtgtgttgatatacatggaccagactaaatttcccattgttaacgcagaactttcattctttggacatgctcatctggggacaggtgacccttacacacctggattccctttcttcaatcacactcagtttccaccatctcggtcatcaggattgcctaatatacctgtccagacaatctccagagctgctgcagaaaagctgtttgggaatatggaaggagactgtccctctgactggaaaacagactctacatgtaggatggtaacctcagaaagcaagaatgtgaagctcactgtgagcaatgtgctgaaagagataaaaattcttaacatctttggagttattaaaggctttgtagaaccagatcactatgttgtagttggggcccagagagatgcatggggccctggagctgcaaaatccagtgtaggcacagctctcctattgaaacttgcccagatgttctcagatatggtcttaaaagatgggtttcagcccagcagaagcattatctttgccagttggagtgctggagactttggatcggttggtgccactgaatggctagagggatacctttcgtccctgcatttaaaggctttcacttatattaatctggataaagcggttcttggtaccagcaacttcaaggtttctgccagcccactgttgtatacgcttattgagaaaacaatgcaaaatgtgaagcatccggttactgggcaatttctatatcaggacagcaactgggccagcaaagttgagaaactcactttagacaatgctgctttccctttccttgcatattctggaatcccagcagtttctttctgtttttgcgaggacacagattatccttatttgggtaccaccatggacacctataaggaactgattgagaggattcctgagttgaacaaagtggcacgagcagctgcagaggtcgctggtcagttcgtgattaaactaacccatgatgttgaattgaacctggactatgagaggtacaacagccaactgctttcatttgtgagggatctgaaccaatacagagcagacataaaggaaatgggcctgagtttacagtggctgtattctgctcgtggagacttcttccgtgctacttccagactaacaacagatttcgggaatgctgagaaaacagacagatttgtcatgaagaaactcaatgatcgtgtcatgagagtggagtatcacttcctctctccctacgtatctccaaaagagtctcctttccgacatgtcttctggggctccggctctcacacgctgccagctttactggagaacttgaaactgcgtaaacaaaataacggtgcttttaatgaaacgctgttcagaaaccagttggctctagctacttggactattcagggagctgcaaatgccctctctggtgacgtttgggacattgacaatgagttttaaatgtgatacccatagcttccatgagaacagcagggtagtctggtttctagacttgtgctgatcgtgctaaattttcagtagggctacaaaacctgatgttaaaattccatcccatcatcttggtactactagatgtctttaggcagcagcttttaatacagggtagataacctgtacttcaagttaaagtgaataaccacttaaaaaatgtccatgatggaatattcccctatctctagaattttaagtgctttgtaatgggaactgcctctttcctgttgttgttaatgaaaatgtcagaaaccagttatgtgaatgatctctctgaatcctaagggctggtctctgctgaaggttgtaagtggtcgcttactttgagtgatcctccaacttcatttgatgctaaataggagataccaggttgaaagaccttctccaaatgagatctaagcctttccataaggaatgtagctggtttcctcattcctgaaagaaacagttaactttcagaagagatgggcttgttttcttgccaatgaggtctgaaatggaggtccttctgctggataaaatgaggttcaactgttgattgcacgaataaggccttaatatgttaacctcagtgtcatttatgaaaagaggggaccagaagccaaagacttagtatattttcttttcctctgtcccttcccccataagcctccatttagttctttgttatttttgtttcttccaaagcacattgaaagagaacccagttttcaggtgtttagttggcagacctcagtttgtcagactttaaaagaataatatgctgcccaaattttgggccaaagtgttaatccttaggggagagcttttctgtccttttgggcactgaggatatttattggttttattttatccaggtgacaggagttcactataaatggtgtttttttaatagaatataattatcggaagcagtgccttccataattatgacagttatactgtcggttttttttaaataaaagcagcatctgctaataaaacccaacagatactggaagttttgcatttatggtcaacacttaagggttttagaaaacagccgtcagccaaatgtaattgaataaagttgaagctaagatttagagatgaattaaatttaattaggggttgctaagaagcgagcactgaccagataagaatgctggttttcctaaatgcagtgaattgtgaccaagttataaatcaatgtcacttaaaggctgtggtagtactcctgcaaaattttatagctcagtttatccaaggtgtaactctaattcccattttgcaaaatttccagtacctttgtcacaatcctaacacattatcgggagcagtgtcttccataatgtataaagaacaaggtagtttttacctaccacagtgtctgtatcggagacagtgatctccatatgttacactaagggtgtaagtaattatcgggaacagtgtttcccataattttcttcatgcaatgacatcttcaaagcttgaagatcgttagtatctaacatgtatcccaactcctataattccctatcttttagttttagttgcagaaacattttgtggtcattaagcattgggtgggtaaattcaaccactgtaaaatgaaattactacaaaatttgaaatttagcttgggtttttgttacctttatggtttctccaggtcctctacttaatgagatagtagcatacatttataatgtttgctattgacaagtcattttaactttatcacattatttgcatgttacctcctataaacttagtgcggacaagttttaatccagaattgaccttttgacttaaagcagagggactttgtatagaaggtttgggggctgtggggaaggagagtcccctgaaggtctgacacgtctgcctacccattcgtggtgatcaattaaatgtaggtatgaataagttcgaagctccgtgagtgaaccatcattataaacgtgatgatcagctgtttgtcatagggcagttggaaacggcctcctagggaaaagttcatagggtctcttcaggttcttagtgtcacttacctagatttacagcctcacttgaatgtgtcactactcacagtctctttaatcttcagttttatctttaatctcctcttttatcttggactgacatttagcgtagctaagtgaaaaggtcatagctgagattcctggttcgggtgttacgcacacgtacttaaatgaaagcatgtggcatgttcatcgtataacacaatatgaatacagggcatgcattttgcagcagtgagtctcttcagaaaacccttttctacagttagggttgagttacttcctatcaagccagtacgtgctaacaggctcaatattcctgaatgaaatatcagactagtgacaagctcctggtcttgagatgtcttctcgttaaggagatgggccttttggaggtaaaggataaaatgaatgagttctgtcatgattcactattctagaacttgcatgacctttactgtgttagctctttgaatgttcttgaaattttagactttctttgtaaacaaatgatatgtccttatcattgtataaaagctgttatgtgcaacagtgtggagattccttgtctgatttaataaaatacttaaacactgaaaaaaaaaa

SEQ ID NO: 77653 - DNA, 1652 bp, Homo sapiens; identical to SEQ ID NO: 60243

SEQ ID NO: 77654 - DNA, 1521 bp, Homo sapiens
  misc_feature (1)...(1521): n = a,t,c or g
ggatccacgtcccacgggccggacccgcggccgcgttcggaaatcagcctgagcctgagtaccgctaaggctttaatcacgggtcccgagagccctaagtcttctctttgcttgctgatctcgtaccttaatgtgcaaaagaatcacgttgggaactgaaaattcagaatcctgggcctcactcccagaggatctgatctacatgtgtggagatgcccaggaatctgctttattctcttttgtcctcccacctgtccccccatttcggcacctcggtaacctctgccaaagtggctgtgaatggcgttcagctgcattaccagcagactggagagggagatcacgcagtcctgctacttcctgggatgttaggaagtggagagactgattttggacctcagctcaagaacctcaataagaagctcttcacggtggtcgcctgggatcctcgaggctatggacattccaggcccccagatcgcgatttcccagcagacttttttgaaagggatgcaaaagatgctgttgatttgatgaaggcgctgaagtttaagaaggtttctctgctggggtggagtgatgggggcataaccgcactcattgctgctgcaaaatatccatcttacatccacaagatggtgatctggggcgccaacgcctacgtcactgacgaagacagcatgatatatgagggcatccgagatgtttccaaatggagtgagagaacaagaaagcctctagaagccctctatgggtatgactactttgccagaacctgtgaaaagtgggtggatggcataagacagtttaaacatctcccagatggtaacatctgccggcacctgctgccccgggtccagtgccccgccttgattgtgcacggtgagaaggatcctctggtcccacggtttcatgccgacttcattcataagcacgtgaaaggctcacggctgcatttgatgccagaaggcaaacacaacctgcatttgcgttttgcagatgaattcaacaagttagcagaagacttcctacaatgagaatgcacactccagtcttggtggttccttcgtgtggggcttgatcgtgttgctgcctgttaacatgatgcctttgaaactctccgcctttgaaactttctacccctcccttcaatcttatcctaaccaaatgagaataatgacatattgaaaacagcctctaggcttcaggctgggcacggtggctcacagctataatctcagcactttgggaggctgaggtgggagaattgcctgaagcccaggagttcaagacccaagnctgtgcaatatagggagactccgggctctacaaaaaaagagtttttcaaaattagccaggcgaagtggcacacatctgtggtcccaggtgctcaggaagctgaggtgggaggatcacttgagcccaattcaaagctgcagtgagctgtaattgcatcactgcactccaacctgggcaacagagtaagaccttgtcttaaaaaaaaataaaaacataaaaaaa

SEQ ID NO: 77655 - DNA, 2051 bp, Homo sapiens; identical to SEQ ID NO: 60245

SEQ ID NO: 77656 - DNA, 563 bp, Homo sapiens; identical to SEQ ID NO: 60246

SEQ ID NO: 77657 - DNA, 1795 bp, Homo sapiens
gcggacgcgtggggaaccggaagaagaggaactgggcctgaaagggtaccggtgaccgctactgctgccggtgtttgcgtgtggcagggagccaggcctggcgagcggggtgtgtcgcgatgccggagctggcagtgcagaaggtggtggtccaccccctggtgctgctcagtgtggtggatcatttcaaccgaatcggcaaggttggaaaccagaagcgtgttgttggtgtgcttttggggtcatggcaaaagaaagtacttgatgtatcgaacagttttgcagttccttttgatgaagatgacaaagacgattctgtatggtttttagaccatgattatttggaaaacatgtatggaatgtttaagaaagtcaatgccagggaaagaatagttggctggtaccacacaggccctaaactacacaagaatgacattgccatcaacgaactcatgaaaagatactgtcctaattccgtattggtcatcattgatgtgaagccgaaggacctagggctgcctacagaagcgtacatttcagtggaagaagtccatgatgatggaactccaacctcgaaaacatttgaacacgtgaccagtgaaattggagcagaggaagctgaggaagttggagttgaacacttgttacgagatatcaaagacacgacggtgggcactctgtcccagcggatcacaaaccaggtccatggtttgaagggactgaactccaagcttctggatatcaggagctacctggaaaaagtcgccacaggcaagctgcccatcaaccaccagatcatctaccagctgcaggacgtcttcaacctgctgccagatgtcagcctgcaggagttcgtcaaggccttttacctgaagaccaatgaccagatggtggtagtgtacttggcctcgctgatccgttccgtggtcgccctgcacaacctcatcaacaacaagattgccaaccgggatgcagagaagaaagaagggcaggagaaagaagagagcaaaaaggataggaaagaggacaaggagaaagataaagataaggaaaagagtgatgtaaagaaagaggagaaaaaggagaaaaagtaaaacatgtattaaatagcttttttaatttgtaaattaaaatcttacaaactaaatcagtgtgctgctagagggttctttttcacttgacatgcttattagaaagctgacccaacaagagctctctgcctccggtcactcttgctgtggtgctacgtggaagtgaatggagactgatctcaaatctgaactgcagctttcggctgcctgtgaagttgggggatatggatagtccagctcaggcttccagattgtatgagaaaaatgaagagaagtcaaccaaatattttgggtactcttcattcatttatctctagaaccaggagttgaattttcctccatcttgaaagactcctgggggtctgtttctgggtattttacaaaattgctaagtggaatgcatgaattgcattatgttctttggtaacacggtagagttcagacccttctgaactctgttgataataccacaccatgttctggacccatagctctggcatcctcaggggttgtgatccagctccatatattgtttaccttcaaagatacaatttaaatggctttgatttttaagctgtgttctagtcgtttttgacttcgggagtagtgatctgtagtttccagaagcagccaagacagtcttcgattggagctgccttaagttctcttgcacttggtatcatttatgaaagagcatctcattc

SEQ ID NO: 77658 - DNA, 2618 bp, Homo sapiens; identical to SEQ ID NO: 60247

SEQ ID NO: 77659 - DNA, 1663 bp, Homo sapiens; identical to SEQ ID NO: 60248

SEQ ID NO: 77660 - DNA, 1561 bp, Homo sapiens
ttttttttttttgaaggatttggcaaagatttatttttttttccatttccagttttttaaagtagacacagatttgcttagaataaagctgattttaaaagcacacaaaagttgaacacaaaggagaggattaaattcaccaatgcagagtgataaagaggaaaagatactgagtaggtgccttcagcagaaaactgatcatccagggtgatcacctaataatcggagacttaattccttataatgcaaaagcaagaagagtttagtgtatgaactgtacagctgagtttgtagctctatcttggtttctgttgattatgaacaattagcatagttatatataatctttctttagtagacaacctgcatccatttaaattaaataatactttctacaatagtgtgatatataaggccacaatatttattttggacaaaccccttaaagtagcgattttattatcaatgttattcattcttttgaaatataaagtacttcagctgaattaaggttgcagataatttttaaaatacaacacacatcatgactagtatattaaaattatttatattcagatatttatatctaatatcaaatgaaaatttactaccaaattttcacagtagacattaatcagtctgacatgcttattgatcccataggtgtaattatagatcaacatgattttagtgtctattcttttattttactaaattaggaacgcagcatttacagaacaaataaacacaagtgacgtggccaccccaggatctaacagctcttcagtgagctatgttgcaagctcagaagtaatccactaacgaaccaagtcagactccagttcttcatcaaaaggtgctggtggaggttgtcagacgccttccaatatagatccccaatccgatggccagcaaatgagagagcagcagagatggaaggaaaactttcagaaattctgcagagaatatgccccctttcttcatgacgctcgtgttcctcatgctgagggtggccgtgcgcttcgggtgtttaaagaggaactccttggggggaatattttccggccgacttgaccaatcccatatccaatctgagtttttcttcaagatgctttcaacttctttccttctttcaatatcatcttcctcagactgtgagctgtttttctctccaatgctatgggtatctgtttcagaagctctgttggtatcttgtggtgtctgcgagcgaggtgggctgtcacagtgagagctcttggagctactccgtccagactcatgctgtgcgtccagcagtattttttccatgtctccattataaatagaaaccgaggctggaacgctgcccccgttcccattattgctgaagtgcagttctacccaggagccctgcaggctctcctcctgcatcccgggcgctccgttctgcgacatggcgccagagggcaactgcggcgatcggagtccgcgccgggctgcgggatgtgcttcagctgcgggcggtgggaaagcggaggtcggagcgccgcggcccagctgcgctcccggactgagcggagcc

SEQ ID NO: 77661 - DNA, 3128 bp, Homo sapiens
agcggccgccctttttttttttttttcatttcattcaagagaattaaatcgtttattgattacacatgataatggatacacaagcttcattcccatctataattttatctggtaccattattcaatttagatatattgcataggatgtgccaacaatcacttttataaccattccatgattttgcttgggtaatcccttttaatggtgaacttcaggtcacaacagtaactatcagttcaactacaccaaggtttccgaagacaatggcttctccacccaagcaggttgtatataaattccaaatagaacctggcatcaccctgaaggaattctaacttcacactgttggggaaatttaccaagatggcttaagagtagactaactttacacagcacattaaaaaaaagacatttattcagcgtcacgatcagactgttacatttagcaatcaacagcatggggtgcaaaaaaaaaaaatctacattaaaaccctttgttggaatgctttacactttccacagaacagaaactaaaataacctgttatacaattagtcacaaatacagtcctcgagttttttgcccatacacatgagtatttgtctaaaacatgtcttctttgtagcagctaggccctgccaccactgtgcttggctgagttcacaaatctgttgtaacctgtagcttccctgtcacttctctggctctcctctcctgctaagctttgtttcctaattaaaatcttctgccactgccatagctactgctgctgctggaaccgccatagccaccttggtttcgtggttttgcaaagtattggcctccaccgccataggggccagagcttctgcctccaaaatttcctcccttcatgggtccaaaatttgaagactgattgttgtaattcccaaaatcattgtagcttccaccacctccaaaattgcttccatcattaccaaatccattatagccatccccactgccaccatatccaccacccaccacgggtggcacccaaagccaaccaaggaccaactgaagtttcctccacggaccgaagttgtccattcccaccgaaaaccacctcccacgacccaccaccaaaagtttccaagaaccacttcgaccctcctttgggctggatgaaagcactagccatctcttgcctttgaacagggcttttctaaacttcacaggttgtggcccattcacagtatggtaattcctgaaatggacaatcttatcccacggagtccatggtccgtccaaaggttacaaaaggcaaagcccctttttcttggccactggcctccggtccagtcaatggatttcaatcaacttcaaatttttccaatacttgttcaaaataatctcttaggtgaatgttctttcaggggtcttctttaatgccaaccaaacaaaatatcttttttcacaagttaatgtgggcacctgggtcttttgagaaatcttcctctggaagacaagctcctctttgggttcccacaactccttaccatcccacctttgtgtggcctttgcattcatagctgcatccacctcctccacacgtggcatatgtgacaaacccaaagccccttggagcgcttggtggtttgggatctctcattaccacacaggtccgtgdagcgtttcccccattgcctcgaaaatggctcctcagggctctcatcatgttgtttcaaagctcraaccctcmgaatgaagagcttcctcagctgttcggggctctttaggagactctgcccgtggacgccgccgaagaagcatcgttaaagtctctcttcaccctgccgtcatgtctaagtcagagtctcctaaagagcccgaacagctgaggaagctcttcattggagggttgagctttgaaacaactgatgagagcctgaggagccattttgagcaatggggaacgctcacggactgtgtggtaatgagagatccaaacaccaagcgctccaggggctttgggtttgtcacatatgccactgtggaggaggtggatgcagctatgaatgcaaggccacacaaggtggatggaagagttgtggaaccaaagagagctgtctccagagaagattctcaaagaccaggtgcccacttaactgtgaaaaagatatttgttggtggcattaaagaagacactgaagaacatcacctaagagattattttgaacagtatggaaaaattgaagtgattgaaatcatgactgaccgaggcagtggcaagaaaaggggctttgcctttgtaacctttgacgaccatgactccgtggataagattgtcattcagaaataccatactgtgaatggccacaactgtgaagttagaaaagccctgtcaaagcaagagatggctagtgcttcatccagccaaagaggtcgaagtggttctggaaactttggtggtggtcgtggaggtggtttcggtgggaatgacaacttcggtcgtggaggaaacttcagtggtcgtggtggctttggtggcagccgtggtggtggtggatatggtggcagtggggatggctataatggatttggtaatgatggaagcaattttggaggtggtggaagctacaatgattttgggaattacaacaatcagtcttcaaattttggacccatgaagggaggaaattttggaggcagaagctctggcccctatggcggtggaggccaatactttgcaaaaccacgaaaccaaggtggctatggcggttccagcagcagcagtagctatggcagtggcagaagattttaattaggaaacaaagcttagcaggagaggagagccagagaagtgacagggaagctacaggttacaacagatttgtgaactcagccaagcacagtggtggcagggcctagctgctacaaagaagacatgttttagacaaatactcatgtgtatgggcaaaaaactcgaggactgtatttgtgactaattgtataacaggttattttagtttctgttctgtggaaagtgtaaagcattccaacaaagggttttaatgtagatttttttttttgccccccatgctgttgattgctaaatgtaacagtctgatcgtgacgctgaataaatgtcttttttttaaaaaaaaaa

SEQ ID NO: 77662 - DNA, 591 bp, Homo sapiens; identical to SEQ ID NO: 60146

SEQ ID NO: 77663 - DNA, 664 bp, Homo sapiens; identical to SEQ ID NO: 60251

SEQ ID NO: 77664 - DNA, 834 bp, Homo sapiens; identical to SEQ ID NO: 60252

SEQ ID NO: 77665 - DNA, 3271 bp, Homo sapiens; identical to SEQ ID NO: 60254

SEQ ID NO: 77666 - DNA, 2948 bp, Homo sapiens
cagttcctgctttcagaagttgctagagtgtttctctttgaacttgaactgtggctcttttgatatccagaaagagagttctttggggggatggttaattcttgttttgggtgcttttcttcaccgctctaaggaactaccacagtcagaaggtgcattcttactgcgatctttttatttgctaccttgggcttaaggagcctgcctatatctactgaggtgaggttaggtcagtctctgtaaccgttcgtcacttaggccttgatgggtgacatggatggggatgacttcctgggctaactcttctcttgctaaaggatgatttttcaccaccttgaatgcccatgattaaaacataaacaagaaaatagatatctgaggagaatgcagttgaaactaattttgtggatagagaaactgttggaactgctttacaaagtattttaacagcccacctgaggatattgaccataaggactcatatctcattacaagaagcatcatggccgagccagactacatagaagatgacaatcctgaactcattaggcctcagaaactgatcaatcctgtaaaaacctcccggaaccatcaagatcttcacagagaacttcttatgaatcaaaaaaggggtcttgctcctcagaacaaaccagaattgcagaaggtgatggaaaaaagaaaacgagaccaagtaataaagcagaaggaagaagaagcacagaagaagaaatctgacttggaaatagagctattaaaacggcagcagaagttggagcagcttgaacttgagaagcagaaattgcaagaagagcaagaaaatgcccccgagtttgtgaaggtgaaaggcaatctcaggagaacaggccaagaagtcgcccaagcccaggagtcctaggctgaggctgcaccaagacctcgtgtgtcaccccacagagctgtctgtgggtgccttctcaatctcagggcaaaagcccctggagaatattccagccagcagagaattttgacttgcagtaggatttggtttgattttcctacgatctgggtggatgccttgcctgtgacagttgcagttcctattcgccaaatgaagggcagtgccccgcacgtaagttggaatgatggacctgtgttcagagacttaacagaaccaacaagcaaaacaagtgagaacaggaaaaaggaagaggacactggaatcaattcttgagagttgcactacttggtttttcttccattccaagtttcgtgggacccagagccttttttcttttaaaagctaaaaaacaagtgtttaattcctctttttgttatctgttagataattgagatcacctagaaatgcgtttaatctgttcactcactgtaaattttgaggacccagaattgtcttgtttaatttatactttcacccctgttgcagttaacaccagagaaggaacgtgaatgtcgagcacagccactacccttgttggcacttaatttagaaatagggtgagaagtttaaaagcccatcttgattttattttcattccttttggttctctgtgtaataatagcaggctacatagtgacattccagttccaagaaggtacatcctgtccattcattaattgctttgattactaggagggtttctgttcagttttgtttttaaatgtcttgctgatctagttctttcagatggaataaccttccagtcccttagagagtggaactagtccatataacccagcttcagtagcaaaagtagaagccgccacatcttttcatttctccaagaggagagtggggaaggttcccatgaccagctgggcagtcaggatttctctaggcattctaatgtgaaataagtgtagactgctgtcaaggaggcttcatcagaagatgtatagcatttgaatgtctaatgataatgcatatcattagaatccaagctttgaaaatttctgattaatgctcatgtatttctttatctttgtttttccttgtgaagaaagactttcaccactgtctgagtgatgatgctgttgataaggatgatgtcgatgactactatattgcatctctcaggaacagctgatgggaagggaggggctgctgagttcccttgttctagctagcagcacgctcctcagagagggggccgagttacagacagcagccgcattctcatgcaaaattagttttaaactgctagtgtgggcatcggtaccttttgcctgggtgataccgaagaattgttgaggatttagtatgctccgtagagacagttcagccagtcatttctgcattggagagacttctcatactttctttgagtcttcaaagaaagtatgagaagactcatagaaagctggatctagagcttttgaatccttaattagcacagtagaaattagctttctatgggaatgctttagtgttagcagttgacaattaggcccatattcaatctgaatgggaacaaaagtaaatgcaatgataatatactgctagttagagaaacatgttagttgattatacctgaaatggattatttatctcatcagcaagtattatttgaataaaatgagaaatgcttaagaaaaattgttgctctatagtaatttggtttcgaagaatggaatggtaactattttttcccatcgttcttttgagagaaggaagtgtgatgactgatgatcttgaaaagcccatttctgattgcacgttgactggaattctttctttgtgtctgtggactagcgatgctgtttgtaaaatgaagattcgggactggctcatatctttttatctaactagatgtcagatcttgaaatctgtattctcgaagcaattctgccacttgatcgtattcacaggggccctggtaggctcctttagaaggaccatttctgttcctagagcttaactagaattcattcttcactgaaaaaaaaaa

SEQ ID NO: 77667 - DNA, 2469 bp, Homo sapiens; identical to SEQ ID NO: 58891

SEQ ID NO: 77668 - DNA, 1477 bp, Homo sapiens; identical to SEQ ID NO: 60257

SEQ ID NO: 77669 - DNA, 1231 bp, Homo sapiens; identical to SEQ ID NO: 60258

SEQ ID NO: 77670 - DNA, 1357 bp, Homo sapiens
ctttaaagagaccaaaactttcaaccaaaaaaaacacatatttttataaagaaagataaaagaaagtctcataatcatgattctgtatgctactcaggcattgaaaaggtaccctcaatgaaattacttttcaccattggtttcaggatataaaacaattaaaattagaacacactaaacgctgcactatagttcatgacatctgcatgccacacaaaaaatcaaaatgtagtctcacataggctgatcatactagagtatatttattaaatttcaccattatgatcactttgttataactaaattaaccctgacataaactttgacattttaaaaacagagaacatactgatttttcaactattttacttacatgtgttttttaattctcatgcagtgctcataattaggagatactacatattcaccctcacattatgcttattaagaaccaagctcagagggtagaaaagtgccaacttcattttccataaacttcccatacatatattaagccactgttcttctaattatatacttatggtacattcttctgtaaaatgtataactgtagtcacataaccattgttatgacaaggcggcaacatcatttcagattacaacaaatgagaccaaaagttgaagagaccacagcatataaaagtcatgagaacaccacacacatttcaatattttccactttccagtcaaaaaaacatgcacaaagttttcttagcagatagttgtcagaagtgcataaaaaaactggctttcaggtcatatatgttgagtgaggatcaatgccattgaggaaagagagctgtgttcattatcttttaggtctgtctatatcatctatagctgctagaagtttttgtcttgctttcttattgatatgggatcccaggcaaacattcaccagattggtcagctgcttcgttgaatattccctgtgctctttgatccaccgttccatgtcattctcagttaggtaataagctttaatataagtttctacaaattctttatcaggaatgggtctaatatctgttagtttttcaagtttcattaaaaactgttgaaaatccaattgcatcagggcacgaccctcattactgcatttcttgacattggcatatccttctacaatagttcgattagccaatcgtatacaatgttcccaaagtatattagacacaggcaagggtatgcgaactctcttagaaacttcatttagcctcctgttaaactgctcaaattcctttaatagtgcatctacatatatgttgtgctgtgacataatttcttttacatcccatttcacctcgtgccgaattcctgcagcccgggggatcca

SEQ ID NO: 77671 - DNA, 4328 bp, Homo sapiens
ttttttttttttcagtagaaaccattgaagtttattggcggtcacaatgcttacactgtatgcagcaaacacccttacaagtctatccgcaacctgatcacgcaagaaaggattcatcacacagtcgccagaggagaaggaaaaaaaattaacaggcttgtttctgggggtagaggaaagaaataaaaataaaacctaattgatgagtgtcccgtgggcaagagctgaactagagatgtgtacaactagcagcaacaattgtggaaaaagtacaaggcaaatagctgtctccattaattttcctctgtaggttattattttttttaatattcaaaacatttattatggttttcattttataaaaatgtatattttttaagggatgggagaatgttaaatacttcatgctaggtagaccttgttattaagaacccttccactgtagtaacttcctccagttcatacattcatgagtgcagggtacatatataaatatccacacgcatacatccacacacactgcctcgagggctggggaagactaaaatttattggccacacacagcagggcctctggtggactcacccacattgctcccaggagagcagtgggctcacttccttctctctggtctctgccttcacacagaccaagaaccctacaacacgtcgttaaatccaacttttaaaagcaagaggcatctgtctgaggatgagggtaagcaaagtaggaaagagggtggagataagaacacccaaacacttttagctggagttatttatcactgcaaggggctagggacccagggcagaatctatacggtccaaggggagggacggtgttctggcatggcttagagttcctaataacaagggttaatacagtaacaggaattgatcatttctgggtgaggacagggcaatacgaaaaaatatacatttggaattttagctttttttttgcctctctactgtgtcactaaatatatctctgcactctcacacatccttgtccagtaaagcttcaggccaccagaatacacattttcttcactcgcatacacaacccctcacatcagcattggtgcactagactctgtaaaaatttttcagtcacactttttgtttttaaacttgagtcaatataaaccttgttcaaaatgttatgaaaaaatgtacatgtttatacaaggcaggttgggcaggacactaggggttctccccacttgggtgggccccaggaggagaggctggagtctcagtttgtatctcttatctcctcccaccacccttcccacccagtcccccaggaaccagcagcgccctgccccctagtgagtgtactcacacccctattccctggggaagcagctagttgacctttgccattttccccacacccctggagaaaagagccaggatcagccaggccctctcccttgcaattgttcgcccctctgggccaaaccaaagggacgctgctctgtacaggtagagtccaaggaggtgtcagctcatcatgtcattgctattcacgccataagtggaattcttcattgagtcgttgacttctcgacggaatgctgacaggttctgggtgaacctgtctctgtttttcgtaagaagatttcgctcgatgccttccatcaggttctcaaaacacaggtgcatggcctgctgcttctccggtggctggctgttcacaatactgtttcttaggtcagaaaaatacttttcattaagcaatatcaagccaagtagtggtcgggacatagaccactggttcctacagtcttcaaagatgatgatgttcagcaccgtggacagcatctgctggatcatctctggatgctgctgcatgatgtgcagaaagcggtcgctctcctggttcaggggtgtggtcctcttcttggtgctacgtgacagctgcttgaagaggtatgtcacaatgtggtccaggcaggagcagcagcctgtgcataccatggtgtcaagtgcagtaagtccttcagaaatggaagagagaatatacatgatgacgtgaggttccaggcttgcaataaagttcatatggtcctgggtcaggacttccagtagtgaataataagactggctgagcttggggtaatccaagagatcactgtgaggaatagagaggagcagcttgatgaaggtctgcagagcattgtccagggcatcgtctccatagagacgaaagactccgaaattgacgtaactcccactgagagcagccttcagcatggagaagcagatggagatgcccttgagcttcagagcatagacctgatcctttgggacctctcctagtgtcaggatgcgattgccatacattgttatcatcttgctggtttctcggaagagtaagatgccattgggggaagagacatcaaactggagtcgctgggacctattatgaaccaattcagccatcaacttgagtacaggtgtagtacaggctggatcatggtaccagagctcaattgcccgttggagaattggcatataggatggatatatccattcaaagagcatcatgaagctggtcttggcattgaaagcgaaagcgatccctctcaggtctcttactaggccaactagagttcgctttgcctcctgctcgttgaaactattggtgctaaacatctgggccacagcctcaaatgctgctgtgagtggcagcatgaactgctcatactgatcttcatcctctcctaaatccaccatgaggagacgcccaagtgctgtgtagaaggtagtccgacaccgcatgtctgtcaggttggactgattgttaatacccaaaaatgaaaagtgctcgctcgtgtgattgttcagcatgaactgtaccgcactaagcttcactagcttccttacgctactgtacccaatggagaggtcattgagaagctgtagtgtcttggaggtgattggttcacaacggccccagtacttcaagttggtgatgatttttcctatgaagacgcttaggaccatggtctcatcattcaagcccagaacttctgagagtcggcggtacagcttagaggatttctgcacttggtccccaatgtagatcttacgaaactgttcaaaaaagctcagcatggccaactctagcttctcattacccgcctgggccaaacgagaatctgttaggttcatcagctggagcacccgacagacaagctcaccatccatggcgtcttgctcatcagtgctggcaaaagaaacccggccaccgatcactgctccaataatgtaaaccagccatgtcagccttccctcctgcactgcaatgtccattgggcttgcgctggcgctctgtagcagctcctggtacgactgggccgactggtcaaacaactgcacgaggagtgcacacgtcttctcatattcacaacgcccaatggtggacagctgcaaggttgaagaatctaagaaggctgatctccagctggtgggaatctgcactgtacacaggtcgtctgaggactcatcagtggaagtgccgatgaagtcaaagttgaggcagttatgagtgagcttgagcagttgcatgagcaagccatgctgactttcatcattcaagtttagattctttcctgaagcctgttttagtaaattgcaggaaagtgtgaagatatcaaataatgatgaatcgcgaaaagaagaggctatttttctgtgcttggttaaaggatgggtggtgtctgcttcaatgaggaaggctgtagcacttacttgattaatttcattggttagctgagataaaattgtgacaccaatgatgcagtattcaacactatcctgtaaaaaccttgtgacgtctgtgattgcatttctgaagacatagtcatccttctgacagtcaaaccagcccagttttgtgattctggcatataactgaataagtgcttgtgtcacgaaagtagccaacttcggccgagtggcaaggtagttgagcacatagttccgaatatctattcgctgttccaatggtagggggttgtttgtgcgtgatacaagcttggtaaggcatgtagctgccagtaactgggagtaagaggaacttcctctttcgaggagtagctggcacttgctcaggcaatcagggctgttggtaaattcaaccaaggctttctctgcctggagtcgagtggttgtgtctgtggtttcatacagctgtttgcacagattctctagttgggccaggctctgcacatgatccgccattttgctccattcatgctcctctccggccccccctcccccccagcgcgcacctcggccggagccgctgcacgaaa

SEQ ID NO: 77672 - DNA, 1160 bp, Homo sapiens; identical to SEQ ID NO: 60261

SEQ ID NO: 77673 - DNA, 1565 bp, Homo sapiens
acccatatagcagctatgctaaccccaagcctctctggccctgttcttcatccttccttctgccccaatcctgaaggacaagacacacccggccatcaacaccactcacatttccttggtggaaggaaaggaacagagaagtgaagaacagatacctccctccaaggtcaaatgcctcgtgatcttggcagagtagggattgggcaataagcatcaggtatcttccctctacagattctagagagctggggcattaaatatgggggacacttagaatacagctccttaaataccaccaaataaagacctttgtgtgtgtgtggtgggtggggggggggcaggggtctttctcttatgaacataaatctgtgagctgaagtctcattcccctgttcctccctacccccaaagaggcacagagtgaagggacttggggggcacagctcagcaacccagtgggagttagcaccccctcccaccttatgatgtgtgtggacctggccagtgcccctctgaacatatcattattagtgtaattatcatttattttgtgtatttgtcacattgtgtgcatgacagcctttgttaagggtgtctgaggagtatggagctgacaggggcattggaatgccaggaaagaacttcttcaactgagatcaaggcttcctggagggaaccactgcaaaaaggccatcaggcagttttcaagttatgtgacagagggcaaagacggccatagggtgctctgagttttgggatggtcacatgacacaatccagcacttgaacctggggtacatgctccctcattgcgaggcaggacgtaggcacatgactgtgcatttaggcatatatgtgaccaagaagaaggagagaaatggaaaacactggagaacagaaagtatcaggaacttttcatcaggcaatcccaaagcgctctgctcttttcctcttctttgcctctgtatcctctgtggttccagttccagctgaacttgtgacaatcccaaatcgctccttcctctttttcagtttctcatcatcttcagactttctggagattgaagagacattcaaaccaaatctttgagctctttccttcagcttatccaagttaaccataggtttgttatcagatgacagaccttttgttggaactgaagaaatcccaaacctagctgcccgagcagctttcttactctccaagctcacaggtacattgaatcgttcagccctcttctgcattctctcagtctgtggtatttcagatgtaattttcaccactttcttctctgctgccacatcaacagttttttcagggggttcttcctctttgacagggagctcaatgggctttgtttcttcttcctctgtttcatctcccagtacatcttcttcatttgcctcctcttcagcatgttcttcaagatatgcctggagtctgtggataagatcttgctttattcccttggtctccaaaccacgagcaagacattcttgctttagttcggcaagctttagcttatggagctccaccgtctcggtcgccatcttcggacgcgtggg

SEQ ID NO: 77674 - DNA, 1796 bp, Homo sapiens; identical to SEQ ID NO: 60263

SEQ ID NO: 77675 - DNA, 3348 bp, Homo sapiens; identical to SEQ ID NO: 60264
  misc_feature (1)...(3348): n = a,t,c or g

SEQ ID NO: 77676 - DNA, 4527 bp, Homo sapiens; identical to SEQ ID NO: 60265

SEQ ID NO: 77677 - DNA, 2030 bp, Homo sapiens; identical to SEQ ID NO: 60266

SEQ ID NO: 77678 - DNA, 3423 bp, Homo sapiens
gttactgggataactcagtttggtgaacacatgatgtggtttggttattagtagagttacagaaaaggtagcatggaaactgagatggcctcgtgggtgttggaaggcttttcagcaaggggaggtgaatgttattaggtccaacctgaaaggtgcatatttcaggcagatagataggtgtttggcatcttataactgctcactttccttttccttagtaatctgaaagtaattcactgtactgaatagttaatggttcccttaatagactcttgtccttggaaaaataaaatgaaatgactggggttctattagtaactgaaaaattgtcaacaattaaaactctaaaacctactcatgagaaaataaagctcttttgtttaggaataataaaagccgacttaatgacttctgaaagaagtaagtgtccctgtaaaggccaggtgaaactgccattctttaacctgttactcggtgtacttgactgcggaaagaacccagaaacagaaaaggccaggcccaaaggatagaagtgtaggtttcctctggaagcttactgttctgctaaatgacctaaaaattgcctagaacactcccagataagtcaatttctgcttataaaaatccattgccagaaagagattatttttagttgtctttatttaaaaaatgaaacacattagttacaaaaaccgttgctccaaatagataccgtgtatcttacaaatgttttttgcttggttttgagtgtttactgtagaaattttcaatatcataaataaatgattatttctttctcagaaagctgatttttgtagtgtagtatttacaaataccgtaagtgaaaaatgatagtttataaatttgtaccatttaggaaaaaatgttttatgtagtgttgtttgtgtaacagcaaataaaaccatttaagattatagtttttacaagggtggtaaaacctttaaaacagcataatgtgcatcgtatgcctttctgacattagcatgcaaaaacaaagctatttgttaaaatagacttatttttgctccaactaagtaaacatgtaaaattatttttaataagctcaatagcttagaaggcatcttgtttaaaatgaaaataatttaaaacaatatctagcactgcaacccaaagctaacagacaactgcaatgccactgtgacatatttcagcaaaatataaaaaatgaaaactttccaagttgtagaacattggtttttcaaatgtaagactgttcacatgtgtattcacatgttcacaagttttccaaagggaaaatactaattttttattggcatcatccatatccaggcaggctgtagttgagtcaccaatagctactcctaaatggagctgctattttttctatgttttctataaagttatttacatctgtaacaaggattccattattttcaaagacttctctggggatagtaggcttgtctgttaggaggacagcaaacctggcatcaatatgctgaatttgcaggtttagcaaacatttcagaatttctgcttttgttgatgatcgagagtcacactggtgataatgaagcaattcaatgatatttgcactctgaaatgacttcaacattatgttcttcttatgtgcagttgaatccactctttcatcttcttttagctttttattttccctgtagtgaagcaaccacttccatcttccatttccatttagtttttccaggattttgataatttccttcagttgaactaatgttacagcttctagtatcttgtcatctgatatcacaaagcctcctgcacgaaacagttcttggtaggtgtgatcaagaacatctccagggctgtctactccagcaaagatgacactggggaaatgcttcagcttcagcaaagaaggaatctgatgcaaatgtgatgatatatcttcatttctgatgatgatgattagtgtatcattctctctgtggaaagcttgacagaagtgctgaggttcaatttctgtatggcctcctttcctcagaaggttctttgttcttacaaagaatgatttgtcttctgtttcgacaaggtagaacaggaaggtacttttacaagcctctttcacaacacttcttagtttgacgtgcaaattggtgcacacgtctatgattatgtcttcataggaggctgaccgtcctgggaaaggcagatacatctcttgagcagtggcttctccagaaacatcatttagctctttgtcttggaaaatgaattggttgctattcttcatcaccttgttgaattcagcatactcattgagaataagtgaaatatcattccgagattccttcacagtactgttgtatttcagtttgttgaggtggaatgaaacagtgtgatttctttgagaatttctaagatctctattatgactacatctctctctccaagaggaagagctgtccagactgctggctgtgtagcctctcctgggctgcccctgtggtctgggatctgactccacaactgttaccagaagggggcttctgctcctaggtgcaggatgcagaaatggggcctcagagatttttgtcgaagggaaagcaccaatggagatctgggttggtgactcctttggaaagacattggcagaggaggcagaatgctgagaatccccattctttatggtctgttttagtttatgtgcaaaacgcagatactccaggtctaaagtgttctgggtgaggtcgtctgccacctgccaagtgcttgtccaggagctgggcaggccacagtttgcactgaaactcgggtgcctcctcaggccgtgtgaagttctcatggtatctttgagttcttttgttatagagaagttggcgtaagtcctgaggatcccgtggagatctcggatttggacgtaaggcggcacacacttctcttctttctttaccgcagcagtccagtgcccgggagggaggctcgtctccatgcctggaacccagctagagcagccccagtcctcttggttgttgttgtggaagttcaacgacgactcatagccatctgtgggaacatcttttttcctggtgtaactacctcttaaagtataagaatcctccaaatccagtctgggatttctacaatcaccaagcaggtctagatcagaatctccagagagttcatagtgcatgtcggaattcacaccgacctctccatctctgcttagggtttcagaaccagcctcagccgtgagcccctccccactgttatcaatttttacgtgctctgtggctattccacaagcagaaatatcaaaggattctgaaacaaaggaggccaaaggctctttactgaggttttccatggtgtctgctgtattttggtagggcccagcacaaagggagaaatctccgaccttcaatagctcctttgcga

SEQ ID NO: 77679 - DNA, 873 bp, Homo sapiens; identical to SEQ ID NO: 60268

SEQ ID NO: 77680 - DNA, 2629 bp, Homo sapiens; identical to SEQ ID NO: 60269

SEQ ID NO: 77681 - DNA, 1156 bp, Homo sapiens; identical to SEQ ID NO: 60270

SEQ ID NO: 77682 - DNA, 670 bp, Homo sapiens; identical to SEQ ID NO: 60271

SEQ ID NO: 77683 - DNA, 2362 bp, Homo sapiens; identical to SEQ ID NO: 60272

SEQ ID NO: 77684 - DNA, 5088 bp, Homo sapiens; identical to SEQ ID NO: 60273

SEQ ID NO: 77685 - DNA, 845 bp, Homo sapiens; identical to SEQ ID NO: 60274

SEQ ID NO: 77686 - DNA, 1990 bp, Homo sapiens
tttcgtccgggattcggccagtggtgctgagcgagtgctggaccagcggccgtcctgtgcacctggcctgtgcgcgtgcccgctgctcggcttcacccagactaaggcgcgggcagctgcgggaacaggcggggtgggcggagggagaccgggaggcacgggcgccctgtgcgcggaggaggtgaaggcggccggggccgggacgccatgtccatggaggaccccttctttgtggtgaaaggagaggtacagaaagcagtcaacactgcccagggattgtttcagagatggacagagctcctccaggacccctccacagcaacaagggaagaaatcgactggaccaccaacgagctgagaaataacctccggagcatagagtgggatctagaggaccttgatgaaaccatcagcatagttgaagcaaatcctagaaaatttaaccttgatgcaactgaattgagtataagaaaagccttcattacaagtactcggcaagttgtcagggacatgaaagatcagatgtcaacttcatctgtgcaggcattagctgaaagaaaaaatagacaggcactgctgggagacagtggcagccagaactggagcactggaacaacagataaatatgggcgtctggaccgagagctccagagagccaattctcatttcattgaggagcagcaggcacagcagcagttgatcgtggaacagcaggatgagcagttggagctggtctctggcagcatcggggtgctgaagaacatgtcccagcgcatcggaggggagctggaggaacaggcagttatgttggaagatttctctcacgaattggagagcactcagtcccggctggacaacgtgatgaagaaacttgcaaaagtatctcatatgaccagtgatcggcgccaatggtgtgccatagccatcctctttgcagtcctgttggttgtgctcatcctcttcttagtgctgtgacggcggggcctctgggtgcgagttcctcctgcatatgaaccgaggggaggaggagaagctgagcacgtgtgacattgccgtctactcacattcctatcctggaaacatactgctgcactgacttttctccgtgtgaccccacaattgacatggctcctccatcccagcgctggaagggccagtgggaagaggaaatagatgtctgcactcctggctgcagctggacaacagaagccccatgccgcctgtccagttcggaggagaactagctgctgccttgccttccgggacctcgtttgctgaggagggacttacagactccactggtgttttgctgttgctcattccatgcatctttggcagctcttttcttctgctcagacccttccccgtgctcagacagtgcaccgctgtcccatctaaagaaacctgtcaggaatacgagcttctgggtatgtttcgtttcccattgctgtagcatttcttatcccctgagagctgatgattattgaggacagaaggctcagaaacagtttgtgacagaaaatgcagtgtttcatttttcagggataaatgctaagataaaattgcttttccaggtcatttttttttgtggcaagaataactaatggaaaataatgaaacaccctggggtttgggggtgctaacaacttgtggctttaactgacaggagcaattaaaaagagcaagagggttctgcattggcatagcttaaggaagggttaatgatgtcgccacaggtcagctcctgatccttgccgacttgatgttgctgtaccagggcttcctccccagaggtgcagcttgcgttttgagggtgattgctacatatgttgttgctaaacagctcagtaacacacttgaatgaatttggataccagattgtcctcattacagctcttttactcttagggcactctacactgggggttggggttgggagggggtagtacatttattacatttattaaaaaacgcagtgacataaaaggtt

SEQ ID NO: 77687 - DNA, 1052 bp, Homo sapiens; identical to SEQ ID NO: 60276

SEQ ID NO: 77688 - DNA, 1496 bp, Homo sapiens; identical to SEQ ID NO: 60277

SEQ ID NO: 77689 - DNA, 2714 bp, Homo sapiens
tcgtggtgcttgggtggtcgccaccaagaagactttggtggggtagtctcggggcagctcagcggcccgctgtgcccgtttctggcctcgctcgcagcttgcacgtcgagactcgtaggccgcaccgtagggcgagcgtgcgggtcgcccgcggccgcctcggggtctgggcccagccgcagcctcttctaccgcggccggttgggagtcgccgcgagatgcagcctccgggcccgcccccggcctatgcccccactaacggggacttcacctttgtctcctcagcagacgcggaagatctcagtggttcaatagcatccccagatgtcaaattaaatcttggtggagattttatcaaagaatctacagctactacatttctgagacaaagaggttatggctggcttctggaagttgaagatgatgatcctgaagataacaagccactcttggaagaattggacattgatctaaaggatatttactacaaaatccgatgtgttttgatgccaatgccatcacttggttttaatagacaagtggtgagagacaatcctgacttttggggtcctctggctgttgttcttttcttttccatgatatcattatatggacagtttagggtggtctcatggattataaccatttggatatttggttcactaacaattttcttactggccagagttcttggtggagaagttgcatatggccaagtccttggagttataggatattcattacttcctctcattgtaatagcccctgtacttttggtggttggatcatttgaagtggtgtctacacttataaaactgtttggtgtgttttgggctgcctacagtgctgcttcattgttagtgggtgaagaattcaagaccaaaaagcctcttctgatttatccaatctttttattatacatttattttttgtcgttatatactggtgtgtgatccaagttatacatgaatagaaaaagatggtgttaaatttgtgtgtaggctgggaattcttgctgaaggaattggagaaaacctgttgctgcaaaattttacatgttccagatggaaagggaagtctaagcgctttttaaaacaatttttttttgtatttaattaagcaattgcagttatctgggatttttgggtcagaattttaaattctgtttgattctccatattccagtgaataaaatacaaaagcattgtgtttttaagattgtgtcgatattcacctaaaaacttgtgccaaaagcacctggattggtaattatatttcacttaaagggtaaatttgacaatatcttgataatcaaaagtgcaatttttttcttcaaaatgttttctccagcatcacagatcctgcagatatatatttatatttatacatatatatttatgaaataattcttactcacaaaatatatttctgataaacattaagatattaaatctgatgcacaaactttaatttggccattaatcttttttatttaaaaatttaaatttgtttttaaaattgtatatagtttttaaaatctcacacatgcttcgatacttccttgttaagaattcttaataactactaaaactgatttttaatagttgctgatatatatttggtttgtttgggtatacttttcaaaaccatttttgaatgtccaaacatctgatttaaagtttctgtttatctttctgaccaaaggagcaagaggtataatggatatggcattcattaaaatctttactatgtacaaaaacagtaatatttacagcatcagtaaatatttttaagtggtacttctaaatcataaaagttggggaaagagacctttaaaatcttgtggtgttgaacaatgttatatgaagtagaaaaaataaaatacttcccagttgtgtgttttgttttacagcaccatgtcctgtattacttgatattttaacaagtatcaggtactctctaacaaatgtacagtttttgctaagggaaatattaagaaatttttatcagtgaaatatttgttgcaaataatttcataggtttttagatacacctgtagttaatattactttgtaaagtaggtaaatcattttatttatgtccataaaatatcaaatgtctgttaactattagcaaattattgtattatcctttctggtctcacctggaagagtttcctgctgtcctcagtatgataacatggcgacctcttggtatgtatttctttagcaaacttacccatcaggaaatatccagcacctctgaagcaaacctacaaatgagtgtgttatcaagcccagccgtcttcctttcccctaatcccaaaaggaaagaaagaaaaacttattttaagctgcagaaaaagtgtggagcacttttgagctagaataatgtagaaaattacatgtactgatttttttaaaaacaggtgagaagcaccagagggacaggacttctagaagttagaataatatgaagtaatcaggaaatatctatgcctacagaagcagcaaccgtaagataaacatttgttacacttaagaaattgctgaggttaatactttgttataatggattataatatttgacattcatagtgttgaccctggaatctttcacagaaagcttgggggtcaggaccaggaggtagaattttacaaggcaataaatgaaggtattttaagatcacctctattaaaaaatggtttaatttt

SEQ ID NO: 77690 - DNA, 1877 bp, Homo sapiens; identical to SEQ ID NO: 60279
  misc_feature (1)...(1877): n = a,t,c or g

SEQ ID NO: 77691 - DNA, 2029 bp, Homo sapiens
tgattcctgagtgctgagcgcgaacccgaggagatgaagtaaggcgtcagctttcttttgaggaaggagcagcgggccactgggggtggtccaccgggactggtgtggtagagcgtctgcggggccgaggggcgggagcggcgcggggactggaacagctcgtcccctagttttgctcttcctcagctccggccggttcgcacttacttgtctgcttttctgcctaccctccccaccccccccgccaccgtgaagccctttaactaaggtgaagctgatcaacgagctgaatgaacgagaggtccagcttggggtggccgataaggtgtcctggcactccgagtacaaggacagcgcctggatcttcctgggagggcttccttatgaactgactgaaggggacatcatctgtgtgttctcacaatatggggagattgttaacattaatctcgtgcgggacaagaaaactgggaaatccaaaggattctgtttcctctgctatgaagaccagaggagcacaattctggccgtcgacaattttaatgggatcaagatcaaaggaagaactatccgagtggatcatgtgtctaactatcgggctcctaaggactcagaagaaatagatgatgtgaccagacaactccaggagaagggctgtggggctcgtaccccctcaccaagtttgtctgagagctctgaagatgaaaaaccaacaaaaaagcacaaaaaagacaaaaaggaaaaaaagaaaaaaaagaaagaaaaagagaaagccgaccgggaggtacaggcagagcaaccatcctcttcgtcacccagacgcaagacagtaaaggaaaaggatgacactggccctaagaagcacagcagcaagaactcagagagagctcagaagtcagagcccagggaggggcagaagctccccaaatccaggacggcctactctggtggagcagaggacctagagagggagctgaagaaggagaaacccaagcacgagcacaagtcctcaagcaggagggaggcaagagaagaaaagaccaggattagggacagagggcggagctcagatgcacattctagctggtataatgggcgttctgaagggcgtagttatagaagtagaagtaggagccgagataaatcccataggcataaaagggcccgacgctcccgggagcgggagtcttcgaatcccagtgaccgttggcgtcactgaagacttcagctgcacagtagatttggaaataattatgttttttaaatgcagtcaaattcagttgggtggttactatttttgtatctaaaacttctggggctggattcttttaatcccttgactatttagagtcattgggagggctgcagtttcaacagctagatatcctggatattgtttgcaccatccattgtccctgtaccagagtatgtatcctgaactttggttcataaatatggctcttgaacccatagaccccagttgaagatggaattttcaggaaagggaaaatactagataattctagaattctagtcttcgtgttagatgtttatagcccagcatcttgggacctttccagttactaggtttggacagcttgatgtgaacgaatgggataggatttttaaaatcagccagctccatgcccaaaccttcctgtttgcagaactttttaatgtcttttctttttcattaaaacttttttgttcgatatgcctctttccacattttttccttgcaatgtatttattatttatttgtatttaggtgaaattcacataacataaagttaaccattttaaagggaacaattcagtggcatttggtactgaacatccacagtgttgtgtaaccattgcctctgtctagttccaaaacatttttttatcatcccaaaatgaaaccctgtagccattaaacaagagctccccgtttcctccctcctccctgtccctagcaaccaccagtggacttcctgtttatgggtttgcctattctggatctttcataaaaatggaattacacaaa

SEQ ID NO: 77692 - DNA, 2896 bp, Homo sapiens; identical to SEQ ID NO: 60281

SEQ ID NO: 77693 - DNA, 942 bp, Homo sapiens; identical to SEQ ID NO: 60282

SEQ ID NO: 77694 - DNA, 2827 bp, Homo sapiens; identical to SEQ ID NO: 60283

SEQ ID NO: 77695 - DNA, 2346 bp, Homo sapiens; identical to SEQ ID NO: 60284

SEQ ID NO: 77696 - DNA, 2338 bp, Homo sapiens; identical to SEQ ID NO: 60285

SEQ ID NO: 77697 - DNA, 2274 bp, Homo sapiens; identical to SEQ ID NO: 60286

SEQ ID NO: 77698 - DNA, 705 bp, Homo sapiens; identical to SEQ ID NO: 60287

SEQ ID NO: 77699 - DNA, 2708 bp, Homo sapiens; identical to SEQ ID NO: 60288

SEQ ID NO: 77700 - DNA, 917 bp, Homo sapiens; identical to SEQ ID NO: 60289

SEQ ID NO: 77701 - DNA, 2404 bp, Homo sapiens; identical to SEQ ID NO: 60290

SEQ ID NO: 77702 - DNA, 694 bp, Homo sapiens; identical to SEQ ID NO: 60291
  misc_feature (1)...(694): n = a,t,c or g

SEQ ID NO: 77703 - DNA, 668 bp, Homo sapiens; identical to SEQ ID NO: 60292

SEQ ID NO: 77704 - DNA, 1988 bp, Homo sapiens; identical to SEQ ID NO: 60293
  misc_feature (1)...(1988): n = a,t,c or g

SEQ ID NO: 77705 - DNA, 704 bp, Homo sapiens; identical to SEQ ID NO: 60294

SEQ ID NO: 77706 - DNA, 1748 bp, Homo sapiens; identical to SEQ ID NO: 60295

SEQ ID NO: 77707 - DNA, 1453 bp, Homo sapiens; identical to SEQ ID NO: 60296

SEQ ID NO: 77708 - DNA, 7135 bp, Homo sapiens; identical to SEQ ID NO: 60297

SEQ ID NO: 77709 - DNA, 828 bp, Homo sapiens; identical to SEQ ID NO: 60298

SEQ ID NO: 77710 - DNA, 4219 bp, Homo sapiens
gcgcagagtctgcggaggggctcggctgcaccggggggatcgcgcctggcagaccccagaccgagcagaggcgacccagcgcgctcgggagaggctgcaccgccgcgcccccgcctagcccttccggatcctgcgcgcagaaaagtttcatttgctgtatgccatcctcgagagctgtctaggttaacgttcgcactctgtgtatataacctcgacagtcttggcacctaacgtgctgtgcgtagctgctcctttggttgaatccccaggcccttgttggggcacaaggtggcaggatgtctcagtggtacgaacttcagcagcttgactcaaaattcctggagcaggttcaccagctttatgatgacagttttcccatggaaatcagacagtacctggcacagtggttagaaaagcaagactgggagcacgctgccaatgatgtttcatttgccaccatccgttttcatgacctcctgtcacagctggatgatcaatatagtcgcttttctttggagaataacttcttgctacagcataacataaggaaaagcaagcgtaatcttcaggataattttcaggaagacccaatccagatgtctatgatcatttacagctgtctgaaggaagaaaggaaaattctggaaaacgcccagagatttaatcaggctcagtcggggaatattcagagcacagtgatgttagacaaacagaaagagcttgacagtaaagtcagaaatgtgaaggacaaggttatgtgtatagagcatgaaatcaagagcctggaagatttacaagatgaatatgacttcaaatgcaaaaccttgcagaacagagaacacgagaccaatggtgtggcaaagagtgatcagaaacaagaacagctgttactcaagaagatgtatttaatgcttgacaataagagaaaggaagtagttcacaaaataatagagttgctgaatgtcactgaacttacccagaatgccctgattaatgatgaactagtggagtggaagcggagacagcagagcgcctgtattggggggccgcccaatgcttgcttggatcagctgcagaactggttcactatagttgcggagagtctgcagcaagttcggcagcagcttaaaaagttggaggaattggaacagaaatacacctacgaacatgaccctatcacaaaaaacaaacaagtgttatgggaccgcaccttcagtcttttccagcagctcattcagagctcgtttgtggtggaaagacagccctgcatgccaacgcaccctcagaggccgctggtcttgaagacaggggtccagttcactgtgaagttgagactgttggtgaaattgcaagagctgaattataatttgaaagtcaaagtcttatttgataaagatgtgaatgagagaaatacagtaaaaggatttaggaagttcaacattttgggcacgcacacaaaagtgatgaacatggaggagtccaccaatggcagtctggcggctgaatttcggcacctgcaattgaaagaacagaaaaatgctggcaccagaacgaatgagggtcctctcatcgttactgaagagcttcactcccttagttttgaaacccaattgtgccagcctggtttggtaattgacctcgagacgacctctctgcccgttgtggtgatctccaacgtcagccagctcccgagcggttgggcctccatcctttggtacaacatgctggtggcggaacccaggaatctgtccttcttcctgactccaccatgtgcacgatgggctcagctttcagaagtgctgagttggcagttttcttctgtcaccaaaagaggtctcaatgtggaccagctgaacatgttgggagagaagcttcttggtcctaacgccagccccgatggtctcattccgtggacgaggttttgtaaggaaaatataaatgataaaaattttcccttctggctttggattgaaagcatcctagaactcattaaaaaacacctgctccctctctggaatgatgggtgcatcatgggcttcatcagcaaggagcgagagcgtgccctgttgaaggaccagcagccggggaccttcctgctgcggttcagtgagagctcccgggaaggggccatcacattcacatgggtggagcggtcccagaacggaggcgaacctgacttccatgcggttgaaccctacacgaagaaagaactttctgctgttactttccctgacatcattcgcaattacaaagtcatggctgctgagaatattcctgagaatcccctgaagtatctgtatccaaatattgacaaagaccatgcctttggaaagtattactccaggccaaaggaagcaccagagccaatggaacttgatggccctaaaggaactggatatatcaagactgagttgatttctgtgtctgaagttcacccttctagacttcagaccacagacaacctgctccccatgtctcctgaggagtttgacgaggtgtctcggatagtgggctctgtagaattcgacagtatgatgaacacagtatagagcatgaatttttttcatcttctctggcgacagttttccttctcatctgtgattccctcctgctactctgttccttcacatcctgtgtttctagggaaatgaaagaaaggccagcaaattcgctgcaacctgttgatagcaagtgaatttttctctaactcagaaacatcagttactctgaagggcatcatgcatcttactgaaggtaaaattgaaaggcattctctgaagagtgggtttcacaagtgaaaaacatccagatacacccaaagtatcaggacgagaatgagggtcctttgggaaaggagaagttaagcaacatctagcaaatgttatgcataaagtcagtgcccaactgttataggttgttggataaatcagtggttatttagggaactgcttgacgtaggaacggtaaatttctgtgggagaattcttacatgttttctttgctttaagtgtaactggcagttttccattggtttacctgtgaaatagttcaaagccaagtttatatacaattatatcagtcctctttcaaaggtagccatcatggatctggtagggggaaaatgtgtattttattacatctttcacattggctatttaaagacaaagacaaattctgtttcttgagaagagaatattagctttactgtttgttatggcttaatgacactagctaatatcaatagaaggatgtacatttccaaattcacaagttgtgtttgatatccaaagctgaatacattctgctttcatcttggtcacatacaattatttttacagttctcccaagggagttaggctattcacaaccactcattcaaaagttgaaattaaccatagatgtagataaactcagaaatttaattcatgtttcttaaatgggctactttgtcctttttgttattagggtggtatttagtctattagccacaaaattgggaaaggagtagaaaaagcagtaactgacaacttgaataatacaccagagataatatgagaatcagatcatttcaaaactcatttcctatgtaactgcattgagaactgcatatgtttcgctgatatatgtgtttttcacatttgcgaatggttccattctctctcctgtactttttccagacacttttttgagtggatgatgtttcgtgaagtatactgtatttttacctttttccttccttatcactgacacaaaaagtagattaagagatgggtttgacaaggttcttcccttttacatactgctgtctatgtggctgtatcttgtttttccactactgctaccacaactatattatcatgcaaatgctgtattcttctttggtggagataaagatttcttgagttttgttttaaaattaaagctaaagtatctgtattgcattaaatataatatgcacacagtgctttccgtggcactgcatacaatctgaggcctcctctctcagtttttatatagatggcgagaacctaagtttcagttgattttacaattgaaatgactaaaaaacaaagaagacaacattaaaacaatattgtttctaattgctgaggtttagctgtcagttctttttgccctttgggaattcggcatggtttcattttactgcactagccaagagactttacttttaagaagtattaaaattctaaaattctaa

SEQ ID NO: 77711 - DNA, 8866 bp, Homo sapiens; identical to SEQ ID NO: 60300

SEQ ID NO: 77712 - DNA, 912 bp, Homo sapiens; identical to SEQ ID NO: 60301

SEQ ID NO: 77713 - DNA, 1671 bp, Homo sapiens; identical to SEQ ID NO: 60302

SEQ ID NO: 77714 - DNA, 1444 bp, Homo sapiens; identical to SEQ ID NO: 60303

SEQ ID NO: 77715 - DNA, 1406 bp, Homo sapiens; identical to SEQ ID NO: 60305

SEQ ID NO: 77716 - DNA, 2900 bp, Homo sapiens; identical to SEQ ID NO: 60306

SEQ ID NO: 77717 - DNA, 2263 bp, Homo sapiens; identical to SEQ ID NO: 60307
  misc_feature (1)...(2263): n = a,t,c or g

SEQ ID NO: 77718 - DNA, 1485 bp, Homo sapiens; identical to SEQ ID NO: 60308

SEQ ID NO: 77719 - DNA, 4291 bp, Homo sapiens
gcgcggggcaccacccgctcccccccccaaccctcctcagcagaagcagccggcgcgggtggcaggagtcagcccgcttccgaccgtaccccgcccgcctcccggggctcctgttctgtggccccgggaccctaaccagctcccggggcggttccctccgtctgggcgtccgagcgctgcccacatctttcattcctccctgcacctccttcccttcacttttgccccggctctctttctcctctctgtcctgctgtcgcctcctctcctcactccagcctccttccctggcttattctgcccaggaaagtttggaacccccgccccccctccccaatcaggtcaacctgactaggagtagggggagatgtaggaaggcctgagagttcggggggggggaagctggaagctggtttcccaaaaaatttccccccatcttctccatttaggggggggggaattttttttaatcctgtttttgacggagggggggggtgtttaggaaaaaggatgtgggaatggaaggggtagatgagtcaaccctctttcaagattccaacgggtggtgtgttacctgatccttttcgtgtgtggagttcagggggtcgggaggtttggcctttattcccacattcaaagttggaacctcccccaaattaagaatggagttttagtacccacttgtggcaggaaatcctggggggaaggggtccttttttcctttttcttttcttttttcccttttttttccttttggcaacccacacccttccacacacgctcaccccaaaattaaacaccaagatcctctaacttgtttggattgactgatgaagacataaagctctatgttttttgaggtggagtgagtggtttttcttcatttttaaatggccaaatgacagcttgacccagtttgctttccaatcaaagggcatttattttgaatgtctttttgtggcgcaagagccaacgcaaaaatgatggcggcttacaatggcggtacatctgcagcagcagcaggtcaccaccaccaccatcaccaccaccttccacacctccctcctcctcacctgcaccaccaccaccaccctcaacaccatcttcatccggggtcggctgccgctgtacaccctgtacagcagcacacctcttcggcagctgcggcagccgcagcagcggctgcagctgcagccatgttaaaccctgggcaacaacagccatatttcccatcaccggcaccggggcaggctcctggaccagctgcagcagccccagctcaggtacaggctgccgcagctgctacagttaaggcgcaccatcatcagcactcgcatcatccacagcagcagctggatattgagccggatagacctattggatatggagcctttggtgttgtctggtcagtaacagatccaagagatggaaagagagtagcgctcaaaaagatgcccaacgtcttccagaatctggtctcttgcaaaagggtcttccgggaattgaagatgttgtgtttttttaagcatgataatgtactctctgcccttgacatactccaacctccacacattgactattttgaagaaatatatgttgtcacagaattgatgcagagtgacctacataaaattatcgtctctcctcaaccactcagctcagatcatgtcaaagtttttctttatcagattttgcgaggtttgaaatatctccattcagctggcattttacatcgagacattaagccagggaatctccttgtgaacagcaactgtgttctaaagatttgtgattttggattggccagagtggaagaattagatgaatcccgtcatatgactcaggaagttgttactcagtattatcgggctccagaaatcctgatgggcagccgtcattacagcaatgctattgacatctggtctgtgggatgtatctttgcagaactactaggacgaagaatattgtttcaggcacagagtcccattcagcagttggatttgatcacggatctgttgggcacaccatcactggaagcaatgaggacagcttgtgaaggcgctaaggcacatatactcaggggtcctcataaacagccatctcttcctgtactctataccctgtctagccaggctacacatgaagctgttcatctcctttgcaggatgttggtctttgatccatacaaaagaatatccgctaaggatgccttagcccacccctacctagatgaagggcgactacgatatcacacatgtatgtgtaaatgttgcttttccacctccactggaagagtttataccagtgactttgagcctgtcaccaatcccaaatttgatgacactttcgagaagaacctcagttctgtccgacaggttaaagaaattattcatcagttcattttggaacagcagaaaggaaacagagtgcctctctgcatcaaccctcagtctgctgcttttaagagctttattagttccactgttgctcagccatctgagatgcccccatctcctctggtgtgggagtgatggtggaagataatgtactactgaagatgtaatgtagctttcccactgggagtctgggatttgcaattctgggaggttaatcatgcttgtactgtaattttactaatgaagttttaaattaacaaccactacttgtatgatatgaataatatttagaaatgttactagacttttaatcttgtaaagtggttgtgcttttagaagaaaaatattttacccagagttgcacatgttttatgaatttagtgcagctgttatggctcacctcagaacaaaagagaattgaaccaaatttgggagtttggggttttatgttttgtttttcttttctaaaatgaagtgagattgttcacacacacacacacacacacacacacacacaaacacaaaggacagtcatacattttgatatttgagccattcctaaagatttggggttttctaaaactaaagaatctaggaaccttgcctgcgaccaatcatggagccacgtgagctgatcgtggctgcacctggggggagggtagggaggaggggcatgccacctaatgatcaagccctataattagcttctcattaaagccgtgatggtgatgtgtgctgtctaaaatccaatgttgtgggtagagagaatgagtttgtgactaggagagactaaacttttgttttccttacccagtataaatatatatatatatatttaatctatttttattagaagtttttctgctctttcttacataaaagaaccccaagcatgcatctttcatgtgtgtaaataattcatttctgggctaatttcaaaagaatcccaatattgctgtatagaaagagaactagcttgcacattttaggtctgtgaaattttgtgagacttttcctgcactggacagtaaaaaaataataaaagacaaaaacaaatttaaaaaaaaaatttaagccacaaaaaaaggcacatagggaattatgtcaaatgtgtttgtgtccttaggcaaagctgtgggagtcttgaaatgtcacagtagtaaataacttattactttttgacaagttcttttttttctgttggaacactgaattcttctgtgcatatgtacatatgaatacaaatcgaaggcctctacctcctgggagttatacaacttgggcttgtttacctccacatgctgatgatgactattttttttttttttgagttcagtgtggagacttgaaacttgaatgtcccttccaacttttatattaaaaataaaaagacaagggaaattgaagatcatttttcacctgtacaaggaatactaatggatcgtcttaaaattggtctaggaaaaaaccttggtgtgtgttatggacaattaactgttaaagttattgtaagttatctgtatttagcagagtattttcaacttgagtgatctgagctgaatttgaagactattaataagttatgtttggaagttttaacctcaatgaagtaattatttgctgtgaaagaaacaaacattgaattactaaacaaagatggtgcaatatctttgttttttttttatgaggctcctgagaatcaacccaactgaagcatttcaattcacttgaatgagaaacgtgtttagtatcaaaagagcccaaaaagaccctggtgtgaaaggtacaatctcaaaggttggtcaattaccgtggcacactttctggtcactttgtacaatgtaaatttgaagtacagtggtgaaaacattaaatgtgacatttgaaaaaaaaaa

SEQ ID NO: 77720 - DNA, 3739 bp, Homo sapiens; identical to SEQ ID NO: 60310
  misc_feature (1)...(3739): n = a,t,c or g

SEQ ID NO: 77721 - DNA, 1080 bp, Homo sapiens; identical to SEQ ID NO: 60311

SEQ ID NO: 77722 - DNA, 2957 bp, Homo sapiens; identical to SEQ ID NO: 58893

SEQ ID NO: 77723 - DNA, 1821 bp, Homo sapiens; identical to SEQ ID NO: 60313

SEQ ID NO: 77724 - DNA, 921 bp, Homo sapiens; identical to SEQ ID NO: 60314

SEQ ID NO: 77725 - DNA, 1325 bp, Homo sapiens; identical to SEQ ID NO: 60316

SEQ ID NO: 77726 - DNA, 2676 bp, Homo sapiens; identical to SEQ ID NO: 60317

SEQ ID NO: 77727 - DNA, 1330 bp, Homo sapiens
  misc_feature (1)...(1330): n = a,t,c or g
ccgagcggcggagtccgggacgtggagacccggggtcccggcagccgggcggcccgcgggcccagggtggtgatgcaccgccgcggggtgggagctggcgccatcgccaagaagaaacttgcagaggccaagtataaggagcgagggacggtcttggctgaggaccagctagcccagatgtcaaagcagttggacatgttcaagaccaacctggaggaatttgccagcaaacacaagcaggagatccggaagaatcctgagttccgtgtgcagttccaggacatgtgtgcaaccattggcgtggatccgctggcctctggaaaaggattttggtctgagatgctgggcgtgggggacttctattacgaactaggtgtccaaattatcgaagtgtgcctggcgctgaagcatcggaatggaggtctgataactttggaggaactacatcaacaggtgttgaagggaaggggcaagttcgcccaggatgtcagtcaagatgacctgatcagagccatcaagaaactaaaggcacttggcactggcttcggcatcatccctgtgggcggcacttacctcattcagtctgttccagctgagctcaatatggatcacaccgtggtgctgcagctggcagagaagaatggctacgtgactgtcagtgagatcaaagccagtcttaaatgggagaccgagcgagcgcggcaagtgctggaacacctgctgaaggaagggttggcgtggctggacttacaggccccaggggaggcccactactggctgccagctctcttcactgacctctactcccaggagattacagctgaggaggccagagaagccctcccctgactgcatgtggaagggcacacagcagcaggcagggaggaggcggaggtggcaaataaacctgggagtagaggtcagtgaagagagctggcagccagtagtgggcctcccctggggcctgtaagtccagccacgccaacccttcctttagcaggtgttccagcacttgccgcgctcgctcggtctcccatttaagactggctttgatctcactgacagtcacgtagccattcttctctgccagctgcagcaccacggtgtgatccatatttgagctcagctgggaacagactcattcctaatgttgtaaaatacagcccgaactgcaagttgcttattgtttcaaaatccagtggatatcttgacctacgtggcttggaagataagtggttttcccaaaaaccgtgttattggaagcggttgcaatctggattcagccgattccgttacctantgggggaaaagctgggagtcanccattaag

SEQ ID NO: 77728 - DNA, 2193 bp, Homo sapiens; identical to SEQ ID NO: 60319

SEQ ID NO: 77729 - DNA, 1115 bp, Homo sapiens; identical to SEQ ID NO: 60320

SEQ ID NO: 77730 - DNA, 4114 bp, Homo sapiens; identical to SEQ ID NO: 60321

SEQ ID NO: 77731 - DNA, 3661 bp, Homo sapiens; identical to SEQ ID NO: 60322

SEQ ID NO: 77732 - DNA, 2363 bp, Homo sapiens; identical to SEQ ID NO: 60323

SEQ ID NO: 77733 - DNA, 1452 bp, Homo sapiens
caggcgcttccgccaccatggcttcacgtggggttgttggcattttcttcctctctgctgtcccccttgtgtgtctggagctccggcgtgggatcccggatataggaatcaaggattttcttttgctttgtggccggattttgctactgcttgctcttcttactttaattatttctgtgactacctcatggcttaactcatttaaatctccccaagtttatctgaaggaagaagaagaaaagaatgagaaaagacaaaaacttgtgagaaaaaaacaacaagaagcacaaggagagaaggccagcagatacatagagaatgttttaaaacctcaccaggaaatgaaattgagaaaactggaggagcgcttttatcaaatgacgggtgaagcctggaaattaagcagtggtcacaaacttgggggtgatgaaggtacaagtcagacatcttttgaaacatcaaacagagaagcagcaaagagccagaacttgcctaaacctttaactgaatttccgtctcctgctgaacagcccacatgcaaggagattcctgatttacctgaagaaccttctcaaacagcagaagaagtagttactgttgctctccgatgtcccagtgggaatgtcctgaggagaaggtttttgaagtcctacagctcacaggtcttatttgactggatgacgagaattgggtaccacatatctctatacagcctttctacttcctttcccagacggcctctggcagtggagggaggccagtcgctggaggacataggaataactgtggacactgtactcatcctggaggagaaggagcagaccaactaggaaagaagggagagctccctgtttgcatgaagtcagttatgctatgaccttctggcacaataaaggcttcactttcaaatcacaccataccttgattgagctcatggcagtaaactttgaacattgatatccatgggaataggattagaaaaggattgctttctatatataataatctgtggactgtgccattttacagtgtaccaaatgagaatgaggttgaaatgtatgcagtaaggtactcagtaattaattggtattttttcccagctgacatgatttctcagtgttagaaaacaaacccttagaactttcctttctgcctcttcaatccatcttaccacacaatatttcatgattcaaattcttcaaagtcttatacgcaggaatgtttattctgctgtatttctgtggaaattaaaaacttggaaaaagcttcaaaagctcttggaggctttaaagttctttctgttgggtgtgcattacagtttacttaactgatgtttggcgatttatataattttggcctgttattaaatgttacaaagttccaaatgaatcagtattttaaaaaataaaactatgaaagccttaaaaaataggtgaatttttaaaaaaaaaa

SEQ ID NO: 77734 - DNA, 1316 bp, Homo sapiens; identical to SEQ ID NO: 60325

SEQ ID NO: 77735 - DNA, 1806 bp, Homo sapiens; identical to SEQ ID NO: 60326

SEQ ID NO: 77736 - DNA, 2036 bp, Homo sapiens; identical to SEQ ID NO: 59607
  misc_feature (1)...(2036): n = a,t,c or g

SEQ ID NO: 77737 - DNA, 521 bp, Homo sapiens; identical to SEQ ID NO: 60328

SEQ ID NO: 77738 - DNA, 4493 bp, Homo sapiens
ttttttttttttacgggattgcaatgtattcctttttattaaattataaaactgttgtcaatacatgtgcttttggaaatagtgttttcctcaagtatctgcttttgtgcagcacttgggtttaaacaaacaacaaatttcgataccaacttcttgggcttcaagctattgagcacttatagccaaactatcaagtatagttatgatatagacagtccaaatttatggaaaatattacaaagacaaatgccttgaaaagatgacacagtgcagggaaaactacagctattaagctggtataaaaacttagtcaaaatgttttagtccattatggctctgcctaaagcttcaaaggaagaaaatttaagacacttctcatccaaggcacttaaaagagttgcaataaagtacttctttgaatttagtttgagcccaacagtattttttattcctttttcacattctgactcacactgaaacagtccttgaaggcagctattaatgaggaaaaatagttattgcttcttaatatacatattacaagtacgcaaacagaatacagatttcggtccactgaagcaagtaacaggatctgactgcagtgttctgcttaattctgaacaaaaagccacagactcctctaacccagtcccacaaatagagccctcagttctgaatttgcaccagctgtcccctgggttctccatgaggacacacgagctggagtcccaccacgtctccatggtgcattctaactggagaagaaccatcccggcggcctggcaggagtggctagtctgatgccatgcaggcaggcctgggagagtccgtgctcagacatctataattctgtgtcccggtatcgggcagactggccatagtaaccgcgcttggagtgttctgacagctgctggcggtactcctcctcctcggcatcactgccataacttcctctggtatcctgataaggtctggaaggagctttctgtggctcagggggtctggaactcgtgtgctggggcgtgccagggtctggcttgtgcgttttgattggaactgcatagatatcaggatgcttctgggcaatttcgatccttgcattctgtgcttcctggagctcctgcattctctgtaacctggccttgtgatccatcttctcaaatattttgactttgcccaggactgatttgggagcattatcttgctcctcactgctctctcccacctcctcaccctcttgaggagggatgggagtggagggcttcagtatagaccgcccaaaggtaggttttgctgcaacaggaggaggataacctttggtagatgccccaggagtttcattaccagcaacggcagaggggtttgacttatattcataggatttggagaagtcataggattcttctttgttctgggttttggccttgggcggctctggcttgaatgctgggggcgggctattgtccctaagttgatcgctgctagcagccctcctcatctgagctcgtggctctgggctgggtttccttatgctctcctcgtgctgcaccggctccgaggagcgggtgatggacgacaccagcggctcctcggctggctcatccagctcattgtcagtgtaggcgcctccttcaccgtccgtgtcttcaaagtcactgatgaggcggctgtcgcaactcagatagtctgcgcccatggcagttaagtaggacatgcggtcttcggggtcatcatccatcccttccatctttccttcagagacccaaaccgcttctccttgctgatgctgaatagtgtcctttaagctgccaaaccagctatcattggctgaatttaggttgattgtagctgtaaaaaggtgtgcacacgtttttttaagcttgttggcttgatcaaataactttcgagaactattgttggacgttgggtctaacctttgtctcatggtgttgacaccttgtctggagtctggcgtgaaagaaatcacaattgagaaccactgggtgtaattcaacaggtccacagctttcggagtcacatccagtagtgcatgcttatcctgttcaataacttgcctcacggtatttaaccggaccactccagtggatttctcagatcctgcatcttttggttccgttttagcagtttgaaaccagtcaggtaactcattagccaatttttccattgctatatcagctatggggccgaataagaccacaggtctcttgaaaccagcttctcgcagcaaaaccctctcataagctgggaacttggtgctgacagacacaacagctgtgaggtcttcccgacttttcctcaggttcttcttcaccccagacctctggccacgcattctccagaaatctgcccggtccccagcgttgtctctctgggcattttgaacactggccatttgttcagctctgctcttgttggggattaagcctttctccaactcgttcccaatcctcacagccagccagttgcccagcttgccgtcatacagtgtgtctaccactcggaagacctcccctctggtgaaggccaggctctgtggagtttccttctcacattcaaagtggcttcttataaaaaacgaatcccctctgccacaagccaggatgtctctatacacatcggctcggctctgagctaaaatggtcaccatttcacctttagggatttctaacaggtagagaacggcatcctcccgcactaatcctctgaaatcctgtgtgttcaccttcagaatctggtctccttcttgaaggccctcctgctccgccgaggtcccttcttgaatgccagcaacaaatatcccgacatcattgccaccagccaaccggaggcccacgctgtctcccttcttgaaccttaccattttggtattagggccatatattgcttcatcttcaggactaggacgaagaaaagttctcggggctgcttttggttgaggagctgggggttcctcttggtatctgggttccttgttggtctctgggacaactgtgcctgcaatatcccctgtggacttaaagggagtgggtgtcgcacccatcctggacaatctgctcggcgtgtcctctctggaacttggcctttccttcagcttctcacttgaggaatgataatcataatcagaatactgatgacgtctctcctctggagaaaatgatcgggttgactctatttctgaaatatcttctatttctgagtcactgtcatttaatgacgggatgttgatgagggtctgctggctgtctctcaacaccactagctgtagttttcctcttgacttttctatcaattttcgagcatccgttaaagacatgttctcagttacagtcccattgatcttgagaattatgtctccttcgtgaaggttgccatctttagttgccagacccgttcgggtcatttcctttacgaagatctgactcccaagccggagaccatactcttcgttcgctctgcttttcatcaggaggaccccgatgggccccggccgccccctaggctcggggctggggctccgtgagtgcgggtgctcgcggctgcggcttcggggtccccgagagcgggcatcgtggcgggccccgcgcctgtactccgggctgtaggcccgctcgtagtctgggtcgtaggcccggtgataggctcgctcgtagtcctggtcaatgctccggccgcggctgcggtcacggtcccggtcccgggatggcccaaagtcgtggtccaggccccgctccaggctccggccacggctgcggtctcgggtgcgcgcatggtcttggtccaggccccgctccaggctccggccacggctccggtcccggctgaggtcccgctcccggctccgggcccgctcatggggacgccccctttccgggctgtcctcccagctgcggctgcgccccccatggctgttcagccggctcctctcgctgtagccactccggaaacttctgccatcaaactcgtccatcacctcaaaagcccggtcatcctgatccaggggagggctggcctgaagtgcggccacctggaccttccggggcctcttgaccacaatagcagcgaccttcccactttttctgagctgctgaactgcaaacgaatgaagcacatcctccatgggggtgccattgaccatgaccactctgtcattttcttggagcagcccatcagcaggcccacccgggagcacatcagaaatgacaattgacgtttctccattttcaaagtgggggttgtctctgcctccggacactgcaattccaaatcctcttttggaatccttttgtagggtcacagtgtactgttcccatatcagctcttccatgcctggggcgcggagccaacctgacagctcccgccggggtggaaacccgcggtctcctcgcaccggcatttcggacacaggtcccgcgtaggcgcgcagctccggaccccgcttctgcttctgctcctgctcctactcctcctgggca

SEQ ID NO: 77739 - DNA, 1854 bp, Homo sapiens; identical to SEQ ID NO: 60330
  misc_feature (1)...(1854): n = a,t,c or g

SEQ ID NO: 77740 - DNA, 6026 bp, Homo sapiens
tggggccaataggaagatggcggagtccgtagctgccgctgagctccaggcttctgggggtccgcggcacccagtgtgtctgttggtgttgggaatggcgggatccgggaaaaccacttttgtacagaggctcacaggacacctgcatgcccaaggcactccaccgtatgtgatcaacctggatccagcagtacatgaagttccctttcctgccaatattgatattcgtgatactgtaaagtataaagaagtaatgaaacaatatggacttggacccaatggcggcatagtgacctcactcaatctctttgctaccagatttgatcaggtgatgaaatttattgagaaggcccagaacatgtccaaatatgtgttgattgacacacctggacagattgaggtattcacctggtcagcttctgggacaattatcactgaagcccttgcatcctcatttccaacagttgtcatctatgtaatggacacatcgagaagtaccaacccagtgaccttcatgtccaacatgctctatgcctgcagcatcttatacaaaaccaagctgcctttcattgtggtcatgaataaaactgacatcattgaccacagctttgcagtggaatggatgcaggattttgaggctttccaagatgccttgaatcaagagactacatacgtcagtaacctgactcgttcaatgagcctggtgttagatgagttttacagctcactcaggggggggggtgtctctgctgttctgggtactggattagatgaactctttgtgcaagttaccagtgctgccgaagaatatgaaagggagtatcgtcctgaatatgaacgtctgaaaaaatcactggccaacgcagagagccaacagcagagagaacaactggaacgccttcgaaaagatatgggttctgtagccttggatgcagggactgccaaagacagcttatctcctgtgctgcacccttctgatttgatcctgactcgaggaaccttggatgaagaggatgaggaagcagacagcgatactgatgacattgaccacagagttacagaggaaagccatgaagagccagcattccagaattttatgcaagaatcgatggcacaatactggaagagaaacaataaataggagactttagcacacttcacttgtttctagaagtccagaattttggacctccacgtgaaagaactgttcttacctctgaactgggggctcccataagggataattttcctcagagtagcaaagtttctcttattagagaaatcttgtgactcagatgaagtcagggatagaagacccttggacctggcaggttaatgctgattattccttggcctttcccttgtatttatgcaaggaaggatatactgagctgatactgttccaagcctacaacttcaagttttatcatttgaactcaagtacttttgctgctgaggaatggaatcaaaagaacgtagtctcctggtgaccacctcagatctctattattaggctagatgtatagcctctactcccccagcttcttgctcttgaccctgcactgtaagttgcccttctattagcagccaaggaaaagggaaacatgagcttatccagaacggtggcagagtctccttggcaatcaaccaacgttgctatgaaatatgcctcacactgtatagctcattataggacgtcaggtttgttgaaaaaagtgggcaagacatgattaatgaatcagaatcctgtttcattggtgacttggataaagactttttaattttaactttgctctaagactgcttgtcatgatttcaaattagaaaattatataattgcaaacagcttcacttctcctgttcaacagaggcttaaggccagatgtccaaacttgtctcaataaggaggtgatattttactaaagtttcccacgtgcacatactgactaaatacagagctaggcccagtttgtattgtactctgaacttaatgcaaagtctccttggtgattttcgcaaagtccgtggatttgggtcagaggcacatttcatacataacagcccttataaacgtttgccctgcctccacattttacagtatcttaaaacagtacatttctttcaaagaattttatctctatgagtcagtactccaacttaggggggtcccacattggtgggaccaggaggcatcagcatcaaccgggggaattggttcaacttacctcttataacctatgaactcagaaaccctgggggtgggctgagcagtctgttttagaaagccctccatgtgattctgatgcatagtagcctatgacataattccagaccaggtgaatctcaagatactaatcctcacatcatttgccttctcatatttccctcgtcttgaccatctggtgcctgttatgcagtttaacattctgcagcaataaaagtgttttattataaagtattaattttaatgttctatacttagtgggaaccactggtctcaaaatttgaagctattctttaagaggagaacattcgcaaaactcaagcatacttggtttttctctgtagtacttttgaatgctttatcttccttacagaataacttgtcttccttatgcttcaagctccaaaagggtaaggaagaagtcttaatcatttttgtattccttgcacaggacctagcaaataattggtactcaatgtttgctggatgaatgaactaaattcccatacggccactttatggaaactaactgcctaatcgccactttcattataaacaaaggaaaatgaagataagactgcaacagaggccaggtgcagtggctcacgcctgtaatccccagcactttgggagcccgaggcgggcagatcacttgaggtcaggagttttgagaccagcctggcccaacacggtgaaacctcatctctactaaaaatgcaaaaattagctgggtgtggtggcatgtgcgtgtaatcccagctactcaggtggctgaggcaggagaatcgcccgaacctgggaggcagaggttgcagtgagtcgaaattgcaccattgcactccagcctgggtgacagagcaagactccatctcaaaaataaataaataaataaataaatttaaaaaaagactgtgacagaaagggtttagagaaatgtgctaaagagttacaattggcaaatttaaaattatatgttaaactataacctcatttgtatcatattcatttattctcaatacctgggacatttaaggcattcaataatgaattaaagctgtgccttattttggtctgcattaaaggagtggtctaaattttacaagatatattttgcatcagaaaatcaaacttcagcagtttaacatgctggcatccatcaccaaggcatgaagcaacacatttgctaatgattcctaatcactacagtgctacatcatttacttaataaatactgattcagtacttatatatacagatagtctgatggatgagtaaccacagtgatgttgttcaggacatgatgtaaagttgaaaggtgcatattgctatgttttaaaggctgcctttacagtagaagcagcaaagtgtgcttaatggactgctgtcctctgatgaccaagcaaatgcaacaaatgaaatatgcacaaggctgtccttggacagtacttgtttgctttgctcacaaaggagaaaaggaaagaaacaattgaaaatatgtatatggtgaaagtatgtgagtccgagcagaaataacaaaggcaaaaggatgaggagagatggagtaagtctagagaagaaaataaatggatgagatagagagctgtctaagcaaaaaaggtgtcagacctctgatcttataaataagacacttcaaaagtagcaaaaacagttttaagaaggtgactaatagataaggtgtgttgtgtttagctatttcctgttaggtattagtaatgggttcccaatgacctgagccaaaaatgaatcaagttaaatgaaaactgacatctgatatgagcatatattattagtctattcaagcacagttttgaagttagcaaacatctaaatcctcacatctctacaaggtaggtcaaagtatgattcttctcagttgtacaagataaatggctgtataacatgtctagtcatagttaagacaacaattggggacagtgctttggtctgattgccatgccagcatcatattttatctgtgaagggtggcttggttgtggaaaactataaaaactggatgcaaaagtaaaatgcaaccttgtttggtgacgtccagttcctctggaattaggaaaaaccacttgtgtttaagaacaggagtcaaatcaatttttaaggaaacagattctaatacaaaaaccttttctgttgggtctagtaggtctggacaaaacatctccctcttttccttttatattttcctcatcctcttcttgcagcgctggttgaaaacaggggaggaccccatgaggctgtcagtggagtgggaaccatagctgctatctgagtcatcagggctctgaggaatcccagcttcactcatgcctgacataggctcctcgaagacatcactgcccagcacaccatgcccagagacattgccttcttcactttcttgaggctccattttcacatgggccagattccaaagaggagaagcatttacctctgcacttgaagcctgtggtgaagcttcaacctccaggttagatgggaagcgttcgctctgagccccaagcactcccataggcagtgactggtctccagaagcaaggtcagcctccagctcctcactgacaggaaaagtgatgtcgctcacaggttcctccttgatcttcacaggtttagcgtcctctgtggccttctcaggattgacaatcctttcatattcttcagagagttgcttactaatctgtagcatgtaactgtgatagtccttgatgcggtgctgccagaacttctggagggagagcacactgccaatacccacttcatggaatacctgctccatcacatcaggaaaaggagtctgtcccagccgggcctcccggtccacagcaaaacgcagcaacttggtaaacttaaggcaatactcatgtgccacatcagttagggtctccaggacactctcattagcacagtcaaagcccgcgtgggccaggattgtggccactgcctggtagaggagctgccgacaggagtgccagctgagttcagtcacaggttcccctttcccacgataaaagtcactctctgggtcactgtgccggatctggaatggtgcattgggattcttacaatctaaaggcaggaggtcatcagggagaggaggtgacccagggcacgagggaagaggttcactctcttcagtttttacaccttctgtctgctgctgattctgggcctgagctgtggcaataaggttgcgaagacgtcggttgtgctgaatcaactgaatcgtatggatggtgagactacatggctctgaggggatgtccagcatagtggggggcttcggcttgttggctgagggttggtgcaggggtgggtcatggacttccaccagacggaactcccgtgggagcaaatcgaaggaacttctgttggtctggcttgatgatattggtatctctccccagtatctttgcagattcattgtccatatgtctcttcaagttcaacaaacatttatcaaatgccaggcattctgtgtcggtcaaagactgataatgtgagatccttgcctttaccgaaaggagcacgaagaacaggcacggagcccaaggaatgcccaagtccctccaggggtttcctcggtcacggtccgccggcgcaggcgccaatcacagggtcctgaggtcgcctgacgttcagggcagccggaagacggggaggtctggacctgaaccgagacaaggaggtaccacactattcactgctgcgtcgcagagcgggctgggcggctgtctggacctcgagaggcctgaggcaaggatcgcgtcag

SEQ ID NO: 77741 - DNA, 1735 bp, Homo sapiens; identical to SEQ ID NO: 60332

SEQ ID NO: 77742 - DNA, 2547 bp, Homo sapiens; identical to SEQ ID NO: 60333

SEQ ID NO: 77743 - DNA, 1566 bp, Homo sapiens
ttttttttttttgagaaaagccggcataaagcacttttattgcaataataaaacttgagactcataaatggtgctgggggaagggtgcagcaacgatttctcaccaaatcactacacaggacagcaaaggggtgagaaggggctgagggaggaaaagccaggaaactgagatcagcagagggagccaagcatcaaaaaacaggagatgctgaagctgcgatgaccagcatcattttcttaagagaacattcaaggatttgtcatgatggctgggctttcactgggtgttaagtctacaaacagcaccttcaattgaaactgtcaattaaagttcttaagatttaggaagtggtggagcttggaaagttatgagattacaaaattcctgaaagtcccttagaaaaaccccaggatgaaaaaaaaaaaaggccacaaagaaggcttcagaggtccctgctggcccagggacagatacctgtagtgtccagcattgcagtgaacatgatctactttcaaaggcagagggtttaaggggagggtgggtgggaatggtggaggcaaaggctctccccatccccacctcagttttaggtagggcttttaatttaacccaaagacatctctcaacttggagagtaattcagtcctcaacagcgcctcaaatctgctatggctttgcagcgcagcagcaagaatgtttaatatataatagataaaaatttcatccaaaaaattaaaataaaatattcttgcaaaccccccccccaacaccaattcctattctaatgttaacctaccacttgtgctgttaatacttgaccatgtacttaattggaaacctatatccaaaagactgaaactgaatcttcaccccaaaatgaaaacaaaataaaatgagtaacttgaggtttatggcatatagtttaggtaaacacacatacgaggagaaaggggaagaggaaacagaggtgtcggaagcaaagctgagtgacagaacacattcagtcagggcagatgtctatacaaagtggagtggaacatcaggaaaagctccatatggactcatgtgcacatgtctggaggcaccagatccctccatggcagatccaagaacagggagctaagggaggaggccattcctgtcattccagttttagaagctccacatcgaagacgagagtggcatgtggtgggatgatgcctgggtgcccagtggcaccataggcataatctggagatatagtcagtttggctctctgacccacactcatctgggcaaccccttcttcccagcctcggatcacctcctgcttgcctagcataaacttaaagggcttgtttctgtcccgggaggaatcaaatttctttccatcttcaagcatcccggtgtagtgcaccacgcaggtctggccgcgcttggggaaggtgcgcccgtctcctggggagatggtttccacctgcactcccatggcggcggcggacgctgagcgggcgggcggcgcgacgggcggcgtggaccaacagcgacctggcggcggttccacggctctgcctagtacctcggcg

SEQ ID NO: 77744 - DNA, 432 bp, Homo sapiens; identical to SEQ ID NO: 60335

SEQ ID NO: 77745 - DNA, 437 bp, Homo sapiens; identical to SEQ ID NO: 60336

SEQ ID NO: 77746 - DNA, 726 bp, Homo sapiens; identical to SEQ ID NO: 60337

SEQ ID NO: 77747 - DNA, 363 bp, Homo sapiens; identical to SEQ ID NO: 60338

SEQ ID NO: 77748 - DNA, 1669 bp, Homo sapiens; identical to SEQ ID NO: 60339

SEQ ID NO: 77749 - DNA, 1520 bp, Homo sapiens; identical to SEQ ID NO: 60340

SEQ ID NO: 77750 - DNA, 2691 bp, Homo sapiens; identical to SEQ ID NO: 60341

SEQ ID NO: 77751 - DNA, 1561 bp, Homo sapiens; identical to SEQ ID NO: 60342
  misc_feature (1)...(1561): n = a,t,c or g

SEQ ID NO: 77752 - DNA, 2515 bp, Homo sapiens
ttttttttttttggcattcttgacattttaattagagcagaaataaactactaaatattttatttctaagcaaaacagagctccagcataaatcctgtttgtctgagaaattcacaatacattttagaaatccaatggatacattcaaaatgttatctaataaataacaaggtcaggtctactccaaatctaagaatctgatttaaacataaggggccaaaaaactaccagggcttttttttttttggtggttataaacaatacttgatatttaagcaacacagtcacactgctttaaacttagttgcagagatctacaatttattattattttcagtgttagagctagagggtaattttttcaaagatggcactcaactccacttatttacctgtcaacaaatacagaactgaactgttagccataagcactttacaaacagactcaggaaactatgcagtagacaatgacatagcttaaccagactctgaaaaagagatacatattttgattcacacttgtacaaagagaacagtcatgtctgcatgacttaaggttccctaaacacaactgttttatgttttagacccctggagtgtgccagtttaccacatcagggaggaatcaagggatgtgtgtgctccttctaaagaaccaagggcaagtggggtgggggtggctacagggaacgctctgggcaaaagagctgcctcaggtttttgtgggaatgaaaattacttgttgcagttaagcaattcctagggtttatctagtttgaggttcaaaacaaaggagagaattatttccttcctcgagctcttcccaaagcaatatgcacatctcataatcaaatctcaagtagtacaaagagataatcaattatctaaaaatttaatttacatacatgttggcctggattaaaaacaaaaaagttagtttccataaatagcagactttagtgctgtatgacccaatgactaaaaataaaaccaggaagtttttactaaaagctcaaggataaaaatgaacactggctggctattgaactccacatctgacaataattactgacagtttaaaaatgtatatccaaaatataaccctcaagaggaccaggtttatttgtccgacagagcagctcaaaatgttgaggcatcatttgtttggattatgatgggttattctcgaagtttatttatttagaaggggaaagtgatttatagaaaaatacttggaaataatttgcccaatgaagttgcagattcctaacaataatccacatcttagatttttaagtgtgtagtttcatagtttaaacaaattctgtcaaagaactattcaatatactttatcactttaactttccatgaaaaccaaataaaaatcacatccgaatgatttacttctatgcttttatctgattgtatacatatgatgtactacgcatccaagtacaagaggcagttatcttctctgagaggtgcaagagttgttctttcatgaatgccctctaatagtgaaaccagcaatttttatatatgcattcatgtgcatatacatgtacttcaaaaagcaaagcgtcatctcttcgtccattgttaacttaatggtaagaatgggggccaccaggcattggtggagcaccagaaggtcctgaaggcacttggaaaggattactgggagtaggatagagtcctggtgtgggatacgatcctgtaggggcaggatatggtgctggtggtccccaggctcctggtggaacggtgccccatggaacaggtggtgctgccccaggggcttggggaggaggaggagcgggatatgggcctggagatggatatggcatattaggggtaggatactgccctcccattcctggcgcccaaggtccagaagacatggatccccatggacctaaaggaccagctgcagctggatctgtgggtgcaccatatggtctgggtagctctggaaagggcatatttggtgtaggatatggccctgtggggccagggcccggcacagttggggctggataaggaccaccaggtgggggacatgatggtccggaaggaggaaagggtgctgggggtcctggaggtggtccggtgggaggcacggagggatacattcctgttggtgctggtccaaaaggcacagtggagggtgttgcacttggtgggagtccagatggcactgaagatggagcactcggattattccaagggttggagcctggccagccttgaggaggttggccaggttttgtattgctcacagcagaggttttggcaggggagtgttcaggtagtgcatctgccaacgaaaattcatcagacattttcccggcaatatccgagaccgcagtagggtctagaagcggcgatgggtccgagggactgggccctgaagacgcgggcgcagcctgactgacggcagctagagcagcggcggcaacagcaccagcagcgcgcggctcctcctgacgcgatagtcgacccggaaattcggaac

SEQ ID NO: 77753 - DNA, 1248 bp, Homo sapiens; identical to SEQ ID NO: 60344

SEQ ID NO: 77754 - DNA, 1863 bp, Homo sapiens
aaatgagtcttgtctgaattgtgcggaagacatgaggcactgagagaggtgggggccgagtggcctcctcccacctgctccccaaacatctgctctgggctgcagcaagctggcaatacagattggtccctgactatggctccccagagcctgccttcatctaggatggctcctctgggcatgctgcttgggctgctgatggccgcctgcttcaccttctgcctcagtcatcagaacctgaaggagtttgccctgaccaacccagagaagagcagcaccaaagaaacggagagaaaagaaaccaaagccgaggaggagctggatgccgaagtcctggaggtgttccacccgacgcatgagtggcaggcccttcagccagggcaggctgtccctgcaggatcccacgtacggctgaatcttcagactggggaaagagaggcaaaactccaatatgaggacaagttccgaaataatttgaaaggcaaaaggctggatatcaacaccaacacctacacatctcaggatctcaagagtgcactggcaaaattcaaggagggggcagagatggagagttcaaaggaagacaaggcaaggcaggctgaggtaaagcggctcttccgccccattgaggaactgaagaaagactttgatgagctgaatgttgtcattgagactgacatgcagatcatggtacggctgatcaacaagttcaatagttccagctccagtttggaagagaagattgctgcgctctttgatcttgaatattatgtccatcagatggacaatgcgcaggacctgctttcctttggtggtcttcaagtggtgatcaatgggctgaacagcacagagcccctcgtgaaggagtatgctgcgtttgtgctgggcgctgccttttccagcaaccccaaggtccaggtggaggccatcgaagggggagccctgcagaagctgctggtcatcctggccacggagcagccgctcactgcaaagaagaaggtcctgtttgcactgtgctccctgctgcgccacttcccctatgcccagcggcagttcctgaagctcggggggctgcaggtcctgaggaccctggtgcaggagaagggcacggaggtgctcgccgtgcgcgtggtcacactgctctacgacctggtcacggagaagatgttcgccgaggaggaggctgagctgacccaggagatgtccccagagaagctgcagcagtatcgccaggtacacctcctgccaggcctgtgggaacagggctggtgcgagatcacggtccacctcctggcgctgcccgagcatgatgcccgtgagaaggtgctgcagacactgggcgtcctcctgaccacctgccgggaccgctaccgtcaggacccccagctcggcaggacactggccagcctgcaggctgagtaccaggtgctggccagcctggagctgcaggatggtgaggacgagggctacttccaggagctgctgggctctgtcaacagcttgctgaaggagctgagatgaggccccacaccaggactggactgggatgccgctagtgaggctgaggggtgccagcgtgggtgggcttctcaggcaggaggacatcttggcagtgctggcttggccattaaatggaaacctgaaggccatcctctttctgctgtgtgtctgtgtagactgggcacagccctgtggccggggggtcaggtgagtggttgggtgatgggctctgctgacgtgcagggctcagcccagggcatccaggaacaggctccagggcaggaacctgggcccaggagttgcaagtctctgcttcttaccaagcagcagctctgtaccttgggaagtcgcttaattgctctg

SEQ ID NO: 77755 - DNA, 1471 bp, Homo sapiens; identical to SEQ ID NO: 60346

SEQ ID NO: 77756 - DNA, 1836 bp, Homo sapiens
  misc_feature (1)...(1836): n = a,t,c or g
ttttttttttttattgcacatcactcctttcattatactcgatactggaaaaaggatttagtacagttatgctcagatgaacactggacccatgtggcagggtccaagcaactagaacatgattcagaaatcagtggaaagataccacttggacaggaccaagagggcatttcactgccgatgaaacacaggcaggaagggattcttaataccccccccagggnagcaactcctgccccctcaagaggtcaagcgcagcctgatcctatattggtatgaggaatggcttattttctgatgacccacatgtgggactatttcaaccgccacaagaaaccccagaagggttattgttttgtattatatatactatacttttttaataaaagtaaattaacacataacgaaattcaggattgatcccaacctagagccagatcctctggggtcagggaggaaacagttgtcacatcaccacgcaggttacattcgtcttccactggaatgactagagcccccaggcagtaggcagtgacctgactgcagaagagcagaggacagactccgctcatggggacagacaggctctgttgcttctcctcactggtcatggcttagcatggttcctccccaaagtccttagtaaacaaagcactcgcaaaaacccaagtcactacttttaaactctgttggataaggggagcttttccatagcttagactgagaacctgtgctctagaactgctattctgactagattgtatgaagggagtgggtgcaggcgacaaaatggctaaaatgaaaatgggagccactggtccccgtctgcagctacaactcaagatgtctacagatgtggtcagtgtgacatgtgcaggtgggaggggcagagggacaagacgggcagggagggtgctcctggggacagtatcctccccgccggccttcacttcttggccttgccctgggcagccacagcttccatggctttgcgcaccgtctcttcatcccccagaaactgcatgggcttgataggcttcaagttcttgtccaattcatagacaatgggaataccagtcggcaggttcagctccatgatagcctcttcagagagaccctccagatgcttgacaatgccccggaggctgttgccatgggctgcaatcagtacacgtttcccctccttgatctggggaactatttcttcattccagaagggcagagctctggcaatagtatccttcagactctcacaggagggtagctgatcttctgtgaggtctgcatacctgcgatccttactgatgttgctgtagaaaggatggtcgggctccatcggaggtggtgggacatcataggagcgcctccagatcttcacctgggcctcaccatgctttgcagcagtttctgctttattgagaccggttagacccccatagtgccgctcattgaggcgccaagtcctcaccactggcagccacatctgatcaatggcatctagcactgtccagagggtccggatcgctctcttctgcactgaggtgaagcagatgtcaaactcatagccagcatctcgtagcgcctgcccgccgcgcttcgcctcctcgtggcccgccgggctcaggtcggcgtcgtaccagccgctgaagcggttctccaggttccatgcgctctcgccgtgccggatcagcaccagtttgtaggcggccatggcggcgggctggggatgcggcaccgactgggattagcagattccggagtagcagcccgccccgtcggccgcgcctgcgcgctcgcaccgctcagtccggctcccgcgcaagttctcgcccaaat

SEQ ID NO: 77757 - DNA, 3789 bp, Homo sapiens; identical to SEQ ID NO: 60348

SEQ ID NO: 77758 - DNA, 1944 bp, Homo sapiens
  misc_feature (1)...(1944): n = a,t,c or g
ttttttttttttcagtttggaaaaaatgttttattcctctttgcacagagcagtttatgaaggtggttttctcctgactccatgcatcttttacacaaagatgcccccttaaatatgccccgttatctgccccacctcagtgctggagaactggcagttagtaagtggggcagaatgcttaagtctcaggaaggtttttaaaggcatttttgtggggaggaagttctgggtcaaggggaaagattagacccaagagtgagtattccattctccatcttcctggggaaatccaaaccccaaaggttttatgaagaaaagcacctctctcagcgacctagagacagggagagcacagacctactgcttgggtgtaaggctgaggcagagagagggtaggttgcagcgactgcagacccacggcagagagtaaatgcatgtcggggagctgaggggacagagacagcctagaggcccaagtcataagttccactccttccccagttctgagtagaaacttttcttcccaagactagaatggagttttagttttaggaactggctttgctccaggacacagagaagacaaaccaggcaacgatcccacaggtagtaagggtggacagttaaggtagctaactaagagatggacactcgccactgcagttttgaagctatatgccagatcagggtacagaatgcattttatatgccctgttcaatacaatttaaatcgctgtttcttccatgttgtcccttccctatgaactattcccaaagcctcttccaaggcagaggacagggcagtaagaaggaatggaagaaaacactgaggtcactaagtggggttagggcttagattggataaatccctacccatccccgcccccactcgttctatagaaaagaattctctttctctctccccttgctgggctgttgggatgagggccaggtagaggcaaagggaggaaaacactcagcacattctttctcctactttaatctgaagtgtagctacagcaaagggcacagaatttacaaaaatgtcagggcaagggagcatgtgagcataatccagtctagaaagaaagagggtgcttcccctgccctattatctaaatatgctgggagctttactcccagaactgcaagaagaatgaaaaagaataggaagggtgtaggggaggttgagggggcaaccacaaacagaatggagatttaaggatccctgtgatccccgagatgaccctgagagcatcgattggggaactagatgaaaattcacagcagacatgcaaattttttgaagaggatgaagagccaggaacagtgaggtcttcaccgaaggagtgaccacttgatctgttctttggctgactgcagcacctgagacacggtctgctccgtaagggggacatcttcaccccttaatgccacccggtgtaccacctgctggggatcactctctaggatcacccctccatctacaatttcatccacagccaagaacagcccctccatgttctccagcagtgctcgcttttctacatttttcctcagcatctggctcaatgagtcgaagagacagttcagaacagccataagcatcagctcattttcataggagctgccaatcacatagaaatagagatctatactgcttttgtataccactgtcaggccttccaagagggcaatttcactgtcagtccgatgggtcttgttgaaaatgttcttctcaaaggccttttgctccttgacactggggtaggtgtcgtcatagtacttggcaaaaagtcgatctccatcattgtccagaatcaggatggctttgacagtatacagggaaggttccaaaatcagcgcctccatcttgccccgcagcggacgcgtgggtcgncgcngtttttcangngcatcagcgaggctatcattttaccccgt

SEQ ID NO: 77759 - DNA, 3589 bp, Homo sapiens; identical to SEQ ID NO: 60350

SEQ ID NO: 77760 - DNA, 676 bp, Homo sapiens; identical to SEQ ID NO: 60351

SEQ ID NO: 77761 - DNA, 5381 bp, Homo sapiens; identical to SEQ ID NO: 60352

SEQ ID NO: 77762 - DNA, 1308 bp, Homo sapiens; identical to SEQ ID NO: 60353

SEQ ID NO: 77763 - DNA, 1139 bp, Homo sapiens; identical to SEQ ID NO: 59780

SEQ ID NO: 77764 - DNA, 2773 bp, Homo sapiens; identical to SEQ ID NO: 60355

SEQ ID NO: 77765 - DNA, 765 bp, Homo sapiens; identical to SEQ ID NO: 60358

SEQ ID NO: 77766 - DNA, 1544 bp, Homo sapiens
  misc_feature (1)...(1544): n = a,t,c or g
cgctgcaggaattcggcacgagggcacgcgggactgctacgaggtgctgggcgtgagccgctcggcgggcaaggcggagatcgcgcgggcctaccgccagctggcccggcgctaccaccctgaccgctaccggccccagcccggagacgagggccccgggcggacgccgcagagcgccgaggaggctttcctgctggtggcaaccgcctacgagacactcaagtcctcctgcatatgcccaagaggattgggagtggaatggacaccagcagaagcaccacagttattcctgtagagattagaaacaaggagcttattgccctgcttgtcaaggctcaggacagacaggaggaagaaacaagtataaaggttttggttttggaaagaagttggaatctccagaccctgggaccttaagatccacaaaattgctgaaagaaaaagtnctcccttattgaaaggatgaagaaacacgaaaagattatgattacatgctggatcatccagaagagtactacagccattactaccactactatagcaggcgcttggcccctaaggtggatgttagagtagtgattttggtcagcgtgtgtgctatttcggtgtttcagtttttcagctggtggaatagctacaataaggcaatcagctacctagccacagtgcccaagtaccgtatccaagctacagagattgccaagcagcagggactgctcaaaaaagccaaagaaaaaggcaaaaacaaaaagtccaaagaagaaattcgtgacgaggaggagaacatcataaagaacattataaaaagtaaaatagatataaaggggggctatcagaaaccccaaatctgtgatcttctcctgtttcaaattatcttagctccttttcacctatgctcatatatagtttggtattgtcggtggatctataattttaacatcaaaggcaaagaatatggagaggaagagagattatacattatacgtaaatctatgaagatgtcaaagtctcaatttgatagtctagaagatcatcagaaagaaacttttcttaaacgagagctctggatcaaggagaattatgaggtctacaagcaagaacaagaggaagaattaaagaaaaagttggcaaatgaccccagatggaagagatacaggagatggatgaagaatgaagggcctgggcggttaacatttgtggatgactgaagattgatggaatgctactatgccaaaccttaattgtgatattattttcataactgaattattttagaaatgtatcaattgactgctgctcagcagtaactaaaattcctcaagtatttgattaaacagaataatgtcaaaatttaaaccttcccttaaaactttatacataagacatttatgattgttcaatttttataatctatttgtggattttgttaaaagatttcacatgaagatttattagttgccatttaaaatttttatatgtttagttaaaagatttgacatgaaaatctattagataccatttaaaaattttaaaaaaaaaaaaaa

SEQ ID NO: 77767 - DNA, 831 bp, Homo sapiens; identical to SEQ ID NO: 63123

SEQ ID NO: 77768 - DNA, 469 bp, Homo sapiens; identical to SEQ ID NO: 63124

SEQ ID NO: 77769 - DNA, 1080 bp, Homo sapiens; identical to SEQ ID NO: 63125

SEQ ID NO: 77770 - DNA, 2702 bp, Homo sapiens
aatcgatattcatgtgcgtgtggcggaattctatccagagtcaggtgtcactactcaatacacttggacccagcttccccaaaggttcaagaactcccccaccatctttggggaggcgttggctcgagacctccagaagtttcccaccagagacctaggctgcgtgttgctccagtacgttgatgaccttttgctgggacaccccacggcagtcgggtgcgccaagggaacagatgctctactccggcacctggaggactgtgggtataaggtgtccaagaaaaaaagctcagatctgccgatagcagggcacttcaactcagaaagctgaactcaatgctttcatttgggccttagaactcagtgagggtgagactgtcaacacttacactgattctcggtatgtctttttaacccttcaagtgcatggagtgtgatagaaagaaaagggcctattgaattctggggggaaagacagaaaatatccacaagaaatcttgcaatgattaaaagcagtatggagaccccacaaggtggcagttatgcattgcagaggacaccagcgagcttccaccttggtgggtttagggaattcccgtgctgactcagaggctcgaaaagcaccatctgccccattccgggcatcagtcacagcccccctgctccctcaagcacctgatcttgtacctacttattctaaagaagaaaatgactttctccaggcaaagggaggacaagtgatggaggaaggatgaattcggttaccggatgggagagtagctgtgccacagctgctaggagctgcaattgtactggctgtgcatgaaaccacccatcgaggtcaggaattacttgaaaagttgttaggctggtatttctacatctcacatttgtcaggccttgccaaaatggtgacgcagtggtgtgttacctgccgacagcataatgcgaggcaaggtccagccgttccacccggcatacaagcttatggagcagccccctttgaagatctccaggtggacttcacagagatgtcaaagtgtagaggtgatcgagtgtggatcaagaactggaacgtagcctctttgtgtccactgtggaaaggaccccagactgtcgttctgagcactcccaccgctgtgaaggtagaaggaatcccagcctggatccaccacagccatgtaaaacctgcagcgcctgaaacctgggaggcaagaccaagcccagacaacccctgcagagtgaccctgaagaagacgacaagccctgctccagtcacacccggaagctgactggtccacgcacggccgaagcctgaggaagctcatcatgagattcatttttcttaaattttggacttatacagtaagggcttcaactgatcttactcaaactggggactgttcccagtgtattcatcaggtcaccgaagttaggacagcaaattaaaacaatctttctgttctatagttattatgaatgtatggaaacaataagagaaacttgtttgtataacgccactcagtacaaggtatgtagcccaagaaatgaccgacctgatgtgtgttataacccatctgagccccctgcaaccaccatttttgaaacaagattaagaactagccttttcctaggtgacacaagtaaaataataactagaacagaagaaaaaggaatccccaaacaaataattttaagatttgatgcttgtgcagccattaatagtaacaaactaggaacagaatgtggttctcttaactgggaaaggagctacagcgtagaaaataaatatgtttgtcatgagtcaggggtttgtaaaaattgtgcctattggccatgtgttatttgggctacttaaaaaaagaacaaaaaggaaccggtttatcttcagaagggggaagccatcccctcctgtgctgccagtcactgtaacccactagaactaataattaccaatcccctagatccccattggaaaaagggagaatgtgtaaccctggggaccaaagggacagggttaaacccccaagttgccattttagttcaaggggaggtcccacagcaactctcccaaaccagtgtttcaaaccttttatgaggagttaaatctgccagcaccagaacttctgaaaaagataaaaaatttgtttctccaattagcagaaaatgtagctcattcccttaatgttacttcttgttatatatgcgggggaaccactatcagagaccgatggccttgggaagcctgagagttggtgcccactgatccagctcctgatataatgggggcttgtccaggatctcatcaggactggatggctctcgctggactatactggatatgtgggcagagagcctacattcagttacctaatgaatgggcagacagttgtgttattggcactattaagccatcctttttcttattaccgataaaaactactggtactatctgtaaattccagacattgtatgagaaagcactgtaaaactttttgttctgttagctgatatatgtagcctccagtcacattcctcatgcttacttgatctatcatgaccctttcacgtggaccccttagagttgtaagcccttaaaagggctaggaatttctttttgggggagcttggcatcttaagacatgagtctgacaatgctaccggccaaataaaaacatataacttctttaaaaaaaaaacaa

SEQ ID NO: 77771 - DNA, 628 bp, Homo sapiens; identical to SEQ ID NO: 63127

SEQ ID NO: 77772 - DNA, 375 bp, Homo sapiens; identical to SEQ ID NO: 63128

SEQ ID NO: 77773 - DNA, 1293 bp, Homo sapiens; identical to SEQ ID NO: 63129

SEQ ID NO: 77774 - DNA, 383 bp, Homo sapiens; identical to SEQ ID NO: 63130

SEQ ID NO: 77775 - DNA, 1002 bp, Homo sapiens; identical to SEQ ID NO: 63131

SEQ ID NO: 77776 - DNA, 3395 bp, Homo sapiens; identical to SEQ ID NO: 63132

SEQ ID NO: 77777 - DNA, 1056 bp, Homo sapiens; identical to SEQ ID NO: 63133

SEQ ID NO: 77778 - DNA, 407 bp, Homo sapiens; identical to SEQ ID NO: 63134

SEQ ID NO: 77779 - DNA, 1869 bp, Homo sapiens; identical to SEQ ID NO: 63135

SEQ ID NO: 77780 - DNA, 1245 bp, Homo sapiens
cctgcctctggtcggttcctggcgctctgcgtttcgtgaccttgtccagtagaaggctatttaattttcacaactgcttgaattttgacatacaagatgaagcaagatgcctcaagaaatgctgcctacactgtggattgtgaagattatgtgcatgtggtagaatttaatccctttgagaatggggattcaggaaacctaattgcatatggtggcaataattatgtggtcattggcacgtgtacgtttcaggaagaagaagcagacgttgaaggcattcagtataaaacacttcgaacatttcaccatggagtcagggttgatggcatagcttggagcccagagactagacttgattcattgcctccagtaatcaaattttgtacttcagctgctgatatgaaaattagattatttacttcagatcttcaggataaaaatgaatataaggttttagagggccataccgatttcattaatggtttggtgtttgatcccaaagaaggccaagaaattgcaagtgtgagtgacgatcacacctgcaggatttggaacttggaaggagtgcaaacagctcattttgttcttcattctcctggcatgagtgtgtgctggcatcctgaggagacttttaagctaatggttgcagagaagaatggaacaatccggttttatgatcttttggcccaacaggctattttatctcttgaatcagaacaagtgccattaatgtcagcacactggtgcttaaaaaacaccttcaaagttggagccgttgcaggaaatgattggttaatttgggatattactcggtccagttatcctcaaaataagagacctgttcacatggatcgagcctgcttattcaggtggtccacaattagtgaaaatctgtttgcaaccactggttatcctggcaaaatggcaagccagtttcaaattcatcatttaggacaccctcagcccatcctcatgggttctgtagccgttggatctggactgtcctggcatcgaactctccctctgtgtgtaattggaggagaccacaagctgttgttttgggtgactgaagtataaagtgttttctgtaccttacattcacaaactttgtatttttagtacatattttgaagaatttctatagtacatattttgaagaatttttatatcaaatataccgtatactttagaaaatgtctcagttgcttttattaaataaaatgttgatggtttgaaaaattaatt

SEQ ID NO: 77781 - DNA, 384 bp, Homo sapiens; identical to SEQ ID NO: 63137

SEQ ID NO: 77782 - DNA, 359 bp, Homo sapiens; identical to SEQ ID NO: 63138

SEQ ID NO: 77783 - DNA, 368 bp, Homo sapiens
gcaaatgtttaaaacttaagcacaaatgagtaggagaaaggtacaactacagaaaaccaccaaaacacaatgccaatcaagaaaagagaaaggagcaaaaaatatagaaaagaaccaaaaacaattgactatatgacagcatcaaaatgttatatattaataaccacctagaatataaatgaattaaactcttcacttaatagatatagactcactgaatgaattaaaaaaatgacttaactatttgctgtctacaagaaatgtactttacctgtaaagacacatatagaatgaaagtaaagggaatggaaaaagtctactcaaatggaaactaaaaggaagccagagtagctgtgcttacatcagat

SEQ ID NO: 77784 - DNA, 820 bp, Homo sapiens; identical to SEQ ID NO: 63140

SEQ ID NO: 77785 - DNA, 2077 bp, Homo sapiens
tagacctgaacgcttccttgggttctgggaggatggttgaggtcttctgctgatctctgattttctgggtcttgtgtgcctcccagaacgtgtgggctgtgttggatctctacgggccagtccggtgttgtgtcaattgtcagttccacgagactggaggagtcagaaggcacccagcctccttcccccagttcagacaccggcagtgagggcgaggaggatgacgagggcgaggagcatggcctgggaggccagaatgaagtgggtattatacccaccaccctcgagttcctggagaaccatgggaagaatatccttttgtctaatgggaaccgtacggtcacacgggtggccagctacaatcagggcatcgttgtcatcaaccaacctctggtgccccagctgctggtgcaggtgcggatagatttcctaaaccgacagtggacatcttcccttgtcctgggagtcatcacctgcgcgcctgagaggctcaacttccctgcttctgcctgtgccctcaaacgggcagcctggctgctgcggggccgtggggtcttccacaacggtctcaagatctgcgagaagtttgggcccaatctggacacgtgccctgaaggcaccatcctgggactgcggctggacagctctggggggctgcatcttcatgttaatggggtggaccagggggtagctgtgccagatgtgccccagccctgccatgcgcttgtggacctctatgggcagtgtgagcaggtgacaatcgtgaaccctgagccaggggctgccagtgggaaaagtgctggaacccaaggggacatggagaaagcagacatggtggacggtatcaaagagagtgtgtgctggggtccaccacctgccgctagtcctctaaagagctgcgagtaccatgccctttgctctcgcttccaagaactcctgctgcttcctgaagattatttcatgcctccgccaaagcgaagcctgtgctactgtgagtcttgccggaagctgcgaggagacgaggcccacaggcgcagaggggagcctccccgggaatatgcactgccctttggctggtgcaggttcaacctcagagtgaatccccgcctggaggctgggacactaaccaagaagtggcacatggcatatcacgggagcaatgttgccgctgtacggagagtgctggaccgaggggagctgggagcaggtactgcctccatcctgagctgccgtcctttgaagggagaacctggggtagggttcgaggagcctggcaagaactgtgcacctcctcgggaggagcagccccctcctgtgctgctttccccctcccttcaatatgctggggcggagaccctggcctccaaagtgcaattccgggaccccaaatcccagcggacgcaccaggctcaggtggcgttccaggtgtgtgtgcgccctggctcctacaccccgggacccccttccgctgcccttggagaacctcctgaccctcacttcagtccagccgaacttgagtgggtcactaaggagaagggggccacactcctctgtgccctgctggtacgggtggaatgaggggtgagacaccactactacaagcacagtcgggccgcgggcccatggactctgagtggcgactgcctccacctcattcccgtgactcgtggcatgcgcaggtgctggagcttggcagccgcgcaggagcatgtaggcaggctctcagatgtaggtggcaagtggcacagctccatgtccggaggcccagcactccgtctgatgggaggagccgtgggagcccagctccaggccctggtacccctcttcatgcactgatttggggaacatgactcccttttactcccctaccccacatcacttaatttatttccgtttttgtttctggttactgtgaatcccagaggagtctctccctgtgcccacatgaagctgctttttccggggccaccgggcgggagtggggaagggtgggcgcacggaagatgggggcctctgtacagttgttactgactctgatttctaaggagccaataaacaccgtctcagaaaaaaaaaa

SEQ ID NO: 77786 - DNA, 2122 bp, Homo sapiens; identical to SEQ ID NO: 63142
  misc_feature (1)...(2122): n = a,t,c or g

SEQ ID NO: 77787 - DNA, 396 bp, Homo sapiens; identical to SEQ ID NO: 63143

SEQ ID NO: 77788 - DNA, 566 bp, Homo sapiens; identical to SEQ ID NO: 63144
  misc_feature (1)...(566): n = a,t,c or g

SEQ ID NO: 77789 - DNA, 392 bp, Homo sapiens
agaattaagtctcccacagccattggagtagcttttatggacagaagaaaccctttcccagccggtgtccgtcttcccagctccccgccatgtcgccaagtgaatccatcctgccgtccgtctccactttcaccagcccgtaccgcaagcgccgcctgcaggagcgctgaccctgcgccgagcccgaggccaggggaacccacaactacctcaacagcgtgtgggactccattcggtccacagggctggatggcctggggccgaggccaccccgaagcccccggcgaccccaccgtctgcgtcctattacccgaacactgcacgccgctgccctagggcgccctggagctggacccgctgccagaaggcccgcgctgctccggacgcgtggg

SEQ ID NO: 77790 - DNA, 646 bp, Homo sapiens; identical to SEQ ID NO: 63146

SEQ ID NO: 77791 - DNA, 930 bp, Homo sapiens
  misc_feature (1)...(930): n = a,t,c or g
ggcagccttcccttggtgtttaatcattgcagggatgcctctctgattatacacccacgtttcaagggtgtcagaccacgcagggacaactgccttggtccttcacccttagcagcaagtcccgcttttctggggaaggggcaagtaccccaaccccttctctccgtgtctctaccccttctctgcttttccggggacagggcaagtaccccaaccccttctctccgtgtctctactccttctctgcttttctggggacagggcaagtaccccaaccccttctctccttgtctctaccccttctctgcttttctggggcaggggcaagtacccctcaaccccttctccttcacccttagcggtaagtcccgcttttctagggggcaggggcaagtacccccccaaccccttctccttcacccttagtggcaagtcctgctttcctggggcaggggcaagtaccccttaaccccttctccttcacccttagcagcaagtcccacttttctagggggcaagaaaccccaaaccccttccctccgtgtctctactctctcttttctctgggcttgcttccttcactataggcaaccttccatcctccattcctccttcttctcccttattctgtgttctcaagaacttagaacctcttcaactcacacctgacctaaaacctaaatgccttatcttcttctgcaacaccgcttggccccaatacaaacttgacaatggctctaaatggccagaaaacggcatttcgatttctccatcctacaagacctaaataatttttgttgaaaaatgggcaaatggtctgaggtgccttacgtccaggcgtttttcacacttcattccctccctagtctctgttcccgattcctcccaaatcctccttctttccctcccgcctgccgtgnnncgggaatt

SEQ ID NO: 77792 - DNA, 215 bp, Homo sapiens
cggccgagtcgacgtttgctgagaatcatcatggaccattatgattctcagcaaaccaacgattacatgcagccagaagaggactgggaccgggacctgctcctggaccccggcatggttagaaccacgcatacacccgactttctccggcatggtgtaactcccacctccttaaggggtttccccttataaaaaacataaaaaaaagttgacgc

SEQ ID NO: 77793 - DNA, 375 bp, Homo sapiens; identical to SEQ ID NO: 63148

SEQ ID NO: 77794 - DNA, 845 bp, Homo sapiens; identical to SEQ ID NO: 63149

SEQ ID NO: 77795 - DNA, 394 bp, Homo sapiens; identical to SEQ ID NO: 63150

SEQ ID NO: 77796 - DNA, 396 bp, Homo sapiens; identical to SEQ ID NO: 63151

SEQ ID NO: 77797 - DNA, 335 bp, Homo sapiens; identical to SEQ ID NO: 63153

SEQ ID NO: 77798 - DNA, 363 bp, Homo sapiens; identical to SEQ ID NO: 63154

SEQ ID NO: 77799 - DNA, 353 bp, Homo sapiens; identical to SEQ ID NO: 63155

SEQ ID NO: 77800 - DNA, 761 bp, Homo sapiens; identical to SEQ ID NO: 63156

SEQ ID NO: 77801 - DNA, 884 bp, Homo sapiens
gcggaatagtgggttttgctgcaaccggtttattttccttctgttttcacccattctggcacaatctggcgccatcgtccttcttgtgaggccaagcctgaaaatgcgaagcagagaggcaggaccaaaattgaggcgaatccaggaacctgccaatgggtctccgggtgcggtctctgaaactggaggatatcgggaggaaaggctctccgatgcggagataatggggaagctcttggcatggttggctgtaggtatgtgataccggaggagcaggagtcaaataggatacgccgacttttaattcaaggaacccttttctgaaacactttgccacaatgaaggaaataagattacagccgaagatacatattaaggaattgtactctcagagatgttgagaaaagatacatgggtcttggaagataattactcaaaatatgcagggaaggaataaaattgaagggtgtttttcttaaagaacatcatttgtcatatttatttgatcaagaagttgaagatttatataataaggatctagtttgaagcactaagaagaataagacatcagtttgaaaagaggctctatcagaacaacacgaattctgctaaaattgaagcaagaacaaacatcaaatatatgttgacacttgggtggaagaatggtgaactaattgatgctttatgaaaagttgatagggacagtgctcccaaagaaatcagtttacaaatggataactcgttttaagaaggcataaggtaatgttgaagaagaagcccacagtggcagatcatccacatcagtttgtgagaaaaaagttagttcatggcgtaattgaagaaaaccaacaattaacagcagaaacaacagccaacaccataga

SEQ ID NO: 77802 - DNA, 583 bp, Homo sapiens
ggcacgagcgagctgttgtgcatccagaggtggaattggggcccggcattccctcctcgtcccgggctggcccttgcccccaccctgcaactcctggttgagatgggctcagccaagagcgtcccagtcacaccagcgcggcctccgccgcacaacaagcatctggctcgagtggcggacccccgttcacctagtgctggcatcctgcgcactcccatccaggtggagagctctccacagccaggcctaccagcaggggagcaactggagggtcttaaacatgcccaggactcagatccccgctctccattggggaagaactgagggcacgggtggcaagtgggtcagggatcagacctgggcagcccacagcctctcccgccctctgcctcccacctgacagctccagggcaagccgctgctctcagcctccctgcctgtcccttccttggtttggggtgagaagcagccctgccaacacataccacgtgccagtgacttccctatgcccctcgcccgctctgcactatacagcgctgcaggcaggcatcatttccacgtcgcaggcaagagcaccaaggct

SEQ ID NO: 77803 - DNA, 356 bp, Homo sapiens; identical to SEQ ID NO: 63158

SEQ ID NO: 77804 - DNA, 356 bp, Homo sapiens; identical to SEQ ID NO: 63159

SEQ ID NO: 77805 - DNA, 357 bp, Homo sapiens; identical to SEQ ID NO: 63160
  misc_feature (1)...(357): n = a,t,c or g

SEQ ID NO: 77806 - DNA, 478 bp, Homo sapiens; identical to SEQ ID NO: 63161
  misc_feature (1)...(478): n = a,t,c or g

SEQ ID NO: 77807 - DNA, 976 bp, Homo sapiens; identical to SEQ ID NO: 63162

SEQ ID NO: 77808 - DNA, 375 bp, Homo sapiens; identical to SEQ ID NO: 63163

SEQ ID NO: 77809 - DNA, 1320 bp, Homo sapiens
ccagtatggaacctcgggggtgacctgcgcctgggtccccgcccatagagctgcctctggaggttctgggaaatgggccgcagatgcatgaagttgcagaagccacctcgggtacattcccgtgcacagcctgcccgttgaaccagcggttactgagttcagccacggcccgctctccatcctcctccctccggaactgcaggaaatgtcagtcagggtcagcaggagaactcagagatcttcaggggactcactacccgctctggggctggactggatttagtgatgaaattcaagctgagagcctacagtggccaccatcaggcattgaaacgcctccacttctgggccctaagtggggggcagcaagcaccttgacatagacgttgcccacgaggtggtccccaaggttgtcgcacacattcatctcttcaatctccccatacttctcctgcagttctgtgaacacctcctgtggaagacggggaggaactcagctgagctcccacaagaaaccccatctgcccctaccaaccctcacctcgaagaagctatcatagtgctcctgcacctccacgtcactcacatgacctggggtgggggcgggcagggtggaatcagagtgtagcctactgggggctgttcaccttgcccccaggcctggtcccttactcacagtgtgatccgtctgcagtttgggctgtgttctgtggattccggtacaggttgagcagcactatggtctgcacagaatttaaaaggggcggggcctgagctcagagggcagggctgcatgaacagagagtgaggcatgaaggttgggggtggaaccttacaccccagcctaagcatcatgagtgcatcggcgatcctttgcccctaagaaaccagaaaagggatggaggggactggcaaggatgaacagcgggatggaagggactggcaaagatgaacagccgccgtgtgtagcctgtacgcatgggggcgcgaccaagttcccgggaaaacggcacgaagaccggtgggaggagcctgcagaaaggtccaatgagaaaaaaagccgggcggtggggagggactcaggaacccggaataggcgggacatggtgacgacggccccagaaggggaagggccagggagccgttaacccccgaggctccgtgccgggtctcacctggctgaatgtcggcttgttgtgaagccgggagcaccggtccccgtgccggcagaccccgatcttaaagtaaaaagagcagttaaccttgtccttctcagtcccgaatatcgaagctaaatattcagccatttttacccaagcc

SEQ ID NO: 77810 - DNA, 1101 bp, Homo sapiens
  misc_feature (1)...(1101): n = a,t,c or g
tttcgtggacagacagatagtgggacttctcagggcttggacaagccccaccccacgcttggggtggggtccaggactacagtgcccgcccagtttgcggacagtgaaaaaaaaaaagtaccgttccaaagcaggagcctaggcagccgagagggtgcccgaacctgagtctgagttgcggccacttcaggagctgagaggagcaggatggaactgcaggatccaaagatgaatggagccctcccttcggatgctgtgggctacaggcaagaacgtgagggcttcctgcccagtcgtggtcctgctcctgggagcaagccggtccagttcatggatttcgaggggaagacatcgtttggaatgtcagtgttcaacctcagcaacgccatcatgggcagcggcatcctggggctggcctatgccatggcccacacgggggtcatcttcttcctggccctgctgctgtgcattgcgcttctgtcgtcctactccatccacctcctgctgacctgtgctggtattgcaggcatccgagcctatgagcagctgggacagagggcattcgggcctgcggggaaggtagtggtggccacagtcatctgtctgcacaatgttggggccatgtccagttacctgttcatcatcaaatctgagctccccctggttatcggcaccttcctgtacatggaccccgagggggactggttcttgaagggaaacctcctcatcatcatcgtcagtgtgttaatcatcctgcccctcgccctcatgaaacacttgggctacctggggtacaccagtggtctctctctgacctgcatgctgtttttccttgtttcggtcatctacaagaagttccaacttgggctgtgctatagggccacaatgaaacagcaatgggagagtgaagctctcgtggggactccccagccaagggactcaacagcagctgtgaaggcccagatgtttcacagttgactcacaggtgttcttacacagtggcccattatggcttttgcttttgtctgccaccctggaggtgctggcccatctattacggagctttgccgggcctttcaagcgcaggatgcagggncgtgg

SEQ ID NO: 77811 - DNA, 1518 bp, Homo sapiens; identical to SEQ ID NO: 63165

SEQ ID NO: 77812 - DNA, 402 bp, Homo sapiens; identical to SEQ ID NO: 63166

SEQ ID NO: 77813 - DNA, 2012 bp, Homo sapiens; identical to SEQ ID NO: 63167

SEQ ID NO: 77814 - DNA, 380 bp, Homo sapiens; identical to SEQ ID NO: 63168

SEQ ID NO: 77815 - DNA, 1776 bp, Homo sapiens; identical to SEQ ID NO: 63170

SEQ ID NO: 77816 - DNA, 313 bp, Homo sapiens; identical to SEQ ID NO: 44751

SEQ ID NO: 77817 - DNA, 353 bp, Homo sapiens; identical to SEQ ID NO: 63172

SEQ ID NO: 77818 - DNA, 1578 bp, Homo sapiens; identical to SEQ ID NO: 63173

SEQ ID NO: 77819 - DNA, 879 bp, Homo sapiens; identical to SEQ ID NO: 63174

SEQ ID NO: 77820 - DNA, 1679 bp, Homo sapiens; identical to SEQ ID NO: 63175

SEQ ID NO: 77821 - DNA, 1797 bp, Homo sapiens; identical to SEQ ID NO: 63176
  misc_feature (1)...(1797): n = a,t,c or g

SEQ ID NO: 77822 - DNA, 800 bp, Homo sapiens; identical to SEQ ID NO: 63177

SEQ ID NO: 77823 - DNA, 1104 bp, Homo sapiens; identical to SEQ ID NO: 63178

SEQ ID NO: 77824 - DNA, 592 bp, Homo sapiens; identical to SEQ ID NO: 63180
  misc_feature (1)...(592): n = a,t,c or g

SEQ ID NO: 77825 - DNA, 2297 bp, Homo sapiens
cggggtaatgttggcttcatagaatgactcagaaagggttctgtttctcaactttttggaggagttcgagaaggattagtgttaattcatttctaaacgtttggtagaattcaccagcgaagtcatcagttcctgggcttttctttgttaggagagttttggttgctgattcaatcagaattgaatatcattactttttatagatctattcagatttattctttgttcttgagtcaactttgttggtttgtatgtttctaggaatttgtctgtttcatctaggttatccaattttttgacatatagctcttatacgaattctcttacaatcctttttattcctataaatcagtagtagtgtttttcatttctgattttagtaggtgagtattctttttccttaatctagataaagctttgtcaactttgttgatctcttcaaagaactaattttttgtttcattgattctattggttttctattctctatttcatttatttttgctctaatccttattatttccttcctctttatggcttcaaactcaattgaacataaagtattaagaaatttgacttttttctcaaatgtctaaaatgtaacaagaaatatgtctagagtcatcaaaaagcagcctgtttgtcagatttactgtttaatccatgtaaacagctttcatataattcatgatagaatattactatgtgctttggaagacactgaaggaaagacaaaaggtcattgggcagaaccaccctagattgactgttaaggccatcttctagtttgcaggacttgtggtagacagacagaataatatcctggacctcttgggtgtatacaggacaaactgaaataaactctcatttttagatcataatgtcatcatgaaacatatcaattcggtctatttctgaagaaaacaagcacaatgataaagtttgaatgtttgtctcctccaaatctcatgctgacatttgatccccaatgttggaggtggggcgcactgggaggtgttttggttacgggggcagatccctcatgaatggcttggtgctgtcttcatgggattatgttctcactcctacttcctgtgagatcttattgttaaaaagaatctgataccttcctcccctctcttgctctcttcctccctgatcatgtgacacacgggttcccctttgccttccaccacgatggaggcttcctgaggccctcaacagaagcagatgctggtgccatgcttctcgtacagcctgcagaattgtgtgagccaaataaacctcttttccttatatattacccagcctcaggtatttgtttatagcaataaaaacagactgagacacatgatgaagaccctttgatatcctataaatattgatttctctccctgagagaagagcatgaatctaagtgatgccattactctaatgtgaattccacaactcttctcaaagatgtggcccatatgttcctaataatggctttctaagaatctgttctgaaggggtaccttctctctgattttcatttgcatttcctgcttagcttacacacttcaccttgcctatccacctgtcctgaccccaataacctccatcatcagacatctcatcttacctacctactttctacttttcccagtccttcccgtgcttcataaaccatgatcatgagctagagacacaaggtcatagctaaggagttgggatcagaaaatcaccttctgtgattttccattattctcaatacataacttcaacaaaatcaagaaaatcatgaaaggacatcctaaggggtcaggtgaggttgcagtggggttagtcggtcaatagtttctttatgccaattaggatttctgcagaaaacaatgaaacactggtttaaacagtaaaaatattttaattccttacagaagcccatggaacatacactccaggtttaattcatcagctcaatagcatcatcaacgacttaggttctttccactttctgcttgtcatctgtgttggctttattttcaagctagctcctccctggttgcaagataattgcagcaggtttagttatcatattcggacatgctaacgcccaggctagtgatcccttccttacatttctttctcattttaagaacaaagtgtttaaaaaattatacttaaaattattggcatctctgtcaattgaaagatgtcaatctctttcatttttcctaatcactaataacatctactaaaaacaaaatgtctgtgtaaataatttatttgaataaaattaaagttgttgagtgaaa

SEQ ID NO: 77826 - DNA, 1380 bp, Homo sapiens; identical to SEQ ID NO: 63182

SEQ ID NO: 77827 - DNA, 548 bp, Homo sapiens; identical to SEQ ID NO: 63185
  misc_feature (1)...(548): n = a,t,c or g

SEQ ID NO: 77828 - DNA, 1728 bp, Homo sapiens; identical to SEQ ID NO: 63186

SEQ ID NO: 77829 - DNA, 386 bp, Homo sapiens; identical to SEQ ID NO: 63187

SEQ ID NO: 77830 - DNA, 447 bp, Homo sapiens
aaaggaagaaattataccaattctctgaaatctctttcagaatataaaagcagagggaatacttcctaactcattcaatgaggctagaattaccctaatactaaaacaaaacagacattacaaggaaaataaaccctatagaccaatctctcatggacagacatgcagaaatccttaacaaaatatcagcaaattgaatccgataacgtatgaaaagaattatacaccatggccaagtgagatttagctaaggtatgtggggttggttcaacattagaaaacaaattaatgtaatccatcacacccatagcctaaagaagaaaaatcacatgatcatatcaataaatgcagaaaaagaatttgacaaaataagaaaacttcctaaacttaggaacatctacaaacaaaacatatagttaacatcataagtaatggtgagaaactcaa

SEQ ID NO: 77831 - DNA, 1140 bp, Homo sapiens; identical to SEQ ID NO: 63189

SEQ ID NO: 77832 - DNA, 530 bp, Homo sapiens
gtggtaacgtttgagtcccaccaaaccacaattataaacaataagaaagaaggaaacaaaggatatacaaaaccagaaattatttaataaagtgacaggaataagccctcacatatcaatagcaaccctgaatgtaaatgaattaaactttccactggaaagacagagactggctgaatggatttaaaaaaacattactcaactatatgctgtgtacaagaagctcatcgcacctgtacagacacatatagacttaaagtacagggatgaaaaaagatattccatgcaaataaaaaccaaaagcaagcaggactagctatacctatatcagataaaacagactttaagtcaaaaacagtaaaagacaaagagagtcattatataataacaaagggattaattcatcaagaggctataacacttctacatacatctgcaccctacaccagagcactcagatgtataaagcaaatattattaaatctaaagggagagacagacttcagtataataatagctgaggacttcaa

SEQ ID NO: 77833 - DNA, 1888 bp, Homo sapiens
tttcgtggtggcagggtggtggatctgttggtcccgttttcccgtcgcacgtggtggccactgttggcttctgaatggtttgcaaggcggatatccacgccaaggcctttggatcggccgtgggtacatccgtctgagccgttcctttccatcgcagagcggcggcctccggcggcgctctccagtcatggactaccggcggcttctcatgagccgggtggtccccgggcaattcgacgacgcggactcctctgacagtgaaaacagagacttgaagacagtcaaagagaaggatgacattctgtttgaagaccttcaagacaatgtgaatgagaatggtgaaggtgaaatagaagatgaggaggaggagggttatgacgatgatgatgatgactgggactgggatgaaggagttggaaaactcgccaagggttatgtctggaatggaggaagcaacccacaggcaaatcgacagacctccgacagcagttcagccaaaatgtctactccagcagacaaggtcttacggaaatttgagaataaaattaatttagataagctaaatgttactgattccgtcataaataaagtcaccgaaaagtctagacaaaaggaagcagatatgtatcgcatcaaagataaggcagacagagcaactgtagaacaggtgttggatcccagaacaagaatgattttattcaagatgttgactagaggaatcataacagagataaatggctgcattagcacaggaaaagaagctaatgtataccatgctagcacagcaaatggagagagcagagcaatcaaaatttataaaacttctattttggtgttcaaagatcgggataaatatgtaagtggagaattcaggtaagttcagatttttccctccagttggtttaatttctatttcctaaaacattaaaataataatggaatgattgaaataataaacatttttcttattcaagatttcgtcatggctattgtaaaggaaaccctaggaaaatggtgaaaacttgggcagaaaaagaaatgaggaacttaatcaggctaaacacagcagagataccatgtccagaaccaataatgctaagaagtcatgttcttgtcatgagtttcatcggtaaagatgacatgcctgcaccactcttgaaaaatgtccagttatcagaatccaaggctcgggagttgtacctgcaggtcattcagtacatgagaagaatgtatcaggatgccagacttgtccatgcagatctcagtgaatttaacatgctgtaccacggtggaggcgtgtatatcattgacgtgtctcagtccgtggagcacgaccacccacatgccttggagttcttgagaaaggattgcgccaacgtcaatgatttctttatgaggcacagtgttgctgtcatgactgtgcgggagctctttgaatttgtcacagatccatccattacacatgagaacatggatgcttatctctcaaaggccatggaaatagcatctcaaaggaccaaggaagaacggtctagccaagatcatgtggatgaagaggtgtttaagcgagcatatattcctagaaccttgaatgaagtgaaaaattatgagagggatatggacataattatgaaattgaaggaagaggacatggccatgaatgcccaacaagataatattctataccagactgttacaggattgaagaaagatttgtcaggagttcagaaggtccctgcactcctagaaaatcaagtggaggaaaggacttgttctgattcagaagatattggaagctctgagtgctctgacacagactctgaagagcagggagaccatgcccgccccaagaaacacaccacggaccctgacattgataaaaaaaaaa

SEQ ID NO: 77834 - DNA, 3299 bp, Homo sapiens
ttttttttttttccttttcacctcctggagtcctggacttccccacatctcccctgcccctcccacgtttccatagtccaagggccagagtaaatgaaaatacagcagccgcccaagcaatggggcccatgctggggcttcagtcatcagcatcttcactggagtctgagttagctggcatcataggatcatcaatgagtgagaagtccctttctgagctatcatagccctgagataagtcatcatcatcttcttcatcctcatcgtcatcctcctcaggttgcagtggtggcaaccgcaaggtagtaccagaggcggtagtcactggtgaagaggggtagccaggggctctcaagcctggatggtgatggtggtgatggtgggggtgggggtggtggtggtggtgatgaagcatggtgctggagtctacatgaggggatgatggtgcaccacccatcacaaatggcataaaaggcaaagatgcagaagtggcactgctgtgacccaaagatgacacagactgtaggccactactgctgtgttggaacgtgttatgcagagatagagacccagtgcttccaccctgcatgagggccatcatcttagaaaggtctggtcgcatcctacgggcccgcttcttgctgctctctggtgcaataggccctggcaaaacccggttgaacaccgtttcagtgtgatgaccctttttcccatttctagagttagctgtctgtactggttccattcccaaacagttcaattctgccttattattttttttttacatctttgccacttctgttttatgcgatcctccatatacgctagaaatcggggatcaacagcaaactctggatgaccctgtaaccacatctccagttcagcccggcgaggggcatcctcacccaccagcaaagtaccatccaccttattgatgacagggatccgggtctccaggtccacatcaaggtgattaggctcttccatgcactccacctccagctctactagcttctttctgttccccttcttcttatgaaacagtggatgtccatctcccattactccattcgccatcaacttgtgcttctggaatgttaacttcaatccttcctcatctttgatttgaactgtaaactccttttcatccatgcctcggcgaagtttggtgaactgggctgccgctgtgctgactgcagatgcttcctcctctgccatggaagctgcactactacttcgtggtgtggggactggagagtcaccatattctccaggagtcaatgagggactgtctaataaatggttgcctggggccaaaattcctcctgttaccatttcctggctcctacggctagaaggccacttccctgagagtacagcctggcagacgaggtcaatacggtttatcaggacacgatccttggccctgcagaacgtggggaccggcgaaggcgcgttgtgaagcagccttcaagctgaaagaaattgcacggcgggagaaacaacaacgatggacaaggcgtgaacaaactgatttttatcgagtggtgtctacgtttggtgtggaatatgaccctgacaccatgcagttccattgggatcgcttccgcacttttgctcgactagacaaaaagacagatgaaagccttaccaagtacttccatggctttgtggccatgtgccgccaagtatgccgccttcccccagcagctggagatgaaccccccgaccctaacctgttcattgagcccatcactgaggagagagcctcacggactctctaccgtatagaattgcttcggcgcttacgggaacaagttttatgccacccccttttggaagatcggctggcattgtgtcagcctcctggtcctgaattgcccaaatggtgggagcctgttcggcatgatggggagcttctaagaggggcagcccgccatggggtgagccaaacagactgcaacatcatgcaggacccagacttctcttttctggctgcccgtatgaattatatgcagaaccatcaagcaggagcaccagctccatccttgtcacgctgctctactccactgctgcaccagcagtatacctcacgcactgcctcaccactgcccctgcgcccagatgctcctgttgaaaagtcacccgaggagacagctacccaggtccccagtctggagagtctgactttaaagctagagcacgaggtggtggccaggagccgaccaaccccacaagactatgagatgcgagtatccccctctgatactacccctctggtttcccggagtgttccaccagtcaaactggaggatcaggatgattccggactctgagctggacttgagcaagctgtcaccatcttcttcttcttcctcatcctcatccagctccagctccagcactgatgagagtgaggatgagaaggaagagaagctaactgaccagtcccgctcaaagctctatgatgaagagagtctcctgtccctcactatgtcccaagatggattcccaaatgaagatggagaacaaatgacccctgagcttctgctactgcagctgcagcctctatcttcatttgttctctcttgtagctgcgctgatacgctgttactagacgccgaagcctagctgttagggcagagcgaggccagaataaatggcctggctgttgggtcacctgggcttcatctccatcaatcactgagatctcctcatccatcatcatcaagggatcaccctcatcatcttggtcctttgggggaccttggagtggtttatatcaggatcttcacaatctttatcaagtcaacccttctactatgtcagagaagttatccaacactcgatgttctgctgcaattgctttgtcatctggtcggccagccttttctaggaaacataaggctgggtctgccctcatggtattatatttctcatagccatgtttaaagactccaatgagcagcgacttgtcagcctcatctgtcccaccaagttgttggaacctccagttgatccactactgggaaccatatgtcaatctcactggcaatcgcaccccctaacaccttttctgcttggtctccataacctcctgcctcaggtagatagcattcgtacccgcaacagtacctggttacactgatgtttcaagtgcttcttataactttcatcttggaacaaagtgtcagggttatatttccggatccaatctgccttatggatatcaaaagtgctttatgactttactttttttcctttgcgtccacgaggcacagggatagatagacctgaat

SEQ ID NO: 77835 - DNA, 666 bp, Homo sapiens; identical to SEQ ID NO: 63192
  misc_feature (1)...(666): n = a,t,c or g

SEQ ID NO: 77836 - DNA, 1433 bp, Homo sapiens; identical to SEQ ID NO: 63193

SEQ ID NO: 77837 - DNA, 438 bp, Homo sapiens; identical to SEQ ID NO: 63195
  misc_feature (1)...(438): n = a,t,c or g

SEQ ID NO: 77838 - DNA, 1094 bp, Homo sapiens
cccattgaacctgaacaaaagtcgttccccagggtgggccaagttaaccccctcccgcccggaagccataaagagaaatttctgaaggaggccccgggtgaaaaaaaagccagcccccttgaagattgggccaattaatttcacccagaaagagtgggcctgtctagatgccagccagagggtcctttccagggatgttatgtcggaaaccttaagaatctaacatctgtgggtgtgaaagatctgagtcactaagctcagtggtaaagagaagaaatgatagcctgcatgaaggcaaagataactcttgtaacatgatgacagtgttctcaaaatatgcaaatttttccattcatcaaacaaatatttactaagtcactcctgagaaccagccagaatctttctgcataagccagagctaatcaccaagcttgagcaagaagaggaacagtggagagagtttgtccatctcccaaacacagaaggcctttcagaaggcaagaagaaagagcttcgagaacaacatcccagtctgagagatgaggggactagtgatgacaaggtcttccttgcatgcagaggggccggccagtgccccctatctgccccagctgggactatggacaggacccgggtgcttcaagcatcccaggctgggccacccttttttttgctacacctgtggcaaatgtttcagcaggcgctcctacctctatagccaccagtttgttcacaatcccaagctgactaacagctgcagtcagtgtgggaagttgtttcggagccccaagtccctcagctatcacagacgcatgcatcttggggagaggcccttctgttgcacgctctgtgacaagacctactgtgatgcttctggactaagttgtcaccgccgcgtccatctgggttaccggccccattcatgctctgtgtgtgggaagagcttccgggaccagtttgagctcaaacgccaccagaagatacaccaaaaccaggagccagtggatggaaaccaggagtgtactttgaggattccaggcacccaggctgaattccagacacccttcgccagaagccaaaggcggacgcgtggg

SEQ ID NO: 77839 - DNA, 796 bp, Homo sapiens
  misc_feature (1)...(796): n = a,t,c or g
gcagtcactcgcgcatgatttaaatatggtcaccccaaaaaagagctcctttcttggccacaccaaccaatancccnttttttcctataagggtttttcnnnnnnnnnnnnnnnnnnnnnnnnntatgtgttgtcgtgtcttcttggtcagggcccgcaggctgtgtagcacatgctcccagcttctgaggaggatcccgagtgggggagaaaatgcttctggggcaccacagagcccttccttgttggggggctgacgagatcccgcaaagcctcccacttcgatctgcctctaatgtctggcgatggggggtgggacagcagggccctgtggcccgcccgcgagcagacaaacctgaggctgaagagaatgtgagtggagaccacacaccaccctaagagtgggggtccccacagcacctaaagtggcaggacgtgccctcgggtagaggcacagtgaggctgtgcgggcaacacaggcaacctcctccgccagaaccggggacgcctcgcaacctcctccaccagcacgggggacaacctcctccgccagaaccggggacaactggcaacctcctccaccagaagcggggacaacctcctccaccagaaccagggacaagctcctcccccagaaccaggggcgcctcgcaacctcctccaccagaaccgaggacgcctggcaacctcctccaccagaaccgaggacgcctggcaacctcctccaccagaaccggggatgcctggcaacctcctctaccagaaccgaggacaacctcctccaccagaaccaggg

SEQ ID NO: 77840 - DNA, 2443 bp, Homo sapiens; identical to SEQ ID NO: 63198

SEQ ID NO: 77841 - DNA, 1397 bp, Homo sapiens; identical to SEQ ID NO: 63199

SEQ ID NO: 77842 - DNA, 373 bp, Homo sapiens; identical to SEQ ID NO: 63200

SEQ ID NO: 77843 - DNA, 1157 bp, Homo sapiens; identical to SEQ ID NO: 63201

SEQ ID NO: 77844 - DNA, 1014 bp, Homo sapiens; identical to SEQ ID NO: 63202

SEQ ID NO: 77845 - DNA, 1475 bp, Homo sapiens
ttttttttgcagtctttattgttttattttgtttttaaaagatggggatcttgctatgctgcccaggctggtctcaaactccgggtctcaagcgatcctcccacctgggcctcccaaaggtttggggtgacaggcgtgagcccccgtgcccagcctccttgcagtccagacagctgactcaggctggggaggaaccagggcaggcaccctgagaggtggtctcagtggggtacgtggtccaccagcctgtgtcggagaatcagactccttaagttcacggtcttcccagacgtctggttttgcctgctccatgaatgatacatcaagacactgaggcccagagggtggagaggatgtgtccacagtggcagagggagcagggctcagtggcattggagcaagccttctggcacccactcagggcctggctcccagagcaccgggtctcagtcactggggcttaggccggcccagacgggcttgcagctcctgcatcatgccagggtgcgcgaggccaaacccgtgtcccaggggccttctcctggctggcaccggggtcccatcatgcctcagagggcttggctccaggggttcctccagctggaggggtctctgctcaggagctgacagctcctcctcaggagggttgggggctgggggctcctcctgctgctcccaggccggagtccgacgaaaagagggccgggagcgacgctgtgaggagcttctcgagaggtgcacgcgactccttgggacagagacgtctaggagggacccggggagcggggcctcgctccagctgttggcagcacctcctctggcactgcccatggcctcagccgtctcggcttccccgactgactccggcgcagcttctgcaggggcctggtgtgttggctgctcctcctggcccctgacatgttccaggctttctggctcagtctccttggcctctgccctccggcccccggtcaccatgagaccctctgcatcaaggagccttggtgcctctccctcagggtggtagtccccacaccgcccctcactgtcttccctctgttctctctcctgccatccaacagcctcttcttccaacagcgtccacttttctagaagccccccagcctccaccatggctcccatcccctctgccctcgctgtctgggagcccgcgggatccagcccacagctgtcctctgcgcctgcagattcctcggcctctacccgccctccccaaggtcctccctacctggactcaaaagcctctacttggctgcctctgccagtcacctcttcctctgctgaaccctccagaccaaattcttgcccacctgcatgctctcctgctgctgcctctttcttttctttcgagtcccaaccttgcccaagcgccccttttaaaaagttaattgaacaactgtggcctactctgtgtcagtccccgcagcttagaatcaaaccgatagcctgaaccc

SEQ ID NO: 77846 - DNA, 2855 bp, Homo sapiens; identical to SEQ ID NO: 63204

SEQ ID NO: 77847 - DNA, 1232 bp, Homo sapiens; identical to SEQ ID NO: 63205

SEQ ID NO: 77848 - DNA, 1898 bp, Homo sapiens
agcaaaatgtggtgaatattactgatgaggtaatgggagaaagctaaagtaacagtctgaatagttttgtgcatcctgagttttcttaactaaggctttatttttaattaaaaacaaaatttacattttcaaaaacggtttgcctcaaaaaaaatagcttctaaactatattaaattggaccaaataaggattttaattattataaaacaaagctcagtacttcagggaaataccacctccacaaacgttgagccaattcaggggctgccagtagaatcctaaagagtgatgtctccggttcatgtgaacaccatctgcagtccacaccccttgaggacaattcaggccataaggcagaccatgctcagcagagctgccccttcaccaccccagtcaccacccttagcctgattgggcaggcgatggctcatagccaggaaggctgcctccctcaggcttcccaaaaccaatcaagggcatacgcggctcagccacacttttgcactcatattcccgtatgcttccgcttaaatgtactcatgaaaaattttaagatggtttgctgtcactcatcccctgacccagacgggttacacagatctggcagtggacacaccctccaacacagcatgaaaagagcataggaaaacccaggtccagctaagccctacctcaaagtaatttggcctttggttcctcctctgaaagcaggtggatacaaactgtttggctataaaattgtgaatctatggaactgtagaataattaaagcttccaacactaaaccacaaaggcaagtagtgtctgtccacactgatggggcaccacctgcaccaagccccagactccagtgcgctgggggcatcagacatctgtcatagtcacaaggagcaagaagttctaggttccctcaccactccctcctacgctcctccagtcttcaaaaatgccttgaaataacccactttgggacccaattcttaatctgttgcaaaacaatctgcttaaaatagccttaattaagatgtaagtccaaaccattgctcttcccttcataaaaaggagaaggtaagattaccagaggttgtcatgactatgccagtaacagatctatcccagaattataccacttaaagcagactgttagaagccccctcagtgcagtgggcagcacgtcagtctcataatctcaaggtcctgagttaaagcagactgtataggaagatctatagaaacccgttactactaaaggggaaaaaaaaatactgtacttaaaaaaattagaagccagtttaccattagagagagttttgatttgagatataaagaacatattcctctccaaaactgagtttcctctgatacaaaagtatttgccttctggagaagatatggtttgcaccgtccaacaggtgtgctctgaaggcccccactgaaatatattgcatcatagatgaggggaaagacttggttaatttctcttatcaaaagctagtcttcaggacatcctgtccaacttggctcccaggggcccaagggttcttctcagagattgttcttagagacccccaaacctgcagcccaagcccaggagccacctgtgcatcttcgccacgtcgccaggctgtcaggagcatgcgtctctcatagactggtctcctcacacactctgacggggatgttatagtgccgatcgtcctcagcaatgagcgttaccactggccagtccttgggtgggtcggtggggtagactgtgatgaattcttccgtgttgtacttggagagccggtacacctggatggtgtggcgcacagcataggcaagaaggaacatttcaaccagcatgagctccgggtcctgcagccagggcggcagccccacagcctggctcatggcc

SEQ ID NO: 77849 - DNA, 1918 bp, Homo sapiens; identical to SEQ ID NO: 63208

SEQ ID NO: 77850 - DNA, 1906 bp, Homo sapiens; identical to SEQ ID NO: 63209

SEQ ID NO: 77851 - DNA, 413 bp, Homo sapiens
cccatcaaaaatcagtatttggctaattgttaacttcaaaatccagtaatacagtcacttgctgccaccagcccccacaccgtgtcttcccatggctccaccgccctgctcttccacaggttgcaatggaaatagagatcgccgcgctcatcattgacaatggctctggcatgtgcaaagctggctttgctggggatggatggcccctgagctgtgttcccctccatcatcaggtgaccccggcaccagggtgtgatggtgggcatgggccagaaggactcctacatgggccatgaggcccagagcaagcacgacatcctgaccctgaagtaccctatcaagcatggcatcatcaccatctgggatgacatggagaagatctggcaccacaccttctacaacgagctgtgccc

SEQ ID NO: 77852 - DNA, 1981 bp, Homo sapiens
  misc_feature (1)...(1981): n = a,t,c or g
ttttttttttgctagtgactgatacatttattagtttctaacaaaaaggcatacatggtaggcagagtagaaatactaacagaaattagtttatcttgaaaccaattttagtcaggaagacttcttcacagagaatgagctgaatatataaatcccaaatatatcacaccatatatgtgatatatttacacctaaatatatcacaccctcctttttggtcacagactattcccaggagggttaaatagggtaacggtttaatttgagggcattcaaggaatgtccaccctaaaactgaaagtgaaattgctcttaggggaaaaattggggttgatgagggaggnttgatcttagcctgtctcagacaaatttggtttatttatttttacttaacgacccatgtgatagtatagttgcaagctatacttcatttaactacaatcattactcagggggacaatcaccttaagaggcaaattaagttttaaaattagccacagaatttaataattaccccaatccagcattggacatagatgcccatcaggtatgcaaagattaacaaaattcctattacccaaccttagaggaaaaaaacttaatgacatacagaaatactggcaaatttaagctagaattagctccaggacattttatcttattttcacattaaaagaatagattactagatatcagcagaaatgctgttaaagctattttttactaatagttgttcatattaatgaaacaaaagatcaatagtctctgagctaaatttcacaaaatgaaatcagtgtcttctgatttaactttcaggagtaagaaagggcaaaacccaagcaccatactttctatttctgttcataaactcaaataaaagcagtatcaacacaaatgatcatataagaaaacacgtggttatgtttcaggttccacaacataagacactgtgaggtaactctcctgtaatacattcccatttttttctggaatagcagatgcatagaaatgcaggtttccaaaaattcacccaatttagtaactaattttgattctgatgcctgatagtagggtgtgaaaagctgtaaaacccaaatgtttcctgtgttctttcacaaggacaagggaagaggatgctctgccaaactgcccctgctgcgtcatagtggaccagtttcaatgatccagactgtcagtcaccccatccagcctcatcctcatctggacccatttctcaccacccaatcagtttcaatgatccagactgtcagtcaccccatccagcctcatcctcatctggacccatttctcaccacccaatcagtttcaatgatccagactgtcagtcaccccatccagccacatcctcatctggaccagtttctgaccacccaatcagtttcaatgatccagactgtcagtcaccccatccagccacatcctcatctggaccagtttctgaccacccaatcagtttcaatgatccaaactgtcagtcaccccacccagcctcatctggaccagtttctgacgacccaatcagtttcaatgatccagactgtcagtcaccccatccagcctcatcctcatctggacccgtttctgaccaaccacccaatcagtttcaatgatccagactgtcagtcaccccatccagcctcagcctcatcctcatctggacccgtttctgacgacttaatcagtttcaatgatccagactgtcagtcaccccatccagcctcatctggaccagtttccgacgacccaatctgtttcaaggatatggacggtcagtcaccccatccagcctcatcccagctcttaactccttctgcatagttcagtttcctttctggcaagtaattcccaatttcctagaaaaccctgattttgtgatttaacactgattcgaatccactttaaaccaaaggaaacaggccgggcgtggtggctcacgcctataatcccagcacgctgggag

SEQ ID NO: 77853 - DNA, 2029 bp, Homo sapiens; identical to SEQ ID NO: 63212

SEQ ID NO: 77854 - DNA, 470 bp, Homo sapiens; identical to SEQ ID NO: 63213

SEQ ID NO: 77855 - DNA, 506 bp, Homo sapiens
gacaataaaatctccgtggcacccgctaagaaaataactaaaaccatccaccaaaagaaatgccaaagaaattaaaatcgttccactagaaaatatgtaatacaaaagaaagaaggtagtaatggaagaatttaagaacaagagacacaaaataaaggaaacaaatggcaaaatatcagaagtaatcttcctcatcaataattacattaaatgtcaatggtttaaactccccaaataaaaagcaaagattggcagatccaattgctatctacagagattccccttagactcaagaccccaaatagaaagtaaaagaagaaaatattccatgcaaacagtaaacaaaagaaagctgaagtggctatactaatatagacaaatagacttaagataaaaattgttcttatagggcactgtataatgataaaagaatcaatctatcaagaagatataataatcataaacttacttgtacctaacaatagaatttcaaaatatataaagcg

SEQ ID NO: 77856 - DNA, 836 bp, Homo sapiens
  misc_feature (1)...(836): n = a,t,c or g
tggaacnnnnnnattaatagctcgctataggcngccanttagggataaattacttgatcgtggccagttagtagagctgagattcaaaccctggctttttttaatctagagcttgtgctctaaactactataggggattcattcagttccttagaaggagaaagatcctagagcggcactgttcagtatggtagccactagccacatgtggctgttgagcacttgaaatgtggctagtctaaactgagatgtgctaaagttaaaatacacaccgattttgaagatgtaatgtgaaatatatgtatatataaagtatctcattaatactgtttagtattggttacattttgaaatgataatgttttcggtaaataatatgttaaaattaatttcacccttaaaaacatttttaatattactagatttctattagacagcactatacaagaggaaatcactggacttgaagctttaaatgtttagcacacatctagcaaacgtctgtagccttctgtacaccaggcatatggtactgggtgagagtcttggggaataaaacagaatcagacattgcccatgaggagcccacagactagccagacggggtgggtgtctgtgtttttggtttggttgaagttgagttgaccactttatccgctgttgatttttgctttggctaggtgtctgcctgtatcccagtgttcaggctggctagacggcggaagaagatcctattttactgtcacttcccagatctgcttctcaccaagagagattcttttcttaaacgactatacagggtattgcagctcatggtgtagctctctcctcgtgcc

SEQ ID NO: 77857 - DNA, 1401 bp, Homo sapiens; identical to SEQ ID NO: 63216

SEQ ID NO: 77858 - DNA, 1678 bp, Homo sapiens
  misc_feature (1)...(1678): n = a,t,c or g
gctcggggtaatagggctgctgctcggccttccgttggcggcgagcagcaggggcatgagggctaacccgggaagcggcagctgagcgggccgggaggagcgccggtccccgtggatcccgagagtgcagagctcggggcaggggccgggaggcgtgggggagccgggccctcccctcaggaacgtgtcccggggccgacccggcccgtagtgtggaagcagcttcaggtaggtgagctcgtgaaacaatatgaagaggagaaaatagccttttaaggaaattggcccacagaaaggatggccttcttggacaatccaactatcattctagctcatattcgacagtcacatgtgaccagtgatgacacgggaatgtgtgagatggttctcattgatcatgatgttgacctagagaagattcatcctccttcaatgcctggagacagtgggtcagaaattcagggaagcaatggtgagactcagggctatgtatatgcccagtcagtcgatattacctcaagttgggactttggtattagaagacgctcaaacacagctcaaagattagaacgactccgaaaagagagacaaaaccagatcaaatgcaaaaatattcagtggaaagaaagaaattctaagcaatcagcccaggagttaaagtcactgtttgaaaaaaaatctctcaaagagaagcctccaatttctgggaagcagtcgatattatctgtacgcctagaacagtgccctctgcagctgaataacccttttaacgagtattccaaatttgatggcaagggtcatgtaggtacaacagcaaccaagaagatcgatgtctacctccctctgcactcgagccaggacagactgctgccaatgaccgtggtgacaatggccagcgccagggtgcaggacctgatcgggctcatctgctggcagtatacaagcgaaggacgggagccgaagctcaatgacaatgtcagtgcctactgcctgcatattgctgaggatgatggggaggtggacaccgatttccccccgctggattccaatgagcccattcataagtttggcttcagtactttggccctggttgaaaagtactcatctcctggtctgacatccaaagagtcactctttgttcgaataaatgctgctcatggattctcccttattcaggtggacaacacaaaggttaccatgaaggaaatcttactgaaggcagtgaagcgaagaaaaggatcccagaaagtttcaggttcaagggcagacggggtttttgaggaggattcgcaaattgacatagccacagtacaggatatgcttagcagccatcattacaagtcattcaaagtcagcatgatccacagactgcgattcacaaccgacgtacagctaggtgtgcactcttcccgggggtgctcaggaagagggctgctcccgtggactgcctcaggccgagtgctgacacatggcggcaggagcagatagggtgctgcggtgctgcctgcgctgccttaagaagctgagactcacacaagtgttaagagggtatctctggagacaaagtagagatagaccctgttacgaatcagaaagccagcactaagttttggattaagcagaaacccatctcaatcgattccgacctgctctgtgcctgtngaccttgctgaagaaa

SEQ ID NO: 77859 - DNA, 1775 bp, Homo sapiens; identical to SEQ ID NO: 63218

SEQ ID NO: 77860 - DNA, 427 bp, Homo sapiens; identical to SEQ ID NO: 63219

SEQ ID NO: 77861 - DNA, 903 bp, Homo sapiens
aaaaaacaagttattcgtatttgccaaacagacctcaaaactgctgaagaggccaggattaagtatcagattttctagatagtttttctaaacatttggacttagaaatttcaagtaaaaatgtgttttgttgtgaacagaaattcaccggcattattacctaagtgtatttccgagatgttgccacgtatgttttcttatttacagctagagttaattatgaaaattgtggggttggaggcgaggtgggggtggcggtttgttttctcgtgctctccaactagcgtgctctcttcccctcccccgcggcgtgcagtggggtagagaaaaggtggcgacggcgactggagcagcagaggctgtagcatcggatacccacctcccacgaaccgggtcctcttccccctccttgctgtgtgtttgatgtgttgaagcaggagggagaacgccgcgagcagcgccgtgagcaacactaccatcgtccccagcactgcggatccgggccctagcggcgggcccagtatcggaggtggtggcggcggtggaggcggcggcatcgaggtaataggtgactaatctccccgggcgctagctctgagcatatgcggactctcttcggtttcctaggcaagatcgacgaaccacacctcttcccgccggataattcacctttgccaatcgcaatctcgttaaattccatgatccagactcagcagttgtcgcaccatgtctgacaaacactgtattccttgacagagctttgataacgtaccatatgcataaggagttattcctgataaggctaaggcttgtctctgttggcaccagctaatgcaatggcaggtcttctgcttggtgttgggctcctgcctactcctaacccacttactcagactggcgctg

SEQ ID NO: 77862 - DNA, 1048 bp, Homo sapiens
cccttctccgagccaggtcaccgcaggggtctgaaagggcaggggtgggtggggcttacatgctgagcaaggggtggtggaaagagggccgacatggtggccacaggcggcctcggggatggggcgcggctggacgcaggcagtcggtccccggtggtccggcggctcctcatgcactctgtacagcgtgggggcggatgggcgggggcaggggcatcagtctagaggctgcaggcctcctggtccaccgagcgcttcctcagctccttgcctggcttggggggcggcggggcgggcgcggcgggaggggcttcgggcagatgcaggacggagttctcccctggctgcacccgcaggtaggccttgaccttgtggtgccgggccttgccgtcgctgaagtcgatgacgcggcactcgtaggtgccttcgtccgtgggcttcacccgggacaggcgcagcttgtgggagatgttgctgcccaccaccttgaccacacttattttggttgcctccttccctgcgtcttcctgctgagatgcttttagctggttcgaggcccacgcctgcttgtcggtccagtcccggtggctccgtacataccaccactggatctccagcgagtaggagggggagccgctgccgcggaaggagcaggccatctccacgtcctcgcccgtccgtgctgtcatgtcatggggtgtctctgtgaacagggcgtggccggagacgtggttgtcccagggcgcgtggccggcgggccgcgtggcgccgccgagttgcaggaaaagtgccaggtagtggagggcgcccagcgctacggcgagcggggcccccatcgtgcgctctcgggccgggggcgccgccgcctcacatctgggccccggagaccgcagaaccggcgccagctgtcccctgccctgagcggcctggctgcccggctccggcagctgcccctcgcccgctgtccccggacccggcccagctcccagccctcgcccggctccggcccagccccggcttcggggagcgagcgcacgcccagccggcc

SEQ ID NO: 77863 - DNA, 569 bp, Homo sapiens; identical to SEQ ID NO: 63221

SEQ ID NO: 77864 - DNA, 819 bp, Homo sapiens; identical to SEQ ID NO: 63222

SEQ ID NO: 77865 - DNA, 1495 bp, Homo sapiens
ttaggaggggtttcagaagcaagatctctacttccttcagaataataaggtagggaaggaagcctcaaaacaaagtggcaatttggaggcagagaaggaataaggtagtggtggggaggaaagggatagcaagcaggttcagttcaggaactaaaggcaaaatcttcatactcataccctgtttgagtccaagaggaagcaggaatgagagtaagggtggggcacataatccttattcaagttacctgatatttgaaaagaaggacacatgaacactagagttaatcttttagtgctactgaaatggctacacagttaatctggaagtttaagagctaacaaagctgcaaagacaagctgctctttgttgtaaagtggactgaagatgtttcaaataaaactacatccaaaaactggtagtaagaaaagggatctcttagcaaataggaatctaggtgtagaatttatacacatatatattttttaaagtataaaaatgagaaagtatgtacaaaaaatcatcctaaatcttagaaaggagacataaaaaaaaggctgtggaaagcctggggagttatgtgggtggatgcctagcagttggaagaatgcatattgcccaactgcccagcagccagcacaagaatatctttcttctccttgtggaagcgcagctccttgcctgccagtcgggcttcatccagctcccgctcagtagaggccagctctctagacagtgcccccggcacactctgctcccggctcacccagtccaaggccatttggtggcgaatatcatcatccagggcccggtgcgaataatgagccaacacctcctgccgagagcattgtcgttccctcatggccttaaggctgccattccagtgtagcagttgaaaaactgtcattagctcctggaactccaacattgatttgcccttgttggattccagcatgaatcggaaggcaccaatccctgtatttgggttgtcagcttcctccctgttgccattaaaagatgccagggcctcagagacactcttctcgatgaactcatcagtgattcttcgggaaggatgttcattaaacacagaattcattagcgcaatctttgcagcactcctccgggcctcagcttttgtggggcaaaactggaaactcccaaagcagcttcccccaggcagggtgacatagcagacataaggagggctgttggagggaaccatctcataaaccactagagccccattctttaagtcagcaccacgggactgcttcatctgccagaattcctgaagtgcctccaccacattcactgaatgtccgcagaatctccgcctggccaggattggggccgtggccacggggcagccgaggtggcggagccagtttcctgggggcccgcatggcgtggggggggggcacccggattcccttggtgtcagtatctgcgccccggcgccggatcctggtccctcctcccggagcgcccacgaaa

SEQ ID NO: 77866 - DNA, 2457 bp, Homo sapiens
ttttttcacggacagacagggtcgtttgtcacagcagagaagcacctcacggctcctacccgcactcatcgcggacagtgcctgcagcgggagcggcgcgagcaccctccccagatgaaaacaccagcaccaggaggtgggccgtagcccaggctgagggaggaggctgggggctggggctcagggcccccccccggccacagcgccaccctgagtggccctgaaaatagtgcacagtgctgggtactgccccggccggaggcacctagttgttgagcattccggccacaggccacccgctggcccttccttggtgtggcacgagaccacgggcacttgcaggagctccctgcatgctgttttgtgctttggtctcagggagcaccctcctacctcggggtcccagagtgggcagccgggcaggtgtgaacagtgtgacaagggtaccgtggggcacctggtagtgccacccagaggggcagccggtgctcctggtggtgtggcagcaacagttacaaactcaccccaagtccaaaccccagaaatcctgtttctctggccctccgggtccagaatgccctgcactgcctcctggcctcaggggctgctgcggtggtgggaaggctgcccagcagtgaggaaggcgagtgcaggggctgcggccgcggtcagagaaggagagacaccagcagaggacgcgaagctgcgaccggccaggttcagagcccgcctcggttgctcccaatcagaatctgctttgtgctccacggcctccaagcactttcatgagcgttctgctcctacgtggccaggtcctaccttccctgacggctctggccaggccagctcggtttccctctaacccatgaggcctgggggggctgtgacagaggctggaagcgtggccagagcccaggggcaggcccgcctggtcacagcaggatgaggctggggtggcgcagctgccggtacacctgtagcagcctctgggcggtggcacaggagctggcctcatcctccgtgcagagccggtcgcgcagggtctgcacctcccgcagcagtgtctcgtggttggcgtggatctggcggaggtactgcacacggagatcaggagcgctggagccctgggcggcctgctctgtcaccatcgtctgcatgcgcccgacaacggcatggtgcgccctgcaaatgtcggccagagaggagctttccacttgaatctccacggcctggatgggccctgctgggcacaggtcggtcatggccacctctcggacgatgaggtgaacgttggcgccatcaggggccactccctggatggaagatagtgctcgggccctcacgacgtccacagcagcattctcagcaaggagccactgcagggtggcacagcacaggggcacgcctgagtggccgtccttcaaggcagctctgagcagctccgccgacaccttgatggaagccacagatgggggcaggtactcggcccgcagggaggcgggtcctgctggctggctgccaggctcccgacaagtttccagaaaagtggccacagggtctcgggtggggccgagtggggagggggcccgtgtgtgtggcagggccaggccagggaagcgcagacactgcagcatgtccactgtgtgcctgctcaggggcaggcaaacaccctcttgctcgggcaggacgtcggaggggcactcatccagaaaggggtcctcagagtctgagggggcaagggccccgcccaccacctccctgagactgtagaacagcgtgcaggacacggtcacgggcaggtcgagcccgccgttctcaccagggcccaggggtagcgtcacctcccgccgagcaccggggccgagctggtccacggggatggtgtaggtgatggcggagcaggccgagtccaggtcgagagcacaggagctggtgagcacctggatgcacagggtccacccctggtccaggctgaagctgctgctgttctctagcacgcaggtggccatgagcacatcctgtgtctgcaggcggctccaggtggtgctggtggtgcaggagatgggtctggggcccgtgccgcttgacagcagtgcacagctcacgttcatggcctcgttgaggcttgtcagtgccttgttccgctggtcaaccgccttctttagaaaagacactctctcagagatgttgccaattccagacagcagctcctttattttctgacctgcactctctgtggtcatcctggctgggccaggcatctcagagtccaggtccaggctgcaggtcatcaggcggcctttggcggacagggccaggagcttggtgccaccttcatgcgtcctgggagacgcggacagcgagacgacactgcagatgttcaggctggctgggcacagcatggggggcaggcctcccgggccttcttcgggctgctcagggcccagcggggtgttt

SEQ ID NO: 77867 - DNA, 688 bp, Homo sapiens; identical to SEQ ID NO: 63225

SEQ ID NO: 77868 - DNA, 1129 bp, Homo sapiens
tttttttaaaagcaatttatttctgattacaaaatacaggtgaggagcatgggcgatgcctgtaaccccttggttgtgcatcttcccagtctatttctgcttctagaaataccctgtgtacaacagcaagctcatgctgtccccaagtgcttgcacattctaacagctgcagagtatatgaccaggtggaaagtccaacagatgccccactcacaagatagggccctccaatcagtcttctggctccctttcactcatagtaactggttgctcttcctattggtcatagataaatgacacctgcacaattctccgagtgctttcaagcaacttcgggaggcagtgactaagaccctttccttgctcccagcttcctatgtcccagggctgcctgtggcacctggactgctgctgcccctgggtcccgtacattccagggcaacaatggaggaagggcaggcaacgcatgaggaattaacagtctttattgggctcagaccaggagtccgtgggtcttgaggacctctgtgtatttgtcaattttcttctccacgttcttctcggcctgtttccgtagcctcatgagctgtttcttcttccggtagtggatcttggctttctctttcctcttctcctccagggtggctgtcactgcctggtacttccagccaacctcgtgagccaggcgccccagataggcaaactttcttgtaggcttcagacgcacgaccttgagggcagcaggaaccaccatccgctttttcttgtcgtagggcggtgggatgccgtcaaacaccttgagacggtccagagcggcctggcctcgcttggttttgtggggcagcatacctcgcacggtccgccagaagatgcggctgggggcccggaagtggtaggggcctcgggaagggttggtgttcatccgcttgcggaggaaagccaggtacttcaacttgtttctgtagaaattgccagaaatgttgatgccttcacagcgtacgaccaccacctttccggcccagcagtaggctggtttagccccgatggccggccaggcgggcccaggagatgggcctcgaccatcaaagcaccaggacctgcacctccgccatcttcggcagccgcttgg

SEQ ID NO: 77869 - DNA, 569 bp, Homo sapiens; identical to SEQ ID NO: 63226

SEQ ID NO: 77870 - DNA, 1083 bp, Homo sapiens; identical to SEQ ID NO: 63227
  misc_feature (1)...(1083): n = a,t,c or g

SEQ ID NO: 77871 - DNA, 769 bp, Homo sapiens
tttcgtctacgttgtggcggttccctggtgaatgcgccctggggttgaggcgtctgcgggcgttcggacgatgccgtgacgcggcacggcgacactgttggcaatatgagcgcacccctgtagagggagcccttcggtcctggaggcggcgcggcgtgaagacaggttgctatttgagagcgttcccttgaagcccctcagagagtgggggaggggcggcggacggcggcggttcctgtctgcgcttgcgccggcgcctctgccgacccggcctgcacgcacgcgcatgcccgtagcgcgcggagccgcggtggccggcagcactgcgcgtgcgcggtgaggagcccgctaaggagcggcgctggcggacgtcgggctggctgcccgtgacgtcgtgcggagagctttaaagtgcgggccgggccgggcgtccgagggtctggtcgggagtcgggccgcgtctccgcagcagccctccgcggcatgaggcgctgctggcgcccctgccccgcgggacgtggagaaggtggaggaggaagaagccccgttgtcgccaccgttgcatgacccgccgctcctgaggccctaccccacgcccggaccctcgacgccccccgccgggtcccccactcacgcatgggggttcggcgctaaggacccccctccctccgggggccccggggcgcgtccccttagagccatgcccggctgccccgcccgccccagagggccctagtagcagcgtcgtggggaccatggcggccgcaag

SEQ ID NO: 77872 - DNA, 644 bp, Homo sapiens; identical to SEQ ID NO: 63229

SEQ ID NO: 77873 - DNA, 1840 bp, Homo sapiens
gtggagcatccctgtgggggactctggccagcttgagtgacgcagatcctgagaccactcccgggtaggcaattgccccggtggaacgcctcatcagagcagtgcgtggcaggcccctgtggaggatcaacgcagtggctgaacaccgggaaggaatgggcacttggagtccggacatttgaaacttggtaatcgagtgtggatcaaggactggaacgtaacttctttgtgcccacggtggaaagaccgtagtctgtcgtcctgaccactcccaccgctgtgaaggtagagggaatcccagcctggatccaccacagccgtgtaaaacctgcagcacctgaaacctgggaggcaagaccaagcccagacgacccttgcagagtgaccctgaggaagacgacaagccctgctccagtcacacccagaagctgactggtccacacatggccgaagcatgaggaagctcatcatgggattcatttttcttaaattttggacttacacagtaagggcttcaactgaccttactcaaactggggactgttcccagtgtattcatcaggtcaccgaggtaggacagcaaactaaaacaatctttctgttctatagttattatgaatgtatgggaacattaaaagaaacttgtttgtataatgccagtcagtacaaggtatgtagcctgggaaatgactgacctgatgtgtgttataacccatctgagccccctacaaccaccagttttgaaataagattaagaactggccttttcctaggtgatacaagtgaaataataactagaacagaagaaaaaggaatccccaaacaagtaactttaagatttgacgcttgtgcagccattaatagtaacaagctaggaacaggatgtggttctcttaactgggaaaggagctacagagtagaaaataaatatgtttgtcatgagtcaggggtttgtgaaaattgtgccttttggccatgtgttatttaggctacttggaaaaagaacaaaaaggacttggttcatcttcagaaaggggaagccaacccctcctgtgctgccagtcactgtaacccactagaactaataattaccaatcccctagatccccattggaaaaagggagaatgtgtaaccctggggatcaaagggacagggttaaacccccaagttgccattttagttcaaggggaggtccacaagcactctcccaaaccagtgtttcaaaccttttatgaggagttaaatctgccagcaccagaacttctgaaaaagataaaaaatttgtttctccaattagcagaaaatgtagctcattcccttaatgttacttcttgttatatatgcgggggaaccactatcagagaccgatggccttgggaagcctgagagttggtgcccactgatccagctcctgatataatgggggcttgtccaggatctcatcaggactggatggctctcgctggactatactggatatgtgggcagagagcctacattcagttaccctaatgaaatgggcagacagttgtgttattggcactattaagccatcctttttcttattaccgataaaaactactggtactatctgtaaattccagacattgtatgagaaagcactgtaaaactttttgttctgttagctgatatatgtagcctccagtcacattcctcatgcttacttgatctatcatgaccctttcacgcggaccccttagagttgtaagcccttaaaagggctaggaatttcttttttggggagcttggctcttaagacatgagtctgccgatgctaccggccaaataaaaacctcttccttctttaaaaaaaaaaaa

SEQ ID NO: 77874 - DNA, 857 bp, Homo sapiens; identical to SEQ ID NO: 63231

SEQ ID NO: 77875 - DNA, 459 bp, Homo sapiens; identical to SEQ ID NO: 63232

SEQ ID NO: 77876 - DNA, 806 bp, Homo sapiens; identical to SEQ ID NO: 63233

SEQ ID NO: 77877 - DNA, 1114 bp, Homo sapiens; identical to SEQ ID NO: 63235

SEQ ID NO: 77878 - DNA, 1758 bp, Homo sapiens; identical to SEQ ID NO: 63236

SEQ ID NO: 77879 - DNA, 863 bp, Homo sapiens
  misc_feature (1)...(863): n = a,t,c or g
gggcttcatccccagaccacaagccgctcgctgcggctctgttttcctctctgctcctgtttctctggagagcagagctctcctcctcccagtgtctttctgggccccgagctgtctcacctgaaacgccacttgccacagccaccctcatccaccaacaantactctgcctttcgcggcccataaagctttctcagccctgtccactctgaagtatctctctctcccgaccccctccccacggtggacacattctccttcacagaagaaaggccctgggacccctcagctaccggtcccgaaactgcaaacctagacccccctgtgctccaacctcctcttggatgaggggcctcctcctcgctctactgagggagtcctcccccactgcttctgcctcgtgccttctgactcaaacctcctaggaggacacctgcatcctctcagcctcgtactctggctttggggggcaccaagctggggtcaccagctccagcagatgccttttgccccttgcctcagacactgtccactccttccacgaagctctcctgtgggcctcctgagcacctgctccactgaccgcctggctgccggctgccattcctgccccctctccttggcctccttcttctccttcacttatggcgagttttcactgccttccattggaagctatcttttccaccccatggcttccctcccatccagagctctcttcctggactctgcagagagctccaattcgaactgtccatgcagggtctgatcatcctcccctcttgccaagcttctgacaccagcaaatgtcactcctatggaggcctgaggcaggacctgtgcctctccaatggcagtctaac

SEQ ID NO: 77880 - DNA, 2461 bp, Homo sapiens; identical to SEQ ID NO: 63238

SEQ ID NO: 77881 - DNA, 1616 bp, Homo sapiens
ggaattcgcggcaagatggcggaccgtggcggcgtgggtgaagccgcagctgttggagcgtctcctgcatctgtccctggcctaaacccgacgctaggctggagggagcgactgcgggccgggctggcggggactggggcctcgttgtggttcgtggcggggctggggctgctttacgccctgaggatccctttgaggctgtgtgagaatttggcagcggtgactgtatttttaaattcattgacacccaaattctatgtggcacttacagggacctcttcattgatatcaggactaatatttatatttgaatggtggtacttccataagcatggcacatcttttattgagcaagtatctgtaagccatttgcaaccactgatgggaggaacagagagcagcatttcagaaccaggttctccttcgaggaacagagaaaatgaaaccagcagacagaatttgtcagaatgtaaggtatggagaaaccctctaaatcttttcagaggagcagaatataggagatacacttgggtgactggtaaagagccacttacatactatgacatgaacctgtcagctcaggaccatcagacctttttcacctgtgacacagattttttacgtccttcagacacagttatgcagaaggcttggagggaaagaaatcctccagctcgaatcaaagcagcctatcaagctttagaattaaacaatgactgtgccactgcatatgttctactggctgaggaagaagcaacaactattgtagatgctgaaaggttatttaaacaggcactcaaggcaggagaaacaatttataggcagtcacagcagtgccagcaccaaagtcctcagcatgaagctcaactgaggagagataccaatgtactggtatatattaattgaagattggcaatgtgtgcaagaaaattaggaagaataagagaagcagtaaaaataatgagagatttgatgaatgaatttcctcctcttaccatgttgaacatccatgaaaatctcttagaatcacttttagaattacaggcctatccagatgttcaggcagtcctaccaaaatatgatgatataagccttccaaagtcagcagcaatctgttacacagcagcactgttgaagacaaggactgtttcagaaaaattctctccagaaacagcctccacaagaggattaagcgcagcagaaattaatgccgtggatgcaattcatagagctgtggaatttaatcctcatgttccaaaatatttattagagatgaaaagtttaattttacctccagaacacattctgaaacggggtgatagtgaagcaattgcctatgctttctttcatcttcagcactggaaacgaatagaaggtgctcttaatctgttacagtgtacatgggaaggcagtaagtattcttttccaaaagtaacactaatctctctaactattcattgaattcacaggcagtctttttaaatgagattgtctgggtttccataaggatttgtcgttcagattggtttcaaatggaaattagtgatgagatatttggtttattggtagaaatgcataatgttatattgatcccacaaaagcagaatgagaaattg

SEQ ID NO: 77882 - DNA, 972 bp, Homo sapiens
tttgttaaaaggagtctcgctttgtcccccagggtgggggccactggggcgtttttttgtccctgcaaggcccgggccctgggggtttaaacaatttttttggggtagccccccaactaagtggggctacagggggccccccccccccccgggttttttttttttttctttctttctaagtagagacagggtttcatcatgttggccaggatgatcccgaactcctgacttcagatgatccacctgcctcagactcccaaagtgctgggattacaggcgtgagccactgtgcccagcctcttggaaagatttggattcgcttcatggagccagggagcaggacataggtgaagaacccagcttgtggctcaagttggcctgaatagggttcgaggccctgctcccccgggcctctttgtccatgtgttcaaggaaaaaatgggagagtccaataccaaaaaggtggtcagagatccggagttgggcctgattccaaagaagggtcaaggccaaggcctcgagcttacgtgtggccaccagggggcagcagggatcggggtgtgcaggtggcctttcctccccgcctccactggcccatgggtcagaagtccagctcgggcatcagggtgtgcttgaccgggcagctgggggtctcgggttcctgctcgcagatgtccccggcaacacccatcctgtccccatccccattcccactcccgtccctgtgctctgcctcccaggctctctgctgggccggccagtccaggtgcgcccagcgggggtcagggcccccgatgacctcgtccaccaggtccgccaggtcgggcaggggctcgggtcgctccacaaggatgggcgcgaagggtcccaccagccagggcagcggcacggcctgcaccaccagctccagcagctcgtccacgcaggcgtgcgcgtgggccacgcgaccccggccctcggccagcgcggccg

SEQ ID NO: 77883 - DNA, 681 bp, Homo sapiens
caacttgaagggaaaaagtcacttacaaatacctacatgctggtttttaagcaactctcagtgtggttttccgaggggcctgcaaagagggaagtagtggaagaaccagagttctaaaatgaggcgctctagtaggaggcaacaagtaagctctgccccaaagctccttttaaaaccaacataaatgagtaacagaagaaaaggattttgggtccaggaagtaggctcattctccataaccatcggaaaggaagaggcccaggcagcgctccacatcctgaccctagcttttaacaccatcgttttggggagaggagaggaggaacgcacccacagtgaggtctccacccaacacttctccgaccccagcttcagcctggcgcaccttccttcccaaacccgcctctcccgcctcggagaccccctcctcctccctgccaccaaaggccacgcagcccccatctagccagtcctcacggaccctggaccaagacgcgcctcctggaggccgagactgcccgaaacccggcccctgcgtccaccgggagcgccacactctggcagctgaccggcggctgtcgccgggggtaaggttaccgctccgcttccgcggctggcctgcgacccggccacctgcagggcctggcaggcgcccgaactcatccccttcccgcggcccgc

SEQ ID NO: 77884 - DNA, 987 bp, Homo sapiens; identical to SEQ ID NO: 63242

SEQ ID NO: 77885 - DNA, 727 bp, Homo sapiens; identical to SEQ ID NO: 63243

SEQ ID NO: 77886 - DNA, 1862 bp, Homo sapiens
cgtattttgtgggagaggatatgggggtattttttccccggataaaaaaggttttttttaaaaagggagaaatgaagaatttttgatagataggtgtttttaaaaatgcgggagttagttattttttatatacttcttttttgaaggaaaatattagttttgtgattagggtaaatgggggggcccatgagaggttttttaaaaagggggccttttttttttttttttttttttttttttttttttttttttttttttttttttttttttttgccacttttgtattttattgtggaactgagtttttttttttcctttacatcaaatatcctcaatggaagaggggatattgcacacaaatatcataaaagcactacatattactttcactggaaactaattttctacattagatatgactggataggatagaagtgatgcaggattataagacataataccatacacagctgcagactgacacaaacaccattcagaacaagagagaggagtgtgaagtgcttctcagctgggctcaagaccacttctttccagtgctggaaagaggggctgcatgcagtgtaggaaaagcgtgtctctgaactgccacagggtgttctcgaaagggcagcccggtcttgatgccacttctccatggctcctgttttggggagctccaaacaagtgcagagaagctgcctattttttcccttccttttcagtttttgatgctgcctttaaaaatcaacttcatgaagtcacagattttttaacagtaaatagttttaataccaggtgaataacctaattgctttcaaagaaatgctcatccctaggctgcttttggtgtattgttcagttggttaaaagataaaagcttacagttcctttcaaatggaaacaggatctttttttttaaatctgaagcacaaaaaaaaaaagttattatcctaactcacaatatcattactgagcaggaacctcctgtgacaggtgactaaagagaggcaagaaaagcaaattcagaattgtagagcagctcctaagagctgaaatttggtaacagagggaaaatgaaaggtggtaagatttccattagcaaatgattaaatcttaattaaatgagtattggaaagctcctagactgcataagctattggagacacttaaaacattcatatacactggggaaaccattcactatgatatgtaacgttaagaaaaaaaatttttttgaactccatggaaaatggtgtttaaagaggggaggaggggaagttagtcattgtatccagtcccaccacaagactgagaaagcatgcacagggctcagggttttgagaaaggggacagaattggttaaaattgaaaatggaggatcatcgctaacatttagtctctgtagaattttgtttaagaatactaccaaaaaggtcatgatcatgagtgctatctcgatagaatcccatcatttaaacagagtgtaaattccttccactcaaatattcaatctatacaattggattaagtaatcagtatgaacaaagctcctagaagtctgtgtcgatctttagctctccccatgaatgtacatggtacattgtgatggctgttactaaactaatcgtgtatttatggaactagcaaaattaggttagtcacacaggcaggaaaggtgtctggaaggacaggagcaacctgtaatgcgaatattggttttcttggtatactcaggctctgtggtcattattgagaacaacggatggagaaaggtactgatagatttcataggaaaaagagccaggctgactagtgacagtttttacatatttttcccattaaatcccatagcaaaaaaaaaa

SEQ ID NO: 77887 - DNA, 2297 bp, Homo sapiens
ttttttgaagggcatcactttattccaaagttgatcattagtgagggggatttttacagtcttctttccctcctccctcagctgcctcctggttagagatgctaacaagaattacgatggtcctaagatactggaggaagtaaaaaagttgaaggccctacatattttagttcacgtttggcatttcttggtctttaccctatgtaaggcaaggagaaaaagacatgaaatttaaattacagataaacacaagtgtattagtccattttcacactgctatcaagaattgcccaagactggataatttataaaggaaagaggtttaattgactcactgttccacatggctggggaggcctcaggaaacttacaatcatggcagacagtgaagaggaaccaaggcatcttcacaaggtggcaggaaggagaatgaacacaggaggaactatcaaacttataaaatcatcagatctcgtgagaactatcacaagaacagcatgggggaaccgcccccaagatccaattacctccacctgatctctcccttgatgtggggattatagggattacaattcaagatgatattttaggtgggggcacagctaaaccatatcctacaaggaatgactgaaactaaagatactaatttcctttcccttggttggccaggctgtcgtcttcattactgactaatagagaccaagcaggttggtttaatcccattgccctctagtgctttccaatgttggccaaaatgttgcctccattttaaacattcctcctggggaagaatgtctttctatcatacgataagggagaagagaagaggaagcaagagaaaagtttaaagtgttgtacagaagtttccaaccacaggaggagcaaaacaccaaagaagttgtagaatacagggtgtggtgaagagttggagccccaggccgtgctgtctgagaaggcatgccaagccaaggttcaggcttcctaggaccatgtcctgcccggagaagcattccagtccttctcatcatggagaaatggccaagccccatgtggttacagggaagccacgtaccccacaccatctttgcagaaggtttccagggaagagacaggccaactgaatgacctccagcccatccttggccagagccccaggccgaggagagctgggcgagtccatgatgtctgatcagattggggctggggttcaggtcttaaacatcaggaagcccccaaatgcagtgcccgacaggcttctctttgttattgatccctgggttaactcaaaccatactcgctcacccttctgcagctcagccatggcaaagaccgttgctgtgcttccactcccctgcccagtggtacagactggagtccgatggtgacctccaaacaccagctgcccggtgcctggccctgggccaaattcaacgctcactgcaaacaggtagacaccacgctcaggggctcggaagtagccatgttcagggaagtagctgctgccaatgttgatgtatgtggtgttgaacttcactgtctgcagggcagccgtcccttctgaaaagctggcatagaaggccacaggggatcctgcctcccagagcgccgcgcccaaggcacctggcacaggccctgtgacccgtatgtccaccaaaggctccgcttccttcttgtccctcttccggggagcttccaggtctttctgctgcttcttccctttcctgctcagcatggtctgcagcttccccaggtccaggctgacgttggcttccatgagcccttggaagttcccaaagaggctgtggaagagccgctggtgctgctccaagctgcgctgagtggcgaagagtgcgttgtggaaggccgtgaagggaggcgttgagggaggcggccccggccccggcctcagcctcgcagcaccgcccccacattcttgacgtcgttgctcaggctctggagctcccgcgccagcccggccagggcggtggtggcggcctcctcgcggcccgcgtcgtggctgggctccaggtgctctgccggccgcgggggctccgaggcctgctccagggccgtcactcgggcggccagctcgtcccagccgagcgcctgctcctgcagcccgctagcggcgtcctgcagggccacgcggatctgctcgtagctcaggggcagcggtcccggcgtctgctcagacatctcctccagcacctcctccccgaagagcgcggccagcaccgcctcggtgccgcagcgcgtcctccagcagggcggcgaaggcgctgagcagctggcgcacc

SEQ ID NO: 77888 - DNA, 2046 bp, Homo sapiens
ttttttttttttggttaaagtgctgatgccatttaattagattgtttacaaatttaacaggatggctacaaagagatcttattttaaaagcagctgatggtttggaaatgagagaactacagtggtgaagagaccaggaggcagctctcagtgaaaccaacattgcggatgcccttcgtgagccttctcagtcccagcaggaagcccacaacactggcctccccagcctgcctgctgacaacacctaggcttactttatctaaaatcagagtgtaccaggtctgtagcagaaaataatcaactaaatgtcagggacctatgagtcatttaaaacaaaagagaaagtgaaagccattaggcaagctatgtgctgggctgctaacgtagcccctgcagggaggggtcaggagcgcgctgcagtgagccttgggtctcgcaggcccagccctgctgcaaggagccagggcacccaggaaacatcagcacacacacacacagggaccctcccttcatgtcacttgttttgctgccctaaatggcttcttgcaccctaacccctgatcctggaagaaggcagagaaactggcccgtacagagacctgcaattctacgcaagcttaacacaactatgagacagaagaggggcacgcagaagaggtgggcaaaagtggtcacaacggcgggggatgctttgaatactggatggtgtccagagccgcttcgatgtcataattctttgtctgcaggagcctggtgagccagccgccttcatcagagaagcccatggacagcatctgggagagggactcaatcagccgcgggtcagcctctggcgggagatgtgggtacaaggcagcttccttcagccctgtgggtccctcctgggaggggtccagagagcttggcccttcggattctggcatctgtagggactggagttcacctgtagacgggtccacttcttttgaagacagatgggtccagtcatcatctcctcctgaacagttatccgactccatctgttcctcagggcgcccctcggactccaaggcgatcttcctcatctgctccgccagagactgcgtggcgccctcaacattcccacccggcttgctggggtcagagcagcagctgcttggctgtgagctgctcttctcctctgtgctggaactctctggagagacgggggtcaggcggcttcttttccctccgtgctccacatcgatatcaacttcaatgcccagagggctaagggcagctgccacactctccccaacgttcttcaggaaattcacactcggatcctccgatggaccagaagctgattctgccgtggggccagggcgggcctcccctgcacgaggaggacgtgggctccagtttcctggtggacccatttcccatcctggccacccgaagtgtccgtgtttcaccttccggagccagcggctgtgcgagaagccctcagacaggtgcccgaaggggctggggaatgcgagcttggtgtgcccccggtgcaagccctttccctcgcagacgctacacaagtcgtagtctgggcagacgctgcacttgtagcgggttcctaccacaggcccattgcagccatcgcagatcacattggggtgcaccatgttgcggggcgcctcctgagcacacggtgggcggtggtcccgccggcactcttttttctctttaatgtagattcggaagatgtcatccttcacgtaggacatggccattgtcaattcctcgtcactggaaaaggcaaccaagtccccgtcctcatcgcggtagtgcgcctggaagccgccaggccgcagcgcggggaacagggcggccacccggctcagcagccgctcgcagggtcccggacccgccgcagcctcggcttccgcctcaggctcggggctgcagcagaagctgaagcggcgaatctcgcgcgccgcgtcctccttgcccagaaggtaggccttcacggtgagcgacgccatagcgagcggcgagctggcggaaaatgggccgtcccggtcgcagccgccgcgc

SEQ ID NO: 77889 - DNA, 628 bp, Homo sapiens
agattttctggcacctcagtctggacaacgctgttcatgctttcccttcctcccttccatgatcaccttgtttcttttaacccctctttgcccaaactaaaatgctttcttcactctgtggaattcagacccatcattttacttcgcattcatatttcataatctactttcataacactttgctaactgtacttacatcttctctgcaggaggtgggaatttgaaagggaaagtaactgagcttttgctagacttagaaaaacttctgggtgtagtagagatccttgttagacatggggacaaaggcgagcatcccaaaggactccccactagggtgtctttaaggcaattggagcaaattcaaatgagatggctcaaagaaaaagaaacaattttcttgagagaacaagaaatttggcctgaaacttgttctttacattatcatactattttacaattggacttattcagtaaaaaggaaggaaaatgaggagaagttccttacgtacaggcttctatggccccctaccaggattctgacttaagagtcaactgcaggatgtgtgtggctcatgttacttacaggcaccaagaaaccgcgtgggatatcctcgatgctcccttcctg

SEQ ID NO: 77890 - DNA, 2949 bp, Homo sapiens
ctgggaagccaaggaagccaaaccacagcctcagcagcaatcggacccagaacagtctgaacttagtggctgccagcttcttcccaatccccagccaccacaccccctcttccaactccagaccaaccagagaaagccaaatatacccccccaaccaaccaaagatgcccctccagttagtccgctctgtccccatgccaacaatctccaatcacagcacacccagagccttccctttttttccactataacatttcacagtccctgcctgcctttgacccctgccaaatacaagcaatcatggctgactcctttgcaaactttgaccaaatggcctctctgctcttgtttaggtggtttttatttccacatctccaacagggagtctggaaacaaactgacaatactcgtgaaatcaacacccagatgaggtagaccagcactccaggatgcccctccccagtatccctcccctgttaactgttcccctggcttctaacaccatggatcagttttgcttatttctgtactttttgtaggaagagaatcatacaatgaattctctcttgatgatgaggactctgacctcttttgcttgacctcatgtctgtgaaatttatccatgttgctgtgcatagcgatattttcattcatattcgttgctgtgcagtagtattcgaccctgtgacttcactgtagcttcaactgtggatggacatttgggttggtggatggacatttgggttgtttcaggtttggggctacagtcagcgtgtggttagaaacattcttgccaatgtctcggtggacatagctttctgtggtgtacatacccaggagtggaactgctggatcagtttatacgtatgttcggcttttggtagatactgccagttttccaacagggtcacaccagcttggtccattcaggttacaatgaaacaccttagcctgggtaatttgtaaacaacaaaaaattatttctcacagttctagaggctgggaagtccaagatcaaggtgccagcagatccagtgtccagggcgggctctctgcttcagagatacggtgccttctcactgcatccacacatggtagaagggacagaagggctccctcaagcctgttttataaggtgctaaccccattcatgatctccaccctcatgacctaaccacctcccacaggccccacatctttattatttttttgagatggagtccctgttgcccagcatgcctggaccctcaacacttaatagtgataataacatatatccaacccttggtaaatgccaggactcatcctaagacctacatcgataaactcctttaatcttcacaacactgggaaatatatatatatacttatcctccttttacaggtgagaaaactaagggacagacagataaatcccttgcccaaggtcacagagctggtgagaggcaggttgggacgcaggcctaggctgcctgtgctgcagagctgcacccttgaccactgtgcactctgcctctcatgccctcagctctaccaggttgggcaggagagagatgggagaagcagtggccacttgctctgggccaggcacttggcaaacacctgtaggttcaatctcagaagaacccagtgaagaatgagccagatactcactgtccacgtggagaagcaagaccagaagtctgacatctgccaaagccacacagccccggaagtgagggagctgaaatccaaacctctgcctgagctctgcccaccaggtgtctcctccccagcccatgtagggagctgaagagaatggagaccagaggggagggaaagaggaggctggagaggagctccacaggtcttcctcaggcctgacagctgcccctggcttccctgaggtccacaggaacctccagaccttcccaggattgcccagcaggggagggggcccagtggggcaggaactcaaggcagttgggctcctggagagcagccaccctgccgctcctgcctgcctcaatgcaacggtctcaggctgggctgccaggatgggaggcaggtcttgtggagtcgcccacacaccacatacctgccctgaggccttcagggaccaatgcaacaggagaggcattcccaagcaccacatgttccagtggtccctcctgctccacctgggccaacagggctgaggcctggaggaggaagctcctctggaggacatggatgataacctggattgccagtggggaaggtctggagcactgggggcagcccaggacccacaaagccaaggacggggacccacacaaggcaccgtggggacagagatgctgctctcaggacttggttcagccaaggcatgtcctgctgccaggcctgcagtcccttaactcccctctgacccagcctccacaatccccaagaaagggacaaggggcttcggagaggggccaggtgtactgcaggaacggaacagatgggtggtgggaagagcccagggcttcactagtgcagacgccgccggtacagcaccaccaggagtgtgactaccagcacccctgtcacagccacctggagccacagagccccaggtgagggcctgtggcatggcacctccctctcctggaacttccggtcggcttgtggcctggggccgccatccgggtccgcaggtggcccagggttgccctccaggagctggatgctggggttctcagccacgtggatcccaaaggtgccctcggacttatactcattctcctctgggccatggcagggccccatgcccaaggaggtgctggcactgatggcaagatcctcccagcagcccgagaacgggctgtctacctgggataccagcacgccaggcttactcagctccgcggacgcgtagtcgaccgggaattcggaccggtcgtgcggcgtacggcttcataaggtttcaagggggggggggggggg

SEQ ID NO: 77891 - DNA, 1318 bp, Homo sapiens; identical to SEQ ID NO: 63249

SEQ ID NO: 77892 - DNA, 1598 bp, Homo sapiens; identical to SEQ ID NO: 63250

SEQ ID NO: 77893 - DNA, 2715 bp, Homo sapiens
agctgcaggtcagcccagcagaagtggcactgctccgccaagagtctggctcctggcaggcgctgaggatcagcagatctgcactgccagagcctgtctgtttaccgcccaccccacctccctgctgcagcgctagaaaaagaatttgtcttccttggggaggaagatgggcccgaattagcagtggagtcctgggcagaaggtggggaaacttggccaagaacagagccacggtgtccacgcaatcacaccatttattgctgtgctgtccggggaagacaccgtgcaaatgccaaagtgcactgaggagaggggagggtctgtgactcccaaaccctcgaatattttatgaatctaagagtccagacgcagttcatccacggagatctgcgccccgtccacaccaacacccacgtttgtgcacccacatgtgcacggtgctcttcagagcggcgaggtcctcccccgcggggaggaatgtgggagaggcagaggtcactgagtttcctcctgtttcgtgtcacctcttggcaacctgtgcctggcttctagaagcggcatgggcaagaaaaggaagcaaaagaggctctggcctgctcctccttgcccaggagcaaagccagcaactgtgtagtcccgctgtgaggtaatgcctggcgccgcccgtgtattcctgcaggtcaagacagattcgggccgggtggggtggcagcccagccacggagggcatgcagggagaacaccaccaggactggctgcctgggccgcagccacttcccgccaggctcaggggcctggagtcagggggcgtccttcccttatctgtcccctgagctccctggctccccagaagggtcttctatcaagaacactgggccctgggcagaagggagggcaaggcccggcctcccctggtctctgacctctgcccaggtgctgtggacctgctgagacgggttcagaaggcgccagagaggaaccagctggacctgagcctggctcctgggcccgctcccctcctggctgcagctgcaccaaggttctcattagcaggggcccccgcctgggtgcggaacatgctttgggcatttgccatgaggcggctgggagttttgcaacagtttccaggggagcagagcaggaagaggggcttccccgacgatcccattcactgctccttctccatgggccaagccatgtaggcaggggacaaaatgtcaggtctcagcagctcccatggtacctaatgtgacacagacaaggctccaggccccatctcactggcctgggctcctgaccagtctcggagccatcagctcactccccatcttgcccctggagttgagtcacaggcttggccctggccacaaatggccagtacagaaggggccaggcacacagcacatgagggtctggggtctgggtgctcacctggctgtcacccaagctcctccaagaaggccccaaggaccttgctgcctggaaagccatctgtttggctccttggcacctggcatgcccattccctgaaacccagtctggtgtggtcaacatgccgcagtctccttgagtgagcccgggagcagaagccccatcccaggaggggagtgtggcggcagtgccaggcaggaggcagctctggggcagaggtgtggacaggagtctcccaccgccctggtgctggctcagacctgcccttccggggctggggagacgttctggcgaggatcatgtgggggaaacttgacgaaggcaatggcagccagctccttgcagaactcctccagcaccaccacgccctggaggagggtctggtggtccagctgctccccaggagcctggcccgtcaactgcttgcgcaccaggagcagcttgcctgggaactggggtaccctctggattctctgcatcaagtccccgatcaccctcaccaacacggagaataggctcctgcagccgggggccaggctgatgtacggatccagcaggtactcatgaatatgggggtgggggaagagggcaagccgggacaggaccgaggtcacctgcaggttcaggctgtatggctgatccagaatccgggacatgcggtcaaacagcactcggaggaagtggccctcgaagaaaggtcgctcgggctcatgggggtccaaaggtgtgggggtcagaggccagccccaggaggcgacgcgggagctgcactcctggaacaggccataagcatcgtggacgtatgtgtcatagcctgtctcctccaggaaggcagaggtcttggcttcctcggggaccaggcacaggaaactgttgacgatctcggtcactgctgttttgccatcgtaactggtagcaggagctaggcgaggctttgcgggagtttgaaagccggaatccaggaagctgtcggtgaagtaggggtcttcctccaggtctagggtgtcctcatagctctcaggctctggtgagccccaggccacgtaagggcggccctcaaggttgcgcaggaccaggctgtggatgatcccctcgtggggcttctgcagcagctcctcaaacagccggagtgtggtgatgctgatctcatcagagaggtggtcacaatgcccgatgagatgagcatacagggtgtgggggttgtccccgggggcttcaggctgccggtctgtgcccaggaggaaagccacggcctcccgcagcagcgcaggggagcgaagctgg

SEQ ID NO: 77894 - DNA, 1669 bp, Homo sapiens; identical to SEQ ID NO: 63252

SEQ ID NO: 77895 - DNA, 996 bp, Homo sapiens
  misc_feature (1)...(996): n = a,t,c or g
aggaccgcccacataggaccgcccacatgggaacgcccacatagaaccgcccacataggaccgcccacatgggaccgcccacatagaaccgtccacatgggaccgcccacatgggaacgcccacatagaaccgcccacataggaccgcccacatgggaacgcccacatgggaccgcccacatgggaacgcccacataggaccgcccacatgggaccgcccacatagaaccgtcctccagtggtgaagcggaaacacttagctttatccaccctccccactgggaactgggcacgcctgttgtgagtgccctttcctggaaggtgtttttatctggaagatagaatccaagtatttataactcattgtcagccaaatgctatcatgaacgtaggaaacttgatttttttgttttgatcatggcctctacatgcacctttccagagtggtctcttctcaggccctttttagtccctttccaaagctgcccccaccaccctgctcctctggcctcagtgcacagtggcccccagcctcggccaggcctgctctgctcagcgcccaccgcccaccacccctcctgcttccccgagcctgaccctgttccgcccactggcaatcagggctgcgcacttccctgtccacggtccccaggccttcctgtcttgtcccttttgatcattattaactcagggtttcagctnccaaacctcgctgagttggtgccagctccgggtcantccctggggtggggaatcggatcattcctgactcagcttataccttaattttatttgccagaggattcttttcctcaaaatgctctggcatttggacacacatcacatgtcgatatttgcataggagtcattttcagtggaataacatttttaatgtgtggttttacggttcaaggaactacatgatgattttgaggaaacacttgccagaaactaaattaacgaataaaagatttccagtgcccgaaaaaaaaaaaa

SEQ ID NO: 77896 - DNA, 1349 bp, Homo sapiens; identical to SEQ ID NO: 63254

SEQ ID NO: 77897 - DNA, 1438 bp, Homo sapiens; identical to SEQ ID NO: 63255

SEQ ID NO: 77898 - DNA, 851 bp, Homo sapiens; identical to SEQ ID NO: 63256

SEQ ID NO: 77899 - DNA, 1058 bp, Homo sapiens; identical to SEQ ID NO: 63257

SEQ ID NO: 77900 - DNA, 462 bp, Homo sapiens
ccccaggtccgcacggtcaccagatgcccatggctattttagggaggggaggaagctttccccttacagggtgagcctacctgtccagtcaccaaggttgagggggggctccgaagcccgccccccccccacccccagctggaggcccggtccacccagccagccagcccagcactcagcatccccggcccacccagccagccagcccagccctcagcatccccggcccagtcacccagcttctcaatcatgtcccgcagcatctgatcctcctcttgttccctgaaacgggaccagatggccatgagcgacaatggcaatggcaaggtgccctggaggggcctccggacagtctccagcagtggcaccccagccctgagtcccgcctggacccatgccacctgccccttcctgctgacctcgagccgggtgaattcctccacactgcctacgaatctcaaa

SEQ ID NO: 77901 - DNA, 2855 bp, Homo sapiens; identical to SEQ ID NO: 63259

SEQ ID NO: 77902 - DNA, 1014 bp, Homo sapiens; identical to SEQ ID NO: 63260

SEQ ID NO: 77903 - DNA, 438 bp, Homo sapiens; identical to SEQ ID NO: 63261

SEQ ID NO: 77904 - DNA, 1266 bp, Homo sapiens
tctcccaagagtcaaagtaggtaatggaggaagaaggatctgaagacgcagggaagtgcccaggcccccgcagggaggatgaaagcagcggtgcctgccacgcccgagaagcaggctccaactctcgtgctcgtcagcagccgcactgctgcctgctttgtcattttatgcttatgtaaaaaaatactttttgcaagaaaaatctacaggtacaaaatgtcatcccagccccatacagtaccaagtaatatataggcatatatatatatatatatatttatgtatttataacagaaaattggatagaaattattccaggcatatgggatgtggttcccctgggccagaaccacgtagggcagaggagccctgccctccaagtgtgcatgcccaccaaagggacaggggctttcaggagtcacaccagatcacgcttgggacctttttagagcctggctgagccaccctttccagagttccagtgagcagggggcccctcagtgcatcttccccacctcccctgcttccagggacgctgggctgcagacttcgcagctgctgccacatggggttggagcctccaacagcatcatccctgagtagacctggtccactgagtcccacaggtcggctctctgcagcctttccctgcaggtcaccaccctctacaggcaatggcaaggacgcgacatcacaggtagacagcccacatcctctcatccttccggtctcctggactggagttgtcccggtgccctggagacccagtcactgccacctctcccctgcctggactcagcaggggaaagactggaggccctgctcctgccctttggctctgccagcacccccgaccagccctatatctcctcctccaccttcaagatcatccctgagaagacctcgagccccgagtgggtgcccttggggctgtcctgggagcctccagcaggcccctgggccactccactggcaggactaccgtcctggagtgagggtgaggcttcccgggtagggcgtgcttccaccagcctctcgagggtccggttgagggcctccacgccatcggccagacgctggctctgctcggccagccgctgcagcagcaggttttgctgggccatgagtgtgctctgctgctgggcccaggaggacagcagggcgccctgctgccggtgggagtccagcagctgctgctcaaatacggacgtttcagatgctgccgctggggtcctcctgagggcaagggaggtgctgaattccggc

SEQ ID NO: 77905 - DNA, 1554 bp, Homo sapiens; identical to SEQ ID NO: 63263

SEQ ID NO: 77906 - DNA, 887 bp, Homo sapiens; identical to SEQ ID NO: 63264

SEQ ID NO: 77907 - DNA, 603 bp, Homo sapiens; identical to SEQ ID NO: 63265

SEQ ID NO: 77908 - DNA, 1798 bp, Homo sapiens; identical to SEQ ID NO: 63266

SEQ ID NO: 77909 - DNA, 767 bp, Homo sapiens
gctggccaagtaagccactaacctaggtcataaagagttagctttgggaccatttatttccatgatcaaaataaatacatctgggtttaacctgaatcaccatttagtaacatagtcatcagtttcagtacctttgtctttttccaggtaaaactctttagcctcttatcaaacatgttatgccacatctaaattccatattttatgtaatataaggaaaaatagttttatttgtatgatttatacttcatgtgttaggaacctgtgactacatgttctgaactgttagtaagaaaaatggtattggataccttactctttaagatttttaattatttttggtaaaactgggaaatagccgtctgatttgcattttattttcttttgtattttaaggatatggaatattatcttgtaaaatggaaaggatggccagattctacaaatacttgggaacctttgcaaaatctgaagtgcccgttactgcttcagcaattctctaatgacaagcataattatttatctcaggtaaagaaaggcaaagcaataactccaaaagacaataacaaaactttgaaacctgccattgctgagtacattgtgaagaaggctaaacaaaggatagctctgcagagatggcaagatgaactcaacagaagaaagaatcataaaggaatgatatttgttgaaaatactgttgatttagaagggcccaccttcagacttctattacattaacgaatacaaaccagctcctggaatcagct

SEQ ID NO: 77910 - DNA, 448 bp, Homo sapiens; identical to SEQ ID NO: 63268

SEQ ID NO: 77911 - DNA, 499 bp, Homo sapiens
  misc_feature (1)...(499): n = a,t,c or g
aaacacacgtaaagaggttcaataggtntaatgtggtaaaaggagatgtatttaaacatggcaggcatttgcccgaagctgcttgtaaataagctgtgggacagccgctgcggaagatgcagagaccccagagatgcagagaccccagagatgcagagaccctagagatgcagagactccagagacgcagagaccccagaaatgcagagactccagagacgcagagactccagagaggcagagaccccagagatgcagagaccccagagacgcagagactccagagacgcagagaccccagagatgcagagaccccagagatgcagagaccccagagatgcagagactccagagacgcagagactccagagatgcagagaccccagagatgcagagaccctagagacgcagagaccccagagatgcagagaccttagagacgcagagactaaagagatgcagagtccccagagatgcagagatcctagagatgacgaaa

SEQ ID NO: 77912 - DNA, 560 bp, Homo sapiens; identical to SEQ ID NO: 63270

SEQ ID NO: 77913 - DNA, 2545 bp, Homo sapiens
ttttttttttttcccattaaaaaaataggtttaatgcaggtgggtcatggcatgacgaatttcacaggcaccggggacagcaggcggccaggtgctcagagggcaccaaggtgccacaactccctgcagcgttgacaccgcacgagcggcaccaccagccccctcccgcctcccgtcccaccttcaccctcagccaagaggcttgggtgactctgagtaatacgttaacaaaaaacaaagcttctttgaggaaacagcatgacttagtgcaaaagattctctgcagcaagaaatgaggcccacgcagggaagctcccgcctacctgcccagggcgtggacgcagcccgggctcatcagaggtcatccacagaagctgccgataaattagagagcacggtttacggccagagattttttgctttctctacctgatttagggtttttcaaaaagtttctcttccagtggcacacaactgtcctcatggctcctgggccactggtccgcctgacagggtagggtcacaagtcccacccatgcccagagtgtggggaccatggatttgaggtgacactagggttgtcagtaccacaccctgtgtcctgctctagggtagcctctgcctgttgtccttgcaatcattattcagggcgccctcccacttgcccccaaagtcacacggccatgggcagtccaccatagtgctgccgtgactgcaaggctgaggagcagagcaaggggtcctgggtgagacctcggcccatggtggccaccctccctgaacacaggcatctgcgcccctccagcccacctgcccctgtgccatcatttgggccccccagacactggaggacagcgtgagataagatctcagcatatacctggggctctaagatgctgctggtgccacacaggctctggggctgtgtttgccgcactgaggcctctgccgcctgctccggacacttgggacacgcgtttccatcctggctcactgaagcctcgatctcccaggctttctttgacggtgttccctcaaagaaagaggcccaaagccctcccccgcaaaaaaagccagaaaggaatggaggtgcctccgcagaaatccagagcatctgcaagacatcctcacagccctcccagaacaggcagacaggccagtgttgctggagtcagcccctggctcccagggttccccccaggccagcccctgagctgggagcctgctgaggcccctcccacctgagcccttctccggccccccgctagactgcatctacacaatccaaggggaccctgaaggctggctggggactcaggacccacacagcccctcaggatgacacacacagggtggtccgcgggcagtgccaggcctcaggcggcccagggcagagtaagcagctttgtggcagtgtggtgtgtcagcgaggggagccttccgtgtcccgttggctggggctggggccagggcacgcagaaggggctgtgcagccaggagggcccccctccggaattgctcctgggcacacagccctctgtgtccaggggcctcccagggtgatgtctaaagtccctggcagctgtggtcctggagagaggcccacagagaggcggaacggagggcccaccccgcagtacgacccgaagacatgtgagcaggagccaccggcaggtgggcgctgcccctgagagtgcatacggggagggtgggtccaggaagccagcctaggggtggtgtccgcgcccccatcacagaagtctcagccctttcttttctctccgtgggcgccgggcagcagcgactgcctgggggatgggcgaagggaaggcgctggccgaccccacccatggagagaacacagccacaggccgggacgatacatcaagctcgcacccacggccctcacatgtccacgaagaccatgaagcaccagcccaggcccccgaccagcagcatggtgacgtggatgccatagacgagcagctcgttcaccaggcggaagtccacgcgccggcggcccagcagcagcagcagcaccgacagcttgcgctggaagcgcagcaggacgcgaacgcccaggtactgtaggcagaagagggcggccagcgcaccccagagcgccgcagtgaacaggctgcagctaaagtagagtaggaagcggatgaagccgtacagccagcgcgtcttgatgtacacgtcgaagttgttgtacttggtgcgggccaggtgggaggcgcgcacgggcccgcaggccgcatgcaggcaggtggtgtgcgggccgtggaaggagcgcacccgccgcggaatgggcatgaccggcattgggccccggcggcggcggcgctaggtcgcagtggcggcggcggtgtccaggcggcggttggcgtaggggtcatgggcgcctaggcctgggagcccgcagctgaccctggggggaggcgtcggcccggtgccctctccgcggcggcgccggcgtcccggacctcggggccggccggcggtgctaggggccgggcaagagggtgcccctgtccctcggggc

SEQ ID NO: 77914 - DNA, 553 bp, Homo sapiens; identical to SEQ ID NO: 63273

SEQ ID NO: 77915 - DNA, 824 bp, Homo sapiens
  misc_feature (1)...(824): n = a,t,c or g
ggccgtccttcgcccgcatgctgcggagtctttacccgcacacgtgggtcttgaggccgtcctcannnnnnnnnnnnnnnnnnnnnnnnagccacagaacgtgggtgtccacgtcctaggtccacgctccatcaaggccaaggctggaaaccagcgggaagggaaggggaagctgaacctcagggcttcccatcagggctggagcagacacactgcaggcaatcccagctgggtttcactcccagctccctcgtgtgagccgcctgtaggcccagggctgcctccccctctctgagcctgcatttccccagctgtgttgggtcatgtggtgcctgctgggcagggcgggtgcaggcgggaagaccaaccatgatctgctgccccttcgtcctctcgccttctccagaccacgccatgggagggagctgggtgcggtgggaaagccccaccctgggagtccaggatctgggctcaagtcccacatgccccacatcgccgtgtggcccaggtgaggcactcctgcgaagctctgtgcccaccctcccacgccaccctcccatggcactgctaggaaggaacttgaggcccagagaggtcgagcaccttgacctttgaggcccgaggtcaagttgagctttcggccacccagcccaggccccctctgctcggacctgagcagggctgtgcacccctgcatgctacccaggccctccttccccaccccacaggcaaacctgcccttgctgcagcgggagctcctgcactgtgcacgcctggccaagcagacgcccgccgaattccaccacacggactacgatctcgaa

SEQ ID NO: 77916 - DNA, 1228 bp, Homo sapiens
tttttttttgagattagacagtgctccgtcggccgccgcaagacacttttaatatccctgtttcccaggctgtagataaaggggttgagcatggaggtgaccaccgtgtacatcactgcagccactgcaccctttctgggggaagatgacacatcatctgaactgaggtaacctccaacgcctgttccataaactcagcaaacaactgacaggtgagacccacaggtggagaaggctttatacttcccacctgatgatgaaaccctcagaatggaggaaacaattttagagtaagagaaaagggtccctgagatgggaagaaaaccaaatatggcagcagggaaatacatgattatcttattggtgaaggtgtcacaacatgcaagatgggggagttgagaagggtcacagaagaaattaggaatttccacatccttgaagcaggtcacttgtaaggcaatcaagttgtgcagctgggagtctaaaagactgagaaaaaaaaaaaaaagacaacaaaactagaaaggcacagaaacacgggttcatgatggtgaatgatatagcgggtgacagatggctacaaaccagtcataggccatcacactcaggagcatgtctctcttccatgcctccaaaaatggcaaagagagacatctgagtcaggcagcctgcataggagatgactctgctgtgagactggatgtccacaatcatcttggggaccgtggtggaggtgaaaccgatgtcaggcaaggacaggttggagaggaagaagtacatgggggtgtggaggtgggagtcagggctgatggccaggatgatgagcaggttccccagcaccgtgaccaggcacatggacaggaacagcccagcaaggactggctgcagttctggatcccctgagacttcttgtacatgctgtagcactgctgcagcaccgagctataaaccttgtccaacaactcctcctcttgatattcaataactggttttccatctttactgtttttcaattataggattccgaacaacctacaaagtttgataaactgaaattatacaatgaattcattagaccatgtttattttgccttagtttaaaaactttgcacatgctacagcaccagaaacacagcttcttaaagcagccccaagaacgaataaagcaaataggaagaacttgattttaaaactgcaacgaattttattttaattttacttggatgca

SEQ ID NO: 77917 - DNA, 938 bp, Homo sapiens
ttttttttttttgatttcagggcagcctcttcctagtgtcagactgagggagaatcaattttgggggagaccacatctaatggataaaagagccacaggattacaaaagggtggaatagttgttacaagaaggtcacatcatcctggcactgctcccagaaccagtgggcctcgaagcccagcttggcactctcatcctctggtgactcaggtggtccaccttgaagcctctcccctgggggcttccacacagctctcaagctccctagcctggtggctgccacatccacctcagtcctggccctctctccaccagctataacttttgcccagtccatctcggaacgtggagccccaggtgggccctgttcatccagctcgctgggggccactgtgtccaggaagctgccaatagagacactgtccagccggtcggtggtgctggtgtctggcaggctgtcccagctgcctcgccttgagcggcctgggctcccgcctgtcaggctatattgactgctggtgaggctgctgcaatgactggtcaacgtcccccgctcctccaacagccagcgcactgcctcgatgccctcattcaaggtcaccagctgctgcaggatcttcacatcgatggctcgcaggtaagccagctccatcttcagcgccatgatcttgtcccccaagtcgtggccggtgctagacgcccctgggagcagcagggcgccagaggttcccagctcacactcgcctcgcagcccgcggagcagcccttcaggggtcttcctgcccaccttaccctccacatcccgcaggtcaggcgtctgggactccacggtcccctccatgcgggcccaagcctgaaaagggctgggcgaccggacgccggggaccggctcccgggggaattccaccactctggaatagtgaatcgaaattcaaaa

SEQ ID NO: 77918 - DNA, 804 bp, Homo sapiens; identical to SEQ ID NO: 63277

SEQ ID NO: 77919 - DNA, 1440 bp, Homo sapiens; identical to SEQ ID NO: 63278

SEQ ID NO: 77920 - DNA, 1165 bp, Homo sapiens
  misc_feature (1)...(1165): n = a,t,c or g
aattcgctggcaatctcccanaaagtccagcaatttgaaagtcaaatccacagaaagaccatcttccataacaaaaggaagcactttttttaggttgacacttgcaagcaggagttccaattattttcgcggttatcaatttcatgtaattgcaatgttacccaaaagtttcttgatttgttttaaacgggctgaataacaatttcttttcaagaagaaaaacctaaacagaaatattcacaggggatgctgaaaagggtcaataatgctagtcatttcaattctcacacataaaggaaacgctgatggtctttggctactcctccagaacttttcctgtggaagtcaccaaccccctatcttagcttcttcatcttccaacaaatttcctgccgaactagtggccgctctcgcttctctgctttgctctccggaaaaggacacgggtcacccagatttcagcgagtttgccctcgactctgacgaaaaggaatgcattgccagcaacttttaagtccgctttttaaaaggcctgtggaaccaatccagacttttcctttgcattaaagtttttggctgagctgagactaagggggccgtaggtgacattggaagaagtcagggcattagaggctcgcgggagccaccttgggggaaggggagaccccttgacagcaagggagggatttgaatgggaggctccgtggccaaagttggggccgggatccggaataaggggcggcttggggctgagggaagctgtcggggcgcggcacgggcagcttactccggggcgacgctcttccacgcctcagaaaacggggtgtcccaagctgggggaaacagaccacccgcagtgtcccaaagccggggcggggctgtaagggacgaaggactctcgcggcccagacagcggaaggcgggccccgtgtagaggaggcccggccgcctcagctgccccaagcccgggggtctctgcccgagacaccccctcccccggccccggacgctgacaccaccaccgccctcaggcagtcacatctcccgagctccgccgagggacccagccgccccccgccggtaggggccgtggacagcggaggggctcctcagccgcaggacccgggaaccggctccggctccagcgctgctcaggcacagacac

SEQ ID NO: 77921 - DNA, 2112 bp, Homo sapiens; identical to SEQ ID NO: 63280

SEQ ID NO: 77922 - DNA, 1073 bp, Homo sapiens; identical to SEQ ID NO: 63281

SEQ ID NO: 77923 - DNA, 816 bp, Homo sapiens; identical to SEQ ID NO: 63282
  misc_feature (1)...(816): n = a,t,c or g

SEQ ID NO: 77924 - DNA, 837 bp, Homo sapiens; identical to SEQ ID NO: 63283

SEQ ID NO: 77925 - DNA, 3062 bp, Homo sapiens
aaccctgagacactttacagccctagaccctaaaaggtcaaaaggccatcttattctcaaaatacattttattagccaatctgctcccgacattaaataaaactccaaaaattagattccggccctcaaaccccacaacaggatttaattaacctcgccttcaaggtgtacaataatagagtagaggcagccaagtagcaacatatttctgagttgcaattcctccttgcctccactgtgagacaaaccccagccacatctccagcacacaagaacttccaaacgcctgaactgcagcggccaggcgtttcctccagaacctcctcccccaggagcttgctacatgtgccagaaatctggccactgggccaaggaatgcccgcagcccaggattcctcctaagccgtgtcccatctgtgtgggaccccactgaaaatcggactgttcaactcacctggcagccattcccagagcccctggaactctggcccaaggctctctgactgactccttcccagatcttctcggcttagcggctgaagactgacactgcccgatcgcctcggaagccccctagaccatcacggacgccgagcttcgggtaactctcacagtggaaggtaagcccgtccccttcttaatcaatacagaggctactcactccacattaccctcttttcaagggcctctttcccttgcctccataactgttgtgggtattgatggccaggcttctaaacctcttaaaactccccaactctggtgccaacttagacaatactcttttaagcactcctttttagttatccccacctgcccagttcccttattaggctgagacactttaactaaattatctgcttccctgactattcctggattacagctacatctcattgctgcccttcttcccagtccaaagcctcctttgcgtcctcctcttatattcccccaccttaacccacaaatataagatacctctactccctccttggtgaccgatcatgcatcccttaccatctcattaaaacctaaccacttttaccccgattaatgccaatatcccatcccacagcatgctttgaaagggttaaagcctgttatcacttgcctgctacagcatggccttttaaagcctataaactctccttaaaattcccccattttacctgtcctgaaaccagacaagccttacaagttagttcaggatctgcatcttatcaaccaaattgttttgcctttccaccccatggtgccaaacccatatactctcatatcctcagtacctgcctctacaacccattattctgttctagatctcaaacttgctttctttactatccctttgcacccttcatcccagcctttcttcgctttcacttggactgaccctgacacccatcaagctcagcaaattacctaggctgtactgctgcaaagcttcacagacagcccccattacttcaatcaagcccaaatttcatcctcatctgttacctatctcggcataattctcataaaaacacacgtgctctccctgccaatcgtgtctgactgatctctcaaaccccagcaccttctacaaaacaacaactcctttccttcctaggcatggttagcgtggtcagaattcttacacaagagccaggaccacaccctgtagcctttctgtgcaaacaatttgaccttactgttttagcctagccctcatgtctgcatgcagcggctgccactgctttaatacttttagaggccctcaaaatcacaaactatgctcaactcactctctacagttctcataacttccaaaatctattttcttcctcatacctgacgcatatactttctgctcccccgctccttcagctatactcactctttgttgagtctcccacaattaccattgttcctggcccagacttcaatccggcctcccacattatacctgataccacacctgacccccatgactgtatctctcggatccacctgacattcaccccatttccccatatttccttctttcctgttcctcaccctgatcacgcttgatttattgatggcggttccaccaggcctaatcgccacacaccagcaaaggcaggctatgctatagtacaagccactagcccgcctcttagaacctctcatttcctttccatcgtggaaatctatcctcaaggaaataacttctcagtgttccatctgctattctactactcctcaaggattattcaggccccttcccttccccacacatcaagcttgaagatttgcccccacccagggactggcaaattagctttacctcaacaatgccctgaggtcaggaaactaaaatacctcttagtctaaatagacactttcactggataggtagaggcctttcctgcagggtctgagaaggccaccgcagtcatttcttccattctgtcagacataattcctcagtttagccttcccacctcaatacagtctgataacagacgagcctttattagtcaaatcagccaagcagtttttcaggctcttagtattctgtgaaacctttatatcccttacggtcctccatcttcaagaaaagtagaatggactaaaggtcttttaaaaacacacctcaccaagctcagccaccaacttaaaaaggactggacaatacttttaccactttcccttctcagaattcaggcctgtcctcggaatgctacagggtacagcccatttaagctcctgtatagatgctcctttttattaggccccagtctcattccagacaccagaccaacttagactgtgccccaaaaaacttgtcatccctactatcttctgtctagtcatactcctattcaccgttctcaactactcatacatgccctgctcttgtttacactgccggtttacactgtttctccaagccatcacagctgatatctcctggtgctatccccaaactgccactcttaactcttgaagtaaataaataatctttgttggcaggactatgctgaacctccttaggcactctctaatcagatatcctgagtcgtcccaattcttagaca

SEQ ID NO: 77926 - DNA, 1544 bp, Homo sapiens
ttttttttttgacttctgaacacatttatttgatatgtcaagtggagagaggagtgatttagggtttctccccacttctacctgtgggggtgttcataagctcagacagacagaagagcagcttagagcccatgacccaccccctgggaaaatgagacaatctgttgtagttgttggaggaacagggtgggaataaaaagcaggaagttgagaagtgaagttgagagcagtaaagacagcagcagaactgaggctgggggttgctgcaggaacccccaagaagagtgaaaaagatatcctgaaaagtggttggggttagaagcagggtgtgaataaggagccaggcctggagaaagaagcaagacctgcagaatgggctgggatgtccacggagagagtgtgcaaaatcatgataggctgtgtttcagggcatacatggaaagcaagggattgcttctgcaggagggcaaagacatcggagactgcccataagtaagggttccctactgcttctgaacaaatgcaagagagtttgggaccctagccctgtgtgtttattgatatgctgtgcctgtaggtacacaagtaatcccatatgcatgtgaaatgaccagggcatgaatacatgtgtgtatatacccagtaaatagagtacttattctttcttgctaataagagtactgtgcttatggacacatgtttaaccatgtgtgggtgcactgtgcacccatgagcacatgcaagagatccctttgttcgtggtgtgtgtgtaagctggttctcccacctatcccattaaggtcctaatccccaccctccttggctcctctcactcctctcagcgccctggctccccaggcccacctagactctggaagccccccagcaggcggatctgctcagtctgcatggagtggcgtctcaccaatttgcgcttggtcctgggagagcctggcgccccggcataaggaggggcaggcaacgaaggcgcccgacctccgggttgtgggcgaatgtcagggatgggagggtggggactgacgttgagagggggtaggaaacccggccgcgtttgcgagatgtggtccaggagcaacgtccccgagcccctccgctccagcagccccggactccgcctccttccgcttagcggagatactgcccctggcagactctcctgggactggcgcggagagggagccgagccggctggagggagggtcaacggggaggcgctgtatcggcggcgctccagggacaggcggctggactcaggcgagtcagggcaaaggtgtccaggggtgtccagctccactggctccatgcggctcagtttctgcctcagccctgaagggggaccagactcctgagcttctggtgctgtgtttcggcgagagagaggacccccgctagtcactttctccgcccatgggggcgggtcctcagggccttcggtgctgtgacgtcgggaaagacggggtcgaccggtcagggtcaggccattgaattcggcagtcaagcgcctcgtgcaagctggcgtatct

SEQ ID NO: 77927 - DNA, 765 bp, Homo sapiens; identical to SEQ ID NO: 63287
  misc_feature (1)...(765): n = a,t,c or g

SEQ ID NO: 77928 - DNA, 943 bp, Homo sapiens
ccgagggatgagccggcagtgggcaggggaccacgcacctggttgaagggactgggagcccgcactggggaactgccggacgcaggccctcgggcaggagcatctggcagagtggggggcgtggcaggcaccctcctttgcagggcgaggtggggcctctgcagccatcctggacaggccggggtggcggcagctttgcccacgtggaagcggggtgggtctcacttgcgtggtggcccctggccccatcttgcctgctgcggcctggggagcaggcgctgggtggtggttctgcctgcttgctgctcgttccccgggcatgcgtgggcagcggggggcatgcgtgggcagcagggggcgtgggcagcgggggcatgggcaggaccacgtgggccgtgatcgtgggttgccgagaggacctgagcgctgcggctctgctgaatggagccgggtccctcaggccgtggacgccctcgggaggggggtgactgtggcttgtgtctggacaggaatgtgtcatttcccacatcttctagagggctgccagctgggaagacagttatcagggcaagctgtgctctgagtttcgggttctgctcctacaaagaacgtgcggtgctgcgggcgagggccccggcacggacaagggccactgcagagtgtgtttctgctcgtcagctgccctgggcagcggatgggctgggcgatgcagctggatgcacatctcattctgtcatgaatgtccagtaaaaatctgaattggttgcaaaaaaaaaaaaggggggggccctttttaaagaatccttggggggcccaaattttacgggggctggggaggtattatttttttccttatggggagcctattataaaccctacctgggatttttggaaaggaacctttctttgtggggggggacataatggaccaacctccctacaa

SEQ ID NO: 77929 - DNA, 720 bp, Homo sapiens
  misc_feature (1)...(720): n = a,t,c or g
tttatttattacacagccagattacttgactccctatgtttgaagtccccagtttagattggttattaagtaagcattcattagattttcaattatttataaaagctaaatataaagaaccacaaactatttcaacaagttaatacagccaaagcatatagataaatatatgaaacaatacagtaaatacatgagaccaaaaattcagtctttcatcagtctggaaataaacaaatattttgtgtgtgattgtttctgaaactgcagacaggtatttttaattcttaactcctactgtgttcagtacattattcagaagattagccaggaacagaaaatgtgcaatttaatttcccttaggttcaaggtataagctaaacagagtctttccctgcccaaattatcaagttggctgtgtttcactggataggagatgggacagtgggaatcttgtttgttcattgatgggcgtcattatttagatggtgaggcatttggctaccttgaaagncatctttactccctgttaccctcactttattgaatttctttactttgactttcagagctctgggcagaaatcacatattattttggaggactttgttattttattcaagttaaagtatagggtttccccaaattgaaaaccagagtagcctatgatcattccctgtgggattctttaactgttaaggcaaaaaaaaatgcagttgcact

SEQ ID NO: 77930 - DNA, 1806 bp, Homo sapiens
  misc_feature (1)...(1806): n = a,t,c or g
gattgcgccctgggaccctgagaccgncgaanttcanngnantaggggggcggagcggttccgcccatccccgaccaggcctgggatggctccacccgcgctggctccaaaataacgagggggcggggcccgggccgtgggagcgcctgaggggcaggagtccagtgttttagccttcgaaggaccatggtgcttccacgtcatcgtgttgtggcgctcccggctatggcagtaccgtagttttcctctcttctgcctgcggtgaccattgggctgtagggtgccccgaggcctccctggccccctcacgccggcagaatggcctcagcccgaggggccaagcagtcttcgccccgggtggggaccacccgctacacagagacgtccacggtccgcgtggagacctcgtcccaccgcgtggagacgtcgtcccggcgggtggagacctcccagcgccgcagcgaggggccctccctctccccctcggggaagcggctccctcgcatcctcgaggcgtcctcccggcacgtggaatcctcctcgcagcgcacggaaacgacctcccgccacgtcagagcctcgtccctgagggtggagacgtctctgcactgcgcggagagcccgaccccgcgggccaagccggccgcccgccagaacgaaaaaacggcccgatgagatgctgcttcccaaaggccaccaaggggccagggccctcagccaggacagaaaggcctccagttgccagccagccagccagctgccaggtggaccaatcattttcggtttcatggaaacaaaccataaatcaatgtaagaaacagccaagccgcagtttctgaacacagccaacgtttactgaccgtcctgcgtcttggaccagcctacttttgacccagtgaactattttcacttgaagccagcacagaaggttttcaggcccaggatgctgtctaaatcgggttgatggacaaagagaggctgtttgagcctctgagccaggtgagtttgggatccacagccctcagaaaaccttcaccccttaggaacagagaccaaactgaaataatgacctgtggaatgattccatgcctgctaaaaactcgaggggcaaggaacagactcataaattattaattggcctttgtttatgtttcaaagtaaatggtcgttttctttatgctaagtctttgtacctggcacccccatccatacacttttttaaggtaggttagatgtggttaaaaatgacagtaaacccaccagcaagcaaaaataatcttagaaagtgagaggaggtcactgaaacctggcctgaggtttgaagaagatggagaagagttatatttattgagaaccggctctgtgccaggcactagatgttcctccacttacgatggggttacctcccgttgaaactattgtaagttgaaaatatggtaatttgaaaatgcacttaatacccctaacctactaaacatcatggcttagcctagcctaccttaaacatgctcagaacacctaaagttgagcaaaatcatctaacagaaagcctgttttataataaaatgttgaatatctcatgtaatttattgcatactgtactaaaagtgaaaaagaatggttgtaagagtacttaaagtactatttttactgaatgtcacttttgtaccattgtaaagtcgaaaaatcataagtcaaaccatcttaagttgggaactgtctgtattttgggaacttgggctatagcagtaaaaaaggcaaagtcccagctctagtggagcttacactttggtgaaaaaaaaaaaa

SEQ ID NO: 77931 - DNA, 1533 bp, Homo sapiens
attagtccagtgcggtggaattcggaagagaaagggtctgttgtttttctctcctgtttctcgctccctctctgctgatcacaaagctgctgaccgggtcagaaagtcctgatggaaatccaccagcgctgggcaggcccctcctcctccagggagcttgtccttgcctaatttttcttcgtcctgatgagaacaaaaaagagagagagaagaaaagaaaaaccacaaacttcctttgaaaaccagcttgtagtcagggcccggagcgcatgccatagactcggcgactcaggaatcctgaagactctctgagcgacctggagcaccttggctgtgtccctgcctgccttcaccctcctccagtgcccccagtactgggcgtgagtccggaagtggccacaacccagcctggaccgtcgcttataaagctgtgtaaacctgtataagctcaggcgttgacagctggaaggcagctggcactggcagcccccttcattgcacctatctcccccatctcattgccacggctgaaccctccttctcaatcttggaacagcacccccttctttaaggtgaagctccccccgcagaaggaagtgatcacatcggatgagctcatggcccatcttggaaactgcctcctgtccatcaagccccaggagaagtcagagggacttcagcttaattttcagcagaatgtggatgatgcaatgacagtgctgcctaaactggccacaggtctggatgtcaatgtgcgattcacaggcgtctctgattttgagtatacacccgagtgcagtgtctttgacctgctaggcatacctctgtaccatggctggcttgttgatccacagcagagtcctgaggctgtgcgtgcagttgggaaactgagttacaaccagctggtggagaggatcatcacctgcaaacactccagtgacaccaacctcgtgacagaaagcctgattgcagagcagttcctggagaccaccgcggcccatctgacctaccacggactgtgtgagctgacagcagctgctaaggagggtgaacttagcgtctttttccgaaacaaccactttagcaccatgactaagcataagagtcacttatacctactggtcactgaccagggctttctacaggaggagcaagtcgtatgggagagcctgcacaatgtggatggagacagctgcttttgtgactctgactttcacctgagtcattccctgggcaaggggcctggagcagaaggtgggagtggctccccagaaaagcagctgcaggtagaccaggactacctgattgctctgtccctgcagcagcaacagccacgaggcccgctggggcttaccgacttggagctggcccagcagcttcagcaagaggagtatcaacagcagcaggcagcgcagccagtgcggatgcggacgcgggtcctgtcactgcaggggagaggagccacatctggacgcccagccggggagcgtcggcagaggccgaagcacgagtcagactgcattctgctgtagc

SEQ ID NO: 77932 - DNA, 1320 bp, Homo sapiens; identical to SEQ ID NO: 63293

SEQ ID NO: 77933 - DNA, 1459 bp, Homo sapiens; identical to SEQ ID NO: 63294
  misc_feature (1)...(1459): n = a,t,c or g

SEQ ID NO: 77934 - DNA, 810 bp, Homo sapiens
gaccaaagggctggtcatgatctgctccagaaggggagtaagaatttcgttctccattttacagagtatgtatttgaaaaaaggatctcccccaaaaatacgcctagggaattggtcactaaacgtggaagtaagtagaaatcaatgaaagtccatttcggcaagggagaaaaatcccatcgtggaggaggggggcactctccctcctcaaaaaacaccccagagtgaaacgagccgaaatcccaagaagtggcttcgacgacggacaccacgagcagcagcctgcgctggaaatgtctgtaccgggcgaggaggggcagagaaaaggcatctggaggaggaggaagggaaagggggctggaacccaagacaaaaagcccgtcaaggttgtccagctcctggaggatccagaccagcgaaactgctcccaatgaatcaatcccagcgggggctaaatgaaatacgttaaacagagaccacgttaaggataccgaggcgccaccagactcgacctcggcgttccgacctctacacgttccacccaccgatgggcatggagccgctttcgacccgcggagcctccactgcccgcagcccctcagtaccaacaggcagggctcgccccttccccccgagcagacaccattcctccgccgccctcaagcctcgcctccagcccccttcccctcccgggggtgggggcttgaatgtgtgtccctaaccccccagcttcctaagccctgccagcctttcagcgcgtctctgggaatccctggcacaaaatcaccgccgcgctccagccttacgaaa

SEQ ID NO: 77935 - DNA, 962 bp, Homo sapiens
  misc_feature (1)...(962): n = a,t,c or g
atggggaaatgagcctccgnctttcacnnnctcngnnttgaancccgggcgggatttgtgggctctnnnctttttcctgtatttcccgttcgggggagtaggttgaagtctcctaagatgcccggtgggctgcgggcaccgggagctgtgaagggaacgtgagggggcggcgtagtggagacccacggcaggcctgaagaagagcggcggccgagcccgccttccctgcaccatgctcatagaggatgtggatgccctcaagtcctggctggccaagttactggagccgatatgtgatgctgatccttcagccttagccaactatgttgtagcactggtcaagaaggacaaacctgagaaagaattaaaagccttttgtgctgatcaacttgatgtctttttacaaaaagaaacttcaggttttgtggacaaactatttgaaagtctctatactaagaactaccttccacttttggaaccagtaaaagcctgagccaaaaccactagttccaagaaaaagaagaaattaaagaagaggtatttcaggagccagcagaggaagaacgagatggcagaaaaaagaaatatcctagtccccagaagactcgttcagaatctagtgaacgaaggacacgtgagaaaaaaagagaagacgggaaatggagagactatgaccggtactatgagcggaatgaattgtaccgtgagaagtatgactggagaagaggcaggagtaagagtcggagtaagagtcgaggcctgagtcgcagtagaagccgaagtagggggcgcagcaaagaccgggatccaaataggaatgttgagcacagggaaagatcgaagtttaagagtgaaaggaatgacctggagagttcctatgtgcctgtgtctgcaccacctccaaactcttctgagcagtattcctctggggcacagtctattcccagcactgttactgtgag

SEQ ID NO: 77936 - DNA, 1236 bp, Homo sapiens; identical to SEQ ID NO: 63297

SEQ ID NO: 77937 - DNA, 973 bp, Homo sapiens; identical to SEQ ID NO: 63298

SEQ ID NO: 77938 - DNA, 2174 bp, Homo sapiens; identical to SEQ ID NO: 63299
  misc_feature (1)...(2174): n = a,t,c or g

SEQ ID NO: 77939 - DNA, 945 bp, Homo sapiens; identical to SEQ ID NO: 63300

SEQ ID NO: 77940 - DNA, 2103 bp, Homo sapiens
aatacatgcctccatttgttaaaaataattgttcttttatttctttggaaagtagtgggccctgccctatggattttcaggtcaaactagggtaatgaatgctcccctagtctttgggctggagcactatggtcccagctttcccagggcccagaagcaattcctgtattgtccaacccaagcaactaggacccaaattgtctgaaggctcctatcaggccttctctcctgaccacccacttcccaatctttcctggctttccctctgggcagggtatttttttcttctaaaaccagtgctggaacctgtgctgtgcagaagagaggacaagacgagggatgttcccaaattcccataagaggacacagcccctcagtcagtccttcctctctgctggcttcagtctgcactcctctgcaagcccccactgtgaggcttgaagatggacaagaggaccctcataaaagggaggtgagagaaaacacaccatcccaacccctcctcaggacatactccttgtagtctcttgtcctagttctcaagggagcccttcagacagggatggggaaggctaggtgagtgggcaagggccccctgaccccagccctgcgaggctataccaggggagtgtccattagccccatcagtgtggcatggccgtgatgcgcatgctctgggaagcgatagggtaagtcaccatgggagtggtggtgtggctcattgtgattcctgccaagggttgggccatcgatacagccacaggggccacaggagccacagatacagccacaggagccatggagacaggtggaggtgccattccctgggcaattgtttgagccagggcagctgacagtggcgtgatctctggggtcaagtgtgggggtgggggtggtggagcagcaggaggtgcagcattagttgggggagcagctggagctccagcaggggccaccagttcttgctgggacactggacgaggctgtagagcctggctgctgagagtagtgtgagtctgggcaatgccatggttaaaagtggcaacagtgcccacagtgggggccagagtctgctcagtcgctggtgcagtggagctcagggttatgaccttggcctgattgcggaactgagcattttgttccagtagtacctcattggtggccagcaggttgctgacctgcttctttaactcctctacccgcttcctgagcatggcattctcctcctctagcagtctgcactccacccctcgcggtggagccaaactatattcatatgactcaaaatgagggccatcaggggggcagcatccacctcgccggcgttttgggcgtggctcatggtcctcaaagcccctgtcaggaaggtcatagatatcatagagatcatgacgtcgtcctgggaggactgagcctgttgagcccccaccagtgcctcctccaccccgagcatcaaactcaaaatcccgttgcaggtgacggaacttgcacttggctcctctctgacagtcacccttgagaaagtcacggcagatagggacctcctccttgccatttggtaggtcagccggtgaaaggccaaggccagctgctactttctgcctcagccgtgggggaagctctcctgtcttcttatagccatcctcatcctccttggagccatggatgaaacggcaatttgggcggctacactccttgttctggaagtcatggcagaagatgaactcgtttttgctcacccccaagttggacacctcgctcatgtctgggtggcgatatcggcaacgcttgcctcgcttgcacacattcctcaagaagtctctacagatggcatctgagctggccccgccactgcctacccctgccccactggcctcctcgctgccaccacctccagggcctccaccgctgctcccggtaccgttggcatagctgtcccggtcaggcatcctggtcccgcccaactcagggttttctttatcttgccactcttggtgaccactgaggtagctcaggtgaagtccggggctcctgtgggtctccacctccacatcactgctgggttctgccgccgccgccgtagttgctgctgccgccacgaaa

SEQ ID NO: 77941 - DNA, 689 bp, Homo sapiens
ttttttttttttccagtcgggttggagtttatttctgccagagcctggaggctgggagggtaaaggacactcctttagtcccagagggaagctccgaaccctcagagcaaccagaagggagggcagagcatgggcagcagcaggagtgagaggggtccccttgtcctgcccctttgcaagggttcaaggctggtggaggcctggggcttctgtcgctcaggagttcaggggtggacgcagaaatgggggaaggagagtggctacgtagagagtgagagcgagattcctaaaaagatgcacagagagaccctcagagaggccaagaaagatggtgagagggtagggaaggagagggagggagagagagagagagagagagaagcagagggaatgggttgcactggctgaggatggtggaggagccgtctcactcccttcctaatgtctatagatcaataacgagggaagaaaggaggacagggagctgatggaaacacagcttgccaactgtacccagtcccccaacaagcaaggtagctccagtccttgcctccctgcctgccccgctcctctgtgtttaggggtcatcctttgatgggaggttgcaggggacccaggtgggggtgataaatgccagagtcctgcaccatttccaaagggcaagaagtcatagggcggctcgtgccgag

SEQ ID NO: 77942 - DNA, 159 bp, Homo sapiens
ttttttttttttaaaaaacagattctcactcagttgcccaggctgaattgcgggggcgctgtctaagctcactgcaacctccgcctcccaggttcaagggattctcctgcctcatcctcctgagtagctgggattacaggcgtgtgcaccatgcccaac

SEQ ID NO: 77943 - DNA, 964 bp, Homo sapiens
cacctgagtaaacactttcagctgccctcgagaaatggtaggattggctatgtgctgagcctagtggcactgcagctcatggaggcagcaccggcttcaggccgctgtggccttggtggtccctttgatggcacggaggtggataaatgcctgcatcagctgacactgagtttgtggacaccagggacctctgcagctagctgggaaatctttcccaggaggtctcccaccccttccctctggaacaccccctgacgaggccaggggaggaacccctactctatgttctactctggtacctagtgctcacggtgagcaggctggctcggggcagccctcctcagagctggagcgcctttcaggtgccctctgaacagatactgttcagaatacagataaacagatgccaccaaggtcccctagctgtgcagtggaggggcaggtttcaaaatcagatctgtctccaaagttcctgctcttaaacaaagctgtcccatcttcccacccctctccatgggcctgtcctctcctctaagtaccatatcccaactctcccaggactggcatcatcttaagagtcagtgccttctctgttcccagggtccccactgactccaacctgcccacgtcctccactacatgaacccagaactgttgtacatgatggaaccacctccatgcccatgggtactgtcctgccaccagccccagtgggaggcacctctgcctgtccctgtccaaccccagtaccccatcttgaccaaggccatgccctgacctgcctccaagaacagaccagcagctcaccccctagacaaaatcacttcctctttaattgctgttgaagaagattcacaccactgcctccaaggagatgggggggcatttcccccttgcccccacctctctcccctccccaattacctggtcctttgcaaactattttagccagaaaaaaaaaaaa

SEQ ID NO: 77944 - DNA, 1097 bp, Homo sapiens; identical to SEQ ID NO: 63304

SEQ ID NO: 77945 - DNA, 3149 bp, Homo sapiens; identical to SEQ ID NO: 63305

SEQ ID NO: 77946 - DNA, 724 bp, Homo sapiens; identical to SEQ ID NO: 63306

SEQ ID NO: 77947 - DNA, 1841 bp, Homo sapiens
cagttttggaaaagtgagctctcggttctgctctgagatgggcagagaagatgcgggccaggagacttactcaggtgggactgggcacagggcaggtatgtgggaggctgggctgcttagtgtcttctagtcacctctgcttgggctgattgacagaggtcagtcattacagccccttatgcctcttccatgggaacaaatactgtgcagatgtttgtaagttaaacataagacacaggggctgttgcttttgaacagaaccctatattactctcctgggatctgagtttctgcaggtcatttgtatgtaggaccaggagtatctcctcaggtgaccagttttggggacccgtatgtggcaaattctaagctgccatattgaacatcatcccactgggagtggttatgttgtatccccatcttggctggcttcagtttttgctgtagccctagagcactttgtttgtgggaggctggcctcttgcctacctccttgcatggacagggggatgaatatttactttcccacctccttgctttttctttcactgataccactgaatggaactggtgctgtgactcctgctgctggggatttatgtcccgagaccttagcctggctgagtggagcctgagacctgcacaacagctcatggtcatgcatgagagagaagtggctggccacagccagagggaacagtaacagcccaggggcctttattttgggaaaggctgtccggggctgttactgtctcttctggttataaagcagacatgtggccatcttttccgcagggttagagtgggctcctttctttttggaatccttttcttctcctttggtagcagctccctgcctccagggcttccgccaccagcgtctctgctgtgttgcgcagtgcagtggggtgcaagggctttgtttctgccctgcctgaaagagagggctctggggatggagatgagaaacaacacgctctccttcagacaatgaggcattctgtcctcctgctgcccattcttcatctccactgagagcccagagtctggtaggagccgaagttgccacaggcattctgcattgctctactcttaggtttgtgtgtgtgatccttcccctccctgttcgcccactcctccctcctctggctattcctaaccctgttctgtggggctcttttaataaccagcctatggttgtggggaattgttcatgggcatttagttccagagtggaggggctttggtcctgaaataaaatgcaagtatttaagattgttgttgcaatttgtgtctaacaagctgtagcagagaaggagggagtgagcgctggcagtatttcctttcataaatcatgaatttatcagtgtggaaataatgcttcagaactgtgctctgtagccctcctgcattgtgtgtgcagctcaagttcaccactggaggaaggattgtcttccaaagagctgggatccaactcttctcacagttctgggcgtgaaccttgttaggtatactttacctgatgctgcttccatcctcgcagtctgtctgaggtgccaggtgctgaaagagaaataaagtttgtcaacaggcagatgcaaagccctggctggtattcatccctctttcctgcccgcctcccctgggtctctcctttatatgatgcagcagagcaaggcgaggatagaaaacctacagaggcaaatccaaaatgtcagaagaagttcatttaaaaggggaaaaaaactccatgtgcaaccctcacaaaaacccgacagatgctaagctaatggcatccgctctgccgattggtggggatggctcatgaatattaatgagct

SEQ ID NO: 77948 - DNA, 1301 bp, Homo sapiens
agaaacatctttcagggattaaggagaagatcaaaacagtttcagattaagaaaagctaaggacatctctgaccagcagttctaccctaaaagaagggctaaggggagttctctagacggaaaggaaatgattaaagaaggaaccttgggacatcggaaagaaagaaaacagcaaaataggccttccttctcctcttgagttttctaaactatgcttgacggtttcagaaaaaaatcatagcaccattcaatgtggttctaactctccataaagaaaatgtttgaaatggttataaactgggagggtaaagagacctacaagggaggtaactcgtctatcattcactcaaattggtaaaacaatgacaccagtataccgtgtggttaagatatagatgcacagatatacgaatgtctggaaaaaccaagagggctatacaaacagacatactcaaaagcactatggataaggcaaaacaccattctcaaagatgttcaagtcatgacaggaaggtaagaaaaagaaagcatatccagaaaacgaaaccagggagaacaaacagaaaaggaaaaataaaatggcagatttaagccctaccatgtcaatatcattaaatatcaatggcctaagtataccagttgcaagacacaggctggcagagtaggttaatggacacgaaccaactacatactggctacaaagagactaacttcaaatatgatgatacaggcaagttgaaatgaaaagggtgggaaaagatatatcatgcaaaccttagccaaaggaaagcaagactggctatattaatgccagatatagtatatttcagaacaaataaactaatcagagagagagagggacgttataaaatgatgaaaggaccaatccaccaacccctcccctgacgaggccggttgagatgtgtgaagcagctctggctaacagcgggtagggagagggcgcgcgggacccaggagcctccgtgcggagccaggcctcaggagcagccgccttgttcctggaaggggtgcctccctccatcttgtctccaaagactgtagggagaccttctcgcccggtaggaaagcgacgtctcccatgctttcccaccacgcaggccttgtggcctttctcctgctagtgtctgccctccaacctgcgggggctgcggctgccacggttccacgctgggtggacgctgcctgcccgggatccaagacccgccgttgcaggcgggagttggggagtcgtgtgcaggtccgaaggagacccaagctcttggtcaaggcttttttgctcc

SEQ ID NO: 77949 - DNA, 361 bp, Homo sapiens; identical to SEQ ID NO: 63308

SEQ ID NO: 77950 - DNA, 1311 bp, Homo sapiens; identical to SEQ ID NO: 63309
  misc_feature (1)...(1311): n = a,t,c or g

SEQ ID NO: 77951 - DNA, 1324 bp, Homo sapiens
cgattccggagagggagcctgagaaacggctaccacatccaaggaaggcagcaagcgcgcaaattacccactcccgacccggggaggtagtgacgaaaaataacaatacaggactctttcgaggccctgtaattggaatgagtccactttaaatcctttaacgaggatccattggagggcaagtctggtgccagcagccgcggtaattccagctccaatagcgtatattaaagttgctgcagttaaaaagctcgtagttggatcttgggagcgggcgggcggtccgccgcgaggcgagccaccgcccgtccccgccccttgcctctcggcgccccctcgatgctcttagctgagtgtcccgcggggcccgaagcgtttactttgaaaaaattagagtgttcaaagcaggcccgagccgcctggataccgcagctaggaataatggaataggaccgcggttctattttgttggttttcggaactgaggccatgattaagagggacggccgggggcattcgtattgcgccgctagaggtgaaattcttggaccggcgcaagacggaccagagcgaaagcatttgccaagaatgttttcattaatcaagaacgaaagtcggaggttcgaagacgatcagataccgtcgtagttccgaccataaacgatgccgaccggcgatgcggcggcgttattcccatgacccgccgggcagcttccgggaaaccaaagtctttgggttccggggggagtatggttgcaaagctgaaacttaaaggaattgacggaagggcaccaccaggagtggagcctgcggcttaatttgacccaacacgggaaacctcacccggcccggacacggacaggattgacagattgatagctctttctcgattccgtgggtggtggtgcatggccgttcttagttggtggagcgatttgtctggttaattccgataacgaacgagactctggcatgctaactagttacgcgacccccgagcaggagaacagcactgtaggcatgaagatccaggaggagctgcaacgttccgggggcctggaccacctcgtactctcaccaggagaatggcccgtgagtgacaacaccatcatgcacatcgcaaccgccgaggccctcaccacagactactggtgcctggatgatctgtaccgggagatggtgagatgctatgtggaaatcgttgagaagcttccagaacgccggccagacccagctaccattgaaggctgtgctcagctaaagcccaataactaccttctcgcctggcacacaccgttcaatgaaaaaggctcagggtttggag

SEQ ID NO: 77952 - DNA, 723 bp, Homo sapiens; identical to SEQ ID NO: 63311

SEQ ID NO: 77953 - DNA, 519 bp, Homo sapiens; identical to SEQ ID NO: 63312

SEQ ID NO: 77954 - DNA, 641 bp, Homo sapiens
atttctttttcttgtctaattgctctctcttgatagtacttccagtactatgttgaatagaagtggtgggagtgggtaataactgatttttaaatgtacaaacatctgaaaaggacacctcaccaaagaagatatacatatggaaaataggcatatgaaaagaagctcaaggtgatatgagttgtcttccaaaaggtaatgaaaaatgcatattatgaaaaaattatggagtccaaattttttataccaaaataagctcatactaacttgttataacatgcctgaacaggatgtagtttgaggcactaaaaaggtaagacgtaagtttgaaaagagcacctgtcagagcaacataaattctactaaaattgaagcaaaaccaaacatcaaatttagtgtgaagcttgggtggaagaatggtaaaatcattgatgctttatgagaagtttatggggatgattctccaaaagaaatcagcagtttgcaaacagataactcattttaagaagggatgagatgatgctgaagatgaagcacatagcagcaagccttccacatcgtttgaaaaaaaaattgaaaaaaattatgtccatgccttaattgaagaagaacaagaattaacagcacaaacaatagtcaac

SEQ ID NO: 77955 - DNA, 2025 bp, Homo sapiens
tttttttttttttgaagaattcaagttagttttattcaaaggtcttactgagaatcctagacccaggtcccagcccgggagcagccttagagagctcctgtttgactgcccggctcagtgtctcggcccactgcttggttacgggggccggggctcaggacctgcacagtcacatccatccagactggctccgaagttacattacagcagaatcaacatcaagggtttgggcataagagcacttctggttacagattacagaaggcataatcgctaaccttgggccaacattttctcatgtgcacgaaaaacccaagggaccagggtccttcaccttttaaaggaatacaagttgactcaggcaaaaagacgcggggccgtgtgttctttcctgttttgttttcaaagcgtctctctggagagctgcagtgtcacagagtaagggcccacagaaatgagcacacacttaggtttgctgctgacacgccctgcctctcctcatgtggttcatgtggccatcagccggggctgaagacccctggcacacacctgcaccccaaacggactacaggtgccgctttcatttcaactctcacccatttagggttcggagccccacacccacttaaccccaagcccagtggcaaagcttcctgagaggcccggaaccgccagccatgagttctacaccacccccactgtcctcctgaaaccctgctcccccaaagacaggccttactgaggacttggtggggtgctggtcaggaactgcccggtctttggggagggggtgctggctgtccgcctggggagagcctgggaaaggcatgcaggcagatgtggttggagctccgactctctgactcttgggcttaggtgagtcctcagcaggtgccctgcactcctggtcccctttcccagccagatcactgctcagcatctgcagagtcaaggaggactctcccaaaaccatgcacggccagatggcccaagttaaaagaagatgccagtgactaaaagcaggagtgaaggcagggacgttctcagagacctcacacacatcaataaaatcccgtgaacgacggtatgccaacagatgagataacatggacgaaacggaaaaactccaagaaacacacaagctagcaactgactcaaggatggacaatccgaacgatctataacaaatacatagattgaatcgaatcaaaatcctcccaaagacccaagaccagataggcttactggcaaattctaccaaaggttctagcaagaattaacaccaatctctctcttccaaaaaaaacggaggagagaacatttcctaacccaatctatgaggctaatattatcctgatatcaaaaccaaaggaagacatcataagaaaacaccagaccaatatcccttataaatacagatgtaaaaatccgcaccaaaatacaagcaaatcacattcagcagcagagtaaatggattatacaccatgaccgagttagatgtattccacaaatggaaactggctcaacatatgaaaatcaatcaatgtaacacctcatattaacagaagaacacaggatcttttcaatagaggccagaaaagcatttgacaaaatccagtaccctttaaggataaaaacacttaacaaattaggactagaagggaccgtcttcagctggatgaagagcatccttgaaaatctaacagctcacatcacatctagtggtgaaagactgcaaacgttcccttaagatcaggaacaagacaaggacgtgtgctctcaccaccacgttcgatcaggaacgacacgaggacgtgtgctctcaccaccgcgttcgatcaggaacgagacgaggacgtgtgctctcaccaccgcgttcgatcaggaacgagacgaggacgtgtgctctcaccaccgcgttcgattcaggaacgagacgagggacggttccgctctcaccaccgcgttcgatcaggaatgagacgaggacgtgtgctctcaccaccacgttcaacaaagtgctga

SEQ ID NO: 77956 - DNA, 1816 bp, Homo sapiens; identical to SEQ ID NO: 63315

SEQ ID NO: 77957 - DNA, 2044 bp, Homo sapiens; identical to SEQ ID NO: 63316
  misc_feature (1)...(2044): n = a,t,c or g

SEQ ID NO: 77958 - DNA, 2139 bp, Homo sapiens; identical to SEQ ID NO: 63317

SEQ ID NO: 77959 - DNA, 481 bp, Homo sapiens; identical to SEQ ID NO: 63318

SEQ ID NO: 77960 - DNA, 1047 bp, Homo sapiens; identical to SEQ ID NO: 63319

SEQ ID NO: 77961 - DNA, 1196 bp, Homo sapiens; identical to SEQ ID NO: 63320

SEQ ID NO: 77962 - DNA, 987 bp, Homo sapiens; identical to SEQ ID NO: 63321

SEQ ID NO: 77963 - DNA, 548 bp, Homo sapiens; identical to SEQ ID NO: 63322

SEQ ID NO: 77964 - DNA, 829 bp, Homo sapiens; identical to SEQ ID NO: 63323

SEQ ID NO: 77965 - DNA, 1932 bp, Homo sapiens; identical to SEQ ID NO: 63324

SEQ ID NO: 77966 - DNA, 1118 bp, Homo sapiens; identical to SEQ ID NO: 63325

SEQ ID NO: 77967 - DNA, 437 bp, Homo sapiens; identical to SEQ ID NO: 63326

SEQ ID NO: 77968 - DNA, 979 bp, Homo sapiens; identical to SEQ ID NO: 63327

SEQ ID NO: 77969 - DNA, 1100 bp, Homo sapiens; identical to SEQ ID NO: 63328

SEQ ID NO: 77970 - DNA, 2300 bp, Homo sapiens; identical to SEQ ID NO: 63329

SEQ ID NO: 77971 - DNA, 916 bp, Homo sapiens
cgaaagggggctggaaacagggaaactggagcttggtactaagctgcttgaggtttctcagaaggggtatggcccaggaggggtggggccagaaacccctaaaccagaactgaaatgtctcactaagcagctaggaaactttatgtaagttaaacctctttcccatccacccactcaccttcagtccccaaaaagtaaaggcacaaaacatagcgtttgcccacaggccaccagttctctggggttgaggggctgatcctattgcaaagtcctaagtcagtagctgagggtaggagacggctgggagtgcagtcagggttctcccttcccaggtttgatgggtccttcttctggggtcaggtaatgaaagtcttgcggcacaagtacctcatcaacttctatcgggccattgagagcacatctcgagtatacatcattctggaactggctcagggtggtgatgtccttgaatggatccagcgctacggggcctgctctgagccccttgctggcaagtggttctcccagctgaccctgggcattgcctacctgcacagcaagagcatcgtgcaccggtgagggcgctgccacccagactggggcctttgccctcaagggggttttatgcacatctcccatttcctgtccttttttcctctttcgaactccctcctcaatatctagcctattcatgcactctattttaatcatatggtcaaggatactgataaagtactcactgtatgcaaagcattttatgaaatacaatggtgagctcccggtggtcctcagataccatcctctgtctctctccctactttgggctctgctcacaactccatggctttccttcctctctaccttgtgccatcataatggtttctacctcccacttcctctgtcctcatctttaccc

SEQ ID NO: 77972 - DNA, 1201 bp, Homo sapiens; identical to SEQ ID NO: 63331

SEQ ID NO: 77973 - DNA, 852 bp, Homo sapiens; identical to SEQ ID NO: 63332

SEQ ID NO: 77974 - DNA, 1564 bp, Homo sapiens; identical to SEQ ID NO: 63333
  misc_feature (1)...(1564): n = a,t,c or g

SEQ ID NO: 77975 - DNA, 651 bp, Homo sapiens
tttttttttttcgtatttctatttgttttatttgctttctgtggtgtcaaatttggggtctcctagagccccagccccaggcagaaatccggcatatccttctccgcctggggggcccgggacacaggagtttcagaaaaggcactggcaaaagttctagggcaggggtcagggagaagccaccactgagcctgggagggaccgggccctccttcggcggcagaaaacacagtcacctttgggcagggaagggttttttcctaagaaatgaaatttaagacaagataaaaacctgacgatgttagaggagcccgccagaacctaagccggtgctcccctggggcagggcaggagagtgaactcggttttccaaaggcttcagggggaggttttgcccgggcccttcagccagggtttcagattgccacaggccttggcaagcagaaagcctaattcaaatccctatgtggaatctccttgagacaaagtgtcacgacacaaaacccccaggccccagaccccacctctgaatggcttgggccagacgctggtctggatcgtcaggaccacggccactacccagtgaccaattcctgtccctttttgtgttctgtgagcactggagaggcaggcacttctgtgggtaactgg

SEQ ID NO: 77976 - DNA, 561 bp, Homo sapiens; identical to SEQ ID NO: 63334

SEQ ID NO: 77977 - DNA, 955 bp, Homo sapiens; identical to SEQ ID NO: 63335

SEQ ID NO: 77978 - DNA, 2597 bp, Homo sapiens; identical to SEQ ID NO: 63336

SEQ ID NO: 77979 - DNA, 384 bp, Homo sapiens
tgctcaccagtctactaattcctatcttaagttgttagagaagatagaaaaagtacacagcctgcccagctctttttatgagggcagtgaaatttgaattccaaaaccagataaagataattacagaaaatgatcagttcatgccacttacaggctactgaatgcaaaaatcctgtgtaaggtatttgctgactggatccaacagtgtattaaaaataatttataatgattagttagggtttatcctggaaggcaaggatggctcaaagtcagagaaatctgtcagtttaatctccatatatggtgttagacagaaagtcagtcatttgattttttttataaggttccatagctatatatgattaaaactctgagaaaaccagt

SEQ ID NO: 77980 - DNA, 778 bp, Homo sapiens
gtcagaatataaagcaggcagaaaaaacgtgaaaagattagactggcttagcctcccagcctatacctttctcctatgctggatgcttcctgtcctcaaacatcagactccaagttcttcaggaactcgggactggccttccctttccttgccagcttgccagatggccctattgtgggaccttgtgatggtgtgagttaaaactacttaataaactctcctttatatataaatatatatatctattccattagttctttccctctagagaaacctaatacagattttggtaccaggagtgattctacaggaacagaatattaaggatggagttcttttgttggttttggggtttctggagttggctgcttaatatgattagaacccaaaatgctaaggactctacttctaatagtatagggaacactgatagtccttggtgtgaactgtttagagagttatgcaaaataaatgcatttggacacacctgaatcatcgctcgtgagaggcaaggagttcagtgactatacataatacaattgacccatacgtggaaaaccaaggaacataatgaagctagttggttgctcctaagttcagtggacaaagtcatgaaagaaaatgatgaactcagggattctagctcccaggcttcagaagcagatattgaacctaaaatctgctaagattgccctaagtgagagtcttatctcctgtagagaaagagctgaaattgtggaaaaacagccacaagctcttatcataaaagtaactggcc

SEQ ID NO: 77981 - DNA, 1477 bp, Homo sapiens; identical to SEQ ID NO: 63339
  misc_feature (1)...(1477): n = a,t,c or g

SEQ ID NO: 77982 - DNA, 2034 bp, Homo sapiens
ggcacgagttttgtttgattattttacatagacaaaagaactcatattactttacttgctacatttcaacatctttcctcagcttattagctctatttcttttctgtctgtaaatggatattgctgatttgttctttgagacagggtcttgctctgtcaccaggctggactgtactggcataatcatgcctcactgcagccttgacctcccaggctcaaacttccgcattccgaatagctgggactacaagtgtgcaccaccacccccagctaacttttttcttcttttggatagagacagggtctcactgtgttgtccagaccggtctctagctcctggccttaagcaatcctcctgcattagcttctcaaattgctggaatttcaggcatgagccaccgtgcctggcctgggctagtcctatattctctagagttctctttactttgtgctagtcaatctctcattatgctgttcacctgttataatgaataattctctgtattaaattttaccactttaaacttttgagtggtttatgcttcctgattggactctgactaatatgttaggaagggtcccaggagataaacccacacagatgggatttgggcagtgctgagctctttgccagtgggaaatgggatgctggtgatttccagtaggtgacctcacagtgactcaagctaccacttactgttgattgtgacgaaatgccagctgaggcacatgccttgggagctaagtggttgctgcacttgaccactgtgaagactggtgtgggaagaagggtcgtttctgatgcacttgagcaggggtccccaacccctgagccatggagccgcaaggagccacacagcaggaggtgagtggtgtcgagtgagggagtgagggaagcttcgtctgtatttacagccactcccctttgctcacattcccgcctgagctccaccttctcagatcagcagcagcattagattctcataggagaatgcaccctgttgtgaaccgtgcatgtgagggatctaggttgcgctgtccttatgaaagcctaatacctattgatctgtcactttctcccatcacgctcaggtgggaccattcagttgcaggaaaacaagcttaacacgcccactgattctacattatggtgagttctataattattttattatatattacagtgtaataatggaaataaagtgcctaataaatgcaaatgtgcttacatcttttggcccagctcctacctcccggcagcctctccaggcccagaactttctccagtcagcctctacagaccaagctcatgactcacaatggcctatttaggcccataccctacgtcacggcagcctccgcagatgagcctactgcctcacaacagcctccacaggcacagctccatcgttacaatggcctctttagacccagctcctgcctcccagccttctctccaggccctgaactttctcaagtcgacctcaccaggcccagctcatgcttctttgcagcctctccaggcccagctcctgcatcttggtggcccctccaggcccagcctctgcctcccgtcggcctctacagtcccaacatctgcctcacagcagattcttcacgcccagcatctgcctcactgtggaccccccaagccaagctcccaacctttcagcagcttctacacacccagctcctgccacccagtggcctctttaggccaagctcatgcttcacaagggcctttccaggcccaacttttgtctcatggcaaccttccctggccagattcctgcctgtctcccagcagcctagacaggcccaggtcttgcctcacactggcctctctacatgcagcttatgcctcacggtggcctctccaggcccaactcctgtcccaggacgtcatctccgggcccaaaacttactcaagtcagactctctagtcccaactgctgcctcctggtggcctatgaaggcccaaaatctcctcaagttgacctgttccaggtcccagctcctgcctcctgtcagcgt

SEQ ID NO: 77983 - DNA, 492 bp, Homo sapiens; identical to SEQ ID NO: 63341

SEQ ID NO: 77984 - DNA, 1564 bp, Homo sapiens; identical to SEQ ID NO: 63342

SEQ ID NO: 77985 - DNA, 929 bp, Homo sapiens
cagaaccccttgaatgaaggggaggccgggtccccttgaggaaggatcccactacattaccaacaatttatgcagtgaatctttctcccatccttccccaagacctctggccttttaccagggtaactgtgcactggggaaagggaaatgatcagacatttcagggactacaggatactggctctgagctgatgctgattccaggggacccaaaacgtcactgtagtcctccagttaaataggggcttatggaagtcaggtaattaatggagttttagctcaggtctgacttacagtgggtccagtgggtccccggactcatcctgtggtcattttcccagtgccagaatgcagaattggcagagacatacttagcagctggcagaacccccacactggctccctgactggtagggtgagggcttttatggttggaaaggccaaatggaagccatgagagctgcctctacctagaaaaccagtaaatcaaaaacaatatcgtattcccggagggattgcagagattagtgtccatcaaaaacttgagacgcggggtggtgattcccaccacatcccggttcaactctcccatttggcctgtgcagaagacagatggatcttggtgaacggcagcggattatcgtaagtttaaccaagtggtgactccaatttgcagctgctgtaccagatgtggtttcattgcttgagcaaattaccatatctcttggtacctggtatgtagccactgacttgacaaatgcctttttctccattcctgttccaaggcccaccagaagcaatttgtcttcagctggcaaggccagcaatataccttcactgtcatacctcaggggtgtatcaactctccggctttgtgtcataatcttattcatgtcatattcttattcggagagaccttggtcgcattt

SEQ ID NO: 77986 - DNA, 1164 bp, Homo sapiens
cccacgcgtccgagctgctgtgtctcttcgtcgtctgggaagaaaactttcacattaagagttgctgatgcggattttctttctttcctctcccggcgttgatgagtgcttggctcctgacagaagggatttggctcccagctttgtagttcggaagaagttgggtctatagatttccccctaactctccattgatgtgttgagcttcagagggaataataactctacgtaaagcatgctggcgtctcaaggagttctcctgcatccttatggcgtgcctatgattgtaccggcagctccttaccttcctggactgattcagggtaatcaggaagcagccgctgcccctgacacaatggctcagccttacgcttcggcccagtttgctcccccgcagaacggtatccccgcggaatacacggcccctcatccccaccccgcgccagagtacacaggccagaccacggttcccgagcacacattaaacctgtaccctcccgcccagacgcactccgagcagagcccggcggacacgagcgctcagaccgtctctggcacccgcaacaaacaagattgacgcagcaccgacggatggccaagccccaagacacaaacttcttgaaaacacggaaaacaagtctccagcccaagcgggctgcatgtctccaatatccccttcagggttccgggatccggacctcagacaaatgttttggtcaatttggtaaaatcttagatgttgaaattatttttaatgagcgaggctcaaagggatttggtttcgtaactttcgaaaatagtgccgatgcggacagggcgagggagaaatttacacggcaccgtggttagagggccgtaaaattggaggtaaattaatgccacagcacgtgtaatgacaaataaaaagaccgtcaacccttatacaaatggctggaaattgaatccagttgtgggtgcagtctacagtcccgaattctatgcaggcacggtcctgttgtgccaggccaaccaggagggatcttccatgtacagtgcccccagcacagacttcagaggagctaagctgcacacttccaggcctctgctgtcaggcagctgagaatctgactgcctctcctcccctattacaattcatgtttaaagtcatagtcgcccaggtgtatt

SEQ ID NO: 77987 - DNA, 1597 bp, Homo sapiens
cctgctgggaaccccctgaaacaaagccagcttccttttccaaaacacagtgcaaaggggccctgggcagctgcctcactgctgtgtcctcgtcacatggtgctagcattggcttactgaacataggacggccctctgagacctgatggattatggaggttacagaggggtggctcggcctcagacactcagcacagtccctgccccaggctgctgcctccacaccacagcgtcctgcaaggtggccctcatctccctgggtcttcccctgggctgaaactgcctgtggaaaccccagggaaacctactggttcagctcttcagtcattcagctgtgactcatccattctttcactgaggacacagcacagcccagccttgggccaggtgctggagcttcgggtaaaatgccttggaagctccaggtctgatggagcagacaccctcctgtagatctgatggaggagatacccttctgtttaactcataccatagactcgaagctccaggagcacggagccttgcagcgcctcctgcatgaggaaaggaaggaatgagtgaacggaagggaagcgcggacttcagttgccaggagaccagctggcccctagacatctccacccgactggcagcaccagggcaggacaaggtcaggagggcagggcttgactgggagctagcggcccctgagccagttaaggcctttgtggatgagtggagcaggtggctcctggggcacctgtcctcacgcctggccccaacttgccctgtgtccagccaggaggtggttaccttctagggctccagctcagagcctctgggagtagtgctgggttctgggagaggaagtgcaagagggcaggcaggagggagaagggctccctgcctctccaacaacctgcagggctccaggaactgcaagccactcatcggggtgcagctgccccaccacagggccaggctctgccgccaccgttctaccttgggaaattggactcccaggaagctggaggggctgcccgagggtcccaggagacaggaggcagaagctgagcttgagttcctcctgtctccccactcccccagctgtctatgggccctggggtcccagcactgaagggtggagaggggagggaggctgacggtgtgggaggggtgggtcactgtttcacctcagtagaagccctcccctcttcccttgtgcagcctacgggagctgccctgggtgttccccttgtaattccactgaagtcatgggggaggggctgctgaaggctggacctgccctcttcaccccagtccccagggcaggccccacataggtcctcaaagaggtgacctgtgggggctgcagggggcactattctgcacacaggggtgttcctgccactcaggcccctgctttgatgaggaggcccagggacccaaagtgtgggggtgagggcgccccacagcacggcacccgtgaggggactggagttcttgagttacctgtgcctggctgctctctccagcccccggggcatgggcgccggtgtactggcggcggcggggaagcaggcagctctttcccaggaggacgcccgagtgattccat

SEQ ID NO: 77988 - DNA, 420 bp, Homo sapiens
gggtcaccagacgtggaccgtgtgccagcgctttgtgcactgttaaagggtgggttcattttacttggcccctggtattttcgtgggtcgctctgagcccatcccgagctcttttggatcgcatttctccagcccaggatcccaaaaccagaccagcaggacaactaccccggcactgccaccgcccgtttccacagtccacccacagccgttgcgccctcctccattccccagagcccatcacgcaccctctttaccaacaaaccaccggacgcttttcccccagccgtgacttccacaacccccaactaaatacaagtcggcacacccccttccttccccgcgccaaaccagcgtggccgcccactcgtcgcacccaggtccagcaggtccagcaggtccccaggagggcccacgaaa

SEQ ID NO: 77989 - DNA, 983 bp, Homo sapiens
agcatgtgcatgggacacaacgctgtctcttcgagaatccctatggcacagacctgggaaagacagtaagactctgtttgtagacagcctttgtgggtaccgggctactttcccaggcgtttccatcagtccctcctgcggagagggttggagagcaaccctggtatatcccatctcgaagagctggcggggcgaagatgcgaagtggctgggccttgccttatcctcccgccccacaactccgtccttctctggaaaagacgcccacagtgctgcaagttccgcctgcagtaattccgcgacttccacaagagcgtgagggctgaagaggcaagcggcacccctcccggcctcaccaggcgcaacgtcagagcggagggtctgaacctccggccctgcctctccagccctctgccctcctggctggctggagtccattccccatccgcccgggtgggcaaccagatgcagccaaagtagcgaaagagcatgccgggatgccaacccgtgcagccctcagcaaatcactcaacttctctaagcctcaatcccgcccgggaactgggactaacagaacagacgcggacacactgaatgtcggcccttccctccagccccggtcaagggctcagccaacgccgcggcgccagcgccacgagcgcaggaaactacaggtcccaaaatgcagcgcggccaatccgccgacccgcggccccgagggcggcttggggcctgccgggagctgtagtttcgaaaaaccgcaacgcgcctacgagccgctcgggtaaaagaaccacttgtagggtcactgcgactcactgctcacttgtctccgcggcgaaccttccagaaccggggtccctcaggaactcaaccgactccagtcgagggccgccacccgtccccagctgtcagccagctcagagttttcgcgggcagaggcgcgcagtcggcgctgagcccactgcacttccgccccccac

SEQ ID NO: 77990 - DNA, 1399 bp, Homo sapiens; identical to SEQ ID NO: 63348

SEQ ID NO: 77991 - DNA, 652 bp, Homo sapiens; identical to SEQ ID NO: 63349

SEQ ID NO: 77992 - DNA, 723 bp, Homo sapiens; identical to SEQ ID NO: 63350

SEQ ID NO: 77993 - DNA, 885 bp, Homo sapiens
gcaagcctggcctatcccctgtagggggtgggtgaggggcgaggctgaggaagaagagaaggggaattggggcgcttgaggggattataatttctttaaaaagaggggaggggagaggccatggccgtcccagccaagaaaaggaagatgaacttctcagagcgggaggtggagatcatcgtggaggagctggagctgaagaagcacctgctggtgaaccacttcaacgccggggtacccctggccgccaagagtgcggcctggcacggcatcctgagaagggtcaacgccgtggccacctgccgcagagagctgcctgaggtcaagaagaagtggtctgacctcaagaccgaggtccgtcgcaaggttgcccaggtccgggccgccgtggagggtggtgaggcgccggggcccactgaggaggacggagctggggggcctgggacaggcggtggcagtggcggcggtggcccagctgtagccccagtgctgctgacccccatgcaacaacgtatctgcaacctgctgggcgaggccaccatcatcagcctgcccagcaccacagagatccaccctgtggccctcggaccctcggccaccgcagccgcagccacggtcaccctgacacagatccccacagagaccacctatcacacgctggaggagggcgtggtggagtactgcacggctgaggcgcccccacctctgccaccagagacccctgtggacatgatggcccagcatgcagacacgtcggtcaagccgcaagcgctcaagagccgcattgctctcaactccgccaagctgatacaggagcagcgggtcaccaacctgcatgtgaaggagatcgcacagcacctggaacagcagaacgacctactgcag

SEQ ID NO: 77994 - DNA, 983 bp, Homo sapiens
taagcttaaggatctttactttcagtttagccagagtggaattagaacagggatatcattaacagccagccaggacagaagcgaaggcgtctcagaagcaacttggtggaccagcctcaggaaccccgggtcatgcctgcacttcccaccttcctgcctggggagaggcccaatcccctgagggaccctggagagcccacgaccagggccgccagcccctgcccagcacactgcaggcccagctgccccttcccagggcgatgtgtctaggctccggagacagcccagtccagggtgggtctatgtctgcatgcagccgaggatttccgtcaccctggccatggggctgttccacacctgctcctgggatccagcagtgcagcccgcaagaacagacccaaccggggccaagcctcaggttccagaagccacccctgcctcctgcccctccttcagggccctagatggctgtggcctggatcagggctgggcagagggtgaggcaggagccaccccaccttctgctggggacacagacaaggagctctccggactggaaagagtccccatgtccagtgggtcagggctggaaggggagacaggggaccccatcagcttagggggcctcggattctgtccaaaccccttccctcgaggacctggctgccagctggaaactcagctggtccccaaggccagagcccccttgagcttccagagcctcgatccccctggacttgacacccccgatgggcacctgccagcctcactcccgggacccaggatgatgcccccaccaggaccctccatgtggacccaggcacgtggcctccaggaggctggtgcccagccacccagagacacaagccagctgctgatggtggacagggtgggtcatgaactcagggagccaggggctcgcctctccccgggaaggtgggcgcagcagcagggagcacttggcagcactcgacccgggaatt

SEQ ID NO: 77995 - DNA, 1396 bp, Homo sapiens; identical to SEQ ID NO: 63352
  misc_feature (1)...(1396): n = a,t,c or g

SEQ ID NO: 77996 - DNA, 447 bp, Homo sapiens; identical to SEQ ID NO: 63354

SEQ ID NO: 77997 - DNA, 588 bp, Homo sapiens
ggagccccaggggccgaagaggcacacgtcgggcctttgggtgcacctcagcctgggggccagaacgtggggcagagtgcagccagggttctgactcctggggtggaagggagactcccagggcatcatgtctctacccaagtccagggggatgagccgctttttctctttttagacccagtcccaagacccaagccaagggtgacccttcacactggcccaggcctttgcaggcaccttggctgaggctccccaagtatgaatggtaaatccttgcctccagcctcggcacagaggagcccagcacagacgcccccagcacagagtcccccagcacacagcccccaacacagagctcccctgcacacagcccccctgcacagacacccccagcacagagtcccccagtacagagcccccagcgcagataccccccatagcacagagcccccagatcagagacccacagcacagagtagccccccagcacagggccccccggcacagggatccccaagcacagggacccccccagcacagggatccccccagcacagggcccctcagcacagggacccccccacagta

SEQ ID NO: 77998 - DNA, 829 bp, Homo sapiens
  misc_feature (1)...(829): n = a,t,c or g
ccagcctagcaaagttgatggggattnagngcatgntgtttnnnnnnngggnaaatgnnnaaaanngnggggtnaagangggnnttnnaaangggggnngggtagannaggnnnngnnnttaaaaagtannnnnnnnnnnnnggnnnnnnggaatanngtggnnnttcttctccccaccacccctcccnnnnnnnnnnnnnnnnnnnnnnnnnnnnnngccatgaattttctatgggaatgaatataccttaataaagaaaatcaagcaatacaatgggctacaatgactgactaagaaaaacacatgattatcttaatggatacagaaaaagtatttaacaaaattgaaatatcaactcatgatcttaaaacaattctgaacaatctagtaatcataggaaattttcttaaactgataaagaatatctacaaaaaacctatagctaacatcatacttaatgaaatactaaatgcttccccccagccacactaagatcagagacttggcaaatacgtgtgctccaaacattcccttttaacttcttactgcaagtcttagccaacgcagtatttcaagaagacataaaaggcaagcaaattggaaaggaagaaattaaactatccatattcacatgtaaatagtaaactatacagacaccactgtatgtagaaaatgccaagaaatatacataaaagttcatataataaatgagtttagcaaagttgcaggatacaaggtcaacataccaaaagtgactttcagatgcatatacccctatttggtgttcaatcacatcagtgtggtcttttttataaaagatgatgcta

SEQ ID NO: 77999 - DNA, 1099 bp, Homo sapiens; identical to SEQ ID NO: 63357

SEQ ID NO: 78000 - DNA, 1062 bp, Homo sapiens; identical to SEQ ID NO: 63358

SEQ ID NO: 78001 - DNA, 1475 bp, Homo sapiens; identical to SEQ ID NO: 63359

SEQ ID NO: 78002 - DNA, 708 bp, Homo sapiens; identical to SEQ ID NO: 63360

SEQ ID NO: 78003 - DNA, 1749 bp, Homo sapiens
ttttttttttttgttttaacaaacatgtttattagaaaagtaaaaaatattgcataggtcttaatacttgaacatcaagtgtattcatgaacagtgagtatcttatcttcatgtaaacagttctagatggaagacccagatggcactcctcccggggaggggttccagcccccaccctctcagcccctcccctgccagctcaactctgcagtacacgatgggggaaggcttaaacgcagctgccaggtgtaatttttcaagtgtcaaagatcccaagtgatccctgacacccaccccttcctactcttacattcatgcgtctgtaagatagctgcctacaacaggtcagtagtgatgctccgatcagaaaaacaagatacaaaacaaacaacaaacacacttggtcccttcagaccagtaagatacacaaaccacctccacgacctccgacctcccccctccctccggctgctctgaggagcacgtgcctcttccttcaccctgggccaggctggggcgggagcagcccagctgctctctggatgtcacaccactgttaactgtcagtaacaaaaataataaggtacatgctacacacacatccagctggaagccttgttggcccctaagcctttgtttcatgctacagtactgaggggtatgtgtccccaatgcacagccacccgcacacaactcaatgagcttcctgggaaacactattcccccacctccaccttaggtggctgcctcagttttccaaccactggaatcagtccctcagctcctgcctctagtctccaccccaaaagttcagtcgtctctgtcttggagggcactgtcggccccctcaggttgaagttcaacactcctcaatgagcagctgttccgagctgtacagcttcttcttgatgactcggaagccagtgctcagcgtcagggactggctgaagccagggaggaagggagagttggcggagctaaacagcccctggatcttgggccagagtcgtgagtccaggcgcagcacgagggtcagctggaaggtgggcaccaggctggggtcgagtgccagctggcccacgctgtggcagctcttgccctgctccacgcagacgtccagcagcgccccccgcaggccgcacggctcgctgtaggccaggcgcagtagttctttgcccacctggcttaccaactggctaggcatcagcaggcgcgcagggcgtcgagagcccagccgcgcctgggccaggctctcctgcagcagctgcatcaggttggcacacaagtgttcatcctcagggtcactgagcagctcgaagtcgggcaacgacaccccatccaggtaagccgtgtcttcctccggcccgaagccactgttgctgctgtccagggactcgcagtccgagctctccaggctcgtggagcggtcaaacccctcctcccgggtcgccgacccccaggctgagcgcggcggccgatctggggtgggagttcggggcaaggacgagggcgaagaggaggtggacgacgacgagaagcggtcccaaaggctaggcatggtgaggacagacgccagggcgtttgctgatgaactcagagtgccggagcgtagaagccgcagctagcgcggtcagcgagaactgctaagacaagtgcgtcctgccgcttgaatgggtgtgcgaacccgtgccaaccaccgagagccgcccagacccgtcccaggtccacgctcgcacctcccccttggcc

SEQ ID NO: 78004 - DNA, 577 bp, Homo sapiens
tttaggggtggagccggcaggaaatttaaactgaagccgcggccgaaaacgccaagagattgatgctgtagctgccctgagataaccaggactgtggaatcgggaagagctcatggagctcgcgaatgtaatacggaggcctctgaggaaggagtacggaggccgagaaggagccggcatttgatgagcgaaccgggaaagggagacgattgcctcgagctggagagttccatggctgagagtaggctccgggccccggacctaggagtttccaggtgtctaggaaaatgccagaagaactcaccaggtgccaggaagcatcccttttccggaaagtccttttacttggatctgcctgctggcaagaatctccagtttttgacgggggccattcagcaactgggtggggtaattgagggttttctgagcaaagaagtaagttacatcgtgtccagccgcagagaagtaaaggcagagagcagtgggaaaagccatagaggctgccctagccctagccccagtgaggtcagagtggaaacatcggccatggttgattcaaaaaggcagccaccccagt

SEQ ID NO: 78005 - DNA, 1685 bp, Homo sapiens; identical to SEQ ID NO: 63363
  misc_feature (1)...(1685): n = a,t,c or g

SEQ ID NO: 78006 - DNA, 898 bp, Homo sapiens; identical to SEQ ID NO: 63364

SEQ ID NO: 78007 - DNA, 756 bp, Homo sapiens
actccactccttacctctgattagcctttacctgcactcctatttctaatactttagtaaaaaagtgtttcattcaaatgttaactttaaacagcagacagacacaaaaattagtaaagcaaggtttaaggtcattgcattccaatttatcacctcccttttgtgtccctgttcagactatgagctccaagaagatggggaccagagtgtttggtacattgctgaatccccatgcctggcatagcccttggcttacagaaggcacttaaaaatatcagcaaaggaaggaagaaatgaaggaaaagagcgaggaaaaccatggtttccttgataactgctacgggctgaggggccctccctataccattctttcgtctgttctgccacgaccttgaatgttacaccacaactactctggttatacctcaggagttgattccagaaaagatttcactacaagatctcccgggtctctcctcacttctaagcaagtaactgaggccacattagtgttgccccatttgccatccagattcctaagatccaatgtctgctgggatcgttcatgcaattgcaatgcccctcggccaccctctcaccagtgctcccaagtcacctcccaaaacccctctcaccagtgctcccaagtcacctcccaaaactcctctcaccagtgctcccaagtcacctcccaaaacccctctcaccagtgctcccaggtcacctcccaaaaacccctctcaccagtgctcccag

SEQ ID NO: 78008 - DNA, 3457 bp, Homo sapiens; identical to SEQ ID NO: 63366

SEQ ID NO: 78009 - DNA, 478 bp, Homo sapiens; identical to SEQ ID NO: 63367

SEQ ID NO: 78010 - DNA, 758 bp, Homo sapiens
ttttagaaatacaccagtagtaccggacaaaccaatctccaggaaccaccgggttgagccgccaaaacaggaatcaggcgcgcagcctcggccagtcgggaagccactggcacctatggccaggcgagaaactgtttactttctccaccccaccccagatgcacacaatggagttgatggctttggagatgagaagcgccaccggactgttaaccccgaagggaagaaaaacaagcaaccctaaaccacgctctgggcagggctgttaattgtgccggtgacaaatccgatgattaatgggcaggggcaggaggcgcggggagacggcacgtccgttctgagctggctccggggcagcggcgcagcttcccaccccggggctgggccgccgaccacgcaacggttggagggggctgaggaaaggggacgtcgaacccaccccagccccacggctcctttgtccccaaatccgccgacggtcctcggaccgcagctcccgcctcggtgggcttaagtttctttgttgtgcgtgttgtcttctcctctccgttttgccagctggggggaagggggcgccctccgtccagcccctaaagcctcgcggggaaccgctgttagcggccacccagcgcaaccacaccggtcccgcggcggggcccaagcgcgaccggccccggggcgctgccgaggttccagcagccccgacggccggactctgacccagggatgtggggcccgcgtccggacgcgtgggtcga

SEQ ID NO: 78011 - DNA, 1598 bp, Homo sapiens
ttttttttttgtagcggatagccagttttaatgaacagaggatactgattggtataaaaaggtgtgtttgtcactgaggtgtcctcattttctagatgaggagttgtcttctccatggtcttgaacgcctgcttcgccatggcaccagcgtctgggtgcacgctggctgtcgccacagggcaggagctgctcatggaaaggtgtgtgcccctagtgtgcagcactggtcagcttttccacatagtaacaacagccttgttctgggcctgagaaggcccccaaaggtagacgaaaaggaaccatggccaaatgcctatcaatcagcccggtacctaatgtaacccaggacccatgtgagggaggctgagccttcacctttcagcccttccctcagcatgtggttctcagtttagggcagagcttcttaagattcactttctggcgtttaggggcccagccccaccagcagtacaggcctacaccagtgtaatttgaaacgtacagacggtggaagaggaagtctagggagcttgggtccttagaccaccagggagcagggaagggatgggaagggctggggggcggcgggggctcaccttcctctgcttccctgtgggctgggttcagagctcctcagtgtcctggcctcccaggtgggatcaagcagggtgggtgcagctgcagcgttccaggcaagagctcaagctccagtaccaggaacataaggggacataagggcctcaggcaaactagggttacgggccactgccccaagagttgagtgggccacaagcaatccccagtgcccaggcgcttccccatgagagccgccagcaggcaacggtgtgccaggccggcctgagcggggccagtacacagtgggtgcgaggcttctctcaaatgcgcgctccagctcatcagtcttagggcttctgaggcaacctagtgggtcctggacttctgttgctgtggggcctcaaacctgttgagtagccacctcagatgaccagaacccacctccagagttcctatgaccaaagttgtctagagccgctccggacactgccagggttgctactgacaggaatggggtccccagagaaagccatgcccacaggcatccaccagctgcagacaggcccggcccctgcatggcctgccttggctgcaccttgtacatcctggatggcatctgccggccacgggctgagtccccacacacacagactggccctggagagagcaaggcaagccccctaacctgggacaagtggacactgaggactcccagacccagccctgggtggctccagcttgggactgctcccttaaggctcgttcttggccctcactctcctccccttcctggccctcatctggacccgcgctttctgctgccttgtggtcctctgctccagccctgggagggaacgcggctcccctgacactcgaagccagggaggcctctctctttgcctgctgggcccggtgccgctcttcagttctgccagggctgctgaggcggcacaggccagagagggaggaaccagggctgagggcaggaaccacagaggtgcagacgcgggggcggggcacag

SEQ ID NO: 78012 - DNA, 1940 bp, Homo sapiens; identical to SEQ ID NO: 63370

SEQ ID NO: 78013 - DNA, 2011 bp, Homo sapiens; identical to SEQ ID NO: 63371
  misc_feature (1)...(2011): n = a,t,c or g

SEQ ID NO: 78014 - DNA, 2273 bp, Homo sapiens; identical to SEQ ID NO: 63372

SEQ ID NO: 78015 - DNA, 984 bp, Homo sapiens; identical to SEQ ID NO: 63373
  misc_feature (1)...(984): n = a,t,c or g

SEQ ID NO: 78016 - DNA, 488 bp, Homo sapiens; identical to SEQ ID NO: 63374

SEQ ID NO: 78017 - DNA, 819 bp, Homo sapiens
acactggtgcgcctggcgctgggcactgcagagcagcgaggggcctgccctggcctcctggagacactgggagcccttcgagccatcccccccgcgcagctgcaggaggaggccttcatgtcacaggtgcacagcgtggtgctgtcagagcgggacctgcagcgggagatcaaggcccagctggcccagctgcccgattccgcgccgggacccccgccccggccacaggtccgcctcgccggggcccaagccatctttgaggcccagcagctggcaggagtgcgacgaggcgccaagcctgaggtgcctcggattgtggtgcagcccccggaggagcccagaccaccgcggcggaaaccccagacccgcggcaagactttccatgggctcctgactcgggcccggggcccccccatcgaggggccccccaggccccaacgaggctccacctccttcctggacacccgcttctgagaggaccatggacttagtgtcccccagtctcaattgcctgatggctgatgccagcccggcaaataggcaccgcactttactcttgggactcggggacttggcttccttcctggcaaggaccaggcagtggggaaggaggaggtcctccgtggtacatactgggtcaggcactagcatggaggagggtcacagagtggggcacgtgaggacccatggaaccgttctggtgcccaggccctcacaagtaccaaagccagcaccaaaggagtcagggaagggcgttggctgagtcaagggaccccagagggcaccaggaataaaatcttcttgaacagaaaaaaaaaa

SEQ ID NO: 78018 - DNA, 483 bp, Homo sapiens
  misc_feature (1)...(483): n = a,t,c or g
tttcgtagccggtgctgctgcaggctgaggctgcggcagaggcggcgaggcgcgggcggtgaggacggacagtcaccgacttagtccagttccctgtgatctcaaaacaattgttgcagcaggctcctggcagtctcaagcagttcatcttcttggtgtactggtttcctattgtgattttatcatggaaaatcaattggctaaatcaactgaagaatgaacatttcagtaccaggattctcttccatcactgcctgttccttcacttgaagaatcattaaaaaaataccttgaatcagtgaaaccatttgcaaatcaagaagaatataagaaaactgaagaaatagttcaaaaatttcaaagtgggattggagaaaaattgcaccagaaattgcttgaaagagcaaaagggaaaaaggaattggggtatttgtttgttataattgaattattgatgatgttttaaagattgataantaaaag

SEQ ID NO: 78019 - DNA, 906 bp, Homo sapiens; identical to SEQ ID NO: 63376

SEQ ID NO: 78020 - DNA, 771 bp, Homo sapiens; identical to SEQ ID NO: 63377

SEQ ID NO: 78021 - DNA, 1258 bp, Homo sapiens; identical to SEQ ID NO: 63378
  misc_feature (1)...(1258): n = a,t,c or g

SEQ ID NO: 78022 - DNA, 596 bp, Homo sapiens; identical to SEQ ID NO: 63379

SEQ ID NO: 78023 - DNA, 417 bp, Homo sapiens; identical to SEQ ID NO: 63380

SEQ ID NO: 78024 - DNA, 635 bp, Homo sapiens; identical to SEQ ID NO: 63381

SEQ ID NO: 78025 - DNA, 461 bp, Homo sapiens
ttgcctctttcactatgggcaaacttccaccctccattcctccttcttctcccttagcctatgttctcaagaacttaaaacctcttcaactctcacctgacctaaaatctaagcatcttattttcttctgcaactcctcttggccccaatacaaactaacaatggttctaaatggccagaaaatggcacttttcatttctccgtcctacaagacatagataatttttgttgaaaaatgggcaaatggtctgaggtgtcttacgtccaggcatttttcacacttcgttccctccatagtctctgttcccaatgcgactcgtcccaaatcctccttctttccctcacacctgtcccttcagtcccaaccacgagcgtcgctgagtcttgtgaataatcctattctgctgaaccatctgacctctcaccttcttcccagactgctccacgaaatcgtcgacccg

SEQ ID NO: 78026 - DNA, 1039 bp, Homo sapiens
tttgggggggcagtatcattttaactagggaggagagggaaggcttcccttaagaggtgatatttcaactcaaggatggtaaagagggaagccacaaagacactcgaaataaaggtttcagggaagggacagacagcaggggtggcggagaggtgggtgcggggcaggagggccatgaaggcgctcgtgtctcctgcgagggctcagggtgctcggcctgtcataaatggacttaggctttgacagagcagtttagctgccctaaagaaacctgggaaggttcccttggcacttgggattgtccgtttccttttctgtctatgtgcgctgtctatgctggacttgagataattctccggagtccgactcaccaggagactcgggtgtcacccagattgaccttcaaggctcatttcttgtcagtccagtacccgtcccctcggttcacacgaccatccagaaacctcaaattcagtccatgcttcttgttttgggtctcggggctgggataaggcggggctgaccaccgcggggcatgtaggtagtttccgtggtgctgggggcgctctccagggaagactacttggtctgcagaaaaggccttgacttgtgcatacctgggcagcgggcctatgagtggcagcgagagcggggtaaccagagagggcacaccccccaaccggagcgccccccaggttggcatctccacaactgtagaacctcccccatcagggcaaccctcccgattgggacaccgcccccagccagacacatcctcctagcagaacacccatgcttagccggagccgctcccccgccagacacctccccaccgggaaaccctccccagtgggacaccccagccagtccaggtattcccgccgttagggacaccccctccagccggagcataccctcggcaggggcattcctctcaaccgagggaacaccgccgcaacgggaacctgcctgaaccagagcaccataacgcgccggggacaccccacaggcggctcccgcgcacgaagtggtcgatccg

SEQ ID NO: 78027 - DNA, 825 bp, Homo sapiens; identical to SEQ ID NO: 63384
  misc_feature (1)...(825): n = a,t,c or g

SEQ ID NO: 78028 - DNA, 1131 bp, Homo sapiens
gagtggtaaaattcacagaagttccaggttcatcatgtcaggatcattccttgtgcaaagtttgatgtagatgaagataaagtggtttcttggtcaataattgcaattgctttcttttaaagtcagtgggtttcttgtatagttctattacaattggcccaagtttaatttcatccatctccatgaaagcaaaacacttggtgctggtaaacctttttttaggcttgtagtgtttgaattcaaagaagatagctgcacctttggttaatttttcaacatgcttctggagctcaatgtccacattaaaatgaacatatgtatcttcttttcttgaagccacaggagtatcttgcacaggagttaagtctatgccattcagatcctttacactaactgtaatatagggattgatgcactgcccagcatctttcaaaccaattttctcaattctgatagtgagtaatgtcattcctggttccgatggcaaccttggtaataaagtaccgggaactctagcaggaaaagaatcaggagaccctgctccagcaccaccctcttcttcatcttcttcaaattccaaattctcttcttcaccaggtgccaaaattcttcttaatgggacaggctgaacatcaaatgggaattctttattatatgtaagaatattctttaggattggttctagcttcttcaggtcctccagtttaaattcttcttgagactgtgtggactgtaaagctgcacttcgcaattccaagcatgttgcaattttgcctatggttttcttttgttcttctgtgaattcagaattattgtgttgagcttgggcctccttttgtagatgtcttgctaatatctgatactcgtctatcgcctccaccagctggccccaagagtcgaagtcggcgcctctcctaaaactggcgccccagcgctgcagcagactccgggtcacctccgacatggccggtccccaccccgtcccctcccgcccctaccccagcaaggccgggttctagggcgccatcctcccccggcctggccccgacattaacagggccaggaggaaccgctacggccaccaccgccacccgccgaggagccgcccaagcccatttgccgcccatgtat

SEQ ID NO: 78029 - DNA, 716 bp, Homo sapiens
agagatctcaggccgcagctttgctttcctcatgctcttcctggctggggcgtctgggtcactcactggactctcctctccttagacctgtgcacaagcacacacgggaaggcatcctgacaggtggtgggaagagaaggcagctgcctcactgcggaaagagcacggccgctcctggactccagccctgttggggctggcggggtcagcaggcgctgggttccagcctcaggtggggtctttggaggtggcctctgggcacaggcacctcctctgcggccttctcaccaggtcacggttcagggaggctttgccggctacggagcctgcccacaccaaggcgcgcacgaccacctgtccagagatgccacgcgggctgggcggcgaaggccaaggacacgccctgcctggtgtcgggggcaaaggttaggcctggaagggaggtgtggggtggggaccccgaggccagggctgggccgctgagcttcagggcccttggggggctcagggaggaatgccggaggaccccagcatcaggaggaacccctggagagctacggcaggactcacctgtggggcacagggagggatcaccagggaaatggcccttgtggaggatctcccctctacccccagggcaccaggggaggatctactagggggttctggtggaagggcccacccgggaagcggcgcgcggggaggactcgacgaaa

SEQ ID NO: 78030 - DNA, 876 bp, Homo sapiens
attcccgggtcgacgatttcgtcatgagtgtactgctgaggtcaggtttggggccgttgtgtgccgtggcgcgcgcaggtaagcgtcagtcccctcgaagcccggttgccgtggaagccgcgtggggcgccttcctcagctcttcagttgagggtaccgggggatcaagggctcgggggctcacttccaccttgaaggtaccctgggctggaaacgggtccggtacaaacgcaatagggctgcgtagtcgtgggcaagtgggtgctgtctctgcgccccgtgggcgtgctaagcacagtagcccgcggtctgcggtggggcgaggttaagggttcacgaagctgttttgaaaacgctcaggcggcttgcgctcgtgaatggtcagatttatcatggggtctgtttaatttgtgtttttcgcagccattccttttatttggagagggaaatacttcagctccgggaatgagcctgcagaaaacccggtgacgccgatgctgcggcatcttatgtacaaaataaagtctactggtcccatcactgtggccgagtacatgaaggaggtgttgactaatccagccaagggttattatgtgtaccgtgacatgctaggcgaagaaggagatttcattacttcacctgaaataagtcaaatctttggggagctactaggtatatggttcattagtgaatggatggccactggaataagcacagctttccagctggtggaactgggcccaggtaggggaaccctcgtgggagatattttgagggtgttcacttgacttggatctgagctgattaaacgggacatttctggacatttgtctgaagtagttcatatcaatagtggagagtcatacatttactctg

SEQ ID NO: 78031 - DNA, 1091 bp, Homo sapiens; identical to SEQ ID NO: 63388

SEQ ID NO: 78032 - DNA, 1191 bp, Homo sapiens; identical to SEQ ID NO: 63389

SEQ ID NO: 78033 - DNA, 762 bp, Homo sapiens; identical to SEQ ID NO: 63390

SEQ ID NO: 78034 - DNA, 704 bp, Homo sapiens; identical to SEQ ID NO: 63391

SEQ ID NO: 78035 - DNA, 759 bp, Homo sapiens
tgaaattccgggtagacgatcttcgattcagcctctgctccactactttatttacatctccttttctttccatttcatcaacggaagcagctaacagagcagattaggttatttctttgctggcggcagaaagtaaaacatcacactgtcctttctcacgagcctaaagctcatccccgacgccctaatcattaccctttttaatggacttaaagcttgcaaggctatctacattttctgagaattcatgaactggcataaaatggtttgaaggtacaaactcttccttgggacgagtataatctggtgtatcgaaatcaacaaaccctacaccagaagggctaacttctgaaaacccaccaaattccccaaattcatcatcatcatcatcctctgctccattgtctaatggtggtggggatgaagagtacattcgaatgatgtctggctccattgttcagttgctttcaaataattaatttacacctggctccttcggggcggctgcgatgggcatggctcaggggcccggggaggaactgactccccggggaaggaccgtctattccgacgcggaactggtgagagcggaaggccggctgctcacagccctgtcagcgcagcagcaccatggacgcccacccggagtttcaccgctgccgcgggacccccatcccactaccctccgccctcttccgccgccgccgccgcctcctccacctcctccgcggagacccccacgaaatcgtcgacccggga

SEQ ID NO: 78036 - DNA, 2602 bp, Homo sapiens
gcgtcgacgatttcgtctggaaagggcagagcaagtccactgtgggcactgtgtttagtcttgagtcagaggaggaggaataccctggaatcactgcagaagatagcaatgacatttacatcctgcccagcgacaactctggacaagtcagtcccccagagtctccaactgtgaccacttcctggcagtctgagagcttacctgtgtcactgtcagctagccagagttggcacacagaaagcctgccagtgtcactaggccctgagtcctggcagcagattgcaatggatcctgaagaagtgaaaagcttagacagcaacggagctggagagaagagtgagaacaactcctctaattctgacattgtgcacgtggagaaagaagaggtgcccgagggcatggaagaggctgctgtggcttctgtggtcttgccagcgcgggagctgcaagaggcacttcctgaagccccagctcccttgcttccacatatcactgccacctccctgctggggacaagggaacctgacacagaagtgatcacagttgagaaatccagccctgctacatctctgtttgtagaacttgatgaagaagaggtgaaagcagcaacaactgaacctactgaagtggaggaggtggtccccgcactggaacccacagaaacgctgctgagtgagaaggagataaacgcaagggaagagagccttgtggaagagctgtcccctgccagcgagaagaagcccgtgccgccgtctgagggcaagtctagactgtcccccgccggtgagatgaagcccatgccgctgtctgagggcaagtctatactgctgtttggaggggctgctgctgttgccatcctggcagtggccatcggggtagccctggctctgagaaagaaataggaggcttttcagaagagaaagacagaaggatgtaaggttggagttgtattggctggaatttgaacctccagcagctgtctggacatttgtggaacactctgggataattggggacttctgctcaacatggcagtggcatgttaggcatgttagggcttgaggtggggcattcacattcatctgactgtaaatcccaagggcctccgctcatgctaaattgagaatcttaggggtaaagcaccccctccaggaccgggtttctcagccttggcactagtgctgttctgaccattctctgtgttggggctgtcctgtgtgtggtgggctccacccactagatgccagtggcaccccctcccagagatgacaaacgaaaatgtctctagacattgccaaatgtcccgtgtgaacatcccctattgagacccactgctttagcgagagagggtttacttaggaagaattgggatagaaattcccagctgagagaacttagctgtgggctcctcagctactgacttcttagctcttaatccccttagaatttcatctttctcgatgagcaggctctgcacccactctttttttgccccccgccctcatcctggagtgtgagggtgctcgcccgtactctcagctgcctctcagggactgcactgttcctcttcacccccaggttcctgctaagatcccacgggcgagggcttgctctggactcagtctgtcaagtccccgaagcttcctgcagctccaccttgtaaaaatgctgcctttgggaatcttcgaaatatgtacacagagaaaatcacatgaaggagacctggggtccccacttgtgagtgcaactgcaagtaactctggctagagagacacatgtgtcttgtgtcaaggcaggaggataacccggatgaccttctgaggtctcttcagcccttttcgctagtggtcacccaccaccatggttacttgccagcaacatctctattgctggatggtccctgtctataaccttgggctagtatattttttccaatatgggaccttagtcttactactgatgagttctatgggtctcttgctagggggtaaggatttttattcttgggcttatagagccagttagatcataattcttatgaaatagagagtgtcctaaatatcactgaaataaaaagtaggaaaaagaagcttgaattttaagactgaggctgctctgcagattctagtttggctttcagagttcaagagtggtggcatcttcacctgaattcttcaatgccagggtaataaaccaaaatagtcctaatcagtatatgctagttgagcatcggcataattttctttcctctggctgatcccagccctaaaggaagggtagacccgtgtctttccagccctaaaggaagggtagacccgtgtctttccagccctaaaggaagggcagacccgtgtctttccatgcccgagggccacgacgtcactatgcagggcacacgtggcttggtttaaaaaggtcatcttagatttatcttagtaaatgtaataaattattttttagatcttgaaatttataataaaaatactttacctaccctgatcaccaaaacctgatgttttaaatgtgctttctttttgaaatttatgttttccaaataaaatctccctaaagcaatattttaaaaattgggtccaaaaaaaaa

SEQ ID NO: 78037 - DNA, 743 bp, Homo sapiens
ctgccgtcttctcctctcagagatggatgccacaggttccgggcttcttgggctctgggaggacgcgcagcggaaggcgaggtcgctatatgaggccgctccaaagtcgcctcgcgctgttgttgcgtcactgcctccagcctccagcatccagggagagtgcaggcaaaaaggcagcccggagggtgggaccccaggggacaggacccccagaaggtgacagagatcctggcagtgggggacctggggcagaaggtgaccccatcctcttcccgggctgccgctcaaggctcctgccgctcccgggctccagcgccctctcaccgggtcctgatcagggctccctttctcaccccgggtcaggcagaaggccccggaccccagtcccaaaagaaacggaggctgcagggcttccacgcaggagagaaggggagggctcctctccgacccgggctccttcagcgcccaccccagcggactctgagagggcgaggaggaggtcgggggctaggttcaagccgcactgggccccggattcaagaaagaaacgggctcctgagacgcctgtgcatcagaggggtcctggctcggcctgggatggggctcggggagagtcagacgatctgccaggctcccagcctgaggccgccctccccggcgcgcaacccccgcccccaccgctggggccctcatgcctttcccggcacgtcgctccccgggaggccgagactcctgccacgaaa

SEQ ID NO: 78038 - DNA, 700 bp, Homo sapiens
ggggtacccacttcgcaggaggacccacattcctagccaaatgtgggaagtcactacttgaaatgccttaggtgcctggttagcgtgccttcactagaccaaactctagggatatcccacgcagcactctgcagagctcactataggtgcattctttctatccatgaatttctcctcttcagcccctctacgttgttgcttcacgcatatgcccatctacgcgaccctttcgcgtccacgtccttctacaatggctcccccacctctatggtccgttagttagtttctctccgccacctcacctctatgaccctctatacagttcctcactgacacagtttctttgcatcatcttctcacctctactgctcctccacagcatctcctcgtcgtcctcatttctatagtcatctgcatcctttttgtagtccctttgccctaggccccgactagagaccctcttccgcttctccttcccctcactgggacctcaacacggcgagagcacccagcacgactcccgccaatcccccggcccaaaggaatgccagtctctatcctcccccgtgtcttcactccgctctactactccgagctccgccgcgccggcccccagccccaggttaccacttttctctctcccacttcgccggcaacgtgagtcacgaaatcgtcgacccgggaattcgggggcggtaca

SEQ ID NO: 78039 - DNA, 901 bp, Homo sapiens; identical to SEQ ID NO: 63396

SEQ ID NO: 78040 - DNA, 746 bp, Homo sapiens; identical to SEQ ID NO: 63397

SEQ ID NO: 78041 - DNA, 878 bp, Homo sapiens; identical to SEQ ID NO: 63398

SEQ ID NO: 78042 - DNA, 926 bp, Homo sapiens; identical to SEQ ID NO: 63399

SEQ ID NO: 78043 - DNA, 2454 bp, Homo sapiens
ggcacgagggcactctcagcagtaggcgcaaccgtgctcaccccgtgcctaacagccttgcttagtccgggctccgaggcagcagcagccataagaaaaaacaggagaggaaggcgatgtggcgcttctgccgggccctcagactggggagtgtgaggaaacctgtaggaagtgtcagggactctggaaagaacataatggcctcacctgtgaagagctggctgaaaaagacgacatcaagtaccgtacctctattgaagaaaaaatgactgctgcccgcattagaaaatgccacaagtgtgggactggcctcatcaaatctgaaggctgcaaccgcatgtcttgccgctgtggtgcccagatgtgctacctctgtcgagtttctattaatggatatgaccatttctgccaacatccccgctcaccaggagccccttgccaggagtgttcaagatgctctctctggaccgatcccactgaagatgatgagaagcttattgaggaaatccagaaggaggctgaagaggaacagaaaagaaagaatggagagaacaccttcaaacgcattggacccccgctggagaagcctgtggagaaggtgcagagggtggaggccctcccgaggcccgttccgcagaacctgccacagccacagatgccaccctatgccttcgcgcacccacccttccccctgcctcccgtgcggcctgtgttcaacaacttcccactcaacatggggcctatcccagccccgtacgtgccccctctgcccaacgtgcgggtcaactatgacttcggtcccatccacatgcccctggagcacaacctgcccatgcactttggcccccagccgcggcatcgcttctgatggccccgaatccccattgagcagcacaaagcccgtttggggtaggagtgtggatggagaaccctcccccaaggctggtgtctgtaccattgcatcctaagtcagcttgaagggtaggctggttttcttcccacccctttcctagaagggctactgctcctggaagagtggacggatccataataaagacgtcccaaatggtggagttcggagagagctgcgatgtgaactggccctcccctcgcatcccccaggccaccaacggcagtccttctgccttgtccatggcataggccatagaccaggtccctgctgctcacacctgggcctctcctcggagccgacccctgggtagcaaggcagccgagagcatctccctggaggggcccacggttgggccaagggcagagggggctgcacctgcgggcctgggaagcattgctcagggtggggggctgggaccatggcccgcagaggcactgccacagctgtgagggccaagatgctgtccccccatccaaaacccgtgcgccactgcagtgagtgttgagggcacctctcctcccctcttacacctactcagatgaggcagcagcagacccatctcgcggcgggggttttgttctgttgccgcctaactttctcatcctcggtctctggaaagtcaggctgagaaatcctttcccaggccaggccgctgcggtacactggatggttctgaagctggcccattgaaagagcctcttaaggcagctgggacagaggcctggtggccctgctgggcagcccaactgctgggggagacgtttctgccaccctgggtgatgagcagcttttcccccctggctttctgggggaggagtgggcctccttagggagacaggtgaccctgggtgccacccctgccccgtgtgtgccccgggtgttctcagtggttgctgaaggcaggtagagggtgctgtccagtatcccccatgtgaaggtcacttcccttctcatggagtcagctgagcatcagctcagccctgccatgtccccactcaccctcctcgcctcctgtccggccctgggtttctagccgtgcctgaggcatcactctggcccattgacagatgagaggtctgaagccttcctggccacaggcatcactttctcctcctcctcatgccctgccttgtccttgtcgtgttgccatggggttctgagaggctgggagttcacagacctcagacacagctgagtccgacaaccattggggttggggctgcatcagtctccggagtggcccgccacctcctgaagcagggcctggcccacccaaggtgcctgggggcaggcggggcaccgtcattcggttgccattggtttctcagatgtatttcaaggactaaagtgggctctaagatctaagatggcccggcgcggtggctcccgccttgtaatcccaagcactttgggaggccgaaggcgggcggaatgagtttgaggtcgggaattttgagtcccccgtctctaactaaaaaatacaaaatttagccggacaaaggtgggcgcatgcctaataaatcccaggtacttcaaggagg

SEQ ID NO: 78044 - DNA, 1182 bp, Homo sapiens
ggagggaacatctttgagggtaattgttatggaaaagacatcctcagtgtgcacaaggaagcctctattggacaggaactttccaaatttaatccatgtggaaaagtcttcaccttaactccagatcttgctgcacatcttggaattctcaatgcaagacaaccatacaaatgtaaggaatgtagaaaaggctttaagtattttgcaagccttgataatcacatgggaatccacattggagagaaattctgtgaatttcaggaatgtaggagagccatcactcattcctcacacctaaagcagtgtgtaacagttcatactggaaagaaatctaaaaagactaagaaacatgggaaatccttcactaatttttctcaactttctgcacatgtgaaaattcataaaggagagaagtcctttgaatgtaaagaatgtggaagatcctttagaaattcctcatcctttaatgttcacattcaaattcacactggaataaaaccacacaaatatacggaatgtgggaaagccttcactaggtcaactcaccttactcaacatgtaagaactcacactggaataaaaccctatgaatgtaaggaatgtggccaagccttcactcagtacacgggccttgctatacacatacgaaatcacactgagagagaaaccctatcagtgtaaggaatgtgggaaagccttcaatagatcttcaacgcttactcaacatagaagaattcacacaggagagaagccttatgaatgtgttgaatgtgggaagaccttcattacttcttcccatcgtagtaaacatttgaaaactcacagtggagaaaggtaaatgcaagatatgtgggaaagaatttctgtattcctcaccccacctgtgaactcctaccagagagaaaccttttgtatgtaaagaatttgggaaagcatttgctctttcctcatgcctaagtatgcatgaaagaattcacactggggagaaatactatgaatgtaaggatatgagtgttgttaccatttagcccattggttgccatctttaattattggcagtgcaaagatcatcagattagtcctaaatgccttttggaggttgtaatggctcacagattggccttagatgcatcccgagggtctgaaattaaacctacaggttctgaatacaaaaaaaaaaaa

SEQ ID NO: 78045 - DNA, 913 bp, Homo sapiens; identical to SEQ ID NO: 63402

SEQ ID NO: 78046 - DNA, 1314 bp, Homo sapiens
ttttttttttttcgctctctctttctctctttaattttggtttctctcaagcttccaaatggtgctcagtgctccaaggaaaggaaggaaggaaggaaaaggaggggagaggaggggaaggggaggcagaggaggaacatctggaaaaaaagcagcctgacagtccagctgtttgcaaactcatagcacatcctccagttacatggcagaagagggagggagggagggccaaaaagaaaagggagaggaggaagaaaaataacttaaataaacacacacacaaagaaaagagaaggcaacatgacgtgagctggtgatccatgaaggcagggagggaggggaaccgttttacctgtgctgaaccaagggaagaatgcggagagggagggagggaaaggggaaaaaaaaatcagaagaaacactgggggcagagggaggaggggacacggagacaactttatacaacttgagacgaggcggcccggccggcgtgtcctcagtgcggtgtggcggcggaggatctggtgctggtggtgctggcacttcagggtggggggccgaggacgggcacagtctctaagcagctcccccaccccaaacacggaggccccaaggggctgggaacaagagtctgtggcgaagcaggtgaggcagcgggcggtgggcgggcttgctgggtgcccccgccgcaggcgggcacgggctggacggcctgtcttctttccactggccccccggcatgggatgggccagggcgccgggtcgggtaccggagtgcaagctcgaaagagagagagagaaaacactgagacagcattagtggagtgaaaggcggacacagatgagcctgcagaccatgcccccaaccctccgctgcccatcccctcctccccaatcccatccctctgaggcaaaaaataaaaacgtagaaaaatctctgtacagactccccggtgggaaaacgggggcagggatggtggctcttcctggagcgcactccccacaaataaatttacaacccaagtccacggctcaaaaacagaatccgcaaaggcagcgctgggggctgcagcccctgcccccgcccctcctcgctgggtgctcagaaggctgacagctgcgccaggctgaggcggcagtcgatgctggagttgtccgggcccgtgtaggccaggcccaggggctctaggaaggcccggcaggcggcctcgccctcgaaggccagctcggcctgcaggtaggagactggcagcgcagggcggaagctatggagacaagaggagaaggtgatgaggcgggcgggcgggagggcag

SEQ ID NO: 78047 - DNA, 1441 bp, Homo sapiens; identical to SEQ ID NO: 63404
  misc_feature (1)...(1441): n = a,t,c or g

SEQ ID NO: 78048 - DNA, 712 bp, Homo sapiens
ttggagctgctgggaaagttacatgagtagaagggttgggttaaagcatggaaacacctctgtctacaccagctcacgataagcctgaagaggagtttggagtccctcagacgctttcggcaccacttagtcagcggggggaataatagctttccgggaaataggcccgagacgcgggaagggaagggaagggaaccccgtgggaaagaccttactcattctgccccttgcagtcagcacctgaggagaagcagcggggaaaagaagtgccaagctcgccgcgttgaccagtgtcagggccgagtagccacaggacagaactgagaagcgagtaccaacatcaagcctgccgcgccatttatatccacgcatgcgtttccccttacctgcaccgagcctcccgccccgtttacatccacgcaggcgtttccccttacctgcaccgagcctccattcccgtttatatccacgcaggcgtttccccttacctgcaccgagcctcccgccccgtttacatccacgcaggcgtttccccttacctgcaccgagcctcccgccccgtttacatccacgcaggcgtttccccttacctgcaccgagcctcccgccccgtttacatccacgcaggcgtttccccttacctgcaccgagcctcccgccccgtttacatccacgcaggcgtttccccttaccgaattccaccacgctggac

SEQ ID NO: 78049 - DNA, 745 bp, Homo sapiens; identical to SEQ ID NO: 63406

SEQ ID NO: 78050 - DNA, 625 bp, Homo sapiens
ttttttttttttatctttaaaaacagattttaatgtgttaaaaaaaaaatagaatcaagtggtgtgcttcgccactgagatgattgtgctgtggctccggggccacatagcaccagggctcgatagcagacaggagtttcggccctcgtccagtgcatgtgactggtgcaggggcggaggcccagccccacgggggccagagcaggaacacagccacctgttccaacaggcgctgtgccttgtatgccccgtacatgtgcctgccctgagaggagcatgggccaggcctctcttccagctgtgcccccagggtgccagtgaggcagggcgacctctcaccaacagagctcctccaagccatgctggatttggattcctggaaccccctgtacccatgcggtgggccaccccagggggaggggaggagagatgggagactgtgtgtatgtcccctccctccaagtgcagcaggagaaaggtcactgggctggcctggtcacacaccgtcataggggcctgctggggtatgcccgatgccccccagcctccgggccatgctgatgagtgagcgcaactgcaccagcctcagtggccccacctctctggggtcctggttctccagcca

SEQ ID NO: 78051 - DNA, 447 bp, Homo sapiens
tgcactactaaaatggacacttaaaaattgttgctctctcctctgctcgcattttcactctgccatgccctgctctgaagagacacccaccgttacccacagcaaacaggctggtttgcagaggaaggcagcatgcagctccgttttgccccattctctgagcaggccacaaccctgactcagggatccacacaggccacaggctatgacctcaacggtgcctatgatgatacaataccacctatggagaaagctctagggaaaatggacattcagatagctcttccttctggatgttacagaagagtagctccatggtttggattagctgcaaaaccctttattgatagatgaagattactgagaaaatgatggtgctgtactgtttaattttggcaaaaaaaagcggccgctcgagccggggaattccaccgcactgtgctagta

SEQ ID NO: 78052 - DNA, 1743 bp, Homo sapiens; identical to SEQ ID NO: 63408

SEQ ID NO: 78053 - DNA, 717 bp, Homo sapiens; identical to SEQ ID NO: 63409

SEQ ID NO: 78054 - DNA, 1844 bp, Homo sapiens
  misc_feature (1)...(1844): n = a,t,c or g
cagaactntgggagtccgaggcagacagatcacctgaggtcaggagctcaagaccagcctgaccaacatggcgaaaccctgtcgccactaaaaacacaaaattaggcctggtggcgcatgcctgtaatcccagccactcggtaggccgaggcaggagaatcgcttgaacccaggaggagggaggttgcggtaaactgagatcgcgccattgcattccagcccgggcaccaagagcaaaactcggtctcaaataaataaggctctaacaattgttctcatattttaacatccacaatgtgattcaagatgtaatcaacataaagcttgattgcattattttgcatgctaagttttccaaatccagcttcgtgtcacacctacagcacatctcactcaagctggccacatccctgccatccagacgtaaaacagtcacaagacagggctggcagggccgcggaggaggccggcaggggccatcacggagtgcccatcctgcactgtggtcccagcaagtttcttcctcctggcaagaagcctgtcccaggctggcaggggacagcgtgaggtgcagcctatggactgggaaaggggtgtggaagggccacacctaagtcctaaaatccaggcccaaaagtggcccaactcacttctctgactttaatcacacaggcatacccggtggcaaaggagtatgggaaatggagtcaggctgggtagccacgagcccaggaagaagggagaacagacttggagagggcaggagtctctggccaccaggggctaaagagccttcgatgaggcagtgatgtggggtcctgggctcagacccagggtgggtggctaaggtgcccttgccaggacttagccaccccaacagagatgggtttcgtgcccacgagagtgcctgtgccttgtgacgagaattcaccatgtttttgtctctgcaggcagagaacagcattgacttcatcagcagggagctgtgtgcgcattccatcaggaagctgcaggcccatgtcctgttgatcaagtgagtctggacccatccccttcagtcaccccccaaggagacatgggcgccaggaatctccgggagggggccctggcatgaggctccaagttctctgcgtgtcgaccacatcgctaagactcaagatcttttttgggaagcccccctggcagcagggtcatggaaggaggaaggtcagaggaggggagggctcaggcagcaggggatgggccggggctgtcccatgcctttccacaggtgtcagcggggggcatgcccaggtaaggctccataaccagtgagcccagtctcgactcactgcaacctctgcctcctggattcaaacgattctcctgcctcagcctcccgagtagctgggactacaggcgcccgccaccaggcctggcttatttttgtatttttagtagagacgaggtttcgccatgttggccaggctgctctccatctcctgacctcatgatccgcctgcctcggcctcccagtgttgggattacaggcgtgagccaccgtgcgtggcccaccatagacaatttttaagccataaaaagaaacgaagcactgacacgggctccagcatggatgagcctttaaaacatcgcgctaagtggacgaattcagacacaaccgtctacgtgttgtatggctgcattcacgttcaagtcaagtccaaatagggcacactgcagagacaaagccaggtcatggttgctcaggaccggaagcctgttgggggtgggggggtggggtgtgtgtgtgtgtgtgtaagctcagaggtttgcgatttctttgggggtgatgaaaatgtaattgt

SEQ ID NO: 78055 - DNA, 1952 bp, Homo sapiens; identical to SEQ ID NO: 63411
  misc_feature (1)...(1952): n = a,t,c or g

SEQ ID NO: 78056 - DNA, 920 bp, Homo sapiens; identical to SEQ ID NO: 63412

SEQ ID NO: 78057 - DNA, 2644 bp, Homo sapiens
attttgtaattgtaatagagggggggtttcccatgttatgcagaatgttctagtcatcgtataggggcggccacgcattcgccaaaattgttttaaagaatgaaattattttttaaaatggttttgcctaaccaatggctgataagaaaatgagaaaccaccatgtccggccaaccacagcccctcttttgggccttttcctattgcaatgatttttcaatgtgtccagtggccgagttgcccagatgtccgtggagcttgatgcaaacagaattcagagccacacaggcaccgctagcaaatccacacctctggtgccgagggccccagaatctgtgttttgaatgcatttttcagacgcttttactgtaccttataaccaagatcgggtgaggtgtgcaaaccaagggccctgtcccctccaaaccagcagagcccggggcatgaggatggcaagcgaagtgacaacataaacacaggtgtctccatcatcaaggatgggagtggaacggacagcaagggccaggtcacccccagagcattcgtcagttgtcaagtccaaagctaagaaatcagttcataaatgttttttgatttgcatgttggctcaagccctctttttaagtccaaggaggcagtccacattaagtgtgcaggcaaaaaagagatggaaaaaggagtcagtttctcccctgccctccctctctccctttatcaagctgagcaccttgagttgcatttgaggaaatgaaaactataggtgacgcaaccccattgtgtcgaattctttctttacattttttggggtggtacaaggaatcagtattttttttttttaatcagatggtgtgtgtggtggctcacatctgtaatcccagcattttgggaggccgaggcaggaggatcacttgaggccagaagtttgaggctgcagtgagttatgatcatgccactgcactccagcctgggcaacagagtgagaccctgtctctaaaaaatttaaaaaaaaatcaaagcatgaacaaaactttaacaagagaataaagagggttgttaggtggagacgtggccagcactccacctccactttgaagttcagaggcagagcatctctccctcccacacttggagggagggcccgtgggctgtctctagccctcacctcacagctggtcttcttgctctccctgctcagcttctgctctggcctcggccctcagcaccctgaggttcctggcctctcctgccctggggactctcttgggcagggttggcaaccggggagtgtgccagaaggctctccggcgcttgcaaaaccacgaaaagcgtccaggggtctggaacctcactgtcttgacctgtttccgggccctggctcctggagctgttcctgtggtcccttgggcagctgagacttcagcttcctggatacctggggcccctgccctctgattatgtgcagcctctgccctctggccagcccgggcctgtgccctctgattatctgcaccctggacagctggggccctttccctctggtcatgtacggcctcttccctttgattatctgtaacctctgacccctggtcagctggggcctccgccctctgattatctgcagcctcttccctgtagttatctgtgccctgtgacctctggtcagctggggcctctgccctctgattatctgcagcctcttccctctggttatctgcagcctctgccccctcctcagctggggcccctgccctctgattatctgcagcctcttccctctgattatctgcagcctctgccccctggtcagctggggcccctgccctctgattacctgcagccccttcccgctggtcagctatggcctcttccctttgactatctgcagcctctcccccctgatcagcctcgatgtctgccccctgacctgtgggtgctgtctgctccttcctgcggcgccgaaaggaggcccagttgatcttgggcctccatcgcctaggggaagcctggggcacacaaacatctcccgcgtttcccaagcgatcccccgggctggtgccctctggcgccgatgatacccctgcgctctccactgcggaacaccttgccgatcttcttaaatgtccccacgggctttagggcttccacgaggacgtccaaatccacatctttgcagacatcggggacgctccaaagaatgaggcagtcgggggacggcaggaagccccaggggaaccagccccccacgtggcttttctcgagagtctttaagatctccagggtgatatctggggtgaggggcaatgagccccaacaaactactgtagcccttagtcttgagggagggactggatggggggagttccagcaacgctgaccggagagtctcacctccctagccagggacgagccaaacgcctccaatctcttcgcctgcaacaagtacagtcttgaccaagtccggctcccccaccaaggacttgggggaatcaatttccaggatgcctacgtgagccgggggcgaggtcagtcccaagctcaaggcccactccaagctggaaacgtggtgtcccagctccaagttggggcgcgcgggctgccagcgactcttcctgcccaggccccagggacgcggctggaacttggg

SEQ ID NO: 78058 - DNA, 894 bp, Homo sapiens; identical to SEQ ID NO: 63414

SEQ ID NO: 78059 - DNA, 574 bp, Homo sapiens; identical to SEQ ID NO: 63415

SEQ ID NO: 78060 - DNA, 367 bp, Homo sapiens; identical to SEQ ID NO: 63416

SEQ ID NO: 78061 - DNA, 365 bp, Homo sapiens; identical to SEQ ID NO: 63417

SEQ ID NO: 78062 - DNA, 377 bp, Homo sapiens; identical to SEQ ID NO: 63418

SEQ ID NO: 78063 - DNA, 418 bp, Homo sapiens; identical to SEQ ID NO: 63419

SEQ ID NO: 78064 - DNA, 392 bp, Homo sapiens; identical to SEQ ID NO: 63420

SEQ ID NO: 78065 - DNA, 479 bp, Homo sapiens; identical to SEQ ID NO: 63421

SEQ ID NO: 78066 - DNA, 443 bp, Homo sapiens
  misc_feature (1)...(443): n = a,t,c or g
ttgttcattcgctcagagccacaggaggaggggagaggcctggaggacaccaacatgaacaagttgaaatcatcgcagaaggataaagtttgtcagtttatgatcttcacacaatctagtgaaaaaaaccgcagtaagttgtctatctcaaaatgactggaagttagatgttgcaacagataattttttccaaaatcctgaactttatatatgagagagtgtaaaaggatcactggaaaggaagaagttagaacaactgtacaatagagacaaagatcctcaaaatgagaataaaattggaatagatggtatatagcagttctgtgatggcctggcactcaatccagccagcattagtgtgttgattattgcatggatgttcagagcagcaatacagtgcggacgcgtgggtcgacccggtnntcggacgcggtatcccaaga

SEQ ID NO: 78067 - DNA, 1772 bp, Homo sapiens
aagcccctgggaatccccggtcgacctacgcgtccggtgaggagcatgggtctccggcagccccccagcttttactgggcctaggcccagttgctggccctaagttgtacccgagactctacacagacatccacacacacacacacacacactctcacacacactcacacgtggagggcaaggtccaccagcacatccactatcagtgctagacggcaccgtatctgcagagggcacgggggggccggccagacaggcagactgggaggatggaggacggagctgcacacgaaggcaggggacccatggcgaggaggaatggccagcaccccaggcagtctgtgtgtgaggcatagcccctggacacacacacacagacacacacactacctggatgcatgtatgcacacacatgcgcgcacacgtgctccctgaaggcacacgtacgcacacacgcacatgcacagatatgccgcctgggcacacagataagctgcccaaatgcacgcacacgcacagagacatgccagaacatacaaggacatgctgcctgaacatacacacgcacacccatgcgcagatgtgctgcctggacacacacacacacacggatatgctgtctggacgcacacacgtgcagatatggtatccggacacacacgtgcacagatatgctgcctggacacacagataatgctgccttgacacacacatgcacggatattgtctggacacacacacacacacgtgtgcacagatatgctgtctggacacgcacacacatgcagatatgctgcctggacacacacttccagacacacgtgcacaggcgcagatatgctgcctggacacacgcagatatgctgtctagtcacacacacacgcagacatgctgtccggacacacacacgcatgcacagatatgctgtccggacacacacacgcacgcagatatgctgcctggacacacacacagataatgctgcctcaacactcacacacgtgcagatattgcctggacacacacatgtgcacagatatgctgtctggacatgcacacacgtgcagatatgctgtccggatacacacgcacgcacacatgcagatatgctgcctgggcacacacttccggacacacatgcacacacaggtgcagatatgctgcctggacacacgcagactgacgtgcttttgggagggtgtgccgtgaagcctgcagtacgtgtgccgtgaggctcatagttgatgagggactttccctgctccaccgtcactcccccaactctgcccgcctctgtccccgcctcagtccccgcctccatccccgcctctgtcccctggccttggcggctatttttgccacctgccttgggtgcccaggagtcccctactgctgtgggctggggttgggggcacagcagccccaagcctgagaggctggagcccatggctagtggctcatccccactgcattctccccctgacacagagaaggggccttggtatttatatttaagaaatgaagataatattaataatgatggaaggaagactgggttgcagggactgtggtctctcctggggcccgggacccgcctggtctttcagccatgctgatgaccacaccccgtccaggccagacaccaccccccaccccactgtcgtggtggccccagatctctgtaattttatgtagagtttgagctgaagccccgtatatttaatttattttgttaaacatgaaagtgcatcctttccctccaaaaaaaaaa

SEQ ID NO: 78068 - DNA, 1889 bp, Homo sapiens; identical to SEQ ID NO: 63424

SEQ ID NO: 78069 - DNA, 478 bp, Homo sapiens; identical to SEQ ID NO: 63425

SEQ ID NO: 78070 - DNA, 1068 bp, Homo sapiens
aaccgaatgcgggtcagagtcggctaacaacgactttctcactatttcctgcgctgaatcgggtggccagggcccctcactgtgaccttggaacctcgacttcccacagggctgtttcctcgcctgtaaaggaggaggggcgttcagagaccacctcattctgggtgctgaatccaggcagaatcagagggagattccgccttcccttccacgcagggcccctcgagggagcctgcgaggtcttaagagtctgggagaacacccgggggcaggtgcacgccctaggcaagacgccagggctaaatcccgtgaagaacggtaatcccttcccgatccggagggctgacccactcagagcctccatgtgctcttggaggacaaaagccccttttccagaagggagcgccaagatgatcgctccaggccgcacgggcccttgcgggggccccagagagtctcaggggagggtctctgaccctaacactcgcaggcagggtggacccgtctccagattccacgcccaggccgctttccccaggtcctgcggagtccagccccagcaggacgggttgggcaggcaccaaccagcccctgacccctggctccaggccaaaggggacgctcacccaggctttgggtctcccttctcctggccgatgggaccggcgggcgggccacctccaaccgccttcgcagacgccctcacccaggaagcaggcgagatcctcaacctccgccgggaaacccccaaccccaggtgaccgaaaagcaagacgcccacctcccctgaccaagaccggcctggccaggaccccctggctcccgcctccaagcagggagcttcacgcccacacacagaggccgggctcgaggccggagcgcccgggggagcccggcaggccgcgccgggaggaacctctagtcccccctcaaaccctgggacttcacccccaagctccatgctggcgcgggaagcccccggggccggcctttcgcaccccaggccgccccgcgccgaggccccaggctcccgtcggataaaggaacaggcaccgcggcctccattcc

SEQ ID NO: 78071 - DNA, 722 bp, Homo sapiens
aaggtctagccaacattcattcgttcctattccaagaccctgcttatcaacggtgcaagtatttctacataattttctcttccttttatgctgtagagcataccgcttgtgggaaatggagggaaggcccacggtcccgacaatgtttgggcagggtacctcgtcccaggtggatcgcccaccttactgctgcatagacctgctgtgtatcccggccccagccccggccccggcccgacgtcctctagcccctcttcccagcactcaggaccgcggatttcagatgaccaaaggccaccctgtgacaacagcgtcggaaccacggcacttccgcctgcggccggtgagactacaaatcccagaagccccgcgcaagtctcgtcccactaccaccccctcccatcacgactcccagaaccctccgcgagacgccagggcctcgaaatagaacaaaaccggccggtgggggagggggaaggtgagggtctcggaggacacagggggttagagagctctctgcaaatgccgaagacccaagcaggcctgccgcctacccctccccgccccacaactgctaggcgcggagaccgcggcctgttccccgcgcctcccgggaagctgaggaaggtcccggacaggcttccccgccggctcctgctaagaggtccgcagaccctagcccggtgtcccccctccctctcataacgttccccgcacaccgg

SEQ ID NO: 78072 - DNA, 597 bp, Homo sapiens; identical to SEQ ID NO: 63428

SEQ ID NO: 78073 - DNA, 1210 bp, Homo sapiens; identical to SEQ ID NO: 63429

SEQ ID NO: 78074 - DNA, 1108 bp, Homo sapiens; identical to SEQ ID NO: 63430

SEQ ID NO: 78075 - DNA, 947 bp, Homo sapiens
  misc_feature (1)...(947): n = a,t,c or g
tgctgacctccaaataccgttaagctggagcctcggtggccatgcttcttgccccttgggcctccccccaaacccactccaccttactaccagacaaccttagccaaaccatttacccaaataaagtataggcgatagaaattgaaacctggcgcaatagatatagtaccgcaagggaaagatgaaaaattataaccaagcataatatagcaaggactaacccctataccttctgcataatgaattaactagaaataactttgcaaggagagccaaagctaagacccccgaaaccagacgagctacctaagaacagctaaaagagcacacccgtctatgtagcaaaatagtgggaagatttataggtagaggcgacaaacctaccgagcctggtgatagctggttgtccaagatagaatcttagttcaactttaaatttgcccacagaaccctctaaatccccttgtaaatttaactgttagtccaaagaggaacagctctttggacactaggaaaaaaccttgtagagagagtaaaaaatttaacacccatagtagggcctaaaagcaggccaccaattaagaaagcgttcaagctcaacacccactaccctaaaaaagtccccccaaaaccttttaactgggactccctccaacaccccatttggggccaatcctatcacccctatttggaggaccaatggttnggtataaggtnccatgggaaacattttcccccccggaaaagccctnggggccaggtnaaaccctgggcctggcaattaacaggcccaatttttnaattnacccancaagggntttttcccccactgggaaccccaaaaaggggtgcctataggggagggttaaaaaaaaaaaaaacccgaggggggccggnnccaantggcccaaaggggggggntaaaatnacagggnggggttaaaagg

SEQ ID NO: 78076 - DNA, 512 bp, Homo sapiens; identical to SEQ ID NO: 63431

SEQ ID NO: 78077 - DNA, 1403 bp, Homo sapiens; identical to SEQ ID NO: 63432

SEQ ID NO: 78078 - DNA, 449 bp, Homo sapiens; identical to SEQ ID NO: 63433

SEQ ID NO: 78079 - DNA, 5989 bp, Homo sapiens
ggccccgcagaggacttgcctccaccgccacctgcaagtccgcccagctggacttctgcgcaggctccaggagttgtttgctgtctctatgtcaacccagtagctggagtctgaagatggagaccaacgagtctacggagggatcgcggtcgcggtcgcgatctttagacatacagcccagctccgaaggactggggcccacttcggaaccgtttccttcttcagatgacagtcccaggtcggccctggcagctgcaacctcagcagctgcagcggctgcatcagctgctgcagctactgcagccttcaccactgccaaagcagctgcattatctacaaagaccccagcgccctgttctgagttcatggagccgtcctctgaccccagccttcttggggagccctgtgcgggacccggctttacccacaatatagcccatgggagtcttggctttgagcccgtctatgtttcctgtattgctcaggacacttgcactacaactgaccatagttctaatcctggccctgttccaggctctagctctgggcctgttcttggttccagctcaggtgctggccatggctctggctctggctctggtcctggctgtggctctgtccctggctctggctctggtcctggtcctggctctggtcctggctctggtcctggtcatggctctggctctcatcctggtcctgcctctgggcctggtccagacactggccctgactctgagctcagcccctgtattcctccagggttcagaaacctggtggcagatcgggtccctaactatacctcctggagtcagcactgcccctgggagccccagaaacaaccaccttgggaatttttgcaagtcttagaaccgggtgcccgaggactatggaaacccccagacattaaagggaagcttcaggtttgctatgaaactttgccgcggggccagtgcctcctctacaactgggaggaagagagagccaccaaccacctggatcaagtcccaagcatgcaggatggctctgagagttttttcttccgacacggacaccggggactgctgactatgcaactaacgtcacccatgccctccagcaccacccagaaagactcgtaccagccaccaggaaacgtctattggccacttcgagggaagcgtgaagccatgctggagatgctcctgcagcatcagatctgtaaagaggtgcaggcagaacaggaacccacaaggaagctcttcgaggttgagtctgtgacacaccatgactaccgaatggagctggcacaagcagggactcctgccccaacaaagcctcacgactaccgccaggagcaacctgagaccttctggatacagagggcaccacagctgccggtgtgtgagggtgacttggtgttgggggcagagcggggcaggaaaggtagggcagagttgttttgttctggcttggggagagtgggatccatcctcatgctggcactcctccagggtgtcagtaacatcaggacattggacacaccattccggaagaactgcagcttctcaacaccagtacccttgtctctggggaaacttttgccctatgaacctgagccttacccctaccaattgggagaaatatcttcccttccctgtcccggaggaaggctgggtggtggcggggggagaatgactcctttctgaggggtgaggagggaagtggggtatggaatatggaatctatttctgtctgcactagagaggtcgggaggaagttaattctcactgtacttgaagaggctttacataaagggttctctttcatccccaagactgctaatttagtgattctgtgagtcactgtgtgcataccccataacctttccttgggattgcccctatcccacactatgacatcagaactttttttattattgttttatatttgaccaagagatagttctggtttagatacagatatttacagaaagcacgggaggaaggggaccaagccagagagggacaggtatatgtacaggggctaagctgcagagggctacaacttccatataaggtaggtttttttgtggctgttttccattgcatatgaaaatgtccatttctggtgtgtgcagacatggtggccattgcccacccaggtaccagcagcagaagactatctgacttggaaagaatgggggtttacaggagtccaggaggtcctttccgctctcctaagagccagtatgttcgcatctttccttttcccttcatttccacatccccccgaagctctagctggaagcatcctagctcatctagggcatccttggtggtagaggagacatggatcttcagcgcttgaccattagactccattcgagaagcagtgttcactgtgtctccaaaaagacaataacggggcatcttcaggccaacaaccccagcacagactgggcccagtatgaacccctatgcgtagcctcagctggtcattggggtcggtggcggatgcgaaaggaagaaactgcatctagtaatgctagggccatacgagcaatttctggtgcatggcgttgaccaatttcggccctgggaggccagataccaccatgtaagcatccccaatcgtctccaccttggtaggaaccaaagtttgccaataatggcatccaagcagggaatacggccattaagaagggtcactaccggcatgggggggtcctcctccgaacaatgtgtgtaagccaacattgtccatcgagtggatggtaaaactgttcaaaggctcaacccgtaaagttcctcccccgtttaactggctctgcacctgatgggggtaggatttggtagagcagagcttcagccttgcgtttttcctccagataggcctgtgtgcgttcctccaccagcttctccaagttattggcatactgttccatgcgcagcaggaggttgtccaatatgctggtgccaccctccttgttaaagcgccgaatgaagcccttaatctgtccaaagtctggccgctcagctgggtcctgagcccaacatcgctccatcagcaaaactagctcttccattcagttgggtccggtcaatgcttggccggaaatatggccgctgaccatttcgtaccttctggacaatctctttggggctgaggtccaggccctccaagtagaaaggaccactgcgaagtgctatctcctgcaggatgatcccaaagctatagacgtcagccttttgcatgcctgtggttggcaaggggttcccactgagcagttctggggcagtccacagcttcttggcatagagggcatggctgtcatcaggttcagcagttgatcggaagctggccaggccatagtctgtgattttgagcacaaaacgactatccaccacacagttggaggacttgagactcccatgcgatgaaataatgctgttgtggagaaaggccatgcccttaacaaggtcattaatgagtgaataacgaaacatccagtccaagttgatgctgtcattttctagaatatcctgtaaactcccacgaggacagtattcagtgacaatgcaaatgttgggagggtctatgcaggcgccaatgaagcgagtgagatggttgaactgaacatctctcatatgtttgagttcaaacagaacctgccgggtcagctcaatgcgcttcttattcacatgtttgatggcgacaacatttcccttgaagtgaccggtgttggcaaagatctggtatttcccatgggctgtcatgagcgagccgtaactggatccccgcagcgacagtgtgaggcgactgcctgcacctttgtgataacgctctgagttgccaaactgcagttcttcccagcgaatacgccacaacatgctagccagctccttctccagcatcaggtttcggaaaattaggaagctggaaacaccaaacatgatgaaggtgattcctgtgcccagagccacaattgccagggttgaaagtggagttttatcacaggatgggtcgtccaagtcaaaggcacaggggggattgtccgagggaggagcccccttcacccagggaataggccgtcccgtccaccaaatctgcttctcagctcccgagtagtgggctgcaggctgaaagtccccagaatccaggtctcccatggcccagaggacaaagtcagtctctcggtcattgttcttgtccatgacaaccagcccagttacaccgtgatatcttcgtccctgcatcttttccacaattcgaagtccatcctcccgggtgcctccttcctgtattgtctcattcaggacttcagcatatagcaggatcccatcatagaagcagccagcgatgaggttcatcagggaagggcccagctccacaccaaagtcttcccgggctcttatcagcagacgattctggaattcctgatactcaggatttgggggttctcggtacgtgatcaccaatacagtctgaaaggcctctctgagggcctgggcctgttcccgggtgcgattgtcctgccagggccggcctgtatcacttgtggggcctgcacggagactctccccaaagacatccaggtaaaagaagacataatccccattggtcagattctccctctgggcctgaagcaggatctcatgcagcatctccagagggccgcagatatacacaatgcgcccgttggcccggatgaagtgggtggcctgctcggggccccctggctctcgggcatacacctggtgctgcacactgaggttgctgccctgcagggcctcaaagacgccctcgatggtgaagtagtgaggccggtcatctgtgcgagcatccaggtagagcaaggcagcacgggcagtccaattgaagtgcccgtgtagtgtcaccacaaactcacccagcttgggagcagaggggccagtgcgaaccagggtacgataatggtcattcttagccgaaaaaccagaggccacagcacccgcagtcagcaggggaaggcgccagtgggaggcaaagcgggccacagaggcagcagggtacacgcaaccgggacctaacagcaggtcggggtcatggtacagcttgaggtccacagcgctcagcggtgccaggtactcagagcaggcgccttccagttcggagctgacaaaccgcaggtccacgggcagtgcccggcccagagcctccacagctagtgccacagcgggtcccacccgtggccaggcccaggcatagctcaggttgtgttctggcagcaccaccgccagcgtcaggttccgcgccccgggaggacgcaccccacctgccagggctgccaccaacagcagaagtgatggcagcgccatggggataaagcagcagccccaccgcccccagaacttggggctgctctggcctacaggggagacgcgagcaccccccagcctggagcctggggaagagggccaggaagaggaggagtaggctaggtaggctgggatgcagaaggtgctgggggccggggagaggagggggagatgggaggaaggcggggggcgggcaaggagtgggctaccagcctagggcaaggactgaggactgagaacggggtgtaggggggataagagtttagggagaccaattggaaggctgttgtgagaggttgtagtggcttggagaaaggtgaggatggtagaacatgggcagatcccctttctgtgttggagatggttacatacaagaggacttgctgatggttgggatgtaagctggtgtaattaaacccatttcacaattccgagaggaaattgtgccctaacaaggtaaagagacttgcttaaggtcactcaccaatcagtggcctcaatgaggttcaagccagatccctgtagcgccaaagcctatgctcctaaaagtcagttgatttataatgctaatcagatttctaataaatttaagttgagctcattggtcattcctaaataagcttttgtgtagataatatcttatgtggccg

SEQ ID NO: 78080 - DNA, 2418 bp, Homo sapiens
cggagattcgtacgagcggcaccatggccccgcgggggcggcggcggccgcggcctcacaggtctgagggcgcaagacgttcaaagaacactttagaaagaacacattccatgaaagataaagctggtcaaaagtgcaagcctattgacgtgttcgactttcctgataattctgatgtctcaagcattggcaggctgggtgaaaatgagaaagatgaagaaacttatgagacctttgatcctcctttacatagcacagctatatatgctgatgaagaagaattctccaaacattgtggactgtctctctcttcaactcctccaggaaaagaagcaaaaagaagttcagacacttctggaaatgaagcaagtgaaatcgaatctgtaaaaattagtgcaaaaaagccaggaagaaagctcaggcccattagtgatgactctgaaagcattgaagaaagtgatacaaggagaaaagttaaatcagcagagaaaataagtacacaacgtcatgaggttattcgaaccacagcgtcttcagaactttcagagaaaccagctgagtctgtcacttctaaaaagacaggaccccttagtgcccagccctctgttgaaaaagagaacttggcaatagaaagtcaatcgaaaactcagaaaaaaagggaagatatctcatgacaaaaggaagaaatcaagaagtaaagccataggctcagatacttctgacattgtgcacatttggtgtccagaaggaatgaaaaccagtgacatcaaggagttgaatattgttttgcctgaatttgagaaaacccacctagagcatcaacaaagaatagaatctaaagtttgtaaggcagccatcgccacattttatgttaatgttaaagaacaattcatcaaaatgcttaaagaaagccagatgttgacaaatctgaaaaggaagaatgctaagatgatttcagatatcgaaaagaaaaggcagcgtatgattgaagtccaggatgaactgcttcggttagagccacagctgaaacaactacaaacaaaatatgatgaacttaaagagagaaagtcttcccttaggaatgcagcatatttcttatctaatttaaaacagctttatcaagattattcagatgttcaagctcaagaaccaaacgtaaaggaaacgtatgattcatccagccttccagctctgttatttaaagcaagaacacttctgggagccgaaagccatctgcgaaatatcaaccatcagttagagaagctccttgaccagggatgagaagagcagtctactaaaatgtgcctataggaagactagtctcatgctgttaccttctgaaactgtacctttataaatcaattgttttgcaaagaagttatggcctacttagaatctaaaatttgttattcaaattaaatggctgtgaacaatgttaaatagcatcagtttgtccaatagttttaaaggccataatcatcttttctggttaatatcttgagtaattttaaaatgttgacaccttaatcggtcccaggtatgagctataataaacttgtaaaattaagttgatgtgaacataattttgattaattaataaggcgatttctcctgaatttacaccaaagctaatttttaatgaaattgggtttacaggaaggtaaaaaacaaaaattgggaaaggcaaagtaataaaacttagtttatataaacaggttgaatgatatatttatcaaatctcacagacatcaggcaaattatagcctggtgacaaaagtgttcatagtgaattagttactcttgtaatacttctataattagttcatcaggaatttcatccacttcactgttataactgagaagactgttctctgcagcttcagctaattcagcatcttcagtagcttctaaaaaataagcatcatcaatgccattatcccagacagcatcagcagatgcacctgttgacagcctgctaggtgatggtttatgaggattctgggtttcattgctcctagtttcatctgcttcatctgttgtaaactcttcttcctctttgaaaaaaaacaggagacatacttcagcaggtaatgggaaacagtcagatttgaagttttttgctttacatacagggtcatgacattttttataccaaacttcatttttcagatcaaccagaatcctttttgtttaaaaaaaaaaaaaagtattaataccaagactgggtagaaaacaaaatccagctgcatgctgttccaagaaatatgcctaagacttaaagatggagaaaaattaaaaagtaaaaggataaggatagatacataccaatcaaaacggtggttgccaaaaatcacacaaaatgaactgcagggcaaaaagtagatactgatgaaagttcccccaggaagatgtaacaat

SEQ ID NO: 78081 - DNA, 1166 bp, Homo sapiens
atgttcccacgaaagcgatattcccgtccacccagtgtaaaacgccggcccgtgcccttgcttattattaagcatccatttaggggaaaggtttcaatgcgccgtcccgtgttaagatagggccccccaaggaacctttaaaaaggcccccccctttttttttttttgaaagtataaaaatcattttactttaatacaaaatcacataaagaaaggcatgttggctaaatcaaatattcactaaatatcagtgaagtcaccactggaatctcaatagcacattttcctgctttcttttctcccttctgctaaccattgaagaccagggtcatccgtgggagcagatgagtaggacacgcgtctgcacgctggaggccctgggggttgacatgggagcaggaagtggacccccccaccctgcacatcccttctgtttttcttgatttcagtctcactggcccaggccaaatcttcaagggtgtctagttctgcagccagggagaaagtgatgccaagagaacctcgtctcctccctcctcagtctgctttgaaggggaaataaatacacaggcctagtgtgtctgtgtggcacagggaggtggttttgccaggcatcttggaaggttgtcttctagaatcagagccatagccttacttgtggccttggatctaggtctgtttccccgatcgaaaaaagaacagcttttttatgattgtcttctcctccttgttcctgccagcatttttggcactagtaaccacagcatctttttctcttcttcctcctgggccttctcttggtggaatcaggccactccccgctggccggagggctctgtctccgcagcccctccacctccttcctgaggtggtccctctccatcttcagctcctccagcgccaggctgccctcattcaccagcgcctccagcatctccaggacgcggacgactttgaactgcagctgcgtcacccgggggtcgctgcccagggccataagctcgcggcccaacaggtaggagatgtcatacacgtcctcggcggtcagctggaaggggctcttgcccagcgccccctcgggcccaacctcgtccctctcctcgtcctcctctccctcctcctattcctcttctcgcacagggggctcctccatggccacccagacc

SEQ ID NO: 78082 - DNA, 791 bp, Homo sapiens
ggctcaagtgatcctcccacctcagcttccaagaatgctgggattacaggtgtgagccactgcacctggcctagattaatttttattagtcattcgtggggactagaaaagatggaatctctgtatatagggttcaaagtttaataagtatctgttaagctcaatcttaatatatccttgtttatactttgcctcattgatgtgccaaagcataggatgtattaaagtctctcgctagcatactaattccattatatgttttcttctggagcctcaagtttcttatttatacatttgaatgcaatataatttggtactgaaagtttcataacagtttaatctttgctgtgaattgttgcctttgtcagtataacgtgatccactttctcctatttaatactttttctccttaaattcttctttttattaatagcataatctccgctttctttcttgtatgtccgctttctttctttccctggtgtttttctttaagctttttacatgtcactgtattttagttgtttcttataaacagcatgaagttggattttatatttttacctaacctgagagtttatttatttttataacttttatttttatcttttgtcatttttttctattatttacatattttatgcttctattctgcttttttcatttcttttgacaactattattgaatgagtaatgtattctttatttttaatcttttctagtggtgtgtgtgtgtatacacacatatatttacatatttatatatacagacatatatacactagattata

SEQ ID NO: 78083 - DNA, 732 bp, Homo sapiens
gccgtcagggcagggagcttccaaaggccagtccgagtccatgccaggcgtccactaaatctgcctctccctctccagcgagcaggtgcagccctcaactcctgcaggcctggggagcggagacagggcctgtaggctcggacacgacccggtcctgattttaacagtagacttgagaaggcaagctcagcagacaggctgctggaggatccacccgctgtctcccgcagcggccccactgaagcggcagaaacacacagaagcaccaaatctgtcactctcttcccgtaggaagtccccagaggtggccctccggaggatggtcctgttggctgaagatatgaccacacctgtgcctgcccagggccaccttcagcttggcaacaggaactccgcacactggtaccctggacacacaaggaaaagaaagttccctccaagagggtatctggcccagcctcagccccaccaagcggagggcagcaaagcccccgaatgatttcgcttacccccacccgccgtccctgctggccagacaggcacaccccgtccatagggcaccccctccccacggtatccagctgccctcgcgtccccgtgtggccgctcgcctgcccgccagacccggacacggggccaggagggtcgcgctgcccaggcacagatcagccgctgtcacacgcacagtgggtctggggcagcgcaggaattccaccgcactggactaatgat

SEQ ID NO: 78084 - DNA, 1120 bp, Homo sapiens; identical to SEQ ID NO: 63438

SEQ ID NO: 78085 - DNA, 1573 bp, Homo sapiens; identical to SEQ ID NO: 63439

SEQ ID NO: 78086 - DNA, 1150 bp, Homo sapiens; identical to SEQ ID NO: 63440
  misc_feature (1)...(1150): n = a,t,c or g

SEQ ID NO: 78087 - DNA, 1649 bp, Homo sapiens
  misc_feature (1)...(1649): n = a,t,c or g
ccagccagggnttagccctacctangtganaaaattaaaanacaaaagaatgngggttggggctcacaagcanttcaacaaaccaaatcacanaagtggactgcaggggaacctgggcttagggcaccatttggcactacacgggctgtagcgttcacgggcttaaagaccaaaaaagacagtatgcttacaatttctggacagacctactatacaaggacaatcacagacaaagccagattgcaaagactgtttataaatacctacatattcaatgcacagatatcaatgtataactacaaagatgaagaacagtcagggaaacatgatgtcaccaaacagacaaagtgccagtggctgactctaaagaggcagagatatatgacattcctgagataattcaaaatagctgtctaaaggtataaaactccctggtaaaaataactcaggaactgataaccaaatgatgatgatgatgatgatcaacccagaggactggttgaattcgttgctcaaaccagagaaaaacactgtcctactaaatgatactattttaaataaattgattggtcattactgtcaagcaattgaagtaatttgtccagatacatataaagatgaaggttttgctcaaattcaagtgagattcaacagctgaattaaagctattcaagagccagatgatgtataagtggctatagcaaactgcaagacatttgcttttgtgcatatatcttctgcacagtttgaaatgtctcaaggtaatttcaaaaaaagtaaacaccttcttcataaagctgtaaaatgtggagcagtaccactagaaatgctgcaaattgccacgcagaattgaaacctccaacaaagtagctgctttcagcgaaggaaaagagttcatcaacattgacaatattaactacccaagaatcattctctagttcattgaacatttacagaataggaacatgctgtaattaggcaattaggcaagagaaagaaaaggcatctaaattggaaaggaggaagttaactgtctctgtttacagatgacacgatcataagtagagaaaatcctaaagactccaccaaaaaaactgttcgaactaaaaaacattcagtaaagtttcaggatacaaaatctacaaacaaaaactagtattatttcttttttttgagacaagatctcactctgttgcccacgctgaagtgcagtgttgcaatcacagctcactgcagcctcaactccctgggctcaaccaatcctcccacctcagcctcccaagtagttgggaccaccacacctggctaacttttgtattattttgtagagaaagggttttgccatgttgctcaggctggtggcaaactcgcgagctcaagcaactcacctgccttggcctcccaaagtgctgggattacagccataaaccagtatcatttctatacattaatggtgaactatatgaaaaagaaatcaagaaaatcccatttacaatacaattaaaaaaaaatatatatatatatatctagaaatacacttaaccatggtgaaaaatctctaggatgaaaactataaaacactgatgaaagaaactgaagagccaaataaatggaaagttatcctgtgttcatggattgaaagaattatt

SEQ ID NO: 78088 - DNA, 1468 bp, Homo sapiens; identical to SEQ ID NO: 63442

SEQ ID NO: 78089 - DNA, 1024 bp, Homo sapiens; identical to SEQ ID NO: 63443

SEQ ID NO: 78090 - DNA, 388 bp, Homo sapiens; identical to SEQ ID NO: 63444

SEQ ID NO: 78091 - DNA, 547 bp, Homo sapiens; identical to SEQ ID NO: 63445

SEQ ID NO: 78092 - DNA, 615 bp, Homo sapiens; identical to SEQ ID NO: 63446
  misc_feature (1)...(615): n = a,t,c or g

SEQ ID NO: 78093 - DNA, 409 bp, Homo sapiens
aaaggatggatgtgactggggaccccagggcatgagaacccggcgagattcagactctaaagctgggccggctgcaccgcaactgcagccgtgagcagcacaggtggtcacctcccgcctcgaggacctgagcagcaaggcctgtgacagcctggccattgacaagtccctgccactgatcaccctggtcctgcagaggctggcaccacggtgatgaggattacttcctgtgtctgccttccaatactaagagtatggcattgaccaataacgagacgagggcataggacaattctgatggagatatggcttgggtttccaggcatcctttgatgtggatgaactatagcggggcatggttgaagcagaagaatgtggccaggcagctgaacaaggctccatccagtgc

SEQ ID NO: 78094 - DNA, 774 bp, Homo sapiens; identical to SEQ ID NO: 63448
  misc_feature (1)...(774): n = a,t,c or g

SEQ ID NO: 78095 - DNA, 1377 bp, Homo sapiens; identical to SEQ ID NO: 63449
  misc_feature (1)...(1377): n = a,t,c or g

SEQ ID NO: 78096 - DNA, 1138 bp, Homo sapiens; identical to SEQ ID NO: 63450

SEQ ID NO: 78097 - DNA, 1768 bp, Homo sapiens; identical to SEQ ID NO: 63451
  misc_feature (1)...(1768): n = a,t,c or g

SEQ ID NO: 78098 - DNA, 1263 bp, Homo sapiens; identical to SEQ ID NO: 63452

SEQ ID NO: 78099 - DNA, 1396 bp, Homo sapiens; identical to SEQ ID NO: 62873

SEQ ID NO: 78100 - DNA, 382 bp, Homo sapiens; identical to SEQ ID NO: 62874

SEQ ID NO: 78101 - DNA, 935 bp, Homo sapiens; identical to SEQ ID NO: 62875

SEQ ID NO: 78102 - DNA, 1148 bp, Homo sapiens
  misc_feature (1)...(1148): n = a,t,c or g
ggcacgagcgtccgcagagccagttcctagcgcagagccgcgcccgccatgagggagatcgtgcacatccaggcgggccagtgcgggaaccagatcggcaccaagttttgggaagtgatcagcgatgagcacggcatcgacccggccggaggctacgtgggagactcggcgctgcagctggagagaatcaacgtctactacaatgagtcatcgtctcagaaatatgtgcccagggccgccctggtggacttagagccaggcaccatggacagcgtgcggtctgggccttttgggcagcttttccggcctgacaacttcatctttggccagacgggtgcagggaacaactgggcgaaagggcactacacggagggcgcggagctggtggacgcagtgctggacgtggtgcggaaggagtgcgagcactgcgactgcctgcagggcttccagctcacgcactcgctgggcggcggcacgggctcaggcatgggcacgctgctcatcagcaagatccgtgaggagttcccggaccgcatcatgaacaccttcagcgtcatgccctcgcccaaggtgtcggacacggtggtggagccctacaatgccacactgtcggtgcaccagctggtggagaatacagacgagacctactgcatcgacaacgaggcgctctatgacatctgcttccgcactctgaagctgacaacgcccacctacggggacctcaaccacctggtgtccgccaccatgagtggggtcaccacctcgctgcgcttcccgggccagctcaatgctgacctgcgcaagctggcggtgaacatggtgcccttcccgcgcctgcacttcttcatgcctggcttcgcgccgctcaccagccgcggcancagcagtaccgggcnctgaccgtgcccgagctcacccagcagatgttcgacgccaggaacatgatggccgcctgcnatccgcgccatggccgctacctgaccgtggccaccgtgttccgcgggcccatgtccatgaaggaggtggacgagcagatgctggccatccagagtaagaacagcagctacttcgtgggagtggatttccaacaacgtgaaggtnggccgtgttgcgaanattcccgncccggggncttgaaaggatgggtt

SEQ ID NO: 78103 - DNA, 363 bp, Homo sapiens; identical to SEQ ID NO: 62877

SEQ ID NO: 78104 - DNA, 1693 bp, Homo sapiens; identical to SEQ ID NO: 62878

SEQ ID NO: 78105 - DNA, 928 bp, Homo sapiens
ggaactcaagtgtcctacataggccaggactgcagagaaattccagagcaccttggcagggactgtggacatttcgcaaagaggcttgatctgagctttaaccttctgaggtcactggaaggactgagcgcattcaggagcctggaggaactcatcttggacaacaatcagctgggggacgaccttgtgttgccagggttacccagactgcataccttaaccctcaacaagaaccgaatcactgatttggagaacctgctggatcacttggcagaagtgacaccagctctggagtacctcagtctgctgggcaacgtggcctgtcccaacgagctggtcagcttggaaaaggatgaggaagactacaagagatacagatgctttgttctgtacaagctgcccaacttgaaatttctggatgcccagaaagtaaccagacaagaacgagaggaggcgttggtcagaggagtcttcatgaaggtggtgaagcccaaggcttctagtgaggacgttgccagctccccggagcgccactacacgcccttgccttctgcttccagggaactcaccagtcaccaagatgaagtttcattcttgtcgcccaggctggagtgcagtggtgcgttctcggctcactgcaacctccgcctccccggctcaagcgattctcctgtctcagcctcccaagtagctggaaatacaggcatgtgccaccatgcccagctaattttgtatttttagtaaagatggagtttcttcatgttggccaggtgtcctggggaagtgtcgctacgtttactatgggaaaaactcagagggcaacaggtttatccgagatgaccagctctgaagccaacttctgtataccttcacccatttcatgaaaataaaatcaaaagggaaatcaaaaataaagaaaacgctaaag

SEQ ID NO: 78106 - DNA, 566 bp, Homo sapiens; identical to SEQ ID NO: 62881

SEQ ID NO: 78107 - DNA, 343 bp, Homo sapiens; identical to SEQ ID NO: 62882
  misc_feature (1)...(343): n = a,t,c or g

SEQ ID NO: 78108 - DNA, 328 bp, Homo sapiens; identical to SEQ ID NO: 62883

SEQ ID NO: 78109 - DNA, 413 bp, Homo sapiens; identical to SEQ ID NO: 62884

SEQ ID NO: 78110 - DNA, 375 bp, Homo sapiens; identical to SEQ ID NO: 62885

SEQ ID NO: 78111 - DNA, 414 bp, Homo sapiens; identical to SEQ ID NO: 62886

SEQ ID NO: 78112 - DNA, 1448 bp, Homo sapiens
cccccggctcgagccggggctgtacactgcccaggcaaagcgtccgggcagcgtaggcgggcgactcagatcccagccagtggacttagcccctgtttgctcctccgataactggggtgaccttggttaatattcaccagcagcctcccccgttgcccctctggatccactgcttaaatacggacgaggacagggccctgtctcctcagcttcaggcaccaccactgacctgggacagtgaatcgacaatgccgtcttctgtctcgtggggcatcctcctgctggcaggcctgtgctgcctggtccctgtctccctggctgaggatccccagggagatgctgcccagaagacagatacatcccaccatgatcaggatcacccaaccttcaacaagatcacccccaacctggctgagttcgccttcagcctataccgccagctggcacaccagtccaacagcaccaatatcttcttctccccagtgagcatcgctacagcctttgcaatgctctccctggggaccaaggctgacactcacgatgaaatcctggagggcctgaatttcaacctcacggagattccggaggctcagatccatgaaggcttccaggaactcctccgtaccctcaaccagccagacagccagctccagctgaccaccggcaatggcctgttcctcagcgagggcctgaagctagtggataagtttttggaggatgttaaaaagttgtaccactcagaagccttcactgtcaacttcggggacaccgaagaggccaagaaacagatcaacgattacgtggagaagggtactcaagggaaaattgtggatttggtcaaggagcttgacagagacacagtttttgctctggtgaattacatcttctttaaaggcaaatgggagagaccctttgaagtcaaggacaccgaggaagaggacttccacgtggaccaggtgaccaccgtgaaggtgcctatgatgaagcgtttaggcatgtttaacatccagcactgtaagaagctgcccagctgggtgctgctgatgaaatacctgggcaatgccaccgccatcttcttcctgcctgatgaggggaaactacagcacctggaaaatgaactcacccacgatatcatcaccaagttcctggaaaatgaagacagaaggtctgccagcttacatttacccaaactgtccattactggaacctatgatctgaagagcgtcctgggtcaactgggcatcactaaggtcttcagcaatggggctgacctctccggggtcacagaggaggcacccctgaagctctccaaggcccttgcataaggctgtgctgaccatcgacgagaaagggcctgaagctgctggggccatgtttttggaggccataccatgtctatcacccccgagtcaagttcgacaaacctttggactctaatgattggtcaa

SEQ ID NO: 78113 - DNA, 398 bp, Homo sapiens; identical to SEQ ID NO: 62887
  misc_feature (1)...(398): n = a,t,c or g

SEQ ID NO: 78114 - DNA, 1106 bp, Homo sapiens; identical to SEQ ID NO: 62888

SEQ ID NO: 78115 - DNA, 334 bp, Homo sapiens; identical to SEQ ID NO: 62889

SEQ ID NO: 78116 - DNA, 621 bp, Homo sapiens; identical to SEQ ID NO: 62890

SEQ ID NO: 78117 - DNA, 441 bp, Homo sapiens; identical to SEQ ID NO: 62891

SEQ ID NO: 78118 - DNA, 334 bp, Homo sapiens; identical to SEQ ID NO: 62892

SEQ ID NO: 78119 - DNA, 2170 bp, Homo sapiens; identical to SEQ ID NO: 62893

SEQ ID NO: 78120 - DNA, 377 bp, Homo sapiens; identical to SEQ ID NO: 62894

SEQ ID NO: 78121 - DNA, 989 bp, Homo sapiens; identical to SEQ ID NO: 62895

SEQ ID NO: 78122 - DNA, 1401 bp, Homo sapiens; identical to SEQ ID NO: 62896

SEQ ID NO: 78123 - DNA, 823 bp, Homo sapiens; identical to SEQ ID NO: 62897

SEQ ID NO: 78124 - DNA, 321 bp, Homo sapiens; identical to SEQ ID NO: 44763

SEQ ID NO: 78125 - DNA, 1089 bp, Homo sapiens
cggcaagtgggcttgcggctaagggattttcctgggatgagagcgggtcttctgccttcattttggatgcacatcccgctttagccccggcagcctttggtccggctcgtgtccctggggattctcggatctccgaggacaccggacgggagcgcttggccatcctctctccggcagaggagcagacgtttgctttccaagtgcaaaactacagacacgcgcgcgcacacacgcaagcacacgcggagagagaggaaccttgccggtccgaggcagctctgcgcgtcccctcctgcgcttagcatcctcggcccagcgcggcccgcaccgccatggaggtgctggagagcggggagcagggcgtgctgcagtgggaccgcaagctgagcgagctgtcagagcccggggacggcgaggccctcatgtaccacacgcacttctcagaacttctggatgagttttcccagaacgtcttgggtcagctcctgaatgatcctttcctctcagagaagagtgtgtcaatggaggtggaaccttccccgacgtccccggcgcctctcatccaggctgagcacagctactccctgtgcgaggagcctcgggcccagtcgcccttcacccacattaccaccagtgacagcttcaatgacgatgaggtggaaagtgagaaatggtacctgtctacagacttcccttcaacatccatcaagacagagccagttacagacgaaccacccccaggactcgttccgtctgtcactctgaccatcacagccatctccaccccgttggaaaaggaggaacctcctctggaaatgaacactggggttgattcctcgtgccagaccattattcctaaaattaagctggagcctcatgaagtggatcagtttctaaacttctctcctaaagaaggtctgtctgccctccctgtgtccctttgggttatggatatggtctctgggtctacagagagggaatatggcgagagagctgggatgagtttgtaccacagatgttgtagctggctttatgaaatagctctgttcttaaaaaataaaaattttgcttccaaataaaaaaaaaaaa

SEQ ID NO: 78126 - DNA, 600 bp, Homo sapiens; identical to SEQ ID NO: 62901

SEQ ID NO: 78127 - DNA, 1060 bp, Homo sapiens
ggctggcagtacctaccatttatggtcaaacaatttttatagggtatttatttgcatttgtcactcttgtggcatttgtagctaatattttctctctttgttggcaggtgcgttaaacctctacagtttgtcaagctttgcagtgcaagcctctgtattacactgcagcttaacaagtagggcagggcttttctctcacttacatttatttctcattttccaaacaatatagttggtttgctagtcacatttgctacgtcttattgcatttttggtcagacgctgtcattgatgctctaatgggtctgtgccctatggtctgtaacccaaagcctgcccacacaacccggtcagaatgcagggactgctgcgctttgaagatcaagactctgcacgtggggatcagaacattgccatgttctatccaacctccacccaaatggtttatcggcgggggcttcaggcaatacctcttagtgttgacctttggatacattatataaacttcttaaaagaaacattggaccctggtgatcctgagacaaacaatacaataagaggaacttttgagcatgctgttctagctgcaggaacagatttccgttctgacagactgtgggaaatgtatataaactgggaaaatgagcagggaaacctgagagaagttacagctatatatgatcgtattcttggtattccaacacagctgtatagtcatcattttcagagatttaaagaacatgtacagaataatttgcctagagatcttttaactggtgaacagtttattcagttgcgaagggaattagcttctgtaaatggtcatagtggtgatgatggtcctcctggtgatgatctaccatcgggaattgaagacataaccgatcctgcaaagctaattacagaaatagaaaacatgagacatagaatcattgagattcatcaagaaatgtttaattataatgagcatgaagttagtaaaaggtggacatttgaagaagagaattaaaagaccttactttcatgtgaaacctttggaaaaggcacaactaaaaaaaaa

SEQ ID NO: 78128 - DNA, 2526 bp, Homo sapiens; identical to SEQ ID NO: 62902

SEQ ID NO: 78129 - DNA, 499 bp, Homo sapiens; identical to SEQ ID NO: 62903

SEQ ID NO: 78130 - DNA, 589 bp, Homo sapiens
ttcccagtgactgctatggctattgcccccaataccaacaaccttgtcatcgctcattcggaccagcaggtatttgagtacagcatcccagacaaacagtatacagattggagccggactgtccagaagcagggctttcaccaccttgggccccaaggggatacccctatcaacacaacatcagttttcatcccaagagaccgatgcacatccttctccatggatgcctacatgttctgcatcatttgacaagtcattgcccccttcccaaatgacaaaaaccttactcctacaatcccatttccctccccacgaatgaatcagatgtcatccggaggcgcacagctcatgcttttaaaatttctaagatatataagcctctactcttcatggatcttttggatgaaagaacactcgtggcagtagaacggcctctggatgacatcattgctcagctcccaccacccattaaaaagaagaaatttggaacctaaaacagggcactgtctgtgtccttccttgaactgtctaccctgttgcttttcacaaatcatggtaataaaacaagttattcttgaaaaaaaaaaaa

SEQ ID NO: 78131 - DNA, 402 bp, Homo sapiens; identical to SEQ ID NO: 62905

SEQ ID NO: 78132 - DNA, 1440 bp, Homo sapiens; identical to SEQ ID NO: 62906

SEQ ID NO: 78133 - DNA, 776 bp, Homo sapiens
ggcacgagaggggagcgcgctgcgcgtcgcaggagtaacctacttggtctcctgctttcgcgacatggccttcaattttggggctccctcgggcacctccggtaccgctgcagccaccgcggcccccgcgggtgggtttggaggatttgggacaacatctacaactgcaggttctgcgttcagcttttctgccccaactaacacaggcactactggactctttggtggtactcagaacaaaggttttggatttggtactggttttggcacaacaacgggaactagtactggtttaggtactggtttgggaactggactgggatttggaggatttaatacacaacagcagcagcagcaaactacattaggttatagttgcatgcccagtaataaagatgaagatgggctagtggttttagttttcaacaaaaaagaaacagagattcgaagccaacaacaacagttggtagaatcattgcataaagttttgggaggaaaccagacccttactgtaaatgtagagggcactaaaacattgccagatgatcagacagaagttgttatttatgttgttgagcgttcgccaaatggtacttcaagaagagttccagctacaacgctatatgcccattttgaacaagccaatataaaaacacaattgcagcaactttggtgttacccctttctatgactagaacagaactttctcctgcacagatcaaacagcttttacagaatcctcctgctggtatgtttctagaatcacagagttcaaa

SEQ ID NO: 78134 - DNA, 541 bp, Homo sapiens; identical to SEQ ID NO: 62908

SEQ ID NO: 78135 - DNA, 487 bp, Homo sapiens; identical to SEQ ID NO: 62909

SEQ ID NO: 78136 - DNA, 1763 bp, Homo sapiens; identical to SEQ ID NO: 62910

SEQ ID NO: 78137 - DNA, 1626 bp, Homo sapiens
aaccttcccactgcccctcccagacgccgcgtttccgagagggtgtccttagaagaccaaagtccggggatggcggcagagggggaccagctcagcctgcctccccaagggacctcagacggccctgaggacatgccccgggagagcacggagcaaggccaggacacagaggtgaaagccagcgatcctcacagcatgccagagctgcccaggacagccaaacaacccccagtcccgccccccaggaaaaaacggatctctcgacaactggcctcgaccctcccagctcccttagagaacgctgagctctgcacacaggcgatggccttggagacacccacgccgggtccacccagagagggccaaagccctgcttctcaggctgggactcagcaccctcctgcccaggccactgcccattcccagagctctccagagttcaagggctccctggcctccctctcagacagcttgggggtgtctgtcatggccaccgaccaggactcctactccaccagcagcacggaggaggagctggagcagttcagcagccccagcgtgaagaagaagccctccatgatcctgggcaaggctcggcaccggctgagctttgccagtttcagcagcatgttccacgctttcctctccaacaaccgcaagctgtacaagaaggtggtggagctggcgcaggacaagggctcgtactttggcagcctggtgcaggactacaaggtgtacagcctggagatgatggcgcgccagacctccagcacggagatgctgcaggagattcgcaccatgatgacccagctcaagagctacctgctgcagagcaccgagctcaaggccctggtggaccccgccctgcactccgaggaggagctcgaagcaattgtagagtctgccttgtacaaatgtgtcctgaagcccctgaaggaagccatcaactcatgcctgcatcagatccacagcaaggatggttcgctgcagcagctcaaggagaaccagttagtgatcctggccaccaccaccactgacctaggtgtgaccaccagccgtgccggaggtgcccatgatggagaagatcctgcagaagttcaccagcatgcacaaggcctactcacctgagaagaagatctccatcctgctcaagacctgcaaactcatctacgactccatggccctcggcaacccaggggaagccctatggggcggatgacttcctggcctgtgctcatgtatgtgctggcccgcagcaaccctcacgggagatgcttctcaatgtggagtacatgaatgagctcatggacccccgccctgcagctgggggagggttcctactatctgacccaccacctacggggccctggagcacatcaagagctgcgacaagatcacggtgacccggcagctgagtgtggaggtgcaggactcccatccaccgctgtgagcgccggcgtactctcaactaaggcccgggcctcccgctcctccgtacaggacttcatctgcgtgtcgtacctggagcccgagcagcaggcgcggacgctggcgtcgcgggcggacacccaggcccaggcgctgtgcgcgcagtgcgcggagaagttcgcggtggagcggtcgcaa

SEQ ID NO: 78138 - DNA, 1163 bp, Homo sapiens
tgtgtttcaacattaatactattattttgcagcagttcatattgcttttgccaccaacctgaagacatatagaggcagaaggacaggaataattctatttgtttcctgttttgaaacttccatctgtaaggctatcaaaaggagatgtgagagagggtattgagtctggcctgacaatgcagttcttaaaccaaaggtccattatgcttctcctctctgagaatcctgacttacctcaacaacggagacatggcacagtagccagcttggagacttctcagccaatgctctgagatcaagtcgaagacccaatatacagggttttgagctcatcttcatcattcatatgaggaaatcagtggtaaaatccttggaaatacaatgagactcatcagaaacatttacatattttgtagtatagttatgacagcagagggtgatgctccagagctgccagaagaaagggaactgatgaccaactgctccaacatgtctctaagaaaggttcccgcagacttgaccccagccacaacgacactggatttatcctataacctcctttttcaactccagagttcagattttcattctgtctccaaactgagagttttgattctatgccataacagaattcaacagctggatctcaaaacctttgaattcaacaaggagttaagatatttagatttgtctaataacagactgaagagtgtaacttggtatttactggcagggtctcaggtatttagatctttctttaaatgactttgacaccatgcctatctgtgaggaagctggcaacatgtcacacgtggaaatcctaggtttgagtggggcaaaaatacaaaactcagatttccagaaaattgctcatctgcatctaaatactgtcttcttaggattcagaactcttcctcattatgaagaaggtagcctgcccatcttaaacacaacaaaactgcacattgttttaccaatggacacaaatttctgggttcttttgcgtgatggaatcaagacttcaaaaatattagaaatgacaaatatagatggcaaaagccaatttgtaagttatgaaatgcaacgaaatcttagtttagaacatgctaagacatcggttctattgcttaataaagttgatttactctgggaaaaaaaaaaaa

SEQ ID NO: 78139 - DNA, 1970 bp, Homo sapiens; identical to SEQ ID NO: 62914

SEQ ID NO: 78140 - DNA, 868 bp, Homo sapiens; identical to SEQ ID NO: 62915

SEQ ID NO: 78141 - DNA, 2189 bp, Homo sapiens; identical to SEQ ID NO: 62916

SEQ ID NO: 78142 - DNA, 1066 bp, Homo sapiens
agcccccccaactgacgccgtgttgacggccctgaatcccggctcgacccacgcgtccgggcccagaaaggtggggcaggaacgatcccagccttcagctaattctgtcacctctaacgtctggggcaagaacgtttcaggaaaccaagggggaccgaggctcagcgccgaagagaaagacgccaactgcgggacctgtcgcgcctcccgcgccggggtggagctgaccccgccgagtcccgcccctgcctgagttcgccagtggtccaggagccgcttttttccactcgggaagacttcagagaagtctcacaaaggactcggctggctgcttttctcagtgccgaagccgcgccatgctcgttctcagaagcggcctgaccaaggcgcttgcctcacggacgctcgcgcctcaggtgtgttcatcttttgctacgggccctagacaatacgatggaacgttctatgaatttcgtacttattaccttaaaccttcaaatatgaatgcgttcatggaaaatcttaagaaaaacattcatcttcggacctcttactctgaattggttggattctggagtgtagaatttggaggcagaacgaataaagtgtttcatatttggaagtatgataattttcctcatcgagctgaagttcggaaagccttagccaactgtaaggaatggcaagaacaatctatcattccaaatttggctcgcattgataaacaagagacggaaattacttacctgataccatggtccaaattacaaaagcctccaaaagaaggagtctatgaactagctgtttttcagatgaaacctggtgggccagctctgtggggtgatgcatttgaaagagcaattaatgcccatgtcaatttaggctacacaaaagtagttggtgttttccacacagaatatggagaactcaacagagttcatgttctttggtggaatgagagtgcagatagtcgtgcagctgtgagacataagtcccatgaggatcccataagttggggcggtgttcgggagagtgtcaactacctaagtttctcagcagaatatgg

SEQ ID NO: 78143 - DNA, 566 bp, Homo sapiens; identical to SEQ ID NO: 62917

SEQ ID NO: 78144 - DNA, 1296 bp, Homo sapiens; identical to SEQ ID NO: 62918

SEQ ID NO: 78145 - DNA, 1170 bp, Homo sapiens; identical to SEQ ID NO: 62919

SEQ ID NO: 78146 - DNA, 1918 bp, Homo sapiens; identical to SEQ ID NO: 62920

SEQ ID NO: 78147 - DNA, 979 bp, Homo sapiens; identical to SEQ ID NO: 62921

SEQ ID NO: 78148 - DNA, 815 bp, Homo sapiens
ctctgggattcaagatggaggcgctgagtcgagctgggcaggagatgagcctagcggccctgaagcaacacgacccctatatcaccagcatcgcagacctcacgggccaggtcgctctgtacaccttctgccccaaggccaaccagtgggagaagactgatatagaagggaccttattcgtatatcgaaggtcagcttccccttaccatggttttaccattgtgaatcgactaaatatgcacaatctagttgaaccagtgaataaagatttggaatttcagctccatgaaccatttcttctgtatagaaatgcaagcttgtcgatatatagtatctggttttatgacaagaatgactgtcaccgcatagcaaaactcatggctgatgtggtagaagaggagacacggcgatcccagcaagctgctcgggacaaacagagtcccagccaggccaatggctgcagcgaccacaggcccatcgacatcctggagatgctgagcagagccaaggatgagtatgagaggaatcagatgggtgactcaaatatctccagccctgggttacagccaagcactcagctctccaatctgggaagcaccgagactctagaagaaatgccctccgggtcacaggataagtctgctccatctggacacaagcatctgacggtagaagagttatttggaacctctttgccaaaggaacaaccagcagttgtgggtctggattcagaagaaatggagaggttgccaggagatgcctcccagaaagagcccaattcattcctaccatttccctttgagcagttaggagga

SEQ ID NO: 78149 - DNA, 1011 bp, Homo sapiens; identical to SEQ ID NO: 62923

SEQ ID NO: 78150 - DNA, 447 bp, Homo sapiens; identical to SEQ ID NO: 62924

SEQ ID NO: 78151 - DNA, 611 bp, Homo sapiens; identical to SEQ ID NO: 62925

SEQ ID NO: 78152 - DNA, 1462 bp, Homo sapiens; identical to SEQ ID NO: 62926

SEQ ID NO: 78153 - DNA, 785 bp, Homo sapiens; identical to SEQ ID NO: 62927
  misc_feature (1)...(785): n = a,t,c or g

SEQ ID NO: 78154 - DNA, 1216 bp, Homo sapiens
  misc_feature (1)...(1216): n = a,t,c or g
ttttttttttttcatgaaaaggcacgacatcacttttatgtatgaatgtgagaagaatgaaacactacattaacagagaacaagacaaatcagacggggagaccggacacagcttttgtccaaagtcggtttgcaggaggcggcaggattcagcgccatggggtggccacagaggacacacaggggtcagcagaggacatgtggggtccgtggccgcgaacgctgttgaggaaaggccccagagcccctggtgtatacagtccccgaaagatgacggacgatgagtgctatgtgctcaggaggccgggaggctgagcaagccattccacaggggacgcacagccttcagggctgcggaccccaagggccagcaggccagtctttctccgagtttcaacttgcagcgctggaaagagccgctccaggctcaacctccagtcgtcagagagaaaccaagaccctctgtcttcaccctcatgaccaaagtcagccgcctgtccgagcttcctgctccactccttgctgctggctagacacctggtgtttcaaggctaagacccacctggactcctacgttcacgttaatgattttggcagatggagggcagcgtggagttctgcagcacataggtgcggtccaagaacaggaagatgcttctgatcatgatcatttgtctgcagtggtcctgccagcacgtgttaatcttctttaaaaataaaacactatatagtgagttctctaaacggaaggatctgtgcctggacgtggtcttcacaggcctgacgcagttgcttgtagagcattggggagactttgtgagaacagagattttccacagcctgcaaacaaaagggctacatcaattcttcagtatgaacaacagattggttcataaaaaaaccctattgttaacatagctgtaatcataagaaaaaggcaccccacaccctaccccagtacttcaggaatctacaaataaattacttattatggctaagtttagggcacttctcgttggaacactgcagtccagtcatagttggcatgggggtagaggtaacaacagttaatgtgggcacattgcacctgctggacctcgggtcccaggcagctggcctgcaccactcctgagcatctatggtgcccagtcacttgggacttctcaacaggttggaattccccgcncttctagnggtctcagttnggggnntcaat

SEQ ID NO: 78155 - DNA, 1331 bp, Homo sapiens
catgacatgcctacgccaagcttggcacgagggtcctaacgcgggaaacgtgcaccttgactaattcggttttctgtggctacgagagcaggcttggcgggcggaggcgccagcggatgtctcatgcaaggatcgtctctgtggctaagcctcactttccgctccgcccgggtgctctctagagcccggtttttcgagtggcagtctccagggctgccgaatacagcagcgatggagaacggcaccgggccctacggagaagaacgtccacgtgaagtccaggagacgacagtcaccgagggggctgccaaaatcgcctttcccagtgccaacgaggtcttttataacccggtgcaggaattcaatcgggacctgacatgtgctgtgatcaccgagtttgctcgcattcagcttggggccaaaggaatccagatcaaggttccaggagagaaggacacgcaaaaagtggtcgtggacttgtcagagcaagaggaggaaaaggttgaactgaaagagagtgaaaacctggcctcaggagaccaacctcgcacagcggccgtgggggagatctgtgaggaaggcctgcatgtgctggaaggcctggcagcttcaggcctacgttccattcgatttgccctagaggtgcctgggctcagatctgtggttgcaaacgatgcctccacccgggctgtggatctcatacgccggaatgtccagctcaatgacgtggcccacctggtacagccgagccaagcagatgcccggatgctgatgtaccagcaccagagggtgtcggagaggtttgacgtcatcgatctggacccctatgggcagcccagccaccttcctggatgcagctgtgcaggctgtgagtgaaggagggttgctgtgtgtgacctgcacagacatggcggtgttggcggggaacagcggggagacgtgctacagcaagtacggggccatggccctcaagagccgggcctgccacgagatggccctgagaatcgtcctgcacagcctggacctccgcgccaactgctaccagcgcttcgtggtgccgctgctcagcatcagcgctgacttctacgtgcgtgtttttgtccgtgtcttcaccggccaggccaaggtcaaggcctcagccagggccaagttctctgcagcctgtggtccccctgtgacccccgagtgtgaacactgtgggcaacgacaccagcttggtggccccatgtgggcagagcccatccatgacctggattttgtgggccgtgtcctggaggctgtgagcgctaaccccggccgcttccacacctcggagcggatccgaggggtcc

SEQ ID NO: 78156 - DNA, 709 bp, Homo sapiens; identical to SEQ ID NO: 62929

SEQ ID NO: 78157 - DNA, 2114 bp, Homo sapiens; identical to SEQ ID NO: 62930

SEQ ID NO: 78158 - DNA, 2311 bp, Homo sapiens
gcacgagcgcactcctcgcagttggactggtgggaactgggaacactggagacctgatttctaactgacgctaccgtcgcggccgccggcaagttcctttactgtgttttcttggttcagccttgaagtgagtcgtggacgatcctctctcagcgtccagcctagacggcggtgttgctccggcagcgttcctgggagccgagggccagagactaagttaaaaggcccctccccatcttcagaacagtcctgggttctgagcctgccatccaaggaactcaggaggaggagttgacagtctcttcgttcctaaccagtgtgggacgacttcagcatgtctcaggccaccaagaggaagcatgtggtgaaggaggtgctaggggagcacatagtgccctccgaccagcagcagattgtcagggtactcaggaccccagggaacaatctgcatgaggtggagacagcccaagggcagcgcttcctggtgagcatgccctccaaataccgcaagaacatctggatcaagagaggggactttctcattgttgaccccattgaagagggagaaaaggtgaaggctgaaatctcgtttgtgctctgcaaggaccacgtgcgctctctgcagaaggaggggttttggcctgaggccttctctgaagtggctgagaaacacaacaacaggaacagacaaactcaaccagaactcccagctgagccacagttatcaggagaggagtccagctcagaagatgattctgacctgtttgttaacacaaaccgcagacagtatcatgagagtgaggaggagagtgaagaggaggaggcagcctgagactccaggacccaattctccacttgctcagggactggcccctggctcttctgggcttggacattcccagggtgctctgcacatcttcacccctgcatgaggacaaagcagggctcctctctgaactgatcttttgattcagagaattaaacccctggtgggttggtgacttgttctggtgtctgagtggctctctcgggggagggagattgtgatgaagcgaaaaactgctccctatttattaaaaaccttgtgggtgggtgggctgaatggggaggaaatgggaaatggctggagtctttcccaggtggtttgttctttcttattgggcacttaaaaagtgccaggccgtgctctgggccttcttgcatgtgtttaacagctgggagcactcctgcttccttgcctgcttgcagttcataccaatttaagcattcaggatgacagccctaggacctaacacccacctgcctctaagagacgctcaggagcccatggtgcctcgtgctgttctccccacctttctagtcaccctgtgtacgggagtgctcacctccaggtactgtgtccatccccacatacgacctcatctctcccactctgcaccatctatcactttcagaaggtggctggcaaatctctctatccttaactttgttttgaatggtccatccatctcctgactttatttgaaacctgattattccctgaggacattgattgtcttataaccttttaaatagaggctgcttttccaccctcacccttcattcttctaaccagccctgacattctcatgagtaaccttctgccttcacttccctcttgtgtagcatcaattccgtagtccaccctacacccctctgtctccctccattctgttccgctagtaaaaccctaaccctgggtaaacccaatcattcacctctgtgcccaaacccaagtcaccatcattaggtgagaaaacagccagcctggccaccagttgtaccttatgtttatcattacaaacctcagatggacactaagcactgcccagcagatctactctgggatgtctgtttcaaaacttctgtcttatctatcaattcccccttgtggtagttaccacaacacatgcctcattaagaaacagcaaccatcagagggaatgcctgcctccctgttaccagctctgcagatgtgcacatatcttcctgtcgtaagccaatgggacttaaaccttacctcttgtgttttggagactatctttttttttttttgaaaaagggtccccttgggtggctaagcctgaagggcagggggggaatctgggttaattgaacccttcccctacggggttaaggaaactttcttgcctaaccctcccaagaagttggaactacgggggggccccaccaccccgggttaattttttgtattttaagaaaaaacggggttttgccatgttgcccggccgtggcttaaactccggactta

SEQ ID NO: 78159 - DNA, 1211 bp, Homo sapiens
gcacgagcttaaggacaccaggcaggcgcgacagccttcagcctctccctctgcagttttggccggttcctttaacttgccttcatctggggctgtttggtatttccacgtgccttgggcccgcccactgcagcctccatcttggaagcggccgccggcgcctagaactgtatttcagaaaaaagaaactacagttttagcatgcagaaaggaaaagggagaacaagccggatcagaagacgaaaactctgcggaagttctgaatcaagaggagtgaatgagagccacaagtctgaatttatagagctgaggaagtggctgaaagctaggaagtttcaagattcaaacttagcgcctgcttgttttccaggtacaggaagagggctgatgagtcaaacatccctgcaggagggacagatgattatttcgttgcctgagagttgcctgctcaccacgggacacagtgattcgaagctacttaggggcatacattactaagtggaagcctcctccatctcctctgctggcgctgtgcacctttttagtttcagaaaagcatgctgggcaccgatctcttttggaagccttacctggagattttacccaaggcgtatacctgccctgtttgtttggagccggaagtggtgaaccttcttcccaaatctttaaaagcaaaggctgaagagcagagagcccacgtgcaggagttctttgcttcctccagagactttttctcttctctgcagcctctgtttgcggaggctgttgacagcatcttcagctacagtgccctgctgtgggcttggtgcaccgtcaacaccagagccgtgtacctgaggcccaggcagcgggaatgcctttctgcagagccggacacctgtgcaactcgctccgtacctggacctgctgaatcatagcccacatgtccaggtaaaagcagcgtttaatgaagaaactcattcttacgaaattagaacgacttcacgttggagaaagcatgaagaggtattcatctgttacggccctcacgataatcaacggctgttcctggaatacggatttgtttctgtccataatcctcatgcttgtgtttatgtctcaagaggttggaatcaactttgttcttaacattaacactatataatttttttccccatttggagatgtgtattttcagttttaataaaaatatcaaaaccttaaaaaaaaaa

SEQ ID NO: 78160 - DNA, 579 bp, Homo sapiens; identical to SEQ ID NO: 62932

SEQ ID NO: 78161 - DNA, 1128 bp, Homo sapiens
gcttctggctgcgcggcctgcgcgcgcctcccgtgcggattccagccccgagcgggacagcgcggcggggagcgacgagatttctctctgatcaaacggacagttcaggactcagaatctaaggatgaatgttcaccgtggcagtgacagtgacaggttattgcggcaggaggccagctgcttagtggatgatactttagctgtagcccaagaaaaagaagcaaacagcctggcttcatctggtcctcataatcttacttatcctctaggtcccaggaatgaagacctctcacttgactatgcctctcagccagcaaatcttcagttccctcacataatgccccttgctgaagacatcaaaggttcttgcttccaaagtgggaataaacggaaccatgaaccttttattgctccagaaagatttggaaacagtagtgtgggctttggcagtaattcccattcccaagcaccagagaaagtgacgcttcttgtagatggcacacgttttgttgtgaatccacagattttcactgctcatccggataccatgctgggaaggatgtttggaccaggaagagagtacaacttcactcggcccaatgagaagggagagtatgagattgctgaaggcatcagtgcaactgtatttcgcacaagtgctggatttatttacaaaaccggtatcatcaattgtcctgatggcatctctatcccagatcttagagatactttgtgattatctctgcattaattttgacttcaacactatccgatgtcaagatctgagtgctttactccatgaactgtctaatgacggtgctcataagcagtttgatcactacctcgaagagctcatcttgcccatcatggtgggctgtgccaagaaaggagaacgagagtgccacattgttgtgctgacggatgaggattctgtggactgggatgaagaccaccctccaccaatgggggaggaatattcccaaattctttatagctccaagctctacagattcttcaaatatattgagaatagggatgttgcaaaaacagtgttaaaggaacggggcctaaaaaacattcgcattggaattgaaggttaccctacctgtaaaaaaaaaaaaaaggggg

SEQ ID NO: 78162 - DNA, 939 bp, Homo sapiens
  misc_feature (1)...(939): n = a,t,c or g
cgagtntgcaggtctttctggaatgccacacaaattagttttctctggtgaagccaaacttggaactcaccttagctttcccattggtaattagtgtgtgaccagccccatcatctttctagacttttccctcagacctccaatgtcctgggcactggtgatgtccaattcagactgatgggcggggctgggatgaccttcccaggcaggaaactgctctgccttcaggcaagggcccttctccccatcagactaggcccttctcctccctcaggcctgggcctcctggctcctcatctgaaggcctctgtcccttccagacaggagtgtcccctcccctcggacgggagcctcctccatctcagatgggcatctacgcttctctgacttgatcctcccctcttcagacctgggtcttctctacctcacgctggcagggcatcacctcatcggcatcaccctcagacaggggcctcctctcccaacagacagaggcctcctcctaccctctcagacagcggcatcctcccccctcagacagaggcctcctccctcctcagacaggggactcctccccccgagacagaggcctcctcctaccccttcagacaggggcatcctcccccctcagacagaggcctcctcccccctcagacaggtacctcctctctcctcagacagaggcctcctccctcctcagacggggacctcctcccccctcaaggcctcctccctcttcagacagggacctcctccctcctcagacggaggtttcctccctcttcagacaggggcctcttcccccctgagacagggacctcctgccccctcagacagggaacctcctcccccttcagacagcggcctcctccagcccgcacgatgtggtcggcggtccgctacgcgctctatcgaaggcgttcaagggggccctgcgca

SEQ ID NO: 78163 - DNA, 508 bp, Homo sapiens
ctatgcccccaggtatttacagtgtgagaaagaattattttgactttagcggagcagttgaagaatgacaaagtatgcattagtcggtgatgtgggcggcaccaacgcacgtcttgctctgtgtgatattgccagtggtgaaatctcgcaggctaagacctattcagggcttgattaccccagcctcgaagcggtcattcgcgtttatcttgaagaacataaggtcgaggtgaaagacggctgtattgccatcgcttgcccaattaccggtgactgggtggcgatgaccaaccatacctgggcgttctcaattgccgaaatgaaaaagaatctcggttttagccatctggaaattattaacgattttaccgctgtatcgatggcgatcccgatgctgaaaaaagagcatctgattcagtttggtggcgcccaccgctgaaggtaagcctattgcggtatacggtgcaggaacggggcttggggttgcgcatctggtccatgtctataa

SEQ ID NO: 78164 - DNA, 1559 bp, Homo sapiens
ctctgtaattcggcacgaggtgcaacacgtgggggcggtgccggtcggagggctcctagtgcgccaggttgtgggaagtgaggctggcggtggcgacaaccgaggaggaggggcgggacgccgtggagcacggcgaccggctgagcgtcatggagggctcaggggagcagccgggcccacaaccacagcatcccggagaccaccgcatccgcgacggcgacttcgtggtgctgaaacgtgaagatgtgtttaaagcagtacaagtccagcggagaaaaaaagtaactttcgaaaaacagtggttctacctggataacgtcattggccatagttatggaactgcatttgaagtgaccagtggaggaagtctacagcccaagaagaagagggaagagcctactgcagagactaaagaagcgggcactgataatcgaaatatagttgatgatgggaaatctcagaaacttactcaagatgacataaaagctttgaaggacaagggcattaaaggagaggaaatagttcagcagttaattgaaaatagtacaacattccgagacaagacagaatttgcccaagataaatatattaaaaagaagaaaaaaaaatatgaagccatcattactgttgtgaagccatccacccgtattctttcaattatgtattatgcaagagaacctggaaaaattaaccacatgagatacgatacactagcccagatgttgacgttgggaaatatccgtgctggcaacaaaatgattgtgatggaaacgtgtgcaggcttggtgctgggtgcaatgatggaacgaatgggaggttttggctccattattcagctataccctggaggaggacctgttcgggcagcaacagcatgttttggatttcccaaatcttttctcagtggtctttatgaattccctctcaacaaagtggacagtcttctacatggaacattttctgccaagatgttatcttcagagccaaaagacagtgctttggttgaagaaagtaatggcacactggaggaaaaacaggcttctgaacaagagaatgaagacagcatggcagaggccccagagagcaaccacccagaagaccagggaaacaatggaaacaatttctcaagatccagaacataaggggcctaaagagagaggaagcaaaaaagattatattcaggaaaaacagaggagacaagaagagcagaggaaaagacatttagaggctgccgctctgctgagtgaaagaaacgcagatggtttaattgtagctagtcgtttccaccccactcccctgctgctgtctttgctggactttgtggccccttcaaggccgtttgtggtctactgtcagtacaaagagcctctgttggaatgctacacaaaactgcgggagaggggaggggtcatcaacctcaggctgtctgaaacctggctcagaaattatcaggttttgccaaatcgaagtcatcctaaactgctgatgagtggaggtgggggttatcttctctccggcttcaccgttgccatggacaaccttaaagcagacactgtatt

SEQ ID NO: 78165 - DNA, 1864 bp, Homo sapiens; identical to SEQ ID NO: 62936

SEQ ID NO: 78166 - DNA, 1255 bp, Homo sapiens; identical to SEQ ID NO: 62937

SEQ ID NO: 78167 - DNA, 1074 bp, Homo sapiens
ttttttttttaaaatatttaagagtttatttgagcagggatccatgaattgggcagctccaagccagaagtggctagggagctccccagagagaacatgaggaggaggctttttaggacaaatagataaaagcaaagataatatttcattggttacagttatacagttacacagttatacagttgccttatttggtctatcccatgaggaaagtccctagttactaattacgttttttgttggctgcttctgattggttgagcttaagttctgtgtttctttaacataggcatttacaagaaataccacaaataaagtttcagacatgcttgcaaatcaagcaaggttaaggtcacttaaggaggcccaactgggctctggctgctcaaggattcttctggcctcgtctccattttacatgaactgttgcataaataaacacagagtacctgaaacaacggaggtgatcattctgcctaccgagtgttggccaggccaagcttggagtgttgctcttattcttagggagtttatttttaagtaatctcatctgtaaatgggattacaatccacaaactgaccttgtatatgattccattccttctcccagcccagccccacactccaaggttttccctttgcttataaggggtagtcacccttttttatttcgaccttccaaacattctgggagttttcctcctttaggccaactacagcgcagaggagcgctttctcctgctgggtttctccgactggccttccctgcagccggtcctcttcgcccttgtcctcctgtgctacctcctgaccttgacgggcaactcggcgctggtgctgctggcggtgcgcgacccgcgcctgcacacgcccatgtactacttcctctgccacctggccttggtagacgcgggcttcactactagcgtggtgccgccgctgctggccaacctgcgcggaccagcgctctggctgccgcgcagccactgcacggcccgagctgtgcgcatcgctggctctgggttccgccgaatgcgtccatctggcggtgatggctctgggccgcgcggtcgc

SEQ ID NO: 78168 - DNA, 1498 bp, Homo sapiens; identical to SEQ ID NO: 62939

SEQ ID NO: 78169 - DNA, 1013 bp, Homo sapiens; identical to SEQ ID NO: 62940

SEQ ID NO: 78170 - DNA, 475 bp, Homo sapiens; identical to SEQ ID NO: 62941
  misc_feature (1)...(475): n = a,t,c or g

SEQ ID NO: 78171 - DNA, 1252 bp, Homo sapiens
caaaaaaaaaacttttgtcaccacccgccccaatattgggttcctcaaaggccccccccccctgttgttttttccgctcctctttctctttctcctttcccagagggcaggtaaatgtattcagagcacatggcgagtaagaggcaaatcttctgccagcaagtccaggatttttttcaccagaggacattgcttggtccccagagctcaggaccctgtgttttgtctcactcccacccacagagctcctgtatccaggcatcaactccaactcccactcctggaggccgaggcaggaggatcacttgagcccaggagttcgagaccagcctgggccacatagtgagaccttgtctccacacaaaaattttaaaaatagctgggcttggtggtggcatgtgcctgtagtcctagctactcgagaggctgacgttggaggatcactttgagcccaggaggtggaggctgcagtgagcagtcatcactgtactccagcctggtgacagagcgagaccctatcaccgccccccgccccaccaaaaaaaaactgagtagacaggtgtcctcttggcatgataagtcttaagtcccctcccagatctgtgacatttgacaggtgtcttttcctctggacctcggtgtccccatctgagtgagaaaaggcagtggggaggtggatcttccagtcgaagcggtatagaagcccgtgtgaaaagccatactccaaggggctccaagtccagcgcacagtcccagaagggcccagcaaggcagccagggcggcacaggcaccaggtcccaaccttcttccctgtttgcccactctcagaccccggagttcatcatctcggagccgctggccaatatgtactcatgtgggaaccagaacacactgatggaggagttggcagagcaggcacagcagcacgacgagatgctgcacatgcaccacgcgctgaaggaggcgctcagcatcatcggtgacatcaacaggaccactgtcaccatgcccatgcccccgcccgtggacgacacctggttgtcagagcatccctgacgaacacaggtaccaaagactgccccccaggccccaaaatcccccacccgggatgcccagaggagtgccctgggggcaagtggcacaccccctcaccggggtggctcccacctggagtgacggggggagcttgacaaggagcactggctgcggggggggggtgtggagctgggatgttctcgctgctgggggcgg

SEQ ID NO: 78172 - DNA, 1041 bp, Homo sapiens
cgcgaagcctgagaggcaggtagctgcggcgctgggctggcggcggcgagtccacgtgctccccgcggccggttgaaaccgttggcgggcgctggctgagaggcaatgtttgctgtcttccattggagtgactgaatttctacatgacggctttttgacaagacttaaaacctgtcttggatagagaatatttagccatttacctaaaaatggtattttttacatgcaatgcatgtggtgaatcagtgaagaaaatacaagtggaaaagcatgtgtctgtttgcagaaactgtgaatgcctttcttgcattgactgcggtaaagatttctggggcgatgactataaaaaccacgtgaaatgcataagtgaagatcagaagtatggtggcaaaggctatggaaggtaaaaacccacaaaggcgaccatcaaaacagcaggcgtggattcagaaaattagtgaattaataaaagagacccaatgtcagccccaaagtgagagaacttttagagcaaattagtgcttttgacaacgttccccaggaaaaaggcaaaatttcagaattggatgaagaacagtttaaaagttcataatgaatccattctggaccaggtgtggaatatcttttctgaagcttccaacagcgaaccagtcaataaggaacaggatcaacggccactccacccagtggcaaatccacatgcagaaatctccaccaaggttccagcctccaaagtgaaagacgccgtggaacagcaaggggaggtgaagaagaataaaagagaaagaaaggaagaacggcagaagaaaaggaaaagagaaaagaaagaactaaagttagaaaaccaccaggaaaactcaaggaatcagaagcctaagaagcgcaaaaagggacaggaggctgaccttgaggctggtggggaggaagtccctgaggccaatggctctgcagggaagaggagcaagaagaagaagcagcgcaaggacagcgccagtgaggaagaggcacgcgtgggcgcaaggaaaaggaagcggaggcact

SEQ ID NO: 78173 - DNA, 812 bp, Homo sapiens; identical to SEQ ID NO: 62944

SEQ ID NO: 78174 - DNA, 1611 bp, Homo sapiens; identical to SEQ ID NO: 62945

SEQ ID NO: 78175 - DNA, 742 bp, Homo sapiens; identical to SEQ ID NO: 62946

SEQ ID NO: 78176 - DNA, 780 bp, Homo sapiens; identical to SEQ ID NO: 62948

SEQ ID NO: 78177 - DNA, 1599 bp, Homo sapiens; identical to SEQ ID NO: 62949

SEQ ID NO: 78178 - DNA, 782 bp, Homo sapiens; identical to SEQ ID NO: 62950

SEQ ID NO: 78179 - DNA, 438 bp, Homo sapiens; identical to SEQ ID NO: 62951

SEQ ID NO: 78180 - DNA, 980 bp, Homo sapiens; identical to SEQ ID NO: 62952

SEQ ID NO: 78181 - DNA, 792 bp, Homo sapiens; identical to SEQ ID NO: 62953

SEQ ID NO: 78182 - DNA, 1026 bp, Homo sapiens; identical to SEQ ID NO: 62954

SEQ ID NO: 78183 - DNA, 1938 bp, Homo sapiens; identical to SEQ ID NO: 62955

SEQ ID NO: 78184 - DNA, 1115 bp, Homo sapiens; identical to SEQ ID NO: 62956

SEQ ID NO: 78185 - DNA, 830 bp, Homo sapiens
tttttttttaacttttaattttaaaaatgataaagaaacggggataaaaataaaccacctaaatgagtcatattagtttctttagctttttcaaatagtttctaaaatggaaggagattgaaagccagttttttaagatttatttcaagtgttgtgcaaagagggcttatgcaattcttcagaccctatttattttatttatttatttatgtacattcttctggaaaggattactaaagccaaactaagaaaagtatgtaagtgatggattatcaggcgcccttgtttgaggtcagagtaaacagacagactcccgataggttggtttaaaagtagatacctagattgcctggaagcattcaactcagctttgtgggagcatttggtcaaacttccaagtcattgttttttttgtgtgtgttcattttgttacttttccagttcttcctttgttctgtttatgtgccaatgtgcacagagaagatcaacatccccattggcccatgcggcggcatgtgtctttcagtcaagagacgctgtgaacccgtcctgaaggaatttggatttgcctggccagagagtctgaactgcagcaaattcccaccacagaacgaccacaaccacatgtgcatggaagggccaggtgatgaagaggtgcccttacctcacaaaacccccatccagccctggggaagagtgtcactctgtgggaaccaattctgatcagtacatctgggtgaaaaggagcctgaactgtgtgctcaagtgtggctatgatgctggcttatacagccgctcagcccaagaagtcactggatatctggatggct

SEQ ID NO: 78186 - DNA, 445 bp, Homo sapiens; identical to SEQ ID NO: 66255

SEQ ID NO: 78187 - DNA, 855 bp, Homo sapiens; identical to SEQ ID NO: 62958

SEQ ID NO: 78188 - DNA, 497 bp, Homo sapiens; identical to SEQ ID NO: 62959
  misc_feature (1)...(497): n = a,t,c or g

SEQ ID NO: 78189 - DNA, 1215 bp, Homo sapiens; identical to SEQ ID NO: 62960
  misc_feature (1)...(1215): n = a,t,c or g

SEQ ID NO: 78190 - DNA, 855 bp, Homo sapiens; identical to SEQ ID NO: 62961

SEQ ID NO: 78191 - DNA, 871 bp, Homo sapiens
atcttaggtgaaaaggatgattcaccggttcgtgtctgtgacaagtgtggatagcctattaaaatctatgggagaatgatcccatgcaagcatgttttttgctatgactgtgctattttacatgaaaaaaagggagataagatgtgtccaggctgtagtgatcctgtgcagcgaattgagcagtgtacacgaggttctctcttcatgtgtagcattgttcaagggtgcaagagaacatatttgtctcagagagacttacaggctcatatcaaccatcgccatatgagagctggaaaacctgttacccgtgcttcacttgaaaatgttcatcctcctattgccccaccaccaactgaaatccctgagcgttttataatgccaccagacaagcaccatatgagccatattccgccaaagcagcacatcatgatgccaccacctcctttgcaacatgtgccacatgagcactataatcagccacatgaggatattcgtgctcctccagcagaattgtccatggctccacctccacctcgatcggtcagtcaggaaacctttcgtatttcaacaagaaaacacagcaatttaataaccgtccctattcaggatgactcaaattcaggtgatagagaaccaccacctcctgccccagcacctgctcaccatcatcctgaatatcagggtcaaccagtggtatcgcaccctcatcatattatgcctccacagcaacattatgcaccacccccacctcctccaccaccaataagccatccaatgccacatcctccccaggctgcaggtactcctcacttggtatatagccaagctccacctccaccaatgacctcgactccccccagaattccagcac

SEQ ID NO: 78192 - DNA, 1504 bp, Homo sapiens; identical to SEQ ID NO: 62963

SEQ ID NO: 78193 - DNA, 1406 bp, Homo sapiens; identical to SEQ ID NO: 62964
  misc_feature (1)...(1406): n = a,t,c or g

SEQ ID NO: 78194 - DNA, 879 bp, Homo sapiens; identical to SEQ ID NO: 62965

SEQ ID NO: 78195 - DNA, 497 bp, Homo sapiens; identical to SEQ ID NO: 62966

SEQ ID NO: 78196 - DNA, 1018 bp, Homo sapiens; identical to SEQ ID NO: 62967

SEQ ID NO: 78197 - DNA, 1574 bp, Homo sapiens; identical to SEQ ID NO: 62968

SEQ ID NO: 78198 - DNA, 1120 bp, Homo sapiens; identical to SEQ ID NO: 62969

SEQ ID NO: 78199 - DNA, 2556 bp, Homo sapiens; identical to SEQ ID NO: 62970
  misc_feature (1)...(2556): n = a,t,c or g

SEQ ID NO: 78200 - DNA, 897 bp, Homo sapiens; identical to SEQ ID NO: 62971

SEQ ID NO: 78201 - DNA, 1382 bp, Homo sapiens; identical to SEQ ID NO: 62972

SEQ ID NO: 78202 - DNA, 463 bp, Homo sapiens; identical to SEQ ID NO: 62973

SEQ ID NO: 78203 - DNA, 2231 bp, Homo sapiens; identical to SEQ ID NO: 62974
  misc_feature (1)...(2231): n = a,t,c or g

SEQ ID NO: 78204 - DNA, 997 bp, Homo sapiens
tgtgaccggccgaattccaggcgaccacgcgccggggcggcagccggggagacacttgggcccccctggccatggcggcgaaggtggacctgagcacctccaccgactggaaggaggcgaaatcctttctgaagggcctgagtgacaagcagcgggaggaacattacttctgcaaggactttgtcaggctgaagaagatcccgacatggaaggagatggcgaaaggggtggctgtgaaggtggaggagcccaggtataaaaaggacaagcagctcaatgagaaaatctccctgctccgcagcgacatcaccaagctggaggtggacgccatcgtcaacgccgccaacagctccctgctcggaggcggtggcgtggacggctgcattcatcgggccgccggccccctgcttaccgacgagtgccggaccctgcagagctgtaagactggcaaggccaagatcaccggcggctatcggctcccggccaagtacgtcatccacacagtggggccctctcgcatacggggagcccagacgccagccagtgctgccgacgtccgcagctgctacctgagcagtctggacctgctgctgcgattgacgcgtccgcttcggtgggcgttcccctgcatctccaccggcgtgtttgggttacccctgtgtagcggccgccgagatcgtgctggccacgcttgcggagagtggcttgggagcagcacaagggacaaggtgggaccggcttgattcatcttgcgtgttcctcgagaaggacgaggacatctaccggagccggctcccccactacttccccgtggcctgaggctcccgcagcccaccctgaccgggactgacccgccttcgggaccccgctcccagctctgagaggtcgccaaagcctgcagcctggcctgggcctggccaccccttctttccctccgcgccccgcccccgaggagcctaataaagatctcgttgtggcaaaaaaaaacctcgtgccg

SEQ ID NO: 78205 - DNA, 869 bp, Homo sapiens; identical to SEQ ID NO: 62976

SEQ ID NO: 78206 - DNA, 2081 bp, Homo sapiens; identical to SEQ ID NO: 62977

SEQ ID NO: 78207 - DNA, 484 bp, Homo sapiens; identical to SEQ ID NO: 62978

SEQ ID NO: 78208 - DNA, 439 bp, Homo sapiens; identical to SEQ ID NO: 62979

SEQ ID NO: 78209 - DNA, 406 bp, Homo sapiens
agaaaaaaaacaactaaaggctaatatgcctgataaacctaaatgcaaaagtcctcaaaaaaaacactggcaaatcaaatctaacagcacatttttaacatcattcatctttagcaagtggtattcatctcagggatgcaaggagagtcaaacatacacaaatctataaatgttgtaaaacacatcaacggaatgaaggaaaaaaaatgaccatctcattagaggcagaaaaaagcatttgacaaaatccaatattctttcatagtaaaactcccaacaaatttggtacagaaggaacgcacctcaacacgataaaggtcatatatgaaaaacccacagctgacatactcaacaaggaaagttgaaagcttttcctttaagatccagaacaagacaaatgtgccca

SEQ ID NO: 78210 - DNA, 1052 bp, Homo sapiens; identical to SEQ ID NO: 62981

SEQ ID NO: 78211 - DNA, 956 bp, Homo sapiens; identical to SEQ ID NO: 62982

SEQ ID NO: 78212 - DNA, 2382 bp, Homo sapiens
ttttttttttttcatttcaacaggaaacatttatttcaaaacatgaaggtggttatccttccatgagtttgaagtacaaaggcaggctcacggtgtcgtcagaattcagaacgatggtcgtggggctgggggtgctgggaggggctgggcatggttggctttgtgatctggggtctggtgtgttccatctctgaatctctctcgagctgcactctttcttaatacattttcataagtttaaccaaaaataaaacgaggatgcgaagcttgcttgggttgttaagcctagggaaattatccagccatgagccctggcccagatgcttctagaagcctggagggaactgagaactttccaagtggagggccgcagaggcaaggccctgaggtgggagcacacggctgttcgtccctagctctgaagggggtgccctggtcggaatcagtgctgggtgcagcgaaagccgatctcacccgctccgcagggtgttcagcctgccagcagggggccagctggtcctcctgggatatggcacggacccagcagctctgtctgaaatcataatggcggaaccaagggccctctacgtccaggtccgttgcgaggcggggccatggagttccactgcaggaatctccaggaaccctgaggtcctccctgagccagggccgggctgggcacaccctgagtgcccacagggtaggtgtcttcccggacagccccaccaggacagggtgtggaagaacgaggtgcccgtggcggggaagctgaccaaatgggccgcgggaaccgggctggtgggcctggaggggcctgcctgtcccccttgcagagggtcttcccgccacgtgaagccggcacaggcctggatgccgacgacccttgctcgggtttggctgggggttgcaggtccccctgctttcttgttagtttcttcatagaggccctaagatgcttgagcacagtgtcctcatccctggcccaggtatcaacgaaccggttgcaaaaacgtgcccacgggccacacctggacgtcttcgtgaggcgcttctgctgaaccttaaaggcgattcttgttatcggcatcaacgcctgttcgccttctaccagatacacgtcccacaggcgcagggtgagcccgagagagatcccgtcaatcaatatccggatgaggcagcctaacggggaacactgcccacatagatctttcttgtcctgatgccccatggtcttgggttgtgacgtggctaccacatgctcctgttggtcttggagcccctggacggtcccgccatttgggctgtgaaatccctgcagggagtgcctctcactggccagcagctgcaccagtgcccagaatgcatcctcctcaggaagatagaggaggaacaaggcggcgatgtggctcaggtccctgcagtagcccacctccgggttatactcctcatatgccaggaggatgtggagtagttcccgctgcttggttccgtatcgatccctgaagaatatatgcttccttaatgtcccgcttacgtcccggtcgatgcgctggatgtgctcagatgacctcttgcccttctccttcatgatctggtatcttccggggtttttcaacttcatttcctcagtgttcaggaggactgaccacatcgggccccggatgttcatgggcattcccttgtacgctcgatctatgagctttctgctgcttttgtatttctcccagtctcccagcatatccacccacttgctctttcggctgatctcccgccgaatttgcttcgcctcccgcgcagtcagaggaggcagctccgtctcactgtaaggcaacccaggcagagctgaggaactgcacggggcctggagcggccccagcctgggtgccgacccccagaaaggactggctctgtccctttccagctcagggctcagcccaggagaaggcacagggaagggaggacaagggccttcctgtggggctgactcccaggagcggcaggacctgggagaagaaggagtgtagggacagcctggccggggttactggggcccctggcgtggggggcggtcaggctgcccaatggggctgcccgtcctggactcgaggtggtgctttctgctggagctgagaaaggttagccctgagatgggatgggggccgcccagggtgggcgaccgggccctgacaggagtccctcagggagtgaccacatccccccgccagggtcaagggagcctgccctgagacctgcccggtgtactctggctgcaccaggggcccaccccacttgacagccccaaggcccttgcaggttctgacctcccagcatccacctgcctctccctgcacccgagccacacaccctgcgtttcagacgaaa

SEQ ID NO: 78213 - DNA, 1232 bp, Homo sapiens; identical to SEQ ID NO: 62984

SEQ ID NO: 78214 - DNA, 971 bp, Homo sapiens; identical to SEQ ID NO: 62985

SEQ ID NO: 78215 - DNA, 726 bp, Homo sapiens
agaacacctgtgctgggaggcacctcacggaggggacactccgctggaggacacctgcaccttggaggacacctgcaccttgaaagcttcctaaaggccaggaaggacgcttgtgcccagaaggacacctgctccgacgagggacacctggtccgaggggggacacctgtgccaggaaggacaactgcgcctggggggggacaccgtcaagaggacacctgcaccaggaagtacacttgtgcctgggagggacacctgtgcttgaggggacacctgcaccttggagaactcctgcgccgaggggacacctgcgccaggaaggacacttgtgcctggagggacatctgccccaaggagggacacctgctccgaggggggacacctgtgccaggaaggacaccagcgcctggggcgtgggggaagacactgttaaggggacacctgcaccaggaaggaccttgtgcctgtggggacacatgtgccaaggggacacctacgcctgggggggacacatgtgccggggaggacacctgcgccgaggacactcgcacgagcgggatactccacggggtccggaacggcctccccgccctccaggtcccggtccggcctccccctacgcgcccccgcggaagccagagacagggagagcaaggatgaaagacggcgaccaccgcccaaggacccgccggccgtcaggacctgccaccgactcaccctctacgg

SEQ ID NO: 78216 - DNA, 776 bp, Homo sapiens; identical to SEQ ID NO: 62987
  misc_feature (1)...(776): n = a,t,c or g

SEQ ID NO: 78217 - DNA, 2540 bp, Homo sapiens; identical to SEQ ID NO: 62988

SEQ ID NO: 78218 - DNA, 755 bp, Homo sapiens; identical to SEQ ID NO: 62990

SEQ ID NO: 78219 - DNA, 1553 bp, Homo sapiens
tttcgtgccgccgccagtgctgcgggctccgggcaatggatgcccccggggccctggcccagaccgccgcccccggtccgggcaggaaggagctgaagatcgtgatcgtgggcgacggcggctgcggcaagacctcgctgctcatggtgtacagccagggctccttccccgagcactacgccccatcggtgttcgagaagtacacggccagcgtgaccgttggcagcaaggaggtgaccctgaacctctacgacacggccgggcaagaagactatgaccggctgcggcccctgtcctaccagaacacccacctcgtgctcatctgctatgacgtcatgaatcccaccagctacgacaacgtcctcatcaagtggttccctgaggtcacgcatttctgccgcgggatccccatggtgctcatcggctgcaagacagacctgaggaaggacaaggagcagctgcggaagctccgggccgcccagctggagcccatcacctacatgcagggcctgagcgcctgcgaacagatccgagctgctctctacctggaatgttccgccaagtttcgggagaatgtggaggacgtcttccgggaggccgccaaggtggctctcagcgctctgaagaaggcgcaacggcagaagaagcgccggctctgcctgctgctctgacccagggcagacagacctcacgacagcactgacagggcccgggggcccaggtgccgattgcaccagggaggctgccccatcccgaccctccagctcatggtgtctggggcctgcggctagactcttggaacattctggaactctctcctttcctggctggggctctgaccacaaactcccctccaggctgcccctgggacatggtggtgatgtgggtgcaggagccagtgtctgttgtcgggactcgcaagtgccctcatcacagccacccccaccacgagtgtctccccagtgcagactcaagttatgcttgaaatgaaaaagtctatctggtagtgggtaaacgtagacctggcactgttccacgcgggcgccccaagcctgccactcctgtgtccctgcctccctgggctcccgagataggcaccactgtatcctccagctccttccttccttcccccaggaacacggaggccaccgagggggctgggcctatcaggaggacacaggctgcagcctggcacccacccctcccatctccaccccacatggaagacttgtcttcaacttggccactgtctttgcagagctgggcacatgtgcccagggggcagaaaaaatggcttctcagttgttaaaagtataccctggaccacccatctgaccatctccttaaggtttcacccaaagcccccagtgtcagagacttgggatgggaagaacagtcggctcccagtgtggtcatgagcaagttttctgtggactgttccccccactgtggtaggacaggactggcccacttagtcctcaagctcccaacctgctgtccctcaagccccgcttctaccagcctgtggagttcaggaggcgagacatcctggg

SEQ ID NO: 78220 - DNA, 1085 bp, Homo sapiens; identical to SEQ ID NO: 62992

SEQ ID NO: 78221 - DNA, 556 bp, Homo sapiens; identical to SEQ ID NO: 62993

SEQ ID NO: 78222 - DNA, 836 bp, Homo sapiens
ttaattcccgggtcgagccgggacccccgagcgtgaaccccggagccagcggcgctggggccagaggggccggtcgggaggtggtggcggaggcgaaggggcgacgggacctgggcctggcccgtgtgtgtcctcggcggcctggcgccggccgtcgctgtacggtgagccccagggaggcggatctgggccccgagaaggacacccgcctggatttgccccgtaggcccggcccgggcccctcgggagcagaacagccttggtgaggtggacaggaggggacttcgcgagcagacgcgcgcgccagcgacagcagcccgccccggcctctcgggagccgtggggcagaggctgcggagccccaggagggtctatcagccacagtctctgcaagtttccaagagcagcagaaaatgaacacattgcaggggccagtgtcattcaaagatgtggctgtggatttcacccaggaggagtggcagcaactggaccctgatgagaagatagcatacggggatgtgatgttggagaactacagccatctagtttctgtggggtatgattatcaccaagccaaacatcatcatggagtggaggtgaaggaagtggagcagggagaggagccgtggataatggaaggtgaatttccatgtcaacatagtccaggtaagttagtagattatcacatgttaaaaaacactcatccccgacctttgggagtgactaaagagttgtttatatgtactcggtaccctcagtaacacctcccaacccccaaatatcactttccttcccacacacataccacatacatgaactcttttgttgattctaca

SEQ ID NO: 78223 - DNA, 374 bp, Homo sapiens; identical to SEQ ID NO: 62994

SEQ ID NO: 78224 - DNA, 433 bp, Homo sapiens; identical to SEQ ID NO: 62995

SEQ ID NO: 78225 - DNA, 856 bp, Homo sapiens; identical to SEQ ID NO: 62996

SEQ ID NO: 78226 - DNA, 465 bp, Homo sapiens
gcgcgcgcgtcgggaagatggcgctacgtctgctgcggagggcggcgcgcggagctgcggcggcggcgctgctgaggctgaaagcgtctctagcagctgatatccccagacttggatatagttcctcatcccatcacaagtacatcccccggagggcagtgctttatgtacctggaaatgatgaaaagaaaataaagaagattccatccctgaatgtagattgtgcagtgctcgactgtgaggatggagtggctgcaaacaaaaagaatgaagctcgactgagaattgtaaaaactcttgaagacattgatctgggccctactgaaaaatgtgtgagagtcaactcagtttccagtggtctggcggaagaagacctagagacccttttgcaatcccggatccttccttccagccttgatgctaccaaaggggggaaagtcctgaagaaatccagtggtttgcaaa

SEQ ID NO: 78227 - DNA, 719 bp, Homo sapiens; identical to SEQ ID NO: 62998

SEQ ID NO: 78228 - DNA, 627 bp, Homo sapiens
  misc_feature (1)...(627): n = a,t,c or g
tttcgtcggacggagtcttgttcttgtccaggctggagtgcagtggcatgatctcgactcactgcaacctcagtcctccgggttcaagtgattcttctgcctcaccctcctgagtagctgggattacagacaccatgccacaaggagagtgatctcttcccctgttttcacaatggaggactccggaaagactttcagctccgaggaggaagaagctaactattggaaagatctggcgatgacctacaaacagagggcagaaaatacgcaagaggaactccgagaattccaggagggaagccgagaatatgaagctgaattggagacgcagctgcaacaaattgaaaccaggaacagagacctcctgtccgaaaataaccgccttcgcatggagctggaaaccatcaaggagaagtttgaagtgcagcactctgaaggctaccggcagatctcagccttggaggatgacctcgcgcagaccaaagccattaaagaccaattgcagaaatacatcagagagctggagcaagcaaatgacgacctggaaagagccaagcgcgccacggatcatggtctctcgaagacttttgagccagcgcttggantcaggccatcgaaaagaaatgg

SEQ ID NO: 78229 - DNA, 727 bp, Homo sapiens
aagtttttcactgccctgcctcaggcctctctcaaaggtctggcccatgatatttggtgtacattgggaccccagcgcccagatatttgaaacggggtggggagcgggtgttgagctgctacatttccaggttctaggtaccctggggaacccctggtcgttgacggaagcacagcgttcaagggcggcagagctcaggtactggaggacacatgggccgcgccgggtctagccgcgggacatccccagaccccagcacggcctcccaggccgaccttccagaagccggcccactgccttccccgggtcccagcccagaaaagcggagaccttcccctccgtttggaagatggactcatcccctacttcctcctggctccccagaagacctggagacctcgggaagtgttctcatctatgttcgctccaacccgggggctcaggcccacctcgatcccgccttcccgggaggtccaggaaggtcccgccgcacccaccccgttggcctcaccctggctcgggcccctttatcatcctgcagctacgctccgaccaggaggcacagccagtccccacagccggctctaccgctctgctcgcaggtttgggctagtctggggcggggacttgggagcgcctaaaacttgcgaggagggcggggccgcagaccggtcctttaaaggttggaagtggaattccaccgctctgggctaatggtcaacgaaaa

SEQ ID NO: 78230 - DNA, 1790 bp, Homo sapiens; identical to SEQ ID NO: 63000

SEQ ID NO: 78231 - DNA, 337 bp, Homo sapiens; identical to SEQ ID NO: 63001

SEQ ID NO: 78232 - DNA, 775 bp, Homo sapiens
  misc_feature (1)...(775): n = a,t,c or g
atgaaatccaataaaagcggaaggcattagtaaanctcaaaatgaaaaagaaaaatcccaaaatatcagaaaccagaaaattcaataataccaagtactttaagatcaataaaattgtaaaattgataaatctctacccaacccaatcaaggttaaaagaaaaatatagacattaccagtatcaggaatagaagaggttgcaccactacaaattctacaagtatgaaaataatattttgaaaaatttgagtacttaaataaaacagaaaaactccttgaaagacacaaaccatcaaagctcactctagagatagatggatggatggagtgacaaacagatggacggacagacagatgtatatataactagtatagccctccatctaccatggaaatcaaacttgtagttagatgctgtcctacaaaacacacttcagggccagagtgacaagacagacaacacacacacagacagatgtacatataacttgtacagccctctatctaccacagaaatcaaacttatagttagaaactttcctacaaaacaaactccaggcccagacagcttccttggtgaattctaccaaccatttaaggaagaaataataccaattattcacaaactcttccagagagctgaagagcaggaatacttcccaacttactctataaagctggcattatgttgataccaaagccaaacctgggcaagatatatacttccaaagaaaaaaaagcaagcaagcaagaagaaagttagggtcaaatatca

SEQ ID NO: 78233 - DNA, 2533 bp, Homo sapiens
tctccctgcggacgggcgctgattggcccgtttgaaaatgcgcccaggcgggagctcacctgggctcttagcgtcgccgccggcttcgcagagcaccgcgccttagccgcgaagttctagttcttgctgccggtcctaacgtcccgcagtcttcgccagccagccgtcccgcatgcgcgtttgggcggcgtggagcctgctgccatgaagtcagcgagagctaagacaccccggaaacctaccgtgaaaaaagggtcccaaacgaaccttaaagacccagttggggtatactgtagggtgcgcccactgggctttcctgatcaagagtgttgcatagaagtgatcaataatacaactgttcagcttcatactcctgagggctacagactcaaccgaaatggagactataaggagactcagtattcatttaaacaagtatttggcactcacaccacccagaaggaactctttgatgttgtggctaatcccttggtcaatgacctcattcatggcaaaaatggtcttctttttacatatggtgtgacgggaagtggaaaaactcacacaatgactggttctccaggggaaggagggctgcttcctcgttgtttggacatgatctttaacagtatagggtcatttcaagctaaacgatatgttttcaaatctaatgataggaatagtatggatatacagtgtgaggttgatgccttattagaacgtcagaaaagagaagctatgcccaatccaaagacttcttctagcaaacgacaagtagatccagagtttgcagatatgataactgtacaagaattctgcaaagcagaagaggttgatgaagatagtgtctatggtgtatttgtctcttatattgaaatatataataattacatatatgatctattggaagaggtgccgtttgatcccataaacccaaacctccacaatctaaattgcttcgtgaagattaagaaccataacatgtatgttgcaggatgtacagaagttgaagtgaaatctactgaggaggcttttgaagttttctggagaggccagaaaaagagacgtattgctaatacccatttgaatcgtgagtccagccgttcccatagcgtgttcaacattaaattagttcaggctcccttggatgcagatggagacaatgtcttacaggaaaaagaacaaatcactataagtcagttgtccttggtagatcttgctggaagtgaaagaactaaccggaccagagcagaagggaacagattacgtgaagctggtaatattaatcagtcactaatgacgctaagaacatgtatggatgtcctaagagagaaccaaatgtatggaactaacaagatggttccatatcgagattcaaagttaacccatctgttcaagaactactttgatggggaaggaaaagtgcggatgatcgtgtgtgtgaaccccaaggctgaagattatgaagaaaacttgcaagtcatgagatttgcggaagtgactcaagaagttgaagtagcaagacctgtagacaaggcaatatgtggtttaacgcctgggaggagatacagaaaccagcctcgaggtcccacttggaaatgaaccattggttactgacgtggttttgcagagttttccacctttgccgtcatgcgaaattttggatatcaacgatgagcagacacttccaaggctgattgaagccttagagaaacgacataacttacgacaaatgatgattgatgagtttaacaaacaatctaatgcttttaaagctttgttacaagaatttgacaatgctgttttaagtaaagaaaaccacatgcaagggaaactaaatgaaaaggagaagatgatctcaggacagaaattggaaatagaacgactggaaaagaaaaacaaaactttagaatataagattgagattttagagaaaacaactactatctatgaggaagataaacgcaatttgcaacaggaacttgaaactcagaaccagaaacttcagcgacagttttctgacaaacgcagattagaagccaggttgcaaggcatggtgacagaaacgacaatgaagtgggagaaagaatgtgagcgtagagtggcagccaaacagctggagatgcagaataaactctgggttaaagatgaaaagctgaaacaactgaaggctattgttactgaacctaaaactgagaagccagagagaccctctcgggagcgagatcgagaaaaagttactcaaagatctgtttctccatcacctgtgcctgtaagttatttgtaattgtgtagtaactttgtactagagaaattttgttcagattagatgactatttctatgaggatttttacattttataatacttacatttctgaaatttctctaaaaatattttaaaatttagaataaacacaaatttagcacaaaaaaatagaacaaataattatttgtaatgttaagtcttcatgtgctaacattatagaaaagtaatgaattgtttctctcagtttttcagtcttgctcattaat

SEQ ID NO: 78234 - DNA, 460 bp, Homo sapiens
caagcggtgggtgccatgtgggaatgtcagctcagaggtgccacatcttccaatattttatgacaaaaaggaagtctagagttttatgtgaatttaattaagatttgaatgttggaattaatttgattttaaaagcagggcaattagaactaataaattcagcaaagttgaaggatacaaaatgaacacgcaaaaattggttacatttctacaactaacaataaacaatccaaaaaggaaattaagaaaataattccatttacaatagcatcaaaaagaataaagtaccgaggaataaacttaacaaaggttaaatattgtatgctaaaaactacaagatattggtgaaagaaattaaagatgacaccaataaatggaaagacattccatgttcatggattagaagatttaatattgataaggtgtcagtactacccaaagtggaattccaccgcacggt

SEQ ID NO: 78235 - DNA, 1516 bp, Homo sapiens; identical to SEQ ID NO: 63005

SEQ ID NO: 78236 - DNA, 734 bp, Homo sapiens
gagaagaagcctggattaagccccaggctttgctcccaggagctcccattccacccgcaggtccagcgccttggaaagtggcacatgtggggtgtggacgggcggacgaggaaccctctgcttccacggctcagacactgcctgggaggtcctgagtccacgggtctattcccacgggtggaagagaggaagaaccagggtctgggggctggtaggtggccactcaaggcactctaagcttggggccagaaagcagcgggggtccttaagccacggagaggcttccagggctggctccacatcggaatcactgtgggatcctgggcacgtgatcctgtcttgctggaagttttcccatctgctggtgggcgccgccgtgttcgacgccctcgagtcggaccacgagatgcgcgaggaggagaaactcaaagccgaggagatccggatcaaggggaagtacatcatcagcagcgaggactaccggcagctggagctggtgatcctgcagtcggaaccgcaccgcgccggcgtccagtggaaattcgccggctccttttactttgcgatcacggtcatcaccaccataggtaagggctgggcgcgccgctgggctgggtgcagggcgtcgagggttaaacgcagcctcccttgggggccttcccgcagcgccccctcctctctagggagccccccctccacggcgcctccgagcctcacccttcggggacacgaaa

SEQ ID NO: 78237 - DNA, 966 bp, Homo sapiens; identical to SEQ ID NO: 63007

SEQ ID NO: 78238 - DNA, 602 bp, Homo sapiens; identical to SEQ ID NO: 63008

SEQ ID NO: 78239 - DNA, 1286 bp, Homo sapiens; identical to SEQ ID NO: 63009

SEQ ID NO: 78240 - DNA, 624 bp, Homo sapiens; identical to SEQ ID NO: 63010

SEQ ID NO: 78241 - DNA, 1121 bp, Homo sapiens; identical to SEQ ID NO: 63011
  misc_feature (1)...(1121): n = a,t,c or g

SEQ ID NO: 78242 - DNA, 700 bp, Homo sapiens; identical to SEQ ID NO: 63012

SEQ ID NO: 78243 - DNA, 1420 bp, Homo sapiens; identical to SEQ ID NO: 63013

SEQ ID NO: 78244 - DNA, 849 bp, Homo sapiens; identical to SEQ ID NO: 63014

SEQ ID NO: 78245 - DNA, 1973 bp, Homo sapiens; identical to SEQ ID NO: 63015

SEQ ID NO: 78246 - DNA, 958 bp, Homo sapiens; identical to SEQ ID NO: 63016
  misc_feature (1)...(958): n = a,t,c or g

SEQ ID NO: 78247 - DNA, 1035 bp, Homo sapiens
tttaccttgtatcctgttattagacctggatcacatacagcagctgagaggagcctcacaagcaagtcttgtacttcacccatgctgtcccctatatttagcaatccctcttgaagaacactcaggtttggaacatcaatattctcatcaaagcccaaaactttaccaaagtttcgtaagaactgcaccaccatgagacagtctgaaaatgtacttccagagagaacaagtcctggaatacgaggcaactctggcaaaggcttttggtctgctaagcacatgtcttcattaggcttctttagttcctttgccatttctaattctaatcttcgctgctctagtttacgctctttatttaatcttttctcatcacgtttttcttgtttcaaccgctctttttcttctgcttttttacgagcttccatagctttcataagcatcatgtgttgtcgccttcgctctcgttccctgatgtttcagaagaacagcttgttgtcttctcatttctttttcctttattcgtttctcggcctccaataatttggcatttgccgcttcttccttctttttttttttagcctctagaatttgctgagctcgaagttctttttccattctgatttgctgtattctcttaattttttcctgctgtttcataatctttatctgttctttttgcttccgcttctcctcagcagccattattgcttgttgttttttggcttctttagcaacccgagcctgttcctgcttttgaagttttctcaaaagctttatttgtgctgcttgcctggctatttcttgagcttgcagttttcttagcaactttgcatctgcgttatctaggaattcagcattgccaacatttggaggtcgacctttccgacgtctcatcctggattcctctcttgctcgttgtctatctggatttggtggtcttcctctacgaccttccattgccctgatacgaggaatgacatcctcttctttcaaaagacaccactgcattccctgcggtccatctctggcttcata

SEQ ID NO: 78248 - DNA, 1092 bp, Homo sapiens; identical to SEQ ID NO: 63017

SEQ ID NO: 78249 - DNA, 739 bp, Homo sapiens; identical to SEQ ID NO: 63018

SEQ ID NO: 78250 - DNA, 943 bp, Homo sapiens; identical to SEQ ID NO: 63019

SEQ ID NO: 78251 - DNA, 836 bp, Homo sapiens; identical to SEQ ID NO: 63020

SEQ ID NO: 78252 - DNA, 1194 bp, Homo sapiens; identical to SEQ ID NO: 63021
  misc_feature (1)...(1194): n = a,t,c or g

SEQ ID NO: 78253 - DNA, 1518 bp, Homo sapiens; identical to SEQ ID NO: 63022

SEQ ID NO: 78254 - DNA, 622 bp, Homo sapiens; identical to SEQ ID NO: 63023

SEQ ID NO: 78255 - DNA, 1243 bp, Homo sapiens; identical to SEQ ID NO: 63024

SEQ ID NO: 78256 - DNA, 715 bp, Homo sapiens; identical to SEQ ID NO: 63025

SEQ ID NO: 78257 - DNA, 1014 bp, Homo sapiens; identical to SEQ ID NO: 63026

SEQ ID NO: 78258 - DNA, 1725 bp, Homo sapiens
attcgtgcgccgataatttggtggcggcgtccggagggtgctggtttgttctcggtgaacggcgcgcggggtctctcctgagtgcgagctacgggaccttcgccatgccggggatggtactcttcggccggcgctgggccatcgccagcgacgacttggtcttcccagggttcttcgagctggtcgtgcgagtgctgtggtggattggcattctgacgttgtatctcatgcacagaggaaagctggactgtgctggtggagccttgctcagcagttacttgatcgtcctcatgattctcctggcagttgtcatatgtactgtgtcagccatcatgtgtgtcagcatgagaggaacgatttgtaaccctggaccgcggaagtctatgtctaagctgctttacatccgcctggcgctgttttttccagagatggtctgggcctctctgggggctgcctgggtggcagatggtgttcagtgcgacaggacagttgtaaacggcatcatcgcaaccgtcgtggtcagttggatcatcatcgctgccacagtggtttccattatcattgtctttgaccctcttggggggaaaatggctccatattcctctgccggccccagccacctggatagtcatgattcaagccagttacttaatggcctcaagacagcagctacaagcgtgtgggaaaccagaatcaagctcttgtgctgttgcattgggaaagacgaccatactcgggttgctttttcgagtacggcagagcttttctcaacctacttttcagacacagatctggtgcccagcgacattgcggcgggcctcgccctgcttcatcagcaacaggacaatatcaggaacaaccaagagcctgcccaggtggtctgccatgccccagggagctcccaggaagctgatctggatgcagaattaaaaaactgccatcattacatgcagtttgcagcagcggcctatgggtggcccctctacatctacagaaaccccctcacggggctgtgcaggattggtggtgactgctgcagaagcaagaacccacagactatgacttggtcggaggcgatcagcttcaactgtcacttcggctcccatcctgcacacccacagggctgcagtacagggacttcatccacgtcagcttccatggacaaggtttacggagctgccgtttttagtggctctggatcacaggaaagagtctgttgtggtcgctgtgagggggaccatgtctctgcaggatgtccttacggacctgtcagcggagagtgaggtgctagacgtggagtgtgaggtgcaggaccgcctggcacacaagggtatttctcaagctgccagatacgtttaccaacgactcatcaacgacgggattttgagccaagccttcagcattgctcctgagtaccggctggtcatagtgggccacagcctcgggggaggggcggccgccctgctggccaccatggtcagagccgcctacccgcaggtcaggtgctacgccttctccccaccccgggggctgtggagcaaagctctgcaggaatattctcagagcttcatcgtgtcactcgtcctggggaaggatgtgattcccaggctcagtgtgaccaacttggaagatcttgaagagaagaatcttgcgagtggtcgcgcactgcaataaacccaagtacaagatcttgctgcacggtttgtggtacgaactgtttggagg

SEQ ID NO: 78259 - DNA, 481 bp, Homo sapiens; identical to SEQ ID NO: 63028

SEQ ID NO: 78260 - DNA, 781 bp, Homo sapiens; identical to SEQ ID NO: 63029

SEQ ID NO: 78261 - DNA, 852 bp, Homo sapiens; identical to SEQ ID NO: 63030

SEQ ID NO: 78262 - DNA, 389 bp, Homo sapiens; identical to SEQ ID NO: 63031

SEQ ID NO: 78263 - DNA, 635 bp, Homo sapiens
tttcgttgaggagtcacagttgtgagcaagttcggtgccgcgggctggggtaggcggcagtggggtccctggctttggggcactgggaagatcgcgagtgggaaggtcctcccgcggtcctccgggtcatctttcctcctgaggagcagcatatttcgcatctgccggagattagaattacttgttattggtaaatagccactatggagactaaggaccagaagaaacaaagaaagaaaaatagtggacccaaagctgcaaagaaaaagaagcggcatctgcaggatctccagctaggagacgaagaagatgcctggaagagaaatcccaaagcttttgcatttcagtctgctgtgtggatggctcgatcctttcacaggactcaggatttgaagacaaaaaagcatcatattccagtggttgatcgaactccactagagcccccaccaatagtggtagtggtgatggggcctccaaagttggaaagagcactttgatacaatgcctcattcggaacttcacccggcagaagttgaccgagatcagaggccctgtgatgatcgtgtcaggtaaaaagctccgactcaccattattgattgtgggtgtgacattaacatgatgattgatctggctg

SEQ ID NO: 78264 - DNA, 2072 bp, Homo sapiens
ttttttttttttggcagtgaggactttattggggagggtgactttggcttccagaaaagagggaaggtggggacctagtaacaataaccatttattccaaggaggccctggccctgaacccggggttcccacaggaatcagggaggcacctgagtcccccaggaccagggcatcccaaggcatcatggcagctgcgttgttcaaaaggaagtttcattgagcttcatcttgggaggtgtgaggggagtgccgagaccgctggagggccacggggctggtgtgggtggccgtcggaggtctggcccactccgcaccagttcctggcaagcgttccacaaagcttccccccacccacggccgccggggcctcaagcctgccgggggggctttggggctccccacggttggccagacaaaggaggtgttgctgaaggctgagtggaggctggtgagggagatgcggggtgaggggctggggagacagccccatgagggagctgaaggagccggcggggccagctcacagtgttccagctgttccatcagctcttgctccgtcaggccacctgcaggggcctggccgaggccgtccatggcggtggttaggtcccacatggccaagctgccgttggcctggccagtgagcaggtagcgccggggccgagagccgagccgccgggagccctcgcactccagcactgtgaaggctgtcgtgggtgagccgtccacggagcgcacggagcacacccgctgcccagtagatgagagacgcacgaagagctggctggcactgggcaccaccttctggatgaacacttgctggtcgtcccgctcaccgtaggggccaatgtcattgccagcactgcagccgccatgcccatctgccgactccagagccaggatcttaaaggaagcgagtggggtggagccgggctgggtggaaatcatgccgcggaagcgagtcacagaccatgtccgcacgtggttgttgtcggcacagactgagatgaggtgcttctccgacagcatgatcttggtgacagggctgcggtgcacagtgaaggtctggaagagctgaggccccgagcccacagtctccgggtgctgcacgatgacccgcacgccccctgagctggtgccataggcgatctcgatccagttcccactgtcacctatctcggagccaccgccttccgcctgcagagcccatagcaggatctcgctgccggtggctgctgccaccatcttgtcatgttcacccaaagccccaccatgcacccgggctgtgagcgccagtcgttcgatgggccagtccaggcgggggctggaaaacaccagctgccagccagaggcttccttcaacctgtagcagactagaaactgggtataggccacagcgatccaattatggtgtccacacaccaggcgcaccatccccggctcctcaggttgtcctgagggtgagggaggggttttctcatccagcattcggcccagcagccctgcattgccaaggttggggggcatcgtgttgctccgtcggacaggggctggccgtcctcctagctgctgaggccccactaggctgtgccggttccgccgcttcactgggaacactggtggcggcaggtaaccattgaagaggacgtttccacaagaagatcgatccaactcctctcgaagctgcaggcgacgaaccagaggagtgagcccatagaactgggcttcatggaggaggctggaaccgtggacacccctgggatccaactctttggtgcgcaggaagttgaggatgggggcgaagactgtagggtccctgtcgatgaagattgctccggtctcatctttcagcgtcgagatgcgtccgctcagaagactggagaagaaggagtctgggatccaggtgagagtctggcgagaggtactgaatctcttgcctcccacattcagatggatgacttccccgggaggcccccgactggggaccccctcggctgcagtagccgctgctgccatggcccccgggcgagccgaacgaaatcgtggacccgggaattccgaaccgttcgtca

SEQ ID NO: 78265 - DNA, 896 bp, Homo sapiens; identical to SEQ ID NO: 63034
  misc_feature (1)...(896): n = a,t,c or g

SEQ ID NO: 78266 - DNA, 1748 bp, Homo sapiens; identical to SEQ ID NO: 63035

SEQ ID NO: 78267 - DNA, 748 bp, Homo sapiens; identical to SEQ ID NO: 63036

SEQ ID NO: 78268 - DNA, 784 bp, Homo sapiens; identical to SEQ ID NO: 63037

SEQ ID NO: 78269 - DNA, 597 bp, Homo sapiens; identical to SEQ ID NO: 63038

SEQ ID NO: 78270 - DNA, 994 bp, Homo sapiens; identical to SEQ ID NO: 63039

SEQ ID NO: 78271 - DNA, 1771 bp, Homo sapiens; identical to SEQ ID NO: 63040

SEQ ID NO: 78272 - DNA, 687 bp, Homo sapiens; identical to SEQ ID NO: 63041

SEQ ID NO: 78273 - DNA, 1794 bp, Homo sapiens; identical to SEQ ID NO: 63042
  misc_feature (1)...(1794): n = a,t,c or g

SEQ ID NO: 78274 - DNA, 1223 bp, Homo sapiens; identical to SEQ ID NO: 63043

SEQ ID NO: 78275 - DNA, 1016 bp, Homo sapiens; identical to SEQ ID NO: 63045

SEQ ID NO: 78276 - DNA, 887 bp, Homo sapiens; identical to SEQ ID NO: 63046

SEQ ID NO: 78277 - DNA, 415 bp, Homo sapiens; identical to SEQ ID NO: 63047

SEQ ID NO: 78278 - DNA, 724 bp, Homo sapiens; identical to SEQ ID NO: 63048

SEQ ID NO: 78279 - DNA, 1049 bp, Homo sapiens; identical to SEQ ID NO: 63049

SEQ ID NO: 78280 - DNA, 773 bp, Homo sapiens; identical to SEQ ID NO: 63050

SEQ ID NO: 78281 - DNA, 977 bp, Homo sapiens
cggccgcgtcgacagacagacgggagcagtgcttttcctagagtagagtatgctctataaatgtctactgaatgttgactggtgttggatgtcttgtctcctcagaatctctgagctgcgtgcagtgtaattcatgggaaaaatcctgtgtcaacagcattgcctctgaatgtccctcacatgccaacaccagctgtatcagctcctcagccagctcctctctagagacaccagtcagattataccagaatatgttctgctcagcggagaactgcagtgaggagacacacattacagccttcactgtccacgtgtctgctgaagaacactttcattttgtaagccagtgctgcgaaggaaaggaatgcagcaacaccagcgatgccctggaccctcccctgaagaacgtgtccagcaacgcagagtgccctgcttgttatgaatctaatggaacttcctgtcgtgggaagccctggaaatgctatgaagaagaacagtgtgtctttctagttgcagaacttaagaatgacattgagtctaagagtctcgtgctgaaaggctgttccaacgtcagtaacgccacctgtcagttcctgtctggtgaaaacaagactcttggaggagtcatctttcgaaagtttgagtgtgcaaatgtaaacagcttaacccccacgtctgcaccaaccacttcccacaacgtgggctccaaagcttccctctacctcttggcccttgccagcctccttcttcggggactgctgccctgaggtcctggggctgcactttgcccagcaccccatttctgcttctctgaggtccagtagcactccctgcggtgctgacaccctctttccctgctctgccccgtttaactgcccagtaagtgggagtcacaggtctccaggcaatgccgacagctgccttgttcttcattattaaagcactggttcattcactgcccaaaaaaaaaaaacatt

SEQ ID NO: 78282 - DNA, 641 bp, Homo sapiens; identical to SEQ ID NO: 63052

SEQ ID NO: 78283 - DNA, 806 bp, Homo sapiens; identical to SEQ ID NO: 63053
  misc_feature (1)...(806): n = a,t,c or g

SEQ ID NO: 78284 - DNA, 746 bp, Homo sapiens; identical to SEQ ID NO: 63054

SEQ ID NO: 78285 - DNA, 665 bp, Homo sapiens; identical to SEQ ID NO: 63055
  misc_feature (1)...(665): n = a,t,c or g

SEQ ID NO: 78286 - DNA, 518 bp, Homo sapiens; identical to SEQ ID NO: 63056

SEQ ID NO: 78287 - DNA, 833 bp, Homo sapiens; identical to SEQ ID NO: 63057

SEQ ID NO: 78288 - DNA, 559 bp, Homo sapiens; identical to SEQ ID NO: 63058

SEQ ID NO: 78289 - DNA, 3556 bp, Homo sapiens; identical to SEQ ID NO: 63059

SEQ ID NO: 78290 - DNA, 545 bp, Homo sapiens; identical to SEQ ID NO: 63060

SEQ ID NO: 78291 - DNA, 674 bp, Homo sapiens; identical to SEQ ID NO: 63061

SEQ ID NO: 78292 - DNA, 1293 bp, Homo sapiens; identical to SEQ ID NO: 63062

SEQ ID NO: 78293 - DNA, 467 bp, Homo sapiens; identical to SEQ ID NO: 63063

SEQ ID NO: 78294 - DNA, 1800 bp, Homo sapiens; identical to SEQ ID NO: 63064

SEQ ID NO: 78295 - DNA, 696 bp, Homo sapiens; identical to SEQ ID NO: 63065

SEQ ID NO: 78296 - DNA, 1117 bp, Homo sapiens
acattagtacagtgcggtggaattcgcaaaagcagtggaaagatgtggtagaaagagcttgtcaagcaagagctgaagaagtttgtatccagatttccaatgattatgaagccaaagttgctatgttatctggagctttggaaaatgcaaaagctgagattcaaagaatgcaacatgaaaaagagcactttgaagattccatgaaaaaagctttcatgaggggtgtatgtgcattaaatcttgaagccatgactatatttcaaaacagaaatgatgcagggatagactccacaaataataaaaaggaagagtatggtcctggtgttcaaggaaaagaacattctgctcatttggatccttcagctcctccgatgcccttaccagttacatcaccactgctgccatccccaccagccgccgtcggaggagccagcgcgactgccgttccctcagctgcttcgatgacttctaccagggctgcttccgcatcttctgttcacgttcctgtttctgctcttggtgcaggatctgcagctactgctgcatcagaagaaatgtatgtgccaagagttgtaacctctgcacaacagaaagcaggaagaactattacagcccggatcacaggaagatgtgattttgcttcaaaaaatagaattagcagcagtttagctataatgggagtttctcctcccatgagctcagttgttgtggaaaaacatcatccagtcacagtgcaaaccattcctcaagcaactgcagcaaaatatccccggaccattcatcctgaaagtagtacctcagcttccagatcacttggaaccagatcagctcacacccagtctctcacaagtgttcattccataaaagtggttgactaaagtgaatatgtccatagtggggtcttttaatccctctggtcttaccaagggttagaagtcttttggttttaacttttccatattgttagaacatcatggagacatcatgttcatctgttcaaaattacaagaggctttttcaagctctaccatgctttgtaactatatgtagaaattattttaatgttattttttatttaagcaattaagtaaaacttttttaaattaaaaaaaaaaaa

SEQ ID NO: 78297 - DNA, 1052 bp, Homo sapiens
ttttgaaggtaatcatatgcaagtaaattacaatcaaatggaactgtatgattattttattattttaatgctaaactgaacagtgaactgaaatcagaggagaaagaaaatcaagctagtggctcactctcaatagtgtcctctaattttattgatgcttcagttttcataaagtgcaataaacaaaataaataaatgaaaaaagctttgaagatttatatacagttttgaggttaagataaattactgactatattcctttcagccttttaactctgtgaaagctgtaacgtacattaaaagcacatcgaactaggttaaataatgatctttcccccttagatcaatctagtattaaggagtatataattatgcaagttcattctataacacgaggctagactaaaaggaaaatttttgtgctacagactaaatccagatacggtcaggtgctgagcagtattcctggcttcaaaataggaggtatctgtttcatcatctggctgggggatgaaaggcatagtctgatgctgcagattttcccagtccacatcactgaagagaggatgacgttttagctctttcattccagctctctttgtatcatcaatggttaaaagtatttctactgcactttgagcattatcagataacttttcttcaccttctggccaagggatatctaaaattatacatatacaaataaacttgtttattactgctcaaaataatagtatccagagataaatgactacttttttttgttttttgagatggagtttcactcttgtcacccaggctggagtgcaaaagcgtgatctcagctcactgcaacctccacctcccaggttcaagcgattctcctgcttcagcctcccgagtagctgggattacaggcgcccgtcaacatgcctggctaattttttgtattttttttctagtagagatggggttccaccatgttggccaggctggtctcgaactcccgacctcaggcgatccacccgccttggcctcccaaagtgctgggattacaggcatgggccgaattc

SEQ ID NO: 78298 - DNA, 599 bp, Homo sapiens; identical to SEQ ID NO: 63068

SEQ ID NO: 78299 - DNA, 1742 bp, Homo sapiens
ggagcaatagcagcagccgtggcggccacggggcgacggcgcggcggtcggtgaccgcggccggggctgcaggcggcggagcggctggcttgccaacacttggtgtcacatgtgagcctcccacatgtattcactctccattccagctctgtgattgaactctgctcttattgactagggggcagttgggcaggcatgcctcattcctggaattgacagtcattcctaataagaagttggattccatgggttccaagagaagaagagctacctccccttccagcagtgtcagcggggactttgatgatgggcaccattctgtgtcaacaccaggcccaagcaggaaaaggaggagactttccaatcttccaactgtagatcctattgccgtgtgccatgaactctataataccatccgagactataaggatgaacagggcagacttctctgtgagctcttcattagggcaccaaagcgaagaaatcaaccagactattatgaagtggtttctcagcccattgacttgatgaaaatccaacagaaactaaaaatggaagagtatgatgatgttaatttgctgactgctgacttccagcttctttttaacaatgcaaagtcctattataagccagattctcctgaatataaagccgcttgcaaactctgggatttgtaccttcgaacaagaaatgagtttgttcagaaaggagaagcagatgacgaagatgatgatgaagatgggcaagacaatcagggcacagtgactgaaggatcttctccagcttacttgaaggagatcctggagcagcttcttgaagccatagttgtagctacaaatccatcaggacgtctcattagcgaactttttcagaaactgccttctaaagtgcaatatccagattattatgcaataattaaggagcctatagatctcaagaccattgcccagaggatacagaatggaagctacaaaagtattcatgcaatggccaaagatatagatctcctcgcaaaaaatgccaaaacttataatgagcctggctctcaagtattcaaggatgcaaattcaattaaaaaaatattttatatgaaaaaggctgaaattgaacatcatgaaatggctaagtcaagtcttcgaatgaggactccatccaacttggctgcagccagactgacaggtccttcacacagtaaaggcagccttggtgaagagagaaatcccactagcaagtattaccgtaataaaagagcagtacaaggaggtcgtttatcagcaattacaatggcacttcaatatggctcagaaagtgaagaagatgctgctttagctgctgcacgctatgaagagggagagtcagaagcagaaagcatcacttcctttatggatgtttcaaatcctttttatcagctttatgacacagttatggagttgtcggaataaccaatgggcagctaatagctgaacctttttaccatttgccttcaaagaaaaaataccctgattattaccagcaaattaaaatgcccatatcactacaacagatccgaacaaaactgaagaatcaagaatatgaaactttagatcatttggagtgtgatctgaatttaatgtttgaaaatgccaaacgctataatgtgcccaattcagccatctacaagcgagttctaaaattgcagcaagttatgcaggcaaagaagaaagagcttgccaggagagacgatatcgaggacggagacagca

SEQ ID NO: 78300 - DNA, 1068 bp, Homo sapiens; identical to SEQ ID NO: 63069

SEQ ID NO: 78301 - DNA, 486 bp, Homo sapiens; identical to SEQ ID NO: 63070

SEQ ID NO: 78302 - DNA, 834 bp, Homo sapiens; identical to SEQ ID NO: 63071

SEQ ID NO: 78303 - DNA, 3359 bp, Homo sapiens; identical to SEQ ID NO: 63072

SEQ ID NO: 78304 - DNA, 538 bp, Homo sapiens; identical to SEQ ID NO: 63073

SEQ ID NO: 78305 - DNA, 815 bp, Homo sapiens; identical to SEQ ID NO: 63074

SEQ ID NO: 78306 - DNA, 530 bp, Homo sapiens; identical to SEQ ID NO: 63075

SEQ ID NO: 78307 - DNA, 1054 bp, Homo sapiens; identical to SEQ ID NO: 63076
  misc_feature (1)...(1054): n = a,t,c or g

SEQ ID NO: 78308 - DNA, 933 bp, Homo sapiens
caattaatcaagatgctgggtttcatactaatggtacaggacatggtaatttaaggccaagaaagacaaggccattgaaggccgagaatccttacttgtttctacgaggtttgccttacctagtaaatgaagatgatgtacgtgtctttttctctggtttgtgcgtggatggagtaattttcttaaaacatcatgatggccgaaataatggtgatgccatagtaaaatttgcttcatgtgttgatgcttcaggaggtcttaaatgtcatagaagttttatgggttcaagatttatagaagtaatgcaaggatcagaacaacagtggattgagtttggtggtaatgcagttaaggagggtgacgttcttaggagatctgaagaacattctccaccaagaggaattaatgatagacattttcgaaaacggtctcattcaaaatctcccagaagaacacgttctcgttcccctcttggattttatgttcacttaaaaaatctgtccctcagtattgacgaaagagatttaagaaatttctttagaggtactgatctgactgatgaacagattaggtttttatataaagatgaaaatagaacaagatatgcctttgtgatgttcaagactctgaaagactataataccgctctgagtttacataagactgttttacaatatcgtccagttcatattgatccaatttctagaaaacaaatgctgaagttcattgcacgttatgaaaagaagagatcagggtcactagagagagataggcccggacatgtttcacaaaaatactctcaagaaggtaactctggccagaaactgtgcatctatataagaaattttccatttgatgttacaaaagttgaagtgcagaagttctttgcagactttcttcttgctgaggatgtattgcgacgaaatcgtcgac

SEQ ID NO: 78309 - DNA, 909 bp, Homo sapiens
cccctcccaactcctcaggcctccgaggccgggtccagagccctcagttccttctgaaaccctggagcggaatcagaagtgcgcgtggccacagcggcgcctcctgccctttagccgccgctggcccaacggtttccccagcagtagcctctgcgaccaggtgcggcttcaggtcattttttccaggacactttctgtcttcatgacaggaacatcgagaagccaaggctagtggctgggttactgatggattactgatggattcttctcagcacttagtgacctttgaggatgtggctgtggactttacccaggaggagtggactttgttggatcaagcccagagagatctctacagagatgtgatgttggagaactacaagaatctcattatactagggtctgaattattcaaacgtagtctcatgtctggattggaacaaatggaagagctgaggacaggagtgacaggagttctgcagggagagaagcaatactgcagagaaactgtatgactctaaccattctggaaaagtcttcaatgaacacccatttcttatgactcacatgataactcacattggagagaaaacttctgaggataatcagagtggaaaagccttaagaaagaactttcctcatagtttttacaagaaaagtcatgctgaggggaaaatgcctaagtgtgttaaacatgaaaaagccttcaaccagtttccaaatcttactaggcagaataaaactcacacacaagagaaattgtgtgaatgcaaagactgttggagaacttttcttaatcagtcatcccttaagttacatataagatctcacaatggagacaaacactatgtatgtaaggaatgtgggaaagccttcagtaattcctcacaccttataggacatgggaga

SEQ ID NO: 78310 - DNA, 733 bp, Homo sapiens; identical to SEQ ID NO: 63079

SEQ ID NO: 78311 - DNA, 771 bp, Homo sapiens; identical to SEQ ID NO: 63080

SEQ ID NO: 78312 - DNA, 1268 bp, Homo sapiens; identical to SEQ ID NO: 63081

SEQ ID NO: 78313 - DNA, 489 bp, Homo sapiens
cgaagtctctcctgactcggaatcctgatgcccatcgggctgcgggtgtgggtcccactccaggggcggcaggtgctgctgggccaggcggaagtcctctaggagctcggggctggtggcattgggaaagagtctctcttcttcccagctttgtgaactacttctatccacatccctcttgtcctcggcccaggcccagcgccgccgctgggggcccttccccaggccaggctcagcccagcggatctcagtctccgagctggccattggggctggcctgggcttcacctgggccacttcatcttcaggagacagagctgctgccaggggccccagagtcaccgctggttcctgtcagcatcggccatcctgcctgtgccctctctcgggctccaccaccgtcctgccgacccagtttcaggggacctgcctgtgaattctttgttccaaacccagggagccccctgtctccattgcgccctgacgaaa

SEQ ID NO: 78314 - DNA, 956 bp, Homo sapiens; identical to SEQ ID NO: 63083
  misc_feature (1)...(956): n = a,t,c or g

SEQ ID NO: 78315 - DNA, 791 bp, Homo sapiens; identical to SEQ ID NO: 63084
  misc_feature (1)...(791): n = a,t,c or g

SEQ ID NO: 78316 - DNA, 735 bp, Homo sapiens; identical to SEQ ID NO: 63085

SEQ ID NO: 78317 - DNA, 741 bp, Homo sapiens; identical to SEQ ID NO: 63086
  misc_feature (1)...(741): n = a,t,c or g

SEQ ID NO: 78318 - DNA, 479 bp, Homo sapiens; identical to SEQ ID NO: 63087

SEQ ID NO: 78319 - DNA, 446 bp, Homo sapiens; identical to SEQ ID NO: 63088

SEQ ID NO: 78320 - DNA, 788 bp, Homo sapiens; identical to SEQ ID NO: 63089

SEQ ID NO: 78321 - DNA, 651 bp, Homo sapiens; identical to SEQ ID NO: 63090

SEQ ID NO: 78322 - DNA, 1394 bp, Homo sapiens; identical to SEQ ID NO: 63091

SEQ ID NO: 78323 - DNA, 696 bp, Homo sapiens; identical to SEQ ID NO: 63092

SEQ ID NO: 78324 - DNA, 978 bp, Homo sapiens; identical to SEQ ID NO: 63093

SEQ ID NO: 78325 - DNA, 1035 bp, Homo sapiens; identical to SEQ ID NO: 63094

SEQ ID NO: 78326 - DNA, 460 bp, Homo sapiens; identical to SEQ ID NO: 63095

SEQ ID NO: 78327 - DNA, 676 bp, Homo sapiens; identical to SEQ ID NO: 63096

SEQ ID NO: 78328 - DNA, 2580 bp, Homo sapiens
  misc_feature (1)...(2580): n = a,t,c or g
ttttttttttttggagttcattagaccttttttattattctaccttttctgcatatgtttgcagttttcccaccgactcctccataaacaaacattttcctagaaacccaaaatatgtagtggccccaaaggagctccttaagccaaagtacttggtacaaagagacccatattcctataaacatgttaagtttgttcctaagcattccagacttttagaataagaacttcatttccaacttttttatttattaacatggggctaaacttttaagaaacaaccctaggtcttctatttcccaggagctggttcaaagtcttaaatgacaatataacttcattatgaaaatatactgaaaaggtacaaggggctgatgtaaaaacggttaatcaagggttcccaggcatccatggggacttaagggtaacctgaaagaataacccccagcccaggctgcaaccagccaggccaggatgtgctggcttnacgtngatgaggtgctaaggcccatcgaatgcctcagaggaaagccggattcacgggggatcatctcaaccctgaggaaatcggttccttggggggtgatttcttgcccttttttttgtttttgtaaggaagagggttcccttcattccagtaactttagttttcccttaataaatattttcaaaaataaaaccaatcatcatccaaacaaacagggagccacttttgtagggtaagggtaaatcacaggataatgtattgggataactctgtttttttaaaataaaaaagccttacatggtcagggattgatggagtggggatgacaaatgcacatttcagactttcatcaccaatgaaaaaataaagcattttcatagacttaaaactgtcattagtgcattcggcttttggagaagggatgaaaatgtaaaatacttctacaacaataaaatgttaatagaaatcgtcatgtgctgaggtcattttaggtgagctaccattgtttgtttaaatacaagaaaaagtaatttccttggtcccaatttaagtggaaatcctttaaaaaagattgcctttaaaagaaccattatttgaggacaatgtttttccaggccacatttctgatgatattcaaattcacttcataccaatcacagattaacccttttaattccacctttccttaaaaagctgtcagatttccatttcttcgggagacatttttcacccagtgtgttgttcgattcccacaggttaagctttcttcattattattaaggaacttcataccatattagagagattgccattcattgctttcctcgtctttttcggaaaagacacaggccagacttggctagactaaagctgacgtctttaaaggcatgcaacaagaatatccccacaatgattgtaaagaagccactcaaagtaccaatgacatcgtcaacaggcatatcttgccactccttaaaaagaatagctgaacaagttaaaactgatgttgtaaagaatacataatatattggagtcacaatggaagtgttgaatatatccagggccctatttaggtaattaatctgtgtgctcacacagacgatgaggctcagcagcagaatccaagccaggggatgccgcagcacaggcttccctgcaaacagctccttgatagcaatgcccaggcccttcacacaggagactgaaaacgcgccgattacagagcagattgttatgtacacaagaatgtttgtctgtccatggcgaggacccaccacgaagattaatatcaaggccacaatgaccacaagggttgcaaagaccacaaaacctggatcacctagcttgtgagacatttcatttaaagtctcaatctcctcttcctttggagcatgaatgaccataactgtagatcctagaatacttagcaaacacccaattttcccatgaagattaagtctttcattgagaaagtatgaagaaagaatggcacttactagcacgctgagagctcctagtggagtcactagagtggctggtgcaaacgcatacgcagcgaagttggccacctcaccagctcccattgacagcagtccagcccaccacaaccattccttaagatatgcatggccaccttgacctgctctcatagagcctttcctggcaagtcgaaggaggcccttttttttcaaaatgaaacttcctccaatgaaaatgctggagctcatagccaatcccagaccaatatagaagtcatattttccacgcccctggctcatttcgtttgttacttaaggagttcctgtgaatcacattgatcacagaacagagaaaccgctggtactagaggcagaatgaagcagtcttcaaaccctagtcggccgaccggccgcgcggcttcccctcgccggcgcagccttgggcaccgcggctcacacccccacacaggccgcccagtcctgcgctcgcacggccaccgccttcgtcgccgtccagtgggagatgcgagcattcggggctgaagccgttcgcaccgcctcctccatggagaagcgccgagaaaaacctgccaaggacaacctccggcaccgccg

SEQ ID NO: 78329 - DNA, 1727 bp, Homo sapiens; identical to SEQ ID NO: 63098

SEQ ID NO: 78330 - DNA, 525 bp, Homo sapiens; identical to SEQ ID NO: 63099

SEQ ID NO: 78331 - DNA, 479 bp, Homo sapiens
gaaaatggtgcagaaagacagtgatcagagaggaaagtgaggactttctgccaaaatgcctgagggcttccctgcctacctcagccctctgtgttcttaagtcctcctgtctgaacagaggccagactctcacttcaccccagcccgtctgggtctgtcctctgcaaagccatgtggctctacctggcggtcctcctgggcctatactaccttctgcactggtactgggagaggcaggtggtgagtcacctgagagacaagtacgtgttcatcatgagctgtgactcacgcttcaggaagctactggccagacaactgaatgcacaggcttgcgggagctgcatgtaggacagagaaggggaccaagcagctgaggggccagacttcagacaggctggagacggtgaccatggacatcaccaagacagagagcattgctgcagctgcccagtgggtgaaggagtggaattccgcccccc

SEQ ID NO: 78332 - DNA, 670 bp, Homo sapiens; identical to SEQ ID NO: 63101

SEQ ID NO: 78333 - DNA, 894 bp, Homo sapiens
ctccgccccacgagcacctgtttccgagcggagagcgcgggccgttttctttcctggtgtcccgtcgcggcttgggacccggcaagatgggcaagaagggcaagaaggagaagaagggccgcggcgcggagaagacggccgccaagatggagaagaaggtgtctaagcgctcgcggaaggaggaggaagacctggaagcgctcatagcccatttccagacactcgatgccaagaggactcagactgtggaacttccgtgccccccaccctcaccaaggttaaatgcctccctctcggttcatcctgagaaagatgagttaatcctttttggaggtgaatatttcaacggccaaaaaacttttttgtataacgagctctatgtctacaatatcagaaaggacacctggaccaaagttgacatccccagtccacctccgaggcgctgtgctcaccaggcggtggtagtgcctcaaggtggcggacagctgtgggtctttggaggggagtttgcctctcccaacggagagcagttctaccactacaaggatctctgggtcctgcatttggccaccaagacctgggaacaagtcaaatcaacaggcggtccttcgggtcggagtggacatcggatggtggcctggaagagacaattgatcctgtttggtggcttccatgaaagtacacgggattacatctactacaacgacgtgtatgcctttaatctggacaccttcacatggagcaagctgtccccgtcagggacggggcccacacccagatcaggctgccagatgtccgtcactccccagggcggcatcgtccgtctatgggggctactcgaaacagagagttaagaaagacgtggacaagggcacacggcactcagacatgttc

SEQ ID NO: 78334 - DNA, 2503 bp, Homo sapiens; identical to SEQ ID NO: 63103

SEQ ID NO: 78335 - DNA, 1732 bp, Homo sapiens
aaaagagaaaagaaatgaaccagtattcttaaattgatttcaagtttgaacaaggtactgggctgctgggggatcccaagtgagcagagtctgttttctaccctcgaggagctcagagaaaaggaaatagataattactgtgtgatgagactccagacagaggggttggcatctgcacatccttcctgggcatctcgtgggcactgctcgattaccaccaggccttgcacacctgcctcccctccaagcccctcctgggcctgggctcctctgtgatctacgtcctgtggaacctgctgctactgtggccccgagtcctagctgtggccctgttctcagccctcttccccagtatgtagccctgcatttcctgggcctgtggctggtactgctgctctgggtttggcttcaaggcacagacttcatgctggaccccagttccgagtatcctctatttctcctggttcaacgtggctgagggccacacccgaggccgggccaccatccacttggctttcctcctgagtgacagcattctcctggtggccacctgggtgacttatagctcctggctgcccagcaggattccactgcagctgtggctgcctgtaggaggcggatgcttctttctgggcctggctctgtggcttgtgtgctactgctggctgcaccctagctgctgctgggagcccaaccctgaccaggtggacaggacccagagtctactttcctcagaggggtatcagctgcctcagacccagttagcacagaacttttttcccaagggtaaggctgaggctgcttcgccagtgaagggagaggtgaacggcgtcctttgaagcaggatcagacccagccagcagagatggagagtgactgctggcagaaggcaggcgaggataagctaacaatgctgctgtggcctccatgcactcagcaagagtgggatgcctctgctgggccgtgcaccagggatggtgctgagtggggcagaggcctgccttcaaggagttcacagtgaacaagatgagaagggctgggccctgcagggtcaagagccccaattacgtacaagacactttgggaggaaagaagactaccttttcttttccccctgccattggtatagctggtgccccaaaactttcacctccctccctggccacctctaaaatgattggcataggggcttccccaccccttagctcccctatcctgggctagaaggccacagggactgtcctctagaattcttcctcccctcccccacaccattcattcaattcgtgaaacaaatcttcaccgagagcagtttatgtgctaggaacatcattctatccttgcaacctggaacaagaccagctaccaccttagcttcatcccctacttgcaccaaccagtcccgggttagatctcaaatgccggaagtcagggatgcccaactctgggcagccccagtcagaacctctgggatctcagtgaagctggcctggcctctgctcttgctctcaaggggctgcttttcaaccaagagccttgtgagcctggtctgagccttgcacagccactgagtattttttattccttagccagtgtacctcctacctcagagtctatgtgagaggaagagaatgtgtgtccctgtgggtctctgcaagtgacagatgtgttgtttttaacagtattattaggttatgattaaagcctcatgaaatcctctaaaaaaaaaaaa

SEQ ID NO: 78336 - DNA, 1988 bp, Homo sapiens; identical to SEQ ID NO: 63105

SEQ ID NO: 78337 - DNA, 841 bp, Homo sapiens; identical to SEQ ID NO: 63106

SEQ ID NO: 78338 - DNA, 591 bp, Homo sapiens; identical to SEQ ID NO: 63107
  misc_feature (1)...(591): n = a,t,c or g

SEQ ID NO: 78339 - DNA, 1687 bp, Homo sapiens
  misc_feature (1)...(1687): n = a,t,c or g
gagttagaagggagctggattgagagactgtgttaggggcgggggtatggaacgtagtggaaagggcagaaatttggatctcagttcgcgcccaccccgcaggcgcctcccgcgagccgggccctctgtgagtgagacaagctccccttcctttacgcgcctcacctggcgcgtggggagaggtcggcagccctccgccgcagaacctccggaagggatgtcctctgccctgcgcctctggccggggctgtggtccctccaggccgtcgaggggatgctgaggccggtccccagaggagcatgacttggctggtccggaggagctctgagggcatgggcaatcttggctcgctgcaacctcagcttccagagttcaagcgagtctcctgcttcagcctcatgagtagctgggactacagatgcgtgccactacgtccgtctgatgtttgtatttttagtagagacagggtttcaccatgttggtcaggctgctctcgaactccagatctcgtgatccgcccgcctgggcctactaaagtgctgggattacaggcgtgagctagatctgactttctagtgtcctagccttggcccgatggacatgtcatttctctcagctcgtttctgtcccctaaagtgagaatattacctgggaagattacattagacgatgtatatgcgaagacacttgatagctggtattgtcatgattctgattagttcactactgctactttccctgtggcctaggctttgcctatttccagtgggcgagctagctagatcctcctcccttaaataagccagtgtttttaagacagaatactacttgcatagtggacaataatatcttaaagaactgagcaggatgaaaagaatttgatagaaagcaggtttgaggagcacattggaggttggcaggtttcgaggctgcttgagaggacttgggccgatctgggctgggcttggacgtgaccctggcacccaggcaggtggatcccagctggggcttccattcacgactttctggtccctggcaggacagagcgggatgccaccagcttgtccaaagggaagttccaggagctcctggtgggcatcgttgtggagaatgacgctggccgcggcgagatcaacgagttgaagcaggtggaaggggaggcttcgtgcagcagccgcaaaggaaagctgattttcttctatgagtggaacatcaaactgggctggaaaggcatcgttaaagaatctggagtgaagcacaagggattgattgaaatacccaatctttctgaggaaaatgaagtagatgacactgagaatttacaacgggaatgattttaccaacgaaagctatggcaacccaggaattgactgtcaaaagaaaactgagtgggaataccctgcaggttcaggcctcatctccagtggcactgggtgtaaggattcccactgtggctcttcacatgatggaactgtttgacacaactgtagagcagctgtatagcatcttcactgtaaaggaggtaagtaactccctaagctagcatgttaagtgctgacattgggagaaaatacattacaaagaacaggagctggtttttggttttccttgtggctgtgtttttgattgaagggatgtgggatggtggtgacagaagtctgagcatagnttctgaataattggagg

SEQ ID NO: 78340 - DNA, 1215 bp, Homo sapiens
  misc_feature (1)...(1215): n = a,t,c or g
caacttcgatctcncaggctcaagcagtcctcccacctcagcctcccgagtagctgggactgtaggtacataccacaaagcccagctaatttttttgttaatttttgtagacagggtctcactatgttgcccaggctggtctcgaactcctgggctcatgtgatcctcccgcctcagcctcccaaagtgctggaattacaggcatgagccacctcacctggcccataataatgttttgatatatatagtgtatgcagtaacaggtattctatttgtagttgttaggatgtttaaggttagctgatttaacaaacaaccgtaaaatcttagtagcttaatacaacaggttgttacttacataaagtccaaaatgctttatgtaagtccaaggataattctcagcttcctgcagccagtgagtgaagggagaaagagtaaggattatggaggacatttcaggctgagtctagaaatgggctgtgtcccttctgcacccattccattggcccaagaccagtcacatggcctcaacttcactgcaaggagacctgggaaatgaagtcctcctgtgtgcatggttctgtaggccagaagtccaaaatcaaggtgtcaccagggccacactccctccagaggctttgagagaaaatcagttctttgcatcttccatctcctggtggctccaggagttccttggcttgtggctgtagaactccaatttctgtgtctaccatcacatggtgctctcctcttctgtgtcttctcctctgtgtgtttcttagaaggacacttgtcagccgggtgcggtggctcacgcctgtaatcccagaactttgggaagcccactaggtgaagatgtcagcccaggagagctgcctcagcctcatcaagtacttcctcttcgttttcaacctcttcttcttcgtgagttgcctcatggctacccagacggggcccagcccctgccgctaacccagccctcatcttcccctgtggcccacccccgtatccgcatctcctctccccaggtcctcggcagcctgatcttctgcttcggcatctggatcctcattgacaagaccagcttcgtgtcctttgtgggtgaggggggctggggcaggtgggagggcctcccccaacccaagcaacttcctggggtctcccttgtctcagggagacctacggtgccctactctgcaggcaggctacaggctc

SEQ ID NO: 78341 - DNA, 4654 bp, Homo sapiens; identical to SEQ ID NO: 63110

SEQ ID NO: 78342 - DNA, 768 bp, Homo sapiens; identical to SEQ ID NO: 63111

SEQ ID NO: 78343 - DNA, 963 bp, Homo sapiens; identical to SEQ ID NO: 63113
  misc_feature (1)...(963): n = a,t,c or g

SEQ ID NO: 78344 - DNA, 432 bp, Homo sapiens; identical to SEQ ID NO: 63114

SEQ ID NO: 78345 - DNA, 784 bp, Homo sapiens
ctccaagactcctgcaggagcctgccttcctgggcaggctcagccaaaagaccaactcaaaactcttttgtcagagcaagcttagggagagccacccagccccgagtgccacaaccctcccagagcaaccgtggcccatgtcacccccgcctctcagtgaactttggcagggtacctcccgttatctcctttgctcaaaagaaagtgaccttcttccaggtggcaagctggaagctttggggaatcctcctactgttcgctctcagcaggattctccaaacctgggatctcaaggtcggggtgggctgccttgcggagcaggggagggaagaagggcaggttctgctgggtttccacctcagtgcagaaaccccaccaaaaactcctccgggcagcctggctgtctgctccaactgctctgctgggtatggcgaggaggcgccaggagacacagctgctgagggggccgcggctgcaggcgctgcaggggacggagtggagccgttcccgggggcagagggaagaggctgcagtcgtccagtcccagagccccgagatggcctgtggctgagggagcaggtgggcccgggggaggtggcgggccgagagcggagctgcggcctcgggatcacagcccagtcccagtcccagtcccagtgtgggtgtacggccgaaacgcccggaggcggcggggagaggggagcagcttcagcctagtcgcaggagcgcggtccgagcctcgagctattggggagaggggtccacgcgtccgccctcgcgtccg

SEQ ID NO: 78346 - DNA, 1236 bp, Homo sapiens; identical to SEQ ID NO: 63116

SEQ ID NO: 78347 - DNA, 589 bp, Homo sapiens; identical to SEQ ID NO: 78130

SEQ ID NO: 78348 - DNA, 1577 bp, Homo sapiens; identical to SEQ ID NO: 63118

SEQ ID NO: 78349 - DNA, 1266 bp, Homo sapiens; identical to SEQ ID NO: 63119

SEQ ID NO: 78350 - DNA, 979 bp, Homo sapiens; identical to SEQ ID NO: 63120

SEQ ID NO: 78351 - DNA, 403 bp, Homo sapiens; identical to SEQ ID NO: 63121

SEQ ID NO: 78352 - DNA, 1118 bp, Homo sapiens; identical to SEQ ID NO: 62725

SEQ ID NO: 78353 - DNA, 361 bp, Homo sapiens; identical to SEQ ID NO: 62726
  misc_feature (1)...(361): n = a,t,c or g

SEQ ID NO: 78354 - DNA, 556 bp, Homo sapiens; identical to SEQ ID NO: 62727

SEQ ID NO: 78355 - DNA, 392 bp, Homo sapiens; identical to SEQ ID NO: 62728

SEQ ID NO: 78356 - DNA, 356 bp, Homo sapiens; identical to SEQ ID NO: 62729

SEQ ID NO: 78357 - DNA, 543 bp, Homo sapiens; identical to SEQ ID NO: 62731

SEQ ID NO: 78358 - DNA, 352 bp, Homo sapiens; identical to SEQ ID NO: 62732

SEQ ID NO: 78359 - DNA, 339 bp, Homo sapiens; identical to SEQ ID NO: 62733

SEQ ID NO: 78360 - DNA, 385 bp, Homo sapiens; identical to SEQ ID NO: 62734

SEQ ID NO: 78361 - DNA, 460 bp, Homo sapiens; identical to SEQ ID NO: 62735

SEQ ID NO: 78362 - DNA, 689 bp, Homo sapiens; identical to SEQ ID NO: 62736
  misc_feature (1)...(689): n = a,t,c or g

SEQ ID NO: 78363 - DNA, 699 bp, Homo sapiens; identical to SEQ ID NO: 62737
  misc_feature (1)...(699): n = a,t,c or g

SEQ ID NO: 78364 - DNA, 383 bp, Homo sapiens; identical to SEQ ID NO: 62738

SEQ ID NO: 78365 - DNA, 373 bp, Homo sapiens; identical to SEQ ID NO: 62739

SEQ ID NO: 78366 - DNA, 411 bp, Homo sapiens; identical to SEQ ID NO: 62740
  misc_feature (1)...(411): n = a,t,c or g

SEQ ID NO: 78367 - DNA, 371 bp, Homo sapiens; identical to SEQ ID NO: 62741

SEQ ID NO: 78368 - DNA, 176 bp, Homo sapiens
gcaaagatggtaaacgtacctaaaacccgaagaaccttctgtaagaagtgtggcaagcatcagcctcacaaagtgacacagtaagaagagggcaaggattctacgtatgcacaggaaagtaggcgttatgatcgaaagcagagtggatatggtgggcagacaaagccaattttccg

SEQ ID NO: 78369 - DNA, 333 bp, Homo sapiens; identical to SEQ ID NO: 62743

SEQ ID NO: 78370 - DNA, 345 bp, Homo sapiens; identical to SEQ ID NO: 62744

SEQ ID NO: 78371 - DNA, 389 bp, Homo sapiens; identical to SEQ ID NO: 62745

SEQ ID NO: 78372 - DNA, 438 bp, Homo sapiens; identical to SEQ ID NO: 62746

SEQ ID NO: 78373 - DNA, 1781 bp, Homo sapiens; identical to SEQ ID NO: 62747

SEQ ID NO: 78374 - DNA, 374 bp, Homo sapiens; identical to SEQ ID NO: 62748

SEQ ID NO: 78375 - DNA, 383 bp, Homo sapiens; identical to SEQ ID NO: 62749

SEQ ID NO: 78376 - DNA, 357 bp, Homo sapiens; identical to SEQ ID NO: 62750

SEQ ID NO: 78377 - DNA, 513 bp, Homo sapiens; identical to SEQ ID NO: 62751

SEQ ID NO: 78378 - DNA, 348 bp, Homo sapiens; identical to SEQ ID NO: 62752
  misc_feature (1)...(348): n = a,t,c or g

SEQ ID NO: 78379 - DNA, 347 bp, Homo sapiens; identical to SEQ ID NO: 62753

SEQ ID NO: 78380 - DNA, 353 bp, Homo sapiens; identical to SEQ ID NO: 62754

SEQ ID NO: 78381 - DNA, 793 bp, Homo sapiens; identical to SEQ ID NO: 62755

SEQ ID NO: 78382 - DNA, 353 bp, Homo sapiens; identical to SEQ ID NO: 62756

SEQ ID NO: 78383 - DNA, 460 bp, Homo sapiens; identical to SEQ ID NO: 62735

SEQ ID NO: 78384 - DNA, 361 bp, Homo sapiens; identical to SEQ ID NO: 62760

SEQ ID NO: 78385 - DNA, 342 bp, Homo sapiens; identical to SEQ ID NO: 62761

SEQ ID NO: 78386 - DNA, 339 bp, Homo sapiens; identical to SEQ ID NO: 62762

SEQ ID NO: 78387 - DNA, 333 bp, Homo sapiens; identical to SEQ ID NO: 62763

SEQ ID NO: 78388 - DNA, 314 bp, Homo sapiens; identical to SEQ ID NO: 62764

SEQ ID NO: 78389 - DNA, 318 bp, Homo sapiens; identical to SEQ ID NO: 62765

SEQ ID NO: 78390 - DNA, 329 bp, Homo sapiens; identical to SEQ ID NO: 62766

SEQ ID NO: 78391 - DNA, 341 bp, Homo sapiens; identical to SEQ ID NO: 62767

SEQ ID NO: 78392 - DNA, 343 bp, Homo sapiens; identical to SEQ ID NO: 62769

SEQ ID NO: 78393 - DNA, 352 bp, Homo sapiens; identical to SEQ ID NO: 62770
  misc_feature (1)...(352): n = a,t,c or g

SEQ ID NO: 78394 - DNA, 717 bp, Homo sapiens
caagatcatcgcacccccagagcgcaagtactcagtgtggatcggcggctccatcctggcctcactgtccaccttccagcagatgtggattagcaagcaggagtacgacgagtcgggcccctccatcgtccaccgcaaatgcttctagacggactcagcagatgcgtagcatttgctgcatgggttaattgagaatagaaatttgcccctggcaaatgcacacacctcatgctagcctcacgaaactggaataagccttcgaaaagaaattgtccttgaagcttgtatttgatatcagcactggattgtagaacttgttgctgattttgaccttgtattcaagttaactgttccccttggtattaacatgtcagggctgagtgttctgggatttctctagaggctggcaagaaccagttgtttttgtcttgcgggtctgtcagggttggaaagtccaagccgtaggacccagtttcctttcttagctgatgtctttggccagaacaccgtgggctgttaacttgccttgagttggaagcggtttgcatttacgcctgtaaatgtattcattcttaatttatgtaaggttttttttgtacgcaattctcgattctttaaagagatgacaacaaattttggttttctactgttatgtgagaacattaggccccagcaacacgtcattgtgtaaggaaaaataaaagtgctgccgtaacc

SEQ ID NO: 78395 - DNA, 1522 bp, Homo sapiens; identical to SEQ ID NO: 62771

SEQ ID NO: 78396 - DNA, 392 bp, Homo sapiens; identical to SEQ ID NO: 62772

SEQ ID NO: 78397 - DNA, 1367 bp, Homo sapiens
ttttttttttttaagatagaaagtgactctgctaagtttatttcaaacaagggacacttgaagttagtttttcacccctatgacaaagaacacacgtgagctcacaggccctctatgcttctccccttctggaacagaagacctgctctagaactcattttaaggggctgatctgaggttcttcccataagcagtgactacagctaatcccattaaatgcttcccagaaagcacttctaaaactggatctccaatttagactttttccccgatgggtccaaaggaaggatgagtggaaacatgaagactattctttctcctgaggcagaatcaagaatttaagccattgtgcaatccaatccaagatatcctccaagtccaaagccatgtccagattctctcctctccaatccaagaaaaaaggagattaacaggggtatcctcttagacacaattcctcttgatggagctgagtatttttgtgactgggctgggagatagaaatggggaaagagagtttggttactggctattgaaagggcttctttcctaagtgggatctttgatgtttgtcaaggctcgagctccagctgaaacttttcccacagtgcgaacatttataaggtttctctccagtgtgaaccctctgatgtctattaaagtttgatctctgaatgaaacttttctcacagataggacatttatagggtttctctcctgtgtggattttctcgtggtggcgcaatcctgagaagtcactaaagcctttcccacagtaatcacatttacagggcttctctcccgtgtgagttctctgatgcttcacaaagtctgaactccgcagaaaggcttttttgcagatggtgcactgaaagtatgtctctccggtgtgagttctttggtgaaaaataagctgagaattcctataaaaggtcttcccacactccctgcaggtggggagcttctgggccatgggggctcttggctgccccttctgggaggtctctctcttctcctcaagccacatggtggacatttctcctgaatgaggattaggcaaatgctgacctagttgtttctcagaaatcctttcttgaggagacagctgttcccctgttccctcatcctgaatgttttgcagagcctcagggagattctctccttctccaaagcatcctggctcatcctcagtgaagaagcccctcaaggaagcctgagaaggaacctctcctgaagcttgacaggaagcatgcaggagctcctggtccctgtgattctccaaatttaggttctccttgtcattctcttgtctatctcctatgcaggtgggtcttgggatcttctcattgacatgaaggtatattcct

SEQ ID NO: 78398 - DNA, 1156 bp, Homo sapiens; identical to SEQ ID NO: 62773

SEQ ID NO: 78399 - DNA, 1266 bp, Homo sapiens; identical to SEQ ID NO: 62774

SEQ ID NO: 78400 - DNA, 1295 bp, Homo sapiens
tttgtgtcacttaggatttattataacactaacaacaataacagagaaaatatacactgatacgacttataagacattacattcttttatctttggatttatttttttaatctaaggaatgaagactttgaaattcagttaggaggtccaaaaggtgggaaagggaaaggcttaggaagttctaaaacatgatatgtgagtagtatgattattaattatcttaatgaagaagaaaacagaaaaactgttaaagaactcaatgtggctaaggagaaagattgctccgaaaaaaaagggttcccccccaaacagccgatgcagagaggaacacacagagaggaggtgaaatgtgcagctggagcctctaaaagtgccccaaacaagccaaacacacacaccacctagaccaagagaagacataagaccaactaatgcgtatcccaagaggcattccaaggagaaagaaaaaggaagtgttaagcctacggaattaatcagactggtaggaggacgaaaaagcagaacaattctccatatcagaaaactaatatacaaacaggaaaggtcaacaaatacaacccccatggcttttttaatgttgataagaagtaagtccagaattctcattttatttctcatccttgagagaaaacattttccacaaggcaggtcaagattttatatgtttatttgtggttagaaggaaacgaaaactaataagaaagaacatagttaagagagagctgaacatgaaatgggtttattattgtcatttgaaaaggaactaataagtaaatattgttttacttatttctcagttttaatttctgatatggtaagcattaatacaatccacataagcaagaattcttcggagtcctcaataagtttttagagtttcagggggtcatgagactgaaagttgacaaccaccgtccttaaataaagacaactttacacccaccctaacaaacattaaaaacaaacaagattccaaaggatcaagtcgacccaatagtaactcaactgcctgccaaaacacacctcaatgctctttgaactttaggacaaggaatattatcagcgataaagatggagatttcataatgatgaaagaattatgtcattaaaaatacataataatccttagcatatttgcatataattatacagcttcaaaatacatgaagcaaacctgacagaactaaaaagagaaacaaaaaactataattatatttggagatttcaacaatcatctttcccttgttgatagggcaaaggccaaaaaaaaaaaa

SEQ ID NO: 78401 - DNA, 931 bp, Homo sapiens; identical to SEQ ID NO: 62776

SEQ ID NO: 78402 - DNA, 641 bp, Homo sapiens; identical to SEQ ID NO: 62777

SEQ ID NO: 78403 - DNA, 469 bp, Homo sapiens; identical to SEQ ID NO: 62778

SEQ ID NO: 78404 - DNA, 1300 bp, Homo sapiens; identical to SEQ ID NO: 62779

SEQ ID NO: 78405 - DNA, 574 bp, Homo sapiens
ctgttctactcagcccttggtgatttcacagcactttcatatgcaatctgtttacagctatgttattcacaatagcaaaaagttggtggtggtgcatgtgggtgttgaccgggctgggccaagaagcctcctccgggcaggctgccaggctctcactgtggctgtggctctgtatgggacagagacggggctgagctggccgggctgtgggcagggtggagggccaccagccaaaggacagttggaggaatcgagcttcatgctgtccttctcttctgcctctgatacagaatttgatgttgtggttggatatatagtacacattatcatggatgacatgttccggttattatagagaaattttgtggacaagtattaccaggagtttgaagacatggaagaaaatcaactcacctacatgcctgctttttgataaataatatttgtacatattattgaagtagatgtgacatttcattacgtgcatagaatgtgtagtgatcaactcagggtatccaggatacccatgaccttgagtatttctcatttctatgtgttgagaacatttcaaatc

SEQ ID NO: 78406 - DNA, 670 bp, Homo sapiens; identical to SEQ ID NO: 62782

SEQ ID NO: 78407 - DNA, 680 bp, Homo sapiens; identical to SEQ ID NO: 62783

SEQ ID NO: 78408 - DNA, 1178 bp, Homo sapiens; identical to SEQ ID NO: 62784

SEQ ID NO: 78409 - DNA, 1421 bp, Homo sapiens; identical to SEQ ID NO: 62785
  misc_feature (1)...(1421): n = a,t,c or g

SEQ ID NO: 78410 - DNA, 406 bp, Homo sapiens; identical to SEQ ID NO: 62786

SEQ ID NO: 78411 - DNA, 392 bp, Homo sapiens
atatctttttaaaaatggtttctgcttttcctgaacatgttttcagaatttaaaattgtatatggaaaacaaattacatgaaagatttgagcatttcaaaattttaaacataaaagcataaacgtagataaaatgaaggtgtactatgatatcttcagttttatcagaaatgatgtaaaaattacaacctctttaaaaagtagtgttaatcattaagttagaaaatatatagctgggcatggtggcagatgcctgtaatcccagctacatgggaaggtgaggtgggagaatcgcttgaacccaggcagtggaggatgcagtgagccaagatcatgccactgcaccccagcctgggtgacagaacaagactccatctcaagaaaaaaaaaaaa

SEQ ID NO: 78412 - DNA, 1046 bp, Homo sapiens; identical to SEQ ID NO: 62789

SEQ ID NO: 78413 - DNA, 965 bp, Homo sapiens
agggagaagaagctggaaaactgccttctaactaactggctgatcccataatgtatcctgaagtggccatcttaagcctcatcctacatatggcagattctgtagctggttctgtaaaggttggtggaatggcaggtccgtttatcacggtaccctgccactacaatggagctgtcacatccatgtgctggaatagaggcgcacgttctttattcacatgctgaaatagcattgtctggaccaatggaacccacgtcacctatcggaaggacactcactataaggtattgggggccctttcaagaagggatgtccctttgactatagaaaatacagctgtgtctgacagtggcttatattgttgccatgttgagcacagtgggtggttcaatgacatgaaaatcactctatcattggagattgtgccacccagggtcacgactacaccaattgtcacaactgttccaaccgccactactgtttgaacgagcatcactgttccaatgacaacaagcgttccaacgacaacaactgttccaacgacaaagactgttccaacaacaacgagcatttcaatgaaaacaagtgttccaatgacaacaatggtctctacctttgttcctccaacgccattgcccacgcagaaccatcaatcagtagccacttcaccatcttcacctcagccagcagaaacccaccctatgacacttcagggagaaataaggacacaacccaccagctcaccattgcactctttcacaacagatgggaatgacaccatgacagagtcttcagatggcctttggaataacaatcaaactcaactgtccccagcatatagtccacagatggtcaacaccactaaaggaatctgtgctggagtctgtatttctgtcttggtgcttcttgctcttttgggtgtcatcattgccaaaaagtatttcttcaaagaggagactcaacaa

SEQ ID NO: 78414 - DNA, 1012 bp, Homo sapiens; identical to SEQ ID NO: 62793

SEQ ID NO: 78415 - DNA, 472 bp, Homo sapiens; identical to SEQ ID NO: 62794

SEQ ID NO: 78416 - DNA, 377 bp, Homo sapiens; identical to SEQ ID NO: 62795

SEQ ID NO: 78417 - DNA, 981 bp, Homo sapiens; identical to SEQ ID NO: 62796

SEQ ID NO: 78418 - DNA, 733 bp, Homo sapiens
tgcagagacatggctgcatttattgttcccagcccggcgagaaggtgttcccagaaaggttccttgggtcacctgcccacccagccttggctctgggctgccatgtccccacgggggcaggagagaggcacaagtcacagtcaggcaagggagcctcagcgtcctgggcggtggctgttggggtccctccagtcttcacctgggaccctcggccaggctgggacagcatccaggaggcgaggctgcatggtccagcggtgggtgcaggtggcaacaggtcggcgggctgtgcaggttccaaaaggagctctcgggttggcactgggtgagaccagccccggggccagcaggggaatgagcggtggagcagggggttgctgggcactggggtgggccccatctcctgtccttccctcatggctgctggaagggccgcctccctggctcagcatcatctcagattccgggactcaaagaccgtctcctcgtcgctgtccagcgaggccatctccgtggggtcctcagtgttggcgaggaggccgtatcgcctccgctgaggcttcttcaacctaaacgcccggatcaggaagtagagcgcggtcaggccgcagaagcccaggatcacgtagaaggagcgcgtcagcgccgagcccgacgcccccgacggacgcgtgtgcgtgaagttgtgtggcgcgcccggctggctcccgttcgtcacggccggcggcggcga

SEQ ID NO: 78419 - DNA, 708 bp, Homo sapiens; identical to SEQ ID NO: 62798

SEQ ID NO: 78420 - DNA, 1668 bp, Homo sapiens; identical to SEQ ID NO: 62799

SEQ ID NO: 78421 - DNA, 1238 bp, Homo sapiens; identical to SEQ ID NO: 62800

SEQ ID NO: 78422 - DNA, 1610 bp, Homo sapiens
ggaatactgggtcgacccacgcgtccggacgaaatggacatgacttgggagaagcgggttgcgttcggcggcggcggcggcggcggcggtggtggttgtggcgaggctgtgcggcagggcgcacgggacctgtcctgcagcggctctctcaggccgtgggtcgtcgctgcagctgccgggaaagaaggaaacgacgactccgggggcgaacttggcacacagggaggaagggaaaggatgcatggtcatggaggctatgattctgattttagtgatgatgaacactgtggagaatccagcaaaaggaaaaaaagcgaactcttattttcttcttaatatatcaggacagttgaagacgacttactgctccaaaaaccatttcagaaagaaaaacatggaaaggtggcccataaacaagttgcagcagaattgctggatagggaagaagcaagaaatagaaggtttcatctcatagctatggatgcttatcaaagacatacaaagttcgtaaatgactatattttatactatggtggcaaaaaagaagacttcaagcgtttgggggaaaatgacaagacagacttggatgttatacgagaaaatcatagattcctatggaatgaggaggacgaaatggacatgacttgggagaagagacttgctaagaaatactatgataaattatttaaggaatactgcatagcagatctcagtaaatataaagaaaataagtttggatttaggtggcgagtagaaaaagaagtaatttcaggaaaaggtcaatttttctgtggaaataaatattgtgataaaaaagaaggcttaaagagttgggaagttaattttggttatattgagcatggtgagaagagaaatgcacttgttaaattaaggttatgccaagaatgttccattaaattaaatttccatcacaggagaaaagaaatcaagtcaaaaaaaagaaaagataaaaccaaaaaagactgtgaagagtcatcacataaaaaatccagattatcttctgcagaagaggcctccaagaaaaaagataaaggacattcatcttcaaagaaatctgaagattctctacttagaaactctgatgaggaagaaagtgcttcagaatctgaactttggaagggtccactaccagagacagatgaaaaatcacaggaagaagaatttgatgagtattttcaggatttgtttctatgagacgagagagagaagcctccgctccttaatgtgaaacttcatgaagttttaaacttcatgcaatttgaaattccatataagtttttatctgcaagttacagcttgtgtggtttgtctttggaaataaaaatccaggttctctcagaatgtcagaggctttggaagttcattagttcaattaaagactttcctgtcctttaaatatcttttcaattgcttatctacaattctgttttatttgtagctcctagaggatagagctggacagattccattgttcctacattttgtaggttttttttcactgccttcattatgtatcttctcttgccttcattattttattttattatttcttctttttctcttttttagagccaccaatactggatttg

SEQ ID NO: 78423 - DNA, 717 bp, Homo sapiens; identical to SEQ ID NO: 62802

SEQ ID NO: 78424 - DNA, 1219 bp, Homo sapiens; identical to SEQ ID NO: 62803

SEQ ID NO: 78425 - DNA, 643 bp, Homo sapiens; identical to SEQ ID NO: 62804

SEQ ID NO: 78426 - DNA, 460 bp, Homo sapiens; identical to SEQ ID NO: 62735

SEQ ID NO: 78427 - DNA, 1681 bp, Homo sapiens
gttttgtttggttggttttattttgacattgttaaatttagcttagaggctgacacataaatgttgattaaatgatagaaatacaaaacatatataccaatacagttaaatgtaacagtcacagcacatataccaaacaacgaattcatcacagatatgtacacagatgtgcacaacacacagatgtgccacccctatctgccaagggctcacaaataaatgggagaaacagattccaaaacagatcatggtaatggaatggggtgagtacaaagagaggtccagggtattttggaagtcctgtggaggatgcccagtgtggatgtatgtgttgaggggatgagtagcccaggaagagaaaacctaagcaaaagatggaaggagcaagatagcagtgtttcagaagagctgggcgggagcttgggaggcaaccagaagaataaatgtgtttgcctggcaggatatgaggctgtgcagagaggcaggggccttgttaagaagctatgctctggaccaaggtctccagggagtcactgagggtttaaacaggaccatgacctgaacagaaatgtctaagattcctcggatgctatgaggtgggtagcctggaaaaggagatgaggcagggagactagaaacccaacacatgtacacagtatacccaggaagtacctagggcccctgaggcccacagatgcccccacaacacccttactagacacagccaggctggaggaccacagtgattcaacctggggagtgacagctggaggcccatggggccaattacccactgtgggcttgggcctctcccaggcttcctcccaggcttccctggcctggagaacagtgtggattaacagttgagatcctccatcctggagcctgctccccatcccacaagaggacacaaccatcagctctccctagcaggctcctttcctcagggctgccctatcaccccctcaaacccccacaacctgcccccaggtctggttccagaaccgcagagccaagtggcggaagcgcgagcgttatgggaagatccaggaggggcggaaccccttcacggctgcctatgacatctctgtgctgccccgtactgacagccaccctcaggtaagaccccagccctacctgaaccaggacctggcagggtcaccaaaaagaatatgaggtctggcctgaagaaacctggagagcgtcagcgttctgtatgacagtgggtacaccacttcacttctttctctgcaaaccggggctcttgcctgtctcatgaatgacgcatgcggaacacaaaggaatcacagaagaaaatttcgttttgagaacagtggcaggggcctcctgagatgccactgccagtgttgggggtgagagggggtagatctgagccaagtggaggtttcctggaaagtttctggggccccaaggacaaagagaaagcccctgggtagggaagtcagctcctgaggctacaggctcatgggccttctttccctctcttttcagctgcagaactccctgtgggccagtccaggatctgggagccctggaggcccctgccttgtgtctccagagggcatcccctccccatgcatgtctccatattcccacccccatgagagtgtggctggcttcatgggggtgccagccccttctgcggctcaccctggcatct

SEQ ID NO: 78428 - DNA, 1699 bp, Homo sapiens; identical to SEQ ID NO: 62807

SEQ ID NO: 78429 - DNA, 794 bp, Homo sapiens
  misc_feature (1)...(794): n = a,t,c or g
cctgntcccccggagtcactgtnagttggggtgactgnaaggcaagcagcaagctgggccccatgctgctctccacctccacacctgatgaggcctggtccccggagtcttcatgcctgcttttggtggcccctggggtctggctgctgctggtgagagaaaagtcacggacctgaggcttggcttcttcttggganccattcacagggagcagntcctcctcttcctcnacntcttgtttctctacctcttccttctccctctcctcctcttcctcttcctcttcttcctcctctctgggaggcatatgccagggaggctcaaccagattcatcttgggcaagggagaggggaggtttggcagctcttgagcctggctggtgtcttcaatggaacctgccttctcagttaagtcaggaaaaacataatctgcagtgggtcccaggtccagacttgagtcattcagctcttcctcctcttcccagaagtactgtggtggctgcagaatccgagactcttcattctcttcgctggggaagcctgagccaggggctcccagcccagctcccaggcccatggtctcactaggctcctctgagtccagtggctccaagccagtgggcagcaggaggtctagcagggaggtggaggtgaggccctctgggccaggctcatcagacccagccacacaggcacccaggaacgctcccccaaccagcagaagcagcagcggcgaaagcagcggcggcagccgggcggcccgcagcagccggcccatggtgtagccgacgaaa

SEQ ID NO: 78430 - DNA, 660 bp, Homo sapiens; identical to SEQ ID NO: 62810

SEQ ID NO: 78431 - DNA, 581 bp, Homo sapiens; identical to SEQ ID NO: 62811

SEQ ID NO: 78432 - DNA, 449 bp, Homo sapiens; identical to SEQ ID NO: 62812

SEQ ID NO: 78433 - DNA, 710 bp, Homo sapiens; identical to SEQ ID NO: 62813

SEQ ID NO: 78434 - DNA, 1071 bp, Homo sapiens; identical to SEQ ID NO: 62814
  misc_feature (1)...(1071): n = a,t,c or g

SEQ ID NO: 78435 - DNA, 414 bp, Homo sapiens; identical to SEQ ID NO: 62815

SEQ ID NO: 78436 - DNA, 577 bp, Homo sapiens; identical to SEQ ID NO: 62816

SEQ ID NO: 78437 - DNA, 940 bp, Homo sapiens; identical to SEQ ID NO: 62817

SEQ ID NO: 78438 - DNA, 466 bp, Homo sapiens; identical to SEQ ID NO: 62818

SEQ ID NO: 78439 - DNA, 578 bp, Homo sapiens; identical to SEQ ID NO: 62819

SEQ ID NO: 78440 - DNA, 539 bp, Homo sapiens; identical to SEQ ID NO: 62820

SEQ ID NO: 78441 - DNA, 682 bp, Homo sapiens; identical to SEQ ID NO: 62821

SEQ ID NO: 78442 - DNA, 743 bp, Homo sapiens; identical to SEQ ID NO: 62822

SEQ ID NO: 78443 - DNA, 1719 bp, Homo sapiens
  misc_feature (1)...(1719): n = a,t,c or g
tgattttacaataacattatcatctgcagttactgtttacaagactgcttttaccttaaactttgtagatgtttacatctttttgttgtgttttaagatgatgttggtaatttgtgcctttagctctgttttattagacagagttaaagcatgttgtcttctttgggattacactcaggggtctgaaaggcagtttgatttttatttttaacacacttgaaaaaaggttggagtagccagactttcatatataacttggtgattatcaacctgttgtgtctttatttaattttacatctttttgaagcactgccacaggttattagccaaggtggccttccttcacagtcatgctgcttttttgaaaggtgaatttcaacacatttagtgcctctttcatttctcagtatatatttcaagagcttgtgatgaaatctataggatggtaatgatggacttgtcacctgtatggggaatacttttactactcagaaatgaatttatgtgctgccatttgctataaagttgaactttgtatggcttgaaaaagaaatgacaatatggaacatcccaaggctgtcccatagggttggaagttgtgtagcattcactcccttacctactggcattcccagtgccctctgtccatacctacttctaggattgcaaaggagtcttccaactagagaaaaattgtccactgacatttgggatttacttttctccaatacctgccaatacagaaaactattatcagttgttattgttatcccttgaaagcgagggtgacaaaaacaacaaaacaccgttataaacacatcaaaggttcattctgactgaggtaagactttccaagcccttgttagattaggccttataaaacttgtgtgcattataacctaagctgtgcaacctgtgaagccaagagtgaactgatgtttcatttatattttcatccaaatgacattatctgcacgtttttaaaatttaaaaacaaaggactatttaaaaatacagtttattaacaaacgtgaactactttctgttacattaggtgttccctagtgtttcttaatttctttttagaaagtgtatttttattagtatttttccggtgaacagaagatttgtttggatttaaacatttactaagacagtacctattaggaaaaccaaatattgcaaatggtcaattcgattttaatttctcaaaagatactctgttatccagaagattaaaatgcctacattgagtgcttaaaaaaaaaaaaaacaactgtgatgatgtgaccaaaacggcaaggaagttaagcatttttgatcctgtaatcatggnatcattacaatgaaaggnattcacaaactactgccagaggaagtttgttttttaatttaagagggaaatataacctataaatttgtttcttccaagcttagctcttaaatttggagactcaaagttaaacatcctcaacagagttttatttataattttgaattgncaatttgtattttgctactgatctgtgatcaaccattttaactttcatctntagggatgtttaacatttattattgccaaataaacccacttttaaaaaagaaacttagagagaaattgggacctttaattaccttgnggggtttgccaaaaaaggctccatttttccatnttggaggaggaattttaanccttttttnacctttgccctttnggcc

SEQ ID NO: 78444 - DNA, 1038 bp, Homo sapiens; identical to SEQ ID NO: 62823

SEQ ID NO: 78445 - DNA, 676 bp, Homo sapiens; identical to SEQ ID NO: 62824

SEQ ID NO: 78446 - DNA, 1323 bp, Homo sapiens
ttttttttttaagactaagagtcagtttaatgtattatttctagtgcatttttttcctcgccaagaataaaacggaaggtgagaataataaaactaggagactgaagtacataatgcaaaatacatacaaatctacatataatcctaatatgctgagagagcttcttaatgaaaatgatttcattctgagttactgctagtttgatgcaaatgcagtatgtaccatggcccacaaccctgtggtttcaagtaggtagagtatatcttgagaagttattctttgttaagatttatatctcagagtcaagcatgccttggtggcaacaatcattattctcaatgcaggtaattcaaaccaaggaaaagacactgtggaaaactacaaaatatttactctgcctaatgtagcaactcctactgaaaaacatatatgttgcatatttatgagttgtagcccacggttgtggaaaattcactacagaataaaaccaaatactgcatgatacgtttagtatacaacatgccatttctgctcagtacaagaaaaatctactacccagcccccagcagacactaggactaacggcctgatagcagcaatgtggcaggttgttctttttttttttctgctccaaaataaaaattagaatagtagcatcgttgaatatcccaattaaaacccagtccaattcaaaattcatcttcagagctgtcggctaagagcattactcgatcttgcatgctgttgaattctctctgctttcttttatgccttttgaagccatttctccttcggcgattcataaccttaatgctgtagagggctcccaagatgaacaaggctccagctatcccaacccctacaggcaccagcatcccagacatgtaaccagccttgtcttttaatttttccatccagcttctcaccaggccttgattctgctgttcccactcgagggcatctggcacctggtaggtagctccctccaacaggtccatgtttccctcctctaagcctggttcctgggatgtgataccagggagggtaaaacctggcagctcagtgtcaccatccaagccctcatccagcgagtctgcatctttatcttcctcatcttcttcctcatcttcctcttcttcatcttcatcttcttcatcctcttcatcctcatcttcttctccctcttcagattcaagttggtccaggccatatgaggcagctgtattaacacgagtaatagatggaacaacaagttcttctctcagaggatgcctccaaagccagaagtgcaggggaaaatgctgggttcccccaccattatt

SEQ ID NO: 78447 - DNA, 515 bp, Homo sapiens; identical to SEQ ID NO: 62826

SEQ ID NO: 78448 - DNA, 719 bp, Homo sapiens
cggcacgaggctggcttaggggctctaaggcgcccagactcacaggtgctgtgaagagctcctttattggggtgatggaatcggttccaaagagctggtttactgctgtgaagggatcgcagctttgaatttcaagctctggttctcagtcctcgggcacctgtgcgtgaatcgctgccgcaaggctgggccaagttaaggccccacgcactttggcatccgggccagggatggtctccagaccccacagggtgaagcggctgaagttggcagtggctccaatgaagcggtcgaagtcccgctccagcggctcctcctcttggtcgtcagtcccggaatcccgcaaggggtctggcttccccatcgacaccttcttctcttctgtcaccatcacgtatcccacgaggccaggcggcaccgccacctcctctccccgtagacagcggccccgaaacgacacttcgagtccctcggggccctggcggatggcgggcgtgaagaagcgccccaccggggcgggcccgtccaccgcaacctcgcagggcagcagatgcagtgtggcgggtacggcgtcgcgcaatgtggcggagcgcaagtggacgcggtgcctctcgatggccgcttcgtcgccgctctccatcctccctcctacgcgacgccagggctcgcgagcagacactgaagacgaaatcgtcgactcgggaatacgaaccggtcgc

SEQ ID NO: 78449 - DNA, 1058 bp, Homo sapiens; identical to SEQ ID NO: 62828

SEQ ID NO: 78450 - DNA, 418 bp, Homo sapiens
tctcttcatacagacacacgtgacatttggtgccaaagacccgggggagggggactccttcgggagaccagtcccctgtcctcaccctcactccatgaggagatccacctaccatcttgggtcctcagaccaaccagcccaaggaacatctcaccaatttcaaatcaggtaagcggtcttttcactctcttctccaacctctcttgctgttgctccacccttcaatctctcccttccttaattttggttcctttccctttctggtagagacagaagagacgtgttttatccataaactcaaaactccagcgctggtcactccagacagtcttccgttggtgtttaatcactgtggggatgcctgcctgattattcacccacatttcagggatgtcgaattccaccacacgggtaatac

SEQ ID NO: 78451 - DNA, 989 bp, Homo sapiens; identical to SEQ ID NO: 62830

SEQ ID NO: 78452 - DNA, 1717 bp, Homo sapiens; identical to SEQ ID NO: 62831

SEQ ID NO: 78453 - DNA, 925 bp, Homo sapiens; identical to SEQ ID NO: 62832

SEQ ID NO: 78454 - DNA, 1039 bp, Homo sapiens; identical to SEQ ID NO: 62833

SEQ ID NO: 78455 - DNA, 445 bp, Homo sapiens
gcaggcacgtggattaacaaaataagatggaaccttaaatgttcattgccacaagtgatttaaggaccctgacctgaggccccagggggatgctgagcagtgggctctcccgcggctgctgcctgccagctgagctgttgcaggcatttctgtgacccgtagagcctgactgtgagttactccacatcatccatatgtcaggctttaacacgtctccctctcacgcacatactcacatacacaccgacaggcacacacacgcattcacgcattcacactgacgtgcacatgcacacacgtgcacaaacacacacgcgtgtgcactgacacctatgtgcatacatacagcccacggagaacactttgactgctgagacataccgtgataaagatgggctcatcaaacagctccccaggaaagtcctcgtgccgaattctggcaccg

SEQ ID NO: 78456 - DNA, 674 bp, Homo sapiens; identical to SEQ ID NO: 62835

SEQ ID NO: 78457 - DNA, 1423 bp, Homo sapiens
tgctgttcaacaaaaaacatatcaggggacaaagcatgtaacttgatgatcttcgacactcgaaaaacagctagacaacccaactgctacctatttttctgtcccaacgaggaagcctgtccattgaaaccagcaaaaggacttatgagttacaggataattacagattttccatctttgaccagaaatttgccaagccaagagttaccccaggaagattctctcttacatggccaattttcacaagcagtcactcccctagcccatcatcacacagattattcaaagcccaccgatatctcatggagagacacactttctcagaagtttggatcctcagatcacttggagaaactatttaagatggatgaagcaagtgcccagctccttgcttataaggaaaaaggccattctcagagttcacaattttcctctgatcaagaaatagctcatctgctgcctgaaaatgtgagtgcgctcccagctacggtggcagttgcttctccacataccacctcggctactccaaagcccgccacccttcttacccaccaatgcttcagtgacaccttctgggacttcccagccacagctggcccaccacagctccacctgtaaccactgtcacttctcagcctcccacgaccctcatttctacagtttttacacgggctgcggctacactccaagcaatggctacaacagcagttctgactaccacctttcaggcacctacggactcaaaaggcagcttagaaaccataccgtttacagaaatctccaacctaactttgaacacagggaatgtgtataaccctactgcactttctatgtcaaatgtggagtcttccactatgaataaaactgcttcctgggaaggtagggaggccagtccaggcagttcctcccagggcagtgttccagaaaatcagtacggccttccatttgaaaaatggcttcttatcgggtccctgctctttggtgtcctgttcctggtgataggcctcgtcctcctgggtagaatcctctcggaatcactccgcaggaaacgttactcaagactggattatttgatcaatgggatctatgtggacatctaaggatggaactcggtgtctcttaattcatttagtaaccagaagcccaaatgcaatgagtttctgctgacttgctagtcttaggaggttgtattttgaagacaggaaaatgcccccttctgctttccttttttttttttgaaacagagtcttgttttgttgcccaggctggagggcagaaccacaatttgggttttaaccgaaccctccgtttcttgggttaaagcaattctcctgcctcaccctcctaagaatctggaattacgggcatgggccaccaccccggggggatttttggatttttagtaaagacggggtttcaccat

SEQ ID NO: 78458 - DNA, 1098 bp, Homo sapiens; identical to SEQ ID NO: 62837

SEQ ID NO: 78459 - DNA, 496 bp, Homo sapiens; identical to SEQ ID NO: 62838

SEQ ID NO: 78460 - DNA, 621 bp, Homo sapiens; identical to SEQ ID NO: 62839

SEQ ID NO: 78461 - DNA, 697 bp, Homo sapiens; identical to SEQ ID NO: 62840

SEQ ID NO: 78462 - DNA, 366 bp, Homo sapiens; identical to SEQ ID NO: 62842

SEQ ID NO: 78463 - DNA, 1258 bp, Homo sapiens; identical to SEQ ID NO: 62843

SEQ ID NO: 78464 - DNA, 506 bp, Homo sapiens; identical to SEQ ID NO: 62844

SEQ ID NO: 78465 - DNA, 743 bp, Homo sapiens; identical to SEQ ID NO: 62845

SEQ ID NO: 78466 - DNA, 1010 bp, Homo sapiens; identical to SEQ ID NO: 62846
  misc_feature (1)...(1010): n = a,t,c or g

SEQ ID NO: 78467 - DNA, 485 bp, Homo sapiens; identical to SEQ ID NO: 62847
  misc_feature (1)...(485): n = a,t,c or g

SEQ ID NO: 78468 - DNA, 1078 bp, Homo sapiens; identical to SEQ ID NO: 62848

SEQ ID NO: 78469 - DNA, 837 bp, Homo sapiens; identical to SEQ ID NO: 62849

SEQ ID NO: 78470 - DNA, 888 bp, Homo sapiens; identical to SEQ ID NO: 62850

SEQ ID NO: 78471 - DNA, 669 bp, Homo sapiens; identical to SEQ ID NO: 62851

SEQ ID NO: 78472 - DNA, 1289 bp, Homo sapiens; identical to SEQ ID NO: 62852
  misc_feature (1)...(1289): n = a,t,c or g

SEQ ID NO: 78473 - DNA, 2483 bp, Homo sapiens
ttgcgggcagagagctgcttgaggccaccaacgctgcaaggaaagtgcagctttctgggcccggcgccgctgcttcaggatctgctgcttggtcttgagttccagggcggactcggcctgcaaggggtgccttggggcgtggggcccgggaatgcaacctgcttgggccaacggtctcgcttccccaacctcttcggttctgggcctccgccgggtcaagatgccccttcttcgtccgagtcacgatcaatcaattttctgtttctgtttccacttctgatagaggtctcgcttgtaggagctgctgatgtagcggccgctctctgtcttaatcttcttcttgtcttcctgtcctgactgtcccacaaaccgcttcttcttacggtcccacttgagctgctgccggcccctcgtcaggttctgggcttcatcccccatcaagtccaggacagcgccagctgcctgctgctcaaaggctcccccttccccgctgatgctcaggccccgctcgctgtcaaagtccttgggccggtaggggatgtagaattcctggtcccgctgccgggcctcctccctccgcctcttggctcccctgttgggtcctgaccgctgccgcttccggcccacgacctctgagaaaatgtcctccacactctctcccgcctcctcctcctcctccttctcaggctgcttctcctgcagtgctgggcggctcggggctgggcccactgggccctcctgctgctcctgccgcccctgctgtccctgctggaagcgggcgatggccttgcggtccttctgccgcttggcgcgcatcacctggctgcacaggtctcggctggaggcgttgatctcaaagatagtcgcccgggagcggtagttctttatgctgtccaccagcctcagccgctgcagctcctcctcctcaaaacgcgagctgaagagggggtgcaggcccagccccacaaggtccatctccttggccctcttgatggactcaggcgagggcgccgggcgtgagcgcacatactgctgctgggcgttatcagcaacgcgggccaggccccgtagctccagcgatgcctccagggtgctctgcagaccactgtcctcctcgtccaccacactctgtggcacccgacccagcatgccatccacaccggccacacctgagggctccttgaggggtcgggcgagggtgagggagcggcccaggaacaggtgcagatccagcaggtaggggatttcatcaggggccaccaaggagtaggctgtgccacttcggccagcccgagccacacggcccacgcggtgcaggaagagtttgcccttggcggggaagctgtagttgatgacattgtccagcagcgggatgtccaggcctcgggcggccaggtcagtcacaatgagagtggagcacttgccaagcgtgaatttggcgagattgatcttgcgggctgtcgggtctagggcactgtagatgtgggcgcagctcacccgctgggtcgtcagcagctcagtgaggtactcggcgtggtgcttcgtggccacaaacaccacggtctggtcctggggccgcaccacgttgtgcagcaggtggagcagcacggcagccttggtgtcctcccgcacgaggaagaaggaggtcttcagctgctcgttgagcttggtatccacgtcaagccggatgagcacgggctccgtgaggccagcccgggcaaattccaccagcagtttgggcagcgtggcggagaacagcaccgtctggtggcccccggggaggcgggcgatgatctcctgcagctgctctgcgaaacccatttcaaaaagccggtcagcttcatcgaacaccacgtattccacactctgcagcttcaggctcatttccacagccacatgcaccaaccgtccgggcgtggcaataattatgtcgggattttcgtgcagggctgcaaactggtcttccatcctgtctccacccaggatcagggcagtcttgaggccagtgaacttgcctagctccttagtgaacttcagggtctgcagggccagctctcgggtcggcgagaggatgagggcgcgggccccggtctgggcactgtgggtcttgagccgctcgaacattgggaggaggaagcaggctgtcttgccactgcccgtccgggccatggccaccacgtccttgccatccaagatcaccgggatggtcttcctctggatgggtgttggcaccttgtaccccttcttcatgatgcctttgaacaccgggtagctcaggcccatggactggaagcctccagacttcttcttcttcttgttctgggcacgcaccatctcccgggtgtccggctccacatccgaggtgcattccgaggtggggaaggtgggcaggggtcttccaggtcccagcttccgggcccgggcgtcatcctccgcctggatctcaaactcgccgtcctccgagtcgctgccgcgggcctggg

SEQ ID NO: 78474 - DNA, 930 bp, Homo sapiens
  misc_feature (1)...(930): n = a,t,c or g
ctgtcggagcccccatcatcccttccagcgtggaccattntgagacggaggtttggagttacaggtgtgtgagcgccagagggtgagaggggtcactcgctcggaatgtaagagctcccgcctgctgggaatggggaggagtcgtcgatggccccaggatccgtgcccagacatttccagaggcgcaccggctggttcagcaccccaccgtcatccgcgcaaaagctgcatccctcgaggtcctggagcgaagccatttccttaaagcgcgcgcagagccaggatagagtttcctacgaaggaccgtccccctgaggttcctccattaacagcgcccccggccttgcccaccgcagcggccccaccaaagcgccaacacatttcaaaatggagcgaaatcgcagaagcgcggagtgcgctttgttcccagcattgggctaaatgcgctcatccccaccgggctccctttcctccaaaggcaggaggtgacatctctgctcgcgagatggcaatacgtagccgtggccgcgggctccccttttccggggccaccccgagaccctcgctccatctggaaggggaaccccgcgcccagctctgtctgggggcgagggaggagagacgatgcttgaatcgatccctgagccgctctgcaacccctcgcggcgggcccagccatgcgaggagcctcgcagtacccaggctccagccctctacgccaccgtcaaggagggtcggcctggtcccgggcgggcagccaagccattccccagaaattcagatcaacctgggcgacccgcgtggaggattcagctcctagatcctctcccgtctcagaagtgcgccccccgcaccaaatataagcgataggattaaccagaaatccgtgcgtaccaggttcatctccctcgtaccgagctggacgtgtca

SEQ ID NO: 78475 - DNA, 1082 bp, Homo sapiens; identical to SEQ ID NO: 62854

SEQ ID NO: 78476 - DNA, 882 bp, Homo sapiens
gggggatgccagcatttacatcatagcgggatagacggtttcaaatgtattttagtaaagaacttacagcctcatgtcatagaggctctggaagtgccaagtatttggtgagaatgacaaacctgcatagaccaaaaaggtgatgagtgcagccagcaggtggatacgaagcttggttcggacttcctggaagtgcagcagagcgctgtggaagagaaaggagcagacggcctctgtgatgaccgctttgagcaagtcgactcggatgggattcttgcaagcgaagctcctctcgctgacgtgatactgggtcagacccaagctccacaaggcgcttgtgcagtacctgctgcacagggcactaaccagctgagccaatagcctcaccgcacccgtctcgggggacatgccccccagcatcatctgcatcatcacgccgcacgggttgctggacgtgcccaccagagtcaggccatgcacaagcgagaagaagtagacgagcgtcagcgtccaggtggggtgcgcggggtgctgttcgctcagcagttgcagctcgtgggtgcagcagcagagctggaaggtggctagaaactccaggacgaaggcgtgggccaccggcctgtgcagctgctgccgggcgactacgcgggccagccccatgagcagcaccaccgacagcatcagtcccagcgaggtgcaggtgtcctgcagctcggaccggagccccagcagcggcgacatggctccgtcgccgcctgagcgggttgcgggctccggctctgggtaggaggcggtctccaggcccgagtccgaagtccgcagcccctcccctcctcacgcccctcggggcgggacgagcgggaggctcccgagcgaattcca

SEQ ID NO: 78477 - DNA, 1283 bp, Homo sapiens
attggaatgaggcatccagtttagcaacagcagagatgacgactctgcgattctgagagtccctggcgagcccgggctagcgaaaagtgggggcagaacgaactacatctcccatcgtgccaggaggcggtcccgcccgtttccccctgggagttgtagtctaaccccctcggatccaacagcaacctcagtgcgtgaactctgttatccagaaggcctcgccctgccgccgccgaagctggaattcgtcggctagtagttctcgccggcaactagaggaacctgttggcgtggcccagaaggcttagcgggattgcacgagccctcagattcatcgctaccccgaggctaagcgccatgcctcatattgacaacgatgtgaaactggacttcaaggatgtccttttgaggcccaaacgcagtacccttaagtctcgaagtgaggtggatctcacaagatccttttcatttcggaactcaaagcagacatactctggggttcccatcattgctgccaatatggatactgtgggcacctttgagatggccaaggttctctgtaagttctctctcttcactgctgtccataagcactatagcctcgttcagtggcaagagtttgctggccagaatcctgactgtcttgagcatctggctgccagctcaggcacaggctcttctgactttgagcagctggaacagatcctggaagctattccccaggtgaagtatatatgcctggatgtggcaaatggctactctgaacactttgttgaatttgtaaaagatgtacggaagcgcttcccccagcacaccatcatggcagggaatgtggtaacaggagagatggtagaaaagctcatcctttctggggctgacatcatcaaagtgggaattgggccaggctctgtattactttgtcatttcctgttgtctcactcctgagggctcctgcagtaactctgtacttctctatctgcacacacaaaatgcccaaggcactcactggggaggaagcaaggaagcaaacagtctgagaaaatgatgcaagaaaatcaaatgggaatctggggacccaacacaacatcctgaagattattaaaaggaaaagatgctgattggtacataaatcttttacatggccttggtctagaggaggcaggcttttagaatcatgttttgttaatccgcttcactaaattggaccttcacatatctaaaaagctctgaagtgtttgtatatttgaaatacctcaataaagagagagctcattgactgtaaa

SEQ ID NO: 78478 - DNA, 421 bp, Homo sapiens; identical to SEQ ID NO: 62856

SEQ ID NO: 78479 - DNA, 889 bp, Homo sapiens; identical to SEQ ID NO: 62857

SEQ ID NO: 78480 - DNA, 400 bp, Homo sapiens
agttacaaagagtatgtgcacatagaaagggggcggtgagactttacatgtattatccaggagtagagcgtcaaaagggagactttctcttgtaatcccttaaagctgggggacagaagcatttctctgctaaagaggccaacataccaaagtccccggagaagggcaggatggagatgccatggtggatactcagaagagaaattccagtttgtgtgtatgtgtgtgcacgaatgagtatgcgtgagtgcatgcatgggtatatgttgtgcctgtgtgtgcctgcatgagtgtgcacgtgtacatccatatatgtatgtgagtacatgcatcatatgtatgtgtatgtgagtgcatgcgtgtgtgcacatatacgtttgtgtttgggggcacaggcaag

SEQ ID NO: 78481 - DNA, 719 bp, Homo sapiens; identical to SEQ ID NO: 62859

SEQ ID NO: 78482 - DNA, 369 bp, Homo sapiens; identical to SEQ ID NO: 62860

SEQ ID NO: 78483 - DNA, 1073 bp, Homo sapiens
gagctctgggccctgggggattcttctgcatgtgcttgctgttgcagatgtcctggatgttctggaccacgtcggggttcagcccgtgctccctcatgatggccagcacctttctgtccatcaggttatgggaccggaggcagttgggaaaacgacagttccctcgggtgaagtggtcacagatgtggagtcttgaacacggtggctgctggttacaaatctgctgccgaccctctcccttataacttttgcatatctcgggcataaaaaaaggatcactttggaggaggagcactgctaattcctctttgttcagtccagagagttcgtgatttttcaggactttgaagttctcttctgagagaacctcatgagaatatttgcataaattccgctcggactgcgaatagttgcaccggcccagcaagttgagtttgcagagatgcaggttatcgcagggtctctggcagtacttgcgacggcagacccgggctcgagtggtggccaccaccgatcgggtgatcccggcctcgccgccggtctccaacaccacaaagcggtcgggcccggccacctgcagcacctcacagagctgcggctcagacagcgcgatctcctggagcagcgcgtccagggccatgcggcccccgtgggcgcacaggattttggtgatgaagcagcacacctccgggtccgccatggcgcgctggctgtgctggctctgccgcggcgcgggactcggttccgcggaaatcggaaatcgaaacttacaagtgtccaggggcgggcgcgggcggtgctactgctgggcgcgcccggagtcagcgagggcgcgctctccgtcgccgttagcccagcccagcgatccactctcggctctcaggtcaagaggctagatctcaccgaccgggtcctagtggcaggtttacagccggccgcaagggcaactgggtggaaagaaagagaacgcgcgggcaaatctgctggtgaccgcctggggtggccccctctcggttctaggctcggcgagggtgaggttctccagccgggctccgcgagcccacgcgtcctcg

SEQ ID NO: 78484 - DNA, 434 bp, Homo sapiens; identical to SEQ ID NO: 62862

SEQ ID NO: 78485 - DNA, 1321 bp, Homo sapiens; identical to SEQ ID NO: 62863

SEQ ID NO: 78486 - DNA, 1237 bp, Homo sapiens
gtagggctatatccagtttagtctaataagacactcattttagagaacagggaaaaaccaattaaaaaacagaaaatacaattgttagaggaaagcagaggcaggctttggccccgcttgtggccagcacaggggccctcgctggcagctgccgcctggagggtgtgcacactggctcctgctggccgcagccctgagctcttcccacttccccgtgcccaggcccttcctgcgttcccttccttctgtctcctatacccgggtcttcatggcctctgagagagctggatactcccacagagaaggtatacgaaataggaccaagtgacactacacttcagactggatctcatccctcctggcttaaaaccgcctcgcccccagcctgttctccggaccaacagggtccagatcctcagtagacaccagtggccctttgacaggtggcctcacggacctctccagcttccacgggggcacctccctttgcaccccaccatcccaaaagggccagtgtcctctctggccaggcctgggacccactgctccagcctcagcccggcatgcccctgcctcagtgcctcatcccctgctgtcaggtcctgacccaacaagggcctgggctgctcatggggatgataggtggtttgcttgtcctctctctgcgacccctttgcagtttgaaggccggaagtactgcgaacacgacttccaaatgctgtttgctccgtgctgtggatcctgcggtaaggccggtgacagtacacatcctgggctgcctgggaagtgggcagcagtggcggggggcagggggccgagggggtacacagaactggcccagctctttcctaactccccaccttgcctctctgagcggcagccgtcaggccccctacaggcatcaccatcccacgagggagcccatgggccaggcagagagcaggcggagtgctaggtggacagggcttgggagggtccgaagaggggacaggcacgtgctccccagccagcagggacctgtcttcttccaggtgagttcatcattggccgcgtcatcaaggccatgaacaacaactggcacccgggctgcttccgctgcgaactgtgtgatgtggagctggctgacctgggctttgtgaagaatgccggcaggtgaggtggccgtgttgggccagagaggattgggccacagcccttcgtggcacacctgccacctctcctctccgctccccacttg

SEQ ID NO: 78487 - DNA, 539 bp, Homo sapiens
agtctcgctcttgttgcccaggctagagtgcaaaggtgcgatctcggctcacagcaacctccgcctcccaggctcaagccattctcctgcctcagcctccggagtagctgggactacaggcatgcaccaccacacccggctaattttttgtatttttagtagagacagggtttctccatgttggtcaggctggtcttgaactctggacctcaggtgatccgcccgccttggcctcccaaattactgggattacaggcgtgagccactgcgcccggcctctttaatttcttttaattcctgttccaatgcagagaagaacataagaagaaaaacccagaagtccctgtcaattttgcagaattttccaagaaatgctctgggaggtggaagacaatgtccagtaaagagaaatttaaatttggtgaaatggcaaaggcggatgaagtgtgctatgatcgggaaatgaaggattatggaccagctaagggaggcaagaagaaggatcctaatgcccccaaaaggccaccatctggattctt

SEQ ID NO: 78488 - DNA, 383 bp, Homo sapiens; identical to SEQ ID NO: 62866

SEQ ID NO: 78489 - DNA, 763 bp, Homo sapiens
tagtccccgcaaccaacaagtgcggcattttcgccagatcggcaaccaccggctcaccggcgatatctttacccagcaccccggttaatggcgacggattatcgcggaatttggcgttatccaaaacttcgcgcagataaacggtttgtcgttttttattcggtaactccagacctacatagggtttgccaggaataacttcaacgacacgcaccgccaccgtcgaaagtgaacgggcaaggtcccgtgacaagttagaaatgcgcgccgcttttacgcccggtgccaggttcaattcaaagcgagtgataactggcgctggatgccatagagcgtttgcaacgctggtgggaggagagcgaggcgctggagccggagtctcgctttattgaaattccggtggtttacggtggtgcaggcggaccggatttggcggtggtcgcggcgcattgcgggttgagcgaaaaacaggttgttgaattgcactcctccgtggaatacgtggtctggtttttaggttttcaaccgggcttcccgtatctcgggagtttgccggaacaactacacacgccacggcgcgctgaaccgcgcttactcgttccggcaggttctgtcgggatcggcgggccgcagactggtgtttatccgctggcaacgccgggtggctggcagttgattggtcatacctcactcagcctgtttgatccggcgcgtgacgaacccatcttattacgtccgggagacagcgtgcgctttgtaccgc

SEQ ID NO: 78490 - DNA, 438 bp, Homo sapiens
gacccccctacgtatctgataaatgccgatatatctcttccccctcctgttttgtaaagatttcgaaaatctaaccttctgcgaaggcgtaaatctctggctacaaaaaaggcaacggcactatcattttttaacaatgaaacaacaaattacccttgtttcattttctccatgattttaccaggaagattacgtagaaagggtatcctgcaagcctgtcctggactatccttgtcacgtcagacacgcgtgtgtcgttgtgcgctttttttgggtgaaaggagtaagaaaatggcgacaggaaagtcctgctctcgctggtttgcgcctcttgcggcgttattaatggtagttagcctgagtgggtgttttgataaagaaggcgatcagcgtaaagcgtttatcgactttgtgcagcatgcagtttaaggtggcggt

SEQ ID NO: 78491 - DNA, 1404 bp, Homo sapiens; identical to SEQ ID NO: 62869

SEQ ID NO: 78492 - DNA, 1846 bp, Homo sapiens; identical to SEQ ID NO: 62870

SEQ ID NO: 78493 - DNA, 3773 bp, Homo sapiens
ttttttttgtctttattcatttatttatttattcattcattttgtgcccttctgggaatgaaccaggactatttgaatggaaagagaaaaaaaaaaggctgtcataggtttaaaaattggcatatgttctcttccagattaaattcccttggaccttttaatttatgctagaacaagcacttatctttttttttttttattactaagcccaacacagtgcgtggcatgcagtaactgttcaaataatgtttgtttaattgacgggttttaagctcgataacttagctaagccctttgcacagtctaagcctaatttggaatgctttcagtcttacccaggccaataaaattttcttgcctcatctgaatttcctgcaaatgtgattaattaataagaatcatcaagattaattaataagaaattgatagcaggatgagtaacaggcccagacagtcccacagatcacaccttccgccctccatttccgcttagcttctcttgaatctattgggcatgattgcctctgtgggggctacagccagcatgggtgactgttcatgacctaccctctcttgcagtctgactgtggacaaatgccgagtccttaagagatggtgaagtaggcatagtagatagtaaaggtagacttacagtatacatttgcattctcaaacaaaattaaaaagccttaaagtgcacaagaagattgcacaattgaaaagtgcagagtatactcaaaactgtcatcctactgttttctcagtcttccctgcaatactattccctcctcagacatcctcagctccctctcaccccaagtatgccattgtctttgtaattcttattaaaatactaaagcaaaaattcatcgtagaacaattcatgtccacaaaggtttgcctcagttgctcatgccctgtatgcatttcctctggttttattattcaaattaagaaaatacttaaaaattttttggtaacagcttgcatgcaacccctaagtgtacccctataaccctttggcttttttcagagaaagacttcagccaaattgtccctttcactcctctgagggcagctctgggaaactctcctgaccaccttctccctccttcacgtcatctttgtgtgacagcaggacatccgggtttggagcatcctccaccacccactgacactcatgaatacgggctaccttgatctcctctgcattcacactggccgtggcctgggccgcgctgctttgccctcccatctcttcttgttcctcagaaacctggctctcactgaggcagatggggtcagaacctaaggtgcagccctcttgctgtgaggcatccccttcctcggtacacttgccccctcttccttcatgggcagtgagtgtgcaggcctctcctgggagctccccctccatgggccccaggggctcctcggtgagccctccactggctggcggagaggctgggctgcctacctctggaaatccccccaactcctccccatgggcctcgggacagggaggttgggcctccctctcgctgacttcactttcttcacagttgtcggggtggatggcagctgcctgactgggctctttttcctcttcttcttcattttcttggggaacgtggctctccccattcgtatcttcttccatcactggagcagagtccactggtacttccacggacgctgtcagcaactttctgagcgccttcaaagaacccgaggcagtgatgggttctggctcttcctgggcgggttcttcatcctcaagggtccctccaaactccagctctgatgagcatgtgcccgggagtcctgctgtgtcctctgttgccacaggattcaccacggggtcatccactcttgaaataatcacctgctcagtcccatctgggggtgggcttggcccagggagagaaaggctttctcctttggccaacgagctagggacctcaggctgcttctcttcctctgactcctggaatacttcgttactgagggtctcactacccggaactcctggcagaatggcagaagctctcctggcagggctggcctggtttgaccctgtggggggctttagatctgttaagctggacacactttcactgggcaaggccatgttatcttcaaataagttgtgtttcttcaagatagcagcttcctttatcactttcagagtttcatcaagcaggatctgatgtaaaatctcctcatagacattttcaacgtgaatcatattggtatgatctgcaaagatgaactgctcgtatttctgaagctctggtttgcatgtggacgccagtgccttctgcacagtgggaagtgtgatttgaactagtgcctcttgaaatatcttctttcggatggtgctgctgtcataatcatattgctttaagactcggagtttaaccttctcaatggcaactgcagttttggaggcctctccttggagatgtggggaaagcaactgctcaaaagtgaacactgcattctccattagctcctgcatgtagttctgtgtcctctgaaccaccagatcaatgtgggggaatctgaagcggctcttgagatcctgcaggcgctcgtgaagcaggttgactttagtataacaaggttccatcttcacggaatgcagcggaagattcataagccggtctagatgctcctttagctggacactgtctttggtggtctggaagttctggctgacttcattcacctctttctcaaagagtacacgtacttcactgaatcccgagctcactggtcccatgagctcctccaggatggatgccaggaatggctgcacactctccaagcagcttttctccgccggctgggccaccatcgctttgatctttccaattaaatagttctttgagttcacaatctgatccatgtcagaacggatcgttccttccaggccctttgtcagagctctgcattcctccttcaaggcacttaatccttctgaaacttgatgctgaaccagggtgtaggcctcctcgaggagaccaagccccgccctctttctgtcattcttcttccccttcatcttaggcagcaggtctgtctgaagagtgggcaggagctcctccatcaccaggttactcaggatctggatttcatccccagtgatcatttcccaggaaccatagtgacccttctcctgtcggaagaattgcacagcttctaaaaaggcctgggcttcaaatgtcatctgcttcatgtaatcatgattgagatgcctgacgcagtcactcaggagggcactaaacctcttctggtcagcagcctcgtggaagcagaagtagccgtgtctgaagaagggctgccacaggtacactgggaattccttgggcaggaccacaaagggctgagtgttctccttctcactggaggcaagagggtctgggaaatgcctgtcagacaacagattatattcatcttctgaggttaacaccttgccaccggctggaagaattcgacatttaggagcagctcctctctgataggcctgctaatggcaaggtaatattttaatactttcatgtgacagtcacaacatggtaaatcagagtccctaatctcagggagatttaccctagttatgttctcgaatgtggaaaacataatctcagtaaccctgaaagtctgcaccacatttgccatttcagatgctaacaactaaatcattctgataataaccacaaaggtgacgatcacacgaattacgccactctagactaggggtcttcgaa

SEQ ID NO: 78494 - DNA, 369 bp, Homo sapiens; identical to SEQ ID NO: 61819

SEQ ID NO: 78495 - DNA, 984 bp, Homo sapiens
catagcactcacgagtcactaacagtcaaggccctactggaagccatttgtttggttccattcttatatcctggcccttcattggcactcccccatggtatgacctccagaggctcactacctcaaagccattccttcctcactctgaccatgcctctcattctgaaaacagtttcatgaacttattcctgcatgtgtcaaatgcacatatacaatgaggttgccccttcccacccgtaaatatgcatttaatcagcatttgtgtgttcttcaggttgttggcatggagtggaggatgaagaggtatcttttgagcagagcatttttgtagcaggagtgtcagaggtcaggactctcatggcagagctggagtctcacccatgtgacatatgtggcccaatattgaaagataccttacacctggctaaataccatgggggaaaagccaggcagaaaccatacttgtgtggggcatgtggaaagcaattctggttcagtacagactttgaccagcaccagaaccagcccaatggagggaaacttttcccaaggaaggagggcagagactctgtgaaaagctgcagagtccatgtgccagagaagaccctcacatgtgggaaaggtaggagagacttttcagccacatctggccttcttcagcatcaggcctctctcagcagcatgaagccccacaagagcactaagcttgtgagtggctttctcatgggacagaggtatcacaggtgtggtgaatgtgggaaagccttcacccgcaaagacacacttgctcggcatcagagaatccacactggagaaaggccttatgagtgtaacgaatgtgggaaattcttcagccaaagctatgacctctttaaacaccagacagttcacactggagaaaggccatacgagtgcagcgaatgtgggaaattctttagacaaatctccggcctgattgagcacaggcgagttcacacgggtgaa

SEQ ID NO: 78496 - DNA, 1850 bp, Homo sapiens; identical to SEQ ID NO: 61821

SEQ ID NO: 78497 - DNA, 732 bp, Homo sapiens; identical to SEQ ID NO: 61822

SEQ ID NO: 78498 - DNA, 376 bp, Homo sapiens; identical to SEQ ID NO: 61823

SEQ ID NO: 78499 - DNA, 697 bp, Homo sapiens
ctgggcggcttccgggtttggcggggtctttgtctctcgctgtagccggagctccaggttttgctctcacttctctgtgtcttctgctcctaggggcctagcctgtgtggccctctgacctgcagatattgggagatccacagctaagacgccaggaccccctagaagcctagaaatggatgacccgaggtatggaatgtgtcctctcaagggagcaagtggatgccctggggctgagaggagtcttctggtgcagtcttattttgaaaaggggccattgacgtttagggatgtggccatagaattctctctggaggagtggcaatgcctggacagtgctcagcagggtttgtataggaaagtgatgttagagaactacagaaacctggtcttcttgggtattgctctcactaagccagacctgatcacctgtctggagcaaggaaaagagccctggaatataaagagacatgagatggtagccaaacccccagttatatgttctcattttccccaagacctttgggcagagcaggacattaaagattcttttcaagaagcgattttgaaaaaatatggaaaatatggacatgccaatttccagttacaaaaaggctgtaaaagtgtggatgagtgtaaagtgcacaaagaacatgataacaaattaaaccagtgtttgatacctaaaaaaaaaaaa

SEQ ID NO: 78500 - DNA, 572 bp, Homo sapiens; identical to SEQ ID NO: 61825

SEQ ID NO: 78501 - DNA, 555 bp, Homo sapiens; identical to SEQ ID NO: 61826

SEQ ID NO: 78502 - DNA, 474 bp, Homo sapiens; identical to SEQ ID NO: 61827
  misc_feature (1)...(474): n = a,t,c or g

SEQ ID NO: 78503 - DNA, 498 bp, Homo sapiens; identical to SEQ ID NO: 61828

SEQ ID NO: 78504 - DNA, 613 bp, Homo sapiens; identical to SEQ ID NO: 61829

SEQ ID NO: 78505 - DNA, 547 bp, Homo sapiens; identical to SEQ ID NO: 61830

SEQ ID NO: 78506 - DNA, 206 bp, Homo sapiens; identical to SEQ ID NO: 61831

SEQ ID NO: 78507 - DNA, 357 bp, Homo sapiens
gccgagcatgagcaagccagtgagtgggtcccgcagccccctggacccagggccaagcatggcggctgccaaggtggctttaactgagagagcagatccaactgagcttataacaatatttttgaagtatgcaagcattgagaaaaatggtgaatttttcatgtctcccaatgactttatcactccatacttgaacatttctggagaaagccagcctaacccaaagactgtggaacttttaagtggggtggtgggtcagaccaaagatgggaggaatgttgtcccagcgttgatgatgctaagtttgatcacttgatgaaggtggcatccaccagctatttccattttctcgtgccg

SEQ ID NO: 78508 - DNA, 675 bp, Homo sapiens; identical to SEQ ID NO: 61833

SEQ ID NO: 78509 - DNA, 508 bp, Homo sapiens; identical to SEQ ID NO: 61834

SEQ ID NO: 78510 - DNA, 491 bp, Homo sapiens; identical to SEQ ID NO: 8422

SEQ ID NO: 78511 - DNA, 551 bp, Homo sapiens; identical to SEQ ID NO: 61836

SEQ ID NO: 78512 - DNA, 988 bp, Homo sapiens; identical to SEQ ID NO: 61837
  misc_feature (1)...(988): n = a,t,c or g

SEQ ID NO: 78513 - DNA, 329 bp, Homo sapiens; identical to SEQ ID NO: 61838

SEQ ID NO: 78514 - DNA, 1445 bp, Homo sapiens; identical to SEQ ID NO: 61839

SEQ ID NO: 78515 - DNA, 680 bp, Homo sapiens
gtaaccagttacaaaggataaacttggtaataagttaagcatttaggcaggtaaaagttgcaataaagcattttcctggatttaaactgtaaagaagaagaagaagaaaagattttgaagtataatacaaaatacaaagagttgcctgccagaattaatcctcagtcatatataagttggcttaaatacttccatcaaaaactaaatcaaaacaaacccccaccccacaaaacacagagcacaaactgctcagtttttcatcatgctattaagcatcaacagagaataaacctagaaacagcatacgggtacagatacactctttgagggacacgggtctgaaagaaggaagtgaaaggatggctgagttctgagtgaggaaaggagcctgggaagaagagaaaggggcttggggatggagagagtcagaaattgggggcgaggttaggagggtgcccaggaagaaagtgaggattaggaagccaagcccctggacctcaggaccccatggctctgtgtgtccccttatactctcagaaccctgacatcgtccttgtgcactacctgaacgtcccagccctggaggactgtggaaagggctgcagccccatcttttgttccatcagcagcgaccgtcgagagtggctgaagtggtcccgggaggagttgttgggacagct

SEQ ID NO: 78516 - DNA, 713 bp, Homo sapiens; identical to SEQ ID NO: 61842

SEQ ID NO: 78517 - DNA, 387 bp, Homo sapiens
agaaacccagagattgtgccacctggaccctttcaccttcccagactcccaaattttgatatttttctaaactgagttctcttccacccaccattctcctactccaagatcttaggacttgaggatttccctagttcctggttttccaaatggaagtcacagtcaccaacatccaggatctgtctgaactgtaggcatcctccctgccccgaccctggtactagtgtttccaaaaggctgcagggctcagcctgatccctgttgcctgactattcctgcgatcaagctggtccccttcttcagggcagttcctccagatgtgcagaccttgcgcgccttcaccactgagctggttgtagaggctgtggtccgctgcctgcgtgtgat

SEQ ID NO: 78518 - DNA, 736 bp, Homo sapiens
ctctctgatgtgaactgtgctgtgcacctctgctctctctttcaccagcgttatgctgactttgccccatcacttcttcaggtctggaaaaaacattttgaagcaaggaaagaggagaaaacacctaacatcgccaagttaagagctgatttgcgttttattgcagaattgacaatagttgggattttcactgacaaggaaggtctttccttaatctatgaacagctaaaaaatattattaatgctgatcgggagtcccacactcatgtctctgtagtgattagtttctgtcgacattgtggagatgatattgctggacttgtaccaaggaaagtaaagagtgctgcagagaagtttaatttgagttttcctcctagtgagataattagtccagagaaacaacagcccttccagaatcttttaaaagagtactttacgtctttgaccaaacacctgaaaagggaccacagggagctccagaatactgagagacaaaacaggcgcattctacattctaaaggggagctcagtgaagatagacataaacagtatgaggaatttgctatgtcttaccagaagctgctggcaaattctcaatccttagcagaccttttggatgaaaatatgccagatcttcctcaagacaaaccaacaccagaagaacatgggcctggaattgatatattcacacctggtaaacctggagaatatgacttggaaggtggtatatgggaag

SEQ ID NO: 78519 - DNA, 753 bp, Homo sapiens; identical to SEQ ID NO: 61845

SEQ ID NO: 78520 - DNA, 550 bp, Homo sapiens
atcggctgtcagcctccctggctgttagtaccttctttcccggagtcctggtccacgagttggatttactgctgtcgcgggtgggcctcacgcccattccctgtccctcggtcccctgagtgaggccggtctcccggcgaaagtgagcgaggattgcccggagcgcgcacgaggggaaaatgcctaaaaaaaagactggtgcgaggaagaaggttgagaaccgccgagaacgtgaaaaacaactaagagcatcaagaagcactatagatttagctaaacatccatgtaatgcctcaatggtatcagctttttttgatatcagttggtagttggaaaaactatatactattttatctgacgtatacctgaataaaattttagtgaagacagtgtttttgcatatagtttgttgctgaatttagtatctctggcacgtctgttgatttcactgagtggcagtgattgttgttggattttatattattataaaacctagcatattactttacatactgttggtgataaaggtagatattggacaagaatagat

SEQ ID NO: 78521 - DNA, 330 bp, Homo sapiens; identical to SEQ ID NO: 61847
  misc_feature (1)...(330): n = a,t,c or g

SEQ ID NO: 78522 - DNA, 732 bp, Homo sapiens
  misc_feature (1)...(732): n = a,t,c or g
agttttttaaggggnnccagnnnatcgagatccttagtccacgtggtggaattcgtttgattgctgaggctgctgggaggccgaaggtgggcctggaaagctttactttaagaagtctgtggcctacagaggctgccagcagctcagcaggagttgggccaaaggaggttgttgtgaggcaggagatgggcctgtagacgcactgggaggatgagctcgtcctggagatgccgagttaaggacattctgggcctggacaggctgcaaaaggcaaaagctgtgcctggaaaagtcgccatggggcatgagcttggcctaaagaggccactgcaaggcaggagctggccctgtagaggctgcagaaaggcaggagcttcgcctgaggatgccacagtgagacaccatctgggtctggagggtccgttaggacccagagggaaccatggaaaccccagcgcagcttctcttcctcctgctactctggctcccagatatcaccggagaatttgtcttgacgcagtctccaggcaccctgtctttgtcaccaggggaaagagccaccatctcttgtagggccactgcgagtgtgcacgtcagctccatatcttggtatcaacaaaagcctggcctgcctcccagactcctcctctatgctacgtccatcaaggcctctggcaccccagacaggttccgtgcttctgggtctgagacagacttcactctcaccatcac

SEQ ID NO: 78523 - DNA, 396 bp, Homo sapiens; identical to SEQ ID NO: 61849

SEQ ID NO: 78524 - DNA, 1061 bp, Homo sapiens
tagttgacgaaaacaaaaatgaatccaaaatagaaagagaacataaaagacggacatctacccctgttatcatggagggggtacaggaagagactgacacaagagatgtaaaaaggcaagtagaacgctcagaaatttgcaccgaagagccccagaaacagaaaagcacacttaaaaacgaaaagcatctaaagaaagatgattctgaaacaccacatttgaaaagcctacttaagaaagaggtgaaatcctccaaggagaagcctgaaagagagaaaactccatcggaagacaaattgtctgtgaaacataaatataaaggtgattgtatgcataaaacaggtgatgagactgagcttcactcttctgagaaaggtttaaaagtagaggaaaatattcaaaagcaaagtcaacaaacaaagctttcttcagatgataaaaccgaacgaaaaagtaaacataggaatgaaaggaaattatcagtattaggcaaagatggaaagccagtttctgaatatattataaaaacagatgagaatgttcgtaaagaaaacaacaaaaaagagagacgcttgtcagctgaaaaaactaaggcagagcacaaatcaagaaggtcaagtgattctaaaattcagaaagattctctgggttccaagcaacatggtatcacattacagagaagaagtgaaagttattcggaagataagtgtgatatggactccactaacatggatagtaatttgaaaccagaagaggttgttcacaaggagaaacgacgaacaaagagcttgttagaagagaaacttgtgttgaagtctaaatcaaaaactcaaggcaaacaggtaaaagttgtagaaacagaattacaagaaggtgccacaaaacaggcaaccactccaaaaccagacaaggagaagaacacagaagaaaatgactcagaaaaacagcgtaagtctaaagttgaagacaaaccttttgaagaaactggtgttgaacctgtattagagactgcttcttcttcagcacatagtacacagaaggattctagtcatagagccaag

SEQ ID NO: 78525 - DNA, 398 bp, Homo sapiens; identical to SEQ ID NO: 61851

SEQ ID NO: 78526 - DNA, 468 bp, Homo sapiens; identical to SEQ ID NO: 61852

SEQ ID NO: 78527 - DNA, 1093 bp, Homo sapiens; identical to SEQ ID NO: 61853

SEQ ID NO: 78528 - DNA, 775 bp, Homo sapiens; identical to SEQ ID NO: 61854

SEQ ID NO: 78529 - DNA, 1416 bp, Homo sapiens; identical to SEQ ID NO: 61855

SEQ ID NO: 78530 - DNA, 474 bp, Homo sapiens; identical to SEQ ID NO: 61856

SEQ ID NO: 78531 - DNA, 492 bp, Homo sapiens; identical to SEQ ID NO: 61857

SEQ ID NO: 78532 - DNA, 596 bp, Homo sapiens; identical to SEQ ID NO: 61858

SEQ ID NO: 78533 - DNA, 1164 bp, Homo sapiens; identical to SEQ ID NO: 61859

SEQ ID NO: 78534 - DNA, 326 bp, Homo sapiens; identical to SEQ ID NO: 61860

SEQ ID NO: 78535 - DNA, 493 bp, Homo sapiens; identical to SEQ ID NO: 61861

SEQ ID NO: 78536 - DNA, 449 bp, Homo sapiens
ctgagatcctgagacaatgaatcatagtgaaagattcgttttcattgcagagtggtatgatccaaatgcttcacttcttcgacgttatgagcttttattttacccaggggatggatctgttgaaatgcatgatgtaaagaatcatcgcacctttttaaagcggaccaaatatgataacctgcacttggaagatttatttataggcaacaaagtgaatgtcttttctcgacaactggtattaattgactatggggatcaatatacagctcgccagctgggcagtaggaaagaaaagaaagaagcattggattttcatgtagatcaccagtcaagaccctttttcaatgagctgatccagtttattacaactggtcctattattgccatggagattttaagagatgatgctatatgtgaatggaaaagactgctgggacctgcaaactctg

SEQ ID NO: 78537 - DNA, 655 bp, Homo sapiens; identical to SEQ ID NO: 61862

SEQ ID NO: 78538 - DNA, 349 bp, Homo sapiens; identical to SEQ ID NO: 61863

SEQ ID NO: 78539 - DNA, 464 bp, Homo sapiens
agccaagacgcctcgatgtaccagtgcaccacgtgcagacagtgcaccatgcacagctcacagagcctacggggcaagtcagtatctgcgattcatagctctgcaattatcgcaggcatggatcgagctgttccctgcacgtgatcagcactcactacgccatttccccctcaactccacctaccccatctccctcatgctgctattttaaaaggtgtccagtgtgaggttcatctggtggaatctgggggagacttggtaaacccgggggggtcccttagactctcctgtgcaggatctggattcattttcagcaatgcctggatgagttgggtccgccaggctccagggaaggggctggagtggattggccgtgttaaagatgtaagtgacggtgcgcttataaaatatggaccacccgtggaaggcagattcttcatctcaagagacgactcaaaagagac

SEQ ID NO: 78540 - DNA, 452 bp, Homo sapiens; identical to SEQ ID NO: 61865

SEQ ID NO: 78541 - DNA, 328 bp, Homo sapiens; identical to SEQ ID NO: 61866

SEQ ID NO: 78542 - DNA, 395 bp, Homo sapiens
ctgcaacagatgaaatggaaagtagttcctatagagataggtctccacacagaagcagccctagtgacaccaggcgtaaatgtggattttgccatgtaggggaggaagaaaatgaagcacgaggaaaactgcatatatttaatgccaagaaggcagttgcccattataagtgcatgttgttttcttctggcacagtccagctcacaacaacatcaagagcagaatttggagactttgatattaaaactgtacttcaggagattaaacgaggaaaaagaatgaaatgtacactttgcagtcagcctggtgctactattggatgtgaaataaaagcctgtgttaagacttaccattcccactgtggagtacaagacaaagctaaatacattgaaaat

SEQ ID NO: 78543 - DNA, 446 bp, Homo sapiens; identical to SEQ ID NO: 61868

SEQ ID NO: 78544 - DNA, 726 bp, Homo sapiens; identical to SEQ ID NO: 61869

SEQ ID NO: 78545 - DNA, 763 bp, Homo sapiens; identical to SEQ ID NO: 61870

SEQ ID NO: 78546 - DNA, 302 bp, Homo sapiens
agtccaggatgttgttaattcagcatgccaatcagagaacttgctctctgcatgtggcacttcagtggtgtttttgctaatgcatgtattcaacttttaatgcctagccccaggatatagtttgcaggcactttaaattaaatggttgcagatggaatgggaagttagagtaaggtgtagaaaattcatttcttctcccgaccctctcttgcttttctcctaggcttggcactgctgcaccaccaaaggcaaacttcattgaagctgacaagtattttcttccattcgagctagcttgccag

SEQ ID NO: 78547 - DNA, 298 bp, Homo sapiens; identical to SEQ ID NO: 40553

SEQ ID NO: 78548 - DNA, 331 bp, Homo sapiens
attaaggtatgtgaggagttgttaatttctcaattctcaccagaaaaaagaaaagaaatcattaaccccagctgtgccagttgaatctaaaccggataaaccatcgggaaaggtatgaagacaacagtgtccttctacatgagacagttactcatatgctctgtatttatcataatctgatttcttgtgggcaaataatatgaggggggtaatttaaaggaccattttaatgaattattgtttcaagctaatattgaaagtgtgggttggaagtatggttttcacactcatgtttgtaacacttgctattataaccccttttttaaaaaaa

SEQ ID NO: 78549 - DNA, 341 bp, Homo sapiens; identical to SEQ ID NO: 61875

SEQ ID NO: 78550 - DNA, 2870 bp, Homo sapiens; identical to SEQ ID NO: 61877

SEQ ID NO: 78551 - DNA, 350 bp, Homo sapiens; identical to SEQ ID NO: 61878

SEQ ID NO: 78552 - DNA, 620 bp, Homo sapiens
aggaaactgttaaaattgtattcaacaatccttgttcgatatctcctttgatatttaaacttttaccagtgtattaaaatgatgtctttgcattcagaaggttaaagaaatttgttttttaaagtcaggaagcatctaaatatggtgtcctccggaaaaaagtattccaggaaatctgggaagccgtctgtggaagatcagtttacgagagcctatgactttgagactgaagataagaaagatctgagtggatcagaggaagatgttattgaaggtgcagtacatctcatgttgggcagtgatgtccttcagttcatttgttttgaacccattgagactatcgtacaacttagtttgtaaagcattttcaggtatggtcttccctcccccggtatttgtggttacagaacctgctgacacggatggccagctgtacttgtgtttctcatttgatccttatattgcagtatcggagttacagaagcttattcggcaactcttgcttttgcagttatttccaaaatatctgatatatagtatgtggcttactgtgacattaacccagggagacttgaaaaattattcctataaaatggtcctgaatcctgatttaatttcac

SEQ ID NO: 78553 - DNA, 184 bp, Homo sapiens; identical to SEQ ID NO: 61880

SEQ ID NO: 78554 - DNA, 563 bp, Homo sapiens
ttttttttttttaaaactgaaatgaattttaatacagaaaatgaagacaggcattttgcaaatttatcactcaaaggggtatctctatttgaggaaatcagcgtgttacactttgaaagatgaaatgttacagcttgtacaccaaaattaaaaaatgaaattaaattaaaaaatgaaatggttaccaaggtaatgcaggtcaggggatcaaaggtgaagggtcacacattattaaaaagaaatccaaaaggacggctgcatcatgatctctcattagtgttccagcggtgcctctcttttggtaaacttgaacatttcggcagacattcaagcagctttttcggtaaaaagatttttacatgactactattgctgttcccatgatcatcttctataggtggcacggtgttgagaacacagtaggtgctagttccgcagaatacactttgggaaacgctcttccggcttgttttcggcagccatttcccctccgcgcgccacatcctcctcctcctcgcgaccgggaccccgagcgcgcgcctcgtaccgccgccgccgccggc

SEQ ID NO: 78555 - DNA, 413 bp, Homo sapiens
ccgcatcactgctttaggattacacagtgattggtgtttaaattcctgctattttagccatccctttcccagacatccttgcacagaaggaagctccacacattgggcagggcagtaacgggaacatctgtgtcctctccacagatccaccgtgggcgccctgctggcatctgagctgggatggaaattctatgatgctgatgattatcacccggaggaaaatcgaaggaagatgggaaaaggcataccgctcaatgaccaggaccggattccatggctctgtaacttgcatgacattttactaagagatgtagcctcgggacagcgtgtggttctagcctgttcagccctgaagaaaacgtacagagacatattaacacaaggaaaagatggtgtagctctgaagagtgagg

SEQ ID NO: 78556 - DNA, 754 bp, Homo sapiens
  misc_feature (1)...(754): n = a,t,c or g
cttttgaaaagcagtgaaaaaaagctacaagaaacaccaactgaagcaaatcacgtacaaagactgagacaaatgctggcttgccctccacatggtttactggacagggtcataacaaatgttaccatcattgttcttctgtgggctgtagtttggtcaattactggcagtgaatgtcttcctggaggaaacctatttggaattataatcctattctattgtgccatcattggtggtaaacttttggggcttattaagttacctacattgcctccactgccttctcttcttggcatgctgcttgcagggtttctcatcagaaatatcccagtcatcaacgataatgtgcagatcaagcacaagtggtcttcctctttgagaagcatagccctgtctatcattctggttcgtgctggccttggtctggattcaaaggccctgaagaagttaaagggcgtttgtgtaagactgtccatgggtccctgtattgtggaggcgtgcacatctgctcttcttgcccattacctgctgggtttaccatggcaatggggatttatactgnggtaatgattgtttctttgtcatatgaaaatatgtagggacatttagggctttccctgattgcatacaagagaatgcataatagaattttcttatagatatcagacaatgcaacatagatgttacagcataatttaaatattctaacttccaacataagttatgtgttaataggcgctaactcttacagcta

SEQ ID NO: 78557 - DNA, 345 bp, Homo sapiens; identical to SEQ ID NO: 61883

SEQ ID NO: 78558 - DNA, 634 bp, Homo sapiens
aggaatttgtagcacggtgtcagaataaaataaagggtatttcactgcttcttaatttctttcaattagactgagatctttttcttaaagagagaagaacgtttttattgcatgttattgtttctgaaaagagtaggccgtattttactgagatcacggatttgttatatattatgttttggtcttctaacattcttcagtggattttctctaaagtagtacgtacagaaggagttgaatagaaaacagtaaatcatcacgtaataattctgggatttttgggtttgtcacaactgagaaatattgctgatggtggatggtcctcaagtgtgaaaatgttccttgtgaattgcttgtatccaaaatatacacacagcattaagggctggtttttattttttattttttccaatcctcttttcttctcaaggtgtccaagtcacacagaaccacagaatctcacaggtgtctcagaattccttctcctgggactctcagaggatccagaactgcagcctgtcctcgcttggctgtccttgtccatttacctggtcacagtgctggggaacctgctcatcatcctggctgtcagctctgactcccacctccacacccccatatacttcttccagtt

SEQ ID NO: 78559 - DNA, 1037 bp, Homo sapiens; identical to SEQ ID NO: 61885

SEQ ID NO: 78560 - DNA, 1673 bp, Homo sapiens; identical to SEQ ID NO: 61886

SEQ ID NO: 78561 - DNA, 329 bp, Homo sapiens; identical to SEQ ID NO: 61887

SEQ ID NO: 78562 - DNA, 333 bp, Homo sapiens; identical to SEQ ID NO: 61888

SEQ ID NO: 78563 - DNA, 857 bp, Homo sapiens; identical to SEQ ID NO: 61889

SEQ ID NO: 78564 - DNA, 88 bp, Homo sapiens; identical to SEQ ID NO: 61890

SEQ ID NO: 78565 - DNA, 1092 bp, Homo sapiens; identical to SEQ ID NO: 61891

SEQ ID NO: 78566 - DNA, 671 bp, Homo sapiens; identical to SEQ ID NO: 61893

SEQ ID NO: 78567 - DNA, 335 bp, Homo sapiens; identical to SEQ ID NO: 61894

SEQ ID NO: 78568 - DNA, 348 bp, Homo sapiens; identical to SEQ ID NO: 61895

SEQ ID NO: 78569 - DNA, 829 bp, Homo sapiens; identical to SEQ ID NO: 61896

SEQ ID NO: 78570 - DNA, 336 bp, Homo sapiens; identical to SEQ ID NO: 61897

SEQ ID NO: 78571 - DNA, 586 bp, Homo sapiens
aggcccccacaggatgccgctgtacctcttgaaagtgcaggctccgtaggacccaggggcgagggaggggttgctcccccaggggcagaaagcgctgtcccgctgtacagaatcagcttcagctacggtctcctccaagcggctgccgaagatggcggaggtgcaggtcctggtgcttgatggtcgaggccatctcctgggccgcctggcggccatcgtggctaaacaggtactgctgggccggaaggtggtggtcgtacgctgtgaaggcatcaacatttctggcaatttctacagaaacaagttgaagtacctggctttcctccgcaagcggatgaacaccaacccttcccgaggcccctaccacttccgggcccccagccgcatcttctggcggaccgtgcgaggtatgctgccccacaaaaccaagcgaggccaggccgctctggaccgtctcaaggtgtttgacggcatcccaccgccctacgacaagaaaaagcggatggtggttcctgctgccctcaaggtcgtgcgtctgaagcctacaagaaagtttgcctatctggggcgcctggctcacgaggtt

SEQ ID NO: 78572 - DNA, 1366 bp, Homo sapiens; identical to SEQ ID NO: 61898

SEQ ID NO: 78573 - DNA, 478 bp, Homo sapiens; identical to SEQ ID NO: 61899

SEQ ID NO: 78574 - DNA, 386 bp, Homo sapiens
aagagctcagtctcttcaccaggggctcccagtccttccatctgggaggccaaggcggcttcgcgttctgagaatagacggaacctctgttactctgtgaccggcaggcaccgggagatccgtagctcagacgccaggacatcccggaagctgggaaatggtctcgctgtctctaagccggacctgatcacctttttggagcaaaggaaagagccctggaatgtgaagagtgcagagacagtagccatccagccagatatcttttctcatgatactcaaggcctcttaagaaagaagcttatagaagcatcattccaaaaagtgatattggatggatatgggagctgtggccctcagaatttaaacttaaggaaagagtgggaaag

SEQ ID NO: 78575 - DNA, 320 bp, Homo sapiens; identical to SEQ ID NO: 61902

SEQ ID NO: 78576 - DNA, 828 bp, Homo sapiens; identical to SEQ ID NO: 61903

SEQ ID NO: 78577 - DNA, 616 bp, Homo sapiens; identical to SEQ ID NO: 61905

SEQ ID NO: 78578 - DNA, 573 bp, Homo sapiens; identical to SEQ ID NO: 61906

SEQ ID NO: 78579 - DNA, 814 bp, Homo sapiens; identical to SEQ ID NO: 61907

SEQ ID NO: 78580 - DNA, 574 bp, Homo sapiens; identical to SEQ ID NO: 61908

SEQ ID NO: 78581 - DNA, 496 bp, Homo sapiens
aaggtcacgccgcggcgcgattgacttctaaagagtcatgctgggatgaaaaagcccagaagagaaggaagaggaaagcaaaggagtcagggatggctcttcctcagggacacttaacattcagggacgtggccatagaattctctcaggcggagtggaaatgcctggaccctgcacagagggctttatacaaggatgtgatgttggagaactacaggaacctggtctccctgggaatctctcttcctgacctgaatattaactccatgttggagcaaaggagggagccctggtctggtgagagtgaagtgaaaatagcaaaaaattcagatgggagggagtgcatcaaaggtgtgaacacagggagcagctatgcattgggaagcaatgcagaagacaaaccaattaaaaaacaacttggagtatcctttcacttacatctgtctgaactggagctatttccagatgaccgggtaataaatggatgtaatcaaaa

SEQ ID NO: 78582 - DNA, 1590 bp, Homo sapiens
ggcacgagggaagttgctttttccatgatctgacttggttatatttcctattaactgacaaagcatttaaaaacagttaaaaattgtctcgacaggcattttaaatgtcaagacattataaaatactttagatttatacagcaattgtgaacacctttgacaaatgaacatgtctgttcagcctttttggtacccctttttattttgcttaggtagatcaaattctaagttgatcttttctagcagcagggtcagagtctagtgatcgtttttaaaatggcttagatgctacctttcttttctgagaactcagtgtgatataatccttataagatattgacagctaattttatggattatcctaccgggacagtggaacctaagtagtttgaagacgagaaattgttttgattcagaagcaatgggttcactagtgaaaggaaagatcccacgatcgtaagtggtaaatgtttatatttgttgaataactctctgaaaaaaggaaataaagtagattagccttggtaagaggtggcttaagagtggttttatgatctaagttttatttgaaaaatgtgtgaaacttgtttaaggtaaatgtgagaattaataaaggaattgagaagaaagatatttgatcgttttttgaataacatttacctaattaagaagttaactacttttctgaggcatcttttttatccctctccgttttcctcctcccaaaagaagttgttcttgattttaaaagtttgataaattaacaaggttgaaatttgaatatgatatacattgaattaagatttgttcagggctttcttaattcagttctcaagtatgaatttctcaggtctgaattttttaggtagaaaattctcaagtatgaatttcttttctagcaattgcagagcctgtttttgctgtggtcaaagctgactgatagactgtggtttaagtcaacttattcaaaaatgtcttcaaccctgctggtcgagacaagaaatctttatggggtagttggagctgaaagcaggttaggcacctattaaaacatcacagaacaggttatattgtggtttgaagaactggatattccccaatgttttaactgagtttatgtgcctaagtcttcaaaatggggtttatagtatcaagtgaggctgtttggttcttctgaaaaacacactcattttcctggacacatgggctaggactttaatccccaggtacatgcctatttttgaaaaagcctccttttttaaggagggtaactgtttatttaaaacaatcctgtttccaccccaaatatgttagcccctgtaaaattgccatttccaaaagtttgaagaaaccaaatttgggaaagttaataattcgcctttcctatccttcaaggattcaaattgaccgttttttctcctttttttgtcttttaacttactgtaattatgccccaatagttcgggtgccaagtgtcacgcctataatcccagcactttgagaggctgaggtgggaggattgtttgagtccaggagtttgagacccagcctgggcctcattgcaagacccctgtcctaaaaaaaaaaaaa

SEQ ID NO: 78583 - DNA, 1807 bp, Homo sapiens; identical to SEQ ID NO: 61911
  misc_feature (1)...(1807): n = a,t,c or g

SEQ ID NO: 78584 - DNA, 542 bp, Homo sapiens; identical to SEQ ID NO: 61912

SEQ ID NO: 78585 - DNA, 978 bp, Homo sapiens; identical to SEQ ID NO: 61913

SEQ ID NO: 78586 - DNA, 979 bp, Homo sapiens; identical to SEQ ID NO: 61914

SEQ ID NO: 78587 - DNA, 1765 bp, Homo sapiens; identical to SEQ ID NO: 61915

SEQ ID NO: 78588 - DNA, 538 bp, Homo sapiens; identical to SEQ ID NO: 61916

SEQ ID NO: 78589 - DNA, 580 bp, Homo sapiens; identical to SEQ ID NO: 61917

SEQ ID NO: 78590 - DNA, 981 bp, Homo sapiens
cggacgcgtgggcttttcctgcagtcgcgatgtgtgattgcagatggaaaacaaagtattttatgcctacgtttctaagatagaagaaatggacttgttgaaaagaagccagtttgtaaaggacacagtaggagaatttaaggtaccaccaccagagagaggttgagagtgcgtttgacttttggttttgtcaaacgcgaggttttccgtttccttccggggcaagttgaacctgtccagcccccgtaggctgtgggtcaaaagtgccggtcaaaatggaagtgaatccccctaaacaggagcacctgctggcgctaaaagtgatgcggctgactaagcctactttattcaccaatatcccagtaacatgtgaagagaaagacttacctggagatctctttaaccagctgatgagagatgatccttcaaccgttaatggtgcagaagttttaatgttgggagaaatgctgactttaccacagaattttgggaatatatttttgggagagaccttttccagttatatcagcgttcataatgatagcaatcaagttgtaaaagacatattagtaaaagctgatcttcagacaagttctcagcgtttaaatctttcagcctccaatgctgcagtggctgaacttaaaccggattgttgtattgatgatgtcatacatcatgaagtcaaagaaattggaacacacatcttggtatgtgctgtgagttatacaactcaggctggagaaaaaatgtatttcagaaaattcttcaaatttcaggttctcaaaccattggatgtgaaaaccaaattttacaatgcagagagtgacctcagttctgtgactgatgaagtatttctggaagcccagattcagaatatgacaacctcacctatgtttatggagaaggtttcactggagccatctattatgtacaatgtaacagaattaaattcagtcagccaagctggagaatgtgtgtcta

SEQ ID NO: 78591 - DNA, 472 bp, Homo sapiens; identical to SEQ ID NO: 61919

SEQ ID NO: 78592 - DNA, 780 bp, Homo sapiens; identical to SEQ ID NO: 61920

SEQ ID NO: 78593 - DNA, 1271 bp, Homo sapiens; identical to SEQ ID NO: 61921

SEQ ID NO: 78594 - DNA, 1583 bp, Homo sapiens
cccacgcgtgcgcacgtagcaacggggctggttcagggtctgaaacagagtttgggggttgtttgggattagtgaagctactgcctttgccgccagcgcagcctcagagtttgattatttgcaatgtcaggctttgaaaacttaaacacggatttctaccagacaagttacagcatcgatgatcagtcacagcagtcctatgattatggaggaagtggaggaccctatagcaaacagtatgctggctatgactattcgcagcaaggcagatttgtccctccagacatgatgcagccacaacagccatacaccgggcagatttaccagccaactcaggcatatactccagcttcacctcagcctttctatggaaacaactttgaggatgagccacctttattagaagagttaggtatcaattttgaccacatctggcaaaaaacactaacagtattacatccgttaaaagtagcagatggcagcatcatgaatgaaactgatttggcaggtccaatggttttttgccttgcttttggagccacattgctactggctggcaaaatccagtttggctatgtatacgggatcagtgcaattggatgtctaggaatgttttgtttattaaacttaatgagtatgacaggtgtttcatttggttgtgtggcaagtgtccttggatattgtcttctgcccatgatcctactttccagctttgcagtgatattttctttgcaaggaatggtaggaatcattctcactgctgggattattggatggtgtagtttttctgcttccaaaatatttatttctgcattagccatggaaggacagcaacttttagtagcatatccttgcgctttgttatatggagtctttgccctgatttccgtcttttgaaaatttatctgggatgtggacatcagtgggccagatgtacaaaaaggaccttgaactcttaaattggaccagcaaactgctgcagcgcaactctcatgcagatttacatttgactgttggagcaatgaaagtaaacgtgtatctcttgttcatttttatagaacttttgcatactatattggatttacctgcggtgtgactagctttaaatgtttgtgtttatacagataagaaatgctatttctttctggttcctgcagccattgaaaaacctttttccttgcaaattataatgtttttgatagatttttatcaactgtgggaaaccaaacacaaagctgataacctttcttaaaaacgacccagtcacagtaaagaagacacaagacggccgggcgtggtagctcacgcctgtaatcccagcactttgggaggccgaggcgggcggatcacaagggcaggagatcgagaccatcctggttaacacggtgaaaccccgactctactaaaactacaaaaaaaattagctgggcgtggtggcgggcgcctgtagtcccagctactcaggaggctgaggcaggagaaaagtgtgaacccaggaggcggagcttgcagtgagccgagatcacaccactgcactccatccagcctgggtgacagggtgagactctgtctcaaaaaaaaaa

SEQ ID NO: 78595 - DNA, 547 bp, Homo sapiens; identical to SEQ ID NO: 61923

SEQ ID NO: 78596 - DNA, 598 bp, Homo sapiens; identical to SEQ ID NO: 61924

SEQ ID NO: 78597 - DNA, 585 bp, Homo sapiens; identical to SEQ ID NO: 61925

SEQ ID NO: 78598 - DNA, 461 bp, Homo sapiens; identical to SEQ ID NO: 61927

SEQ ID NO: 78599 - DNA, 991 bp, Homo sapiens; identical to SEQ ID NO: 61928

SEQ ID NO: 78600 - DNA, 909 bp, Homo sapiens; identical to SEQ ID NO: 61929

SEQ ID NO: 78601 - DNA, 440 bp, Homo sapiens; identical to SEQ ID NO: 61930

SEQ ID NO: 78602 - DNA, 678 bp, Homo sapiens; identical to SEQ ID NO: 61931

SEQ ID NO: 78603 - DNA, 546 bp, Homo sapiens; identical to SEQ ID NO: 61932

SEQ ID NO: 78604 - DNA, 685 bp, Homo sapiens; identical to SEQ ID NO: 61933
  misc_feature (1)...(685): n = a,t,c or g

SEQ ID NO: 78605 - DNA, 375 bp, Homo sapiens
cattgcagccaaggactgctccccaccccgcttctccgtgtctctacccttctctttaaacttgcctcctttactatgggcaaccttccaccctccatttctccttcttctcccttagcctgtgttctcaagagcttaaaacctcttcacctcttgcctgacctaaaatctaagcatcttattttcttctccaacaccgcttggccccaatacaaactcgacaatggttttaaatggccagaaaatgacactttcgatttctccatcccacgagacctagatactttttgtcgaaaaaagggcaaatggtctgaggtgccttacgtccaggcatttttcacactttgttccctcctgtcgtacatgacacatacc

SEQ ID NO: 78606 - DNA, 695 bp, Homo sapiens; identical to SEQ ID NO: 61935

SEQ ID NO: 78607 - DNA, 1158 bp, Homo sapiens; identical to SEQ ID NO: 61936

SEQ ID NO: 78608 - DNA, 435 bp, Homo sapiens; identical to SEQ ID NO: 61937

SEQ ID NO: 78609 - DNA, 1289 bp, Homo sapiens; identical to SEQ ID NO: 61938

SEQ ID NO: 78610 - DNA, 353 bp, Homo sapiens; identical to SEQ ID NO: 61939

SEQ ID NO: 78611 - DNA, 971 bp, Homo sapiens; identical to SEQ ID NO: 61940

SEQ ID NO: 78612 - DNA, 364 bp, Homo sapiens
acagggcgatggcaggttcgccgggtgtgaggcttcacagcggtccggtgaccaagtcgaggatttttctggtggtctagtctcagagattacatctgtagtcagcacaatgattcccttccaagcccagtggtgcccagttgcctccaggtcccagacctttatgtggacaagaaaagcttacagaggaaatggtaattctccacttgcacactgaggtgtccagttgcagcccatggagatccagttcaattatgaatctcaggaacaccaccttctgtcagatggtgagaacaagaccaagattggaaagccagcttcagaggagggaattacagcaaaaattgaaccattgacagaagag

SEQ ID NO: 78613 - DNA, 814 bp, Homo sapiens; identical to SEQ ID NO: 61941

SEQ ID NO: 78614 - DNA, 691 bp, Homo sapiens; identical to SEQ ID NO: 61942

SEQ ID NO: 78615 - DNA, 418 bp, Homo sapiens; identical to SEQ ID NO: 61943

SEQ ID NO: 78616 - DNA, 484 bp, Homo sapiens
atcagctttaacataattctcatctttgggtgtgattttttaaagagaagaaataaaatattgtaatcctgtagttgtttatatccaagtttaaatacagtatctattattttgtccagatgctttgggaaaatggaattaatggcattttagcagatgaaatgggattgggtaagacagttcagtgcattgctactattgcattgatgattcagagaggagtaccaggaccttttcttgtctgtggccctttgtctacacttcctaactggatggctgaattcaaaagatttacaccagatgtaagacatgcttccttatgttaaaattataattttacatgttttcttatgctttgttgtagtaggaattaaattgtagaactcttataatcaaaagtcggcgcgaccgcgaattcgaatcctcaagagatctctctagagggctcggtggggtgtcttcgtcgtggtttttctgtctttgt

SEQ ID NO: 78617 - DNA, 962 bp, Homo sapiens; identical to SEQ ID NO: 61946

SEQ ID NO: 78618 - DNA, 1440 bp, Homo sapiens; identical to SEQ ID NO: 61947

SEQ ID NO: 78619 - DNA, 973 bp, Homo sapiens
ctttctcctgcagcgataagggcagtcgacagtctttagtagggaaaggagacaagtgctagctactgccgcccaagtggaaggaattatctatagagtaagtatgctaatcttgactaagactgcaggagttttttttaaaccatcaaaaaggaaagtttatgaatttttaagaagttttaattttcatcctggaacactatttcttcataaaatagtattgggaattgaaactagttgtgatgatacagcagctgctgtggtggatgaaactggaaatgtgttgggagaagcaatacattcccaaactgaagttcatttaaaaacaggtgggattgttcctccagcagctcaacagcttcacagagaaaatattcaacgaatagtacaagaagctctttctgccagtggagtctctccaagtgacctctcagcaattgcaactaccataaaaccaggacttgctttaagcctgggagtgggcttatcatttagcttacagctggtaggacagttaaaaaagccattcattcccattcatcatatggaggctcatgcacttactattaggttgaccaataaagtagaatttccttttttagttcttttgatttctggaggtcactgtctgttggcattagttcaaggagtttcagattttctgcttcttggaaagtctttggacatagcaccaggtgacatgctcttttaaagataggaattatggatggtcctccattcttctccagactcttctattcccgagtacaaatgatagcagagccgttggattgttcctaatgtggtaaatgcttctgggataccagctctagaatgagccaggcttgctattaaattccctgtcaaggcaatagtagaagtccgcactgaattcagactatcccctaaaatagtaacacctcttgcagacaaaatatttaggtccatctctgtaatgactttcggacgagtg

SEQ ID NO: 78620 - DNA, 920 bp, Homo sapiens; identical to SEQ ID NO: 61949

SEQ ID NO: 78621 - DNA, 2263 bp, Homo sapiens; identical to SEQ ID NO: 61950

SEQ ID NO: 78622 - DNA, 2654 bp, Homo sapiens; identical to SEQ ID NO: 61951

SEQ ID NO: 78623 - DNA, 563 bp, Homo sapiens; identical to SEQ ID NO: 61952
  misc_feature (1)...(563): n = a,t,c or g

SEQ ID NO: 78624 - DNA, 436 bp, Homo sapiens; identical to SEQ ID NO: 61953

SEQ ID NO: 78625 - DNA, 589 bp, Homo sapiens; identical to SEQ ID NO: 61954

SEQ ID NO: 78626 - DNA, 534 bp, Homo sapiens; identical to SEQ ID NO: 61955

SEQ ID NO: 78627 - DNA, 1065 bp, Homo sapiens; identical to SEQ ID NO: 61956

SEQ ID NO: 78628 - DNA, 676 bp, Homo sapiens; identical to SEQ ID NO: 61957

SEQ ID NO: 78629 - DNA, 832 bp, Homo sapiens; identical to SEQ ID NO: 61959

SEQ ID NO: 78630 - DNA, 882 bp, Homo sapiens; identical to SEQ ID NO: 61960

SEQ ID NO: 78631 - DNA, 645 bp, Homo sapiens; identical to SEQ ID NO: 61961

SEQ ID NO: 78632 - DNA, 845 bp, Homo sapiens; identical to SEQ ID NO: 61962

SEQ ID NO: 78633 - DNA, 639 bp, Homo sapiens; identical to SEQ ID NO: 61963

SEQ ID NO: 78634 - DNA, 601 bp, Homo sapiens
cagatagaggataaatctcctggcaaagcccagaatgaccacagccctggaacctgaggaccaaaaaggacttctgataattaaggcagaggaccattactggggacaggattccagctcacaaaagtgcagtcctcacaggagggaactctatagacaacacttcaggaagctctgctatcaggatgcacctggaccccgtgaagctcttacccagctgtgggagctctgccgtcagtggctgaggccagaatgccacaccaaggagcagattttagacctgctggtgctagaacagttcctgagcattcttcctaaagacctgcaagcatgggtgcgtgcacaccatccagagactggagaggaggcagtgacggtactggaggatctggagagagagcttgatgaacctggaaagcaggtcccaggcaattcagaaagacgggacatactcatggacaagttggcccccttgggaaggccatatgaatcactgactgtccagctccatcccaaaaagacccagctggagcaggaagctgggaaaccacaaaggaatggtgataaaactaggactaagaatgaagagttgttccagaag

SEQ ID NO: 78635 - DNA, 856 bp, Homo sapiens; identical to SEQ ID NO: 61964

SEQ ID NO: 78636 - DNA, 556 bp, Homo sapiens; identical to SEQ ID NO: 61965

SEQ ID NO: 78637 - DNA, 766 bp, Homo sapiens; identical to SEQ ID NO: 61966

SEQ ID NO: 78638 - DNA, 438 bp, Homo sapiens; identical to SEQ ID NO: 61967
  misc_feature (1)...(438): n = a,t,c or g

SEQ ID NO: 78639 - DNA, 987 bp, Homo sapiens; identical to SEQ ID NO: 61968

SEQ ID NO: 78640 - DNA, 509 bp, Homo sapiens; identical to SEQ ID NO: 61969

SEQ ID NO: 78641 - DNA, 768 bp, Homo sapiens; identical to SEQ ID NO: 61970
  misc_feature (1)...(768): n = a,t,c or g

SEQ ID NO: 78642 - DNA, 390 bp, Homo sapiens; identical to SEQ ID NO: 61971

SEQ ID NO: 78643 - DNA, 695 bp, Homo sapiens; identical to SEQ ID NO: 61972

SEQ ID NO: 78644 - DNA, 206 bp, Homo sapiens
ccgttcgccaggcattttttaaaccaaataatttttttgtcccacaacgttggttgttttattaaagtgtgggaaagtccccccccccccaaaaaaccaccccccggggccaaggttttttaccccctttttcccccttgttttggtccttttaaccaaaaccaggtacctccccaaaaaaggttttttcccccaaaaaaaaaaaa

SEQ ID NO: 78645 - DNA, 503 bp, Homo sapiens; identical to SEQ ID NO: 61974

SEQ ID NO: 78646 - DNA, 343 bp, Homo sapiens
atctggaattcgcggccgcgtcgactttttttgcaatacaaatttatatttcttacactccataatttttaacaaccataatgaatcaggtacaatatttaaagcttttatgatttttttttaactaagaaattttaaaacacacatgccacctgcaccatcaggacccaaagcatctcctatgcctgttcctacagaatcatcatctcagaaaacagcagtgcctccccaagtaaaattagtgaaaaagcaagaacaagaagtaaaaacggaagctgaaaaagtcattctggaaaaagtaaaggaaacactatcaatggaaaaaattcctcctatggtaacc

SEQ ID NO: 78647 - DNA, 488 bp, Homo sapiens; identical to SEQ ID NO: 61976

SEQ ID NO: 78648 - DNA, 1347 bp, Homo sapiens; identical to SEQ ID NO: 61977

SEQ ID NO: 78649 - DNA, 874 bp, Homo sapiens; identical to SEQ ID NO: 61978

SEQ ID NO: 78650 - DNA, 658 bp, Homo sapiens; identical to SEQ ID NO: 61979

SEQ ID NO: 78651 - DNA, 1002 bp, Homo sapiens; identical to SEQ ID NO: 61980

SEQ ID NO: 78652 - DNA, 1671 bp, Homo sapiens; identical to SEQ ID NO: 61981

SEQ ID NO: 78653 - DNA, 1143 bp, Homo sapiens
gcggaggcggtgagtgcgcggctccggggctggccgactccgctagtggcccggccggcctgtgctcgggggctccgggctctgggctctgggtgcgcggaccgggccaggctgcttgaagacctcgcgacctgtgtcagcagagccgccctgcaccaccatgtgcatcatcttctttaagtttgatcctcgccctgtttccaaaaacgcgtacaggctcatcttggcagccaacagggatgaattctacagccgaccctccaagttagctgacttctgggggaacaacaacgagatcctcagtgggctggacatggaggaaggcaaggaaggaggcacatggctgggcatcagcacacgtggcaagctggcagcactcaccaactacctgcagccgcagctggactggcaggcccgagggcgaggtgaacttgtcacccactttctgaccactgacgtggacagcttgtcctacctgaagaaggtctctatggagggccatctgtacaatggcttcaacctcatagcagccgacctgagcacagcaaagggagacgtcatttgctactatgggaaccgaggggagcctgatcctatcgttttgacgccaggcacctacgggctgagcaacgcgctgctggagactccctggaggaagctgtgctttgggaagcagctcttcctggaggctgtggaacggagccaggcgctgcccaaggatgtgctcatcgccagcctcctggatgtgctcaacaatgaagaggcgcagctgccagacccggccatcgaggaccagggtggggagtacgtgcagcccatgctgagcaagtacgcggctgtgtgcgtgcgctgccctggctacggcaccaggtattgcagcaccgtgggtgcgccacctcctatcccatgtcccacctcccacgctagagggccggcaaagaagccaagtgcccatagccagagccaggcttcttcctcgcctgagtggattccagagcttctgccctgtccagacgcagctgcaggaaccaacactatcatcctggtagatgcggacggccacgtgaccttcactgagcgtagcatgatggacaaggacctctcccactgggagaccagaacctatgagttcacactgcagag

SEQ ID NO: 78654 - DNA, 390 bp, Homo sapiens
ctttgccttgatttcttcttgtaaaatgtataatatattctccttgtaaggagtaagacatcaatgaagtaattcccgtatacataattataaactagcaacattttagtagcataatatttttttaatatcaaagttccaacctatggtatttgatattgtttttccatttctgcatcatcattcaaatcaatactggttgtacattctgctatctcctcatcttgctttccttaaactctagctgaatgatcaagcaaatccccaatttccagagtttctcttctattacaacctctcactccccctgacaggcttctctgttgcatctacggtgcagtctcacaccaagggaatttggatatggtgtgtgcctcatcccaactggcc

SEQ ID NO: 78655 - DNA, 898 bp, Homo sapiens; identical to SEQ ID NO: 61984
  misc_feature (1)...(898): n = a,t,c or g

SEQ ID NO: 78656 - DNA, 600 bp, Homo sapiens; identical to SEQ ID NO: 61985

SEQ ID NO: 78657 - DNA, 681 bp, Homo sapiens
gagctacggcacctcggccctggctgggcgcgcagcgaggcccaggcccagaggggtgaggcccaggccactccggagcgcgcgctgttcccgcgaagcgagtcgccgtctcgtacagcagcgtgcagggtcaaagacagccggccccccatgtcagtggtctaggatggccagtgaaggcaccaacatcccaagtcctgtggtgcgccagattgacaagcagtttctgatttgcagtatatgcctggaacggtacaagaatcccaaggttctcccctgtctgcacactttctgcgagaggtgcctgcagaactacattcctgcccacagtttaaccctctcctgcccagtgtgccgccagacctccatcctgcccgagaaaggggtggccgcgctccagaacaatttcttcatcacaaacctgatggacgtgctgcagcgaactccaggcagcaacgctgaggagtcttccatcctggagacagtcactgctgtggctgcgggaaagcctctctcttgcccaaaccacgatgggaatgtaagtggctgggatggcagatactgcccgggagcatgactactgtggccttggggaggctttgggtacatcagagattacagattgaaacagaactccatgtggaaaaatcagtaattaaaaaagatttttaccagcaaaaa

SEQ ID NO: 78658 - DNA, 707 bp, Homo sapiens
tgaggaattcggcacgaggcctgcaggcccccggtacgatcagatccggactccggcccggactacgaggcgctgtcggctggagccactgtcaccacgcacatgtggggcatgcgccgagccatggatgctggagcactgcttgatgtaccccatcgactgcgtgatgacccggatgcatagtctacagtctgacccagctggccgctatcgcaatgtgttggaggtcctctggaggattataagaacggagggcctatggaggcccatgagggggctgaacgtcacagcaacaggcgcatggcctgcccacgccctttattttgcctgctacgaaaagttaaaaaagacattgagtgatgtaatccaccctgggggcaatagccatattgccaatggtgcggccgggtgtgtggcaacattacttcatgatgcagccatgaaccctgcggaagtggtcaagcagaggatgcagatgtacaactcaccataccaccgggtgacagactgtgtacgggcagtgtggcaaaatgaaggggccggggccttttaccgcagctacaccacccagctgaccatgaacgttcctttccaagccattcacttcatgacctatgaattcctgcaggagcactttaacccccagagacggtacaacccaagctcccacgtcctctctggagcttgcgcaggagctgtagctgccg

SEQ ID NO: 78659 - DNA, 1103 bp, Homo sapiens; identical to SEQ ID NO: 61988

SEQ ID NO: 78660 - DNA, 1072 bp, Homo sapiens; identical to SEQ ID NO: 61989
  misc_feature (1)...(1072): n = a,t,c or g

SEQ ID NO: 78661 - DNA, 757 bp, Homo sapiens; identical to SEQ ID NO: 61990

SEQ ID NO: 78662 - DNA, 1005 bp, Homo sapiens; identical to SEQ ID NO: 61991

SEQ ID NO: 78663 - DNA, 621 bp, Homo sapiens; identical to SEQ ID NO: 61992

SEQ ID NO: 78664 - DNA, 924 bp, Homo sapiens
gatgagatgaagtttctgtcacgcaggctggagcgcagtggtgcgatctcggctcactgcaacctctgcctcttgggttcaagtgattcttgtgcctcagcctcctgagtagttgggattacatgtgcctgccaccatgcccagctaatttttgtattttttttagtagagatggggtctcaccatgttggtcagtctggtcttgaactcctgtagtaagtgagcttttattttattcaccataaaatatttgcatctcttactcctcaggttcttacataagacaacatttaattaattaagttaccattatagccatcgagggcctgagaaaccacatcctttgcaactgtctcataaaccaagtcctgggaggcatcgtgaagaactccatccaacttaaacgaccagtctgtctgttggttattgacaactcctctccgaatgtctttttttaagtgaatatcaatgcttcttttgtcatctccgtatctgatcatttcatgagcaaagtcatcggtgggtttgacacggacaaatgcatgaacttttttcctagtacccattctagcgttcaccaggcagcgacgctcccgggacgcgactgccgcaaccgaaaccacctgcactccccacgcggggctgcctggctgtgtacatagtcgccatggcaacgggtcgcttccggggattccggaagtgtcggggtggcggaaatgaagtccgaggtcctacgtcgaggatacgggtgaggtcatggccgaatcgggaagacgagagatggggccgattgatctagaaagacttcggcggatgcacatgcgaagtcaaggtcgagatagcgagggaacgaaggccgcacatgaaccaggaagcggagtggcggggcttccggcgccgaggagattcaactacggcggccgc

SEQ ID NO: 78665 - DNA, 849 bp, Homo sapiens; identical to SEQ ID NO: 61994
  misc_feature (1)...(849): n = a,t,c or g

SEQ ID NO: 78666 - DNA, 879 bp, Homo sapiens; identical to SEQ ID NO: 61900

SEQ ID NO: 78667 - DNA, 468 bp, Homo sapiens; identical to SEQ ID NO: 61996

SEQ ID NO: 78668 - DNA, 912 bp, Homo sapiens; identical to SEQ ID NO: 61997

SEQ ID NO: 78669 - DNA, 922 bp, Homo sapiens; identical to SEQ ID NO: 61998

SEQ ID NO: 78670 - DNA, 719 bp, Homo sapiens; identical to SEQ ID NO: 61999

SEQ ID NO: 78671 - DNA, 807 bp, Homo sapiens; identical to SEQ ID NO: 62000

SEQ ID NO: 78672 - DNA, 405 bp, Homo sapiens; identical to SEQ ID NO: 62001

SEQ ID NO: 78673 - DNA, 793 bp, Homo sapiens; identical to SEQ ID NO: 62002
  misc_feature (1)...(793): n = a,t,c or g

SEQ ID NO: 78674 - DNA, 622 bp, Homo sapiens; identical to SEQ ID NO: 62003

SEQ ID NO: 78675 - DNA, 812 bp, Homo sapiens; identical to SEQ ID NO: 62004

SEQ ID NO: 78676 - DNA, 867 bp, Homo sapiens; identical to SEQ ID NO: 62005

SEQ ID NO: 78677 - DNA, 891 bp, Homo sapiens; identical to SEQ ID NO: 62006

SEQ ID NO: 78678 - DNA, 666 bp, Homo sapiens; identical to SEQ ID NO: 62007

SEQ ID NO: 78679 - DNA, 565 bp, Homo sapiens; identical to SEQ ID NO: 62008

SEQ ID NO: 78680 - DNA, 420 bp, Homo sapiens; identical to SEQ ID NO: 62009

SEQ ID NO: 78681 - DNA, 422 bp, Homo sapiens; identical to SEQ ID NO: 62010

SEQ ID NO: 78682 - DNA, 1051 bp, Homo sapiens; identical to SEQ ID NO: 62011
  misc_feature (1)...(1051): n = a,t,c or g

SEQ ID NO: 78683 - DNA, 713 bp, Homo sapiens; identical to SEQ ID NO: 62012

SEQ ID NO: 78684 - DNA, 3396 bp, Homo sapiens; identical to SEQ ID NO: 62013

SEQ ID NO: 78685 - DNA, 723 bp, Homo sapiens; identical to SEQ ID NO: 62014

SEQ ID NO: 78686 - DNA, 412 bp, Homo sapiens
cagatcactcccaaatatagccctctccagaaaccacttggatagaaaaaagtccaaagagaactgaggtgtccaacacatgagtgaggccttcctggatctctagctctcgtcaagccttcccaacaccacgaggaacaaaaatgagccatccaaatgagctttacccaaattcctgacccacggtgtcaagagcaatgaaagggttgtcgtttggctctttccgccatcttttcgtgccgccacaatggtgcacatgaatgtcctgcctgatgctctcaagagcatcaacaatgccgaaagaagaggcaaaccccaggttcttattaggctgtgctccaaaatcatcatctggtttctcactgtaatggtgaagtatggttacattggcaaatttgaacccacgcgtccg

SEQ ID NO: 78687 - DNA, 984 bp, Homo sapiens; identical to SEQ ID NO: 62016

SEQ ID NO: 78688 - DNA, 613 bp, Homo sapiens
ccacgtagtccagggccagagggtcacagactccctggaatgtatgtttcatgagggcagcacctgaaacagggcccagcacataataggtgctcagttaatactccataagtagatgttctttcccagaccccaagctgtttgccttaaagtcccacttgaaaggctggaaaagcaagtcacaggcaagacttgtcctagataaagtaaagtgtgaggaaggggtgcaaatcaagattagaggcatacctgatgtggacctccgaggatcagagatgtcctagtcccagctcatccaccaacttgccatatgactttgggcaagttacctcaccttcagatgcctccattggaaaagaatacaagggtaagaggaggtgacccctgtggggggcctgttatttggaaagtgacagtattacgacttttttcctaactccctcctgtacagaaactcagccaagaatgtttaaagcagctggcaatcaagaagcagcagcacattgacaacataacccagatagaagatgccaccgagaagctcaaggcaagtggacatttcttcctcatacccatggaaagacccacatttccccccagacaaaagggaccc

SEQ ID NO: 78689 - DNA, 977 bp, Homo sapiens; identical to SEQ ID NO: 62018

SEQ ID NO: 78690 - DNA, 474 bp, Homo sapiens; identical to SEQ ID NO: 62019

SEQ ID NO: 78691 - DNA, 1117 bp, Homo sapiens; identical to SEQ ID NO: 62020

SEQ ID NO: 78692 - DNA, 532 bp, Homo sapiens; identical to SEQ ID NO: 62022

SEQ ID NO: 78693 - DNA, 831 bp, Homo sapiens; identical to SEQ ID NO: 62023

SEQ ID NO: 78694 - DNA, 1149 bp, Homo sapiens; identical to SEQ ID NO: 62024

SEQ ID NO: 78695 - DNA, 1196 bp, Homo sapiens; identical to SEQ ID NO: 62025

SEQ ID NO: 78696 - DNA, 1038 bp, Homo sapiens; identical to SEQ ID NO: 62026

SEQ ID NO: 78697 - DNA, 530 bp, Homo sapiens; identical to SEQ ID NO: 62027

SEQ ID NO: 78698 - DNA, 977 bp, Homo sapiens
cggttcgacgacttcgtcttaacattggcatgcagctcaggtgttatgagatggagaaaaggctaaaaacaccagatcttttcaaattccctttctttgaagccatatgttggtttgtagccaaaaacttgctggaaaccctgaaagaactgagagaagatggtttccagcctcaaacttacctagtacagggagtgaaagcactgcatactgctttaaaattatggatgaaaaaagaacttgtatctgaacatgcctttgaaattccagacaatgttagacctggacaccttattaaagaactttctaaagtaattcgagcaatagaggaggaaaacggcaaaccagttaaatctcagggaattcctattgtgtgtccagtttcacgatcctcaaatgaagcaacttccccataccattcccgaagaaagatgaggaaacttcgagatcataatgtccgaactccttctaacctagacatcctagagctccacacaagggaggtcctcaaaagattagagatgtgtccatgggaagaggacatcttgagctctaaactgaatggaaaattcaacaaacatctccaaccatcctccacagtacctgaatggagagcgaaagataatgatctacgattactgctgacaaatggaagaataattaaagatgaaaggcagccctttgcagatcaaagtctttatacagcagatagtgaaaatgaagaggataaaagaaggacaaaaaaggcaaaaatgaagatagaagagagttcaggagtagagggagtggaacatgaagaatctcaaaaaccactgaatgggttttttacaagtgtgaaatcagaactcaggagtagatcatcaggatattctgatatttctgagtcagaagactccggacccgagtgcactgcactgaaaagtatctttaccactgaagagtctgaaagttcaggtgatgaaaaaaaacaaaaaaaa

SEQ ID NO: 78699 - DNA, 745 bp, Homo sapiens; identical to SEQ ID NO: 62030

SEQ ID NO: 78700 - DNA, 1191 bp, Homo sapiens; identical to SEQ ID NO: 62031

SEQ ID NO: 78701 - DNA, 819 bp, Homo sapiens; identical to SEQ ID NO: 62032

SEQ ID NO: 78702 - DNA, 1207 bp, Homo sapiens; identical to SEQ ID NO: 62033

SEQ ID NO: 78703 - DNA, 578 bp, Homo sapiens; identical to SEQ ID NO: 62034

SEQ ID NO: 78704 - DNA, 406 bp, Homo sapiens
ggcagacgaggccggcttctccgcggacagctagggagagtgtcctgggtgtcagccagaacatgtctttcaacctgcaatcatcaaagaaactgttcattttcttaggaaaatcactgtttagtcttctggaggctatgatttttgccttactcccaaagccacggaagaacgttgctggtgaaatagtcctcatcacaggtgctggaagtggactcggaaggctcttagccttgcagtttgcccggctgggatctgttcttgttctctgggatatcaataaggaggggaatgaggaaacatgtaagatggctcgggaagctggagccacaagagtgcacgcctatacctgcgattgcagccaaaaggaaggagtgtatagagtagccgaccaggttaaaaaaga

SEQ ID NO: 78705 - DNA, 839 bp, Homo sapiens; identical to SEQ ID NO: 62036

SEQ ID NO: 78706 - DNA, 1126 bp, Homo sapiens; identical to SEQ ID NO: 62037

SEQ ID NO: 78707 - DNA, 747 bp, Homo sapiens; identical to SEQ ID NO: 62038

SEQ ID NO: 78708 - DNA, 1806 bp, Homo sapiens; identical to SEQ ID NO: 62040

SEQ ID NO: 78709 - DNA, 765 bp, Homo sapiens; identical to SEQ ID NO: 62041

SEQ ID NO: 78710 - DNA, 857 bp, Homo sapiens; identical to SEQ ID NO: 62042
  misc_feature (1)...(857): n = a,t,c or g

SEQ ID NO: 78711 - DNA, 2132 bp, Homo sapiens; identical to SEQ ID NO: 62043

SEQ ID NO: 78712 - DNA, 466 bp, Homo sapiens; identical to SEQ ID NO: 62044

SEQ ID NO: 78713 - DNA, 640 bp, Homo sapiens
cctaatttcaaatcggtaagcggtttttttgcacttggataagcggtttttttgctctttacctaacctctctcacctcccttcaatctctcttctttcagtttcagtttctctcccttcctagtagagacaaaaaggagacacattttatccgtgcatccaaagactccgatgttggtcatggacttgggaagacagtcttcccttggcgtttgatcactgcggagatgccttccttgatcattcacccacattcccttgatggcaggtcaattgcagggatgcctgctttggctgctcacccacattaaagcccaggactcagtcagggatgcctactggaagactggtagctgcccacctccatttctccatgtgtctaccttcctctttaaacttaccttctccactatgggcaaccttccgccatccattcctccctcttcccccttagcctgtgttcttaaaaacctaaaaccccttcaactaacacctgacctaaaacctaaatgtcttattttcttctgtaataccacttggccccaatacaaactcgacaatagaaccaagtggccagagaaatggcactttcgatttgtcttcttacaaaacctagataatttttgtcaacaatgaattt

SEQ ID NO: 78714 - DNA, 508 bp, Homo sapiens; identical to SEQ ID NO: 62046

SEQ ID NO: 78715 - DNA, 1374 bp, Homo sapiens; identical to SEQ ID NO: 62047

SEQ ID NO: 78716 - DNA, 1015 bp, Homo sapiens; identical to SEQ ID NO: 62048

SEQ ID NO: 78717 - DNA, 446 bp, Homo sapiens; identical to SEQ ID NO: 62049

SEQ ID NO: 78718 - DNA, 539 bp, Homo sapiens; identical to SEQ ID NO: 62050

SEQ ID NO: 78719 - DNA, 987 bp, Homo sapiens; identical to SEQ ID NO: 62051

SEQ ID NO: 78720 - DNA, 482 bp, Homo sapiens; identical to SEQ ID NO: 62052

SEQ ID NO: 78721 - DNA, 712 bp, Homo sapiens; identical to SEQ ID NO: 62053

SEQ ID NO: 78722 - DNA, 819 bp, Homo sapiens; identical to SEQ ID NO: 62054
  misc_feature (1)...(819): n = a,t,c or g

SEQ ID NO: 78723 - DNA, 462 bp, Homo sapiens; identical to SEQ ID NO: 62055

SEQ ID NO: 78724 - DNA, 727 bp, Homo sapiens; identical to SEQ ID NO: 62056

SEQ ID NO: 78725 - DNA, 1383 bp, Homo sapiens
tttttttttttttttttaaagctccaaacatttattgtgtcaatgataagcacactttttaaaagacaacatagaatgtatagaaacaaggggttggggactcatgcgcatttccacaatacaggtaattaggttggctggtttcagaagggccagggcatcactcatgacagcgatggtccacgggccctctctatgggactgattcactgttccaatgtgggtctgtttttttgtttttactttttattaaaaaatataaataaaatgggcgctgcagggcctacggctggaacggactctgcaggactctgtcttcggcacaacggcttcttggaggctactgtcagaaaacatcacaaactagcaggatgacagaccacgctgacgtcgactgggcggcacgcgtccaccccacccctgggggcttcaaattttctcagaacttaagggctctcgagcttccatccgaaaactgccacacatcttgagctctctgggtactacgccgaatgggggtgtgtgaagaacccgcggggtcaggggacttccgtgttcgctttctaagtagattcttaatccatgagtgttctgtgcgtgttgcaagagaaaccatgcactggtgaatggctgtttgcaagttgtacatgtgtagctgctgggctcatctttacaaataccctgcggggcatattctgcactcatcccaggcgtggggattagagctccatgtgcagaacgaggggaggagaggcccctccagtgcagaagtttatctgctatgtgttcctgtttggggcaaattcctctagatgacgttgataaacaatcgtcatcctctggcgtgacctggatgccaacctccacgggattggatgcttttttcatctcgattggtgaaggggaaggtggcttatccacagctttttctaagcagaggctgccattgcattgtttccgtttgtgctcgataaaaataagaatgtcccccaatgggaagttcatctggcactgcccacaggtgaggaggtcatgatccccttctggagctcccaacgggccgtggtctggttcatcatctgtaagaatggcttcaagaggctcgggcgagaattcccgtttgcttaagtgctggggtttgccttgcttgcggcgagacatggtgggctgcggggcgggcggcggcggcggcggcggcggcggcgggcggacgacggctcggttcacatcgggagagccgggttagaaagaaggagactccagagaaaatatcttcatcagtgccttttgacatccaaaataaattagaaataatacaaagatggcgcagggaagatgaattgtgggagagccgtcatggcttttttttaagcaaaaaaaaaa

SEQ ID NO: 78726 - DNA, 1179 bp, Homo sapiens
  misc_feature (1)...(1179): n = a,t,c or g
tggtcccccctnaaaaatttcctgtcccgtgccaacctgaanttggcctaatcaacccttccccccctgancccanccccttttcccctcccatccatccaaagccggatccccggtcctccttcctgaaaaaggaggccagctcccagaacgctggtgctgaagccccatcactgcagacagtgaccccgcttatagttcgaaggtaagctgacaggcgtctctcacttatctgatttctggaggctgaaggcagctctgagtgtctcctcctgcacaggtactgctgctctcttccccggggttggaaggaattgtatcgttgttgcatgctctttgtggatgacatggctgagccaagggagacgccagagcatcctctgaagcagattaaggtaagagctggagagcaggaggagatgcattcacgggtaatgtgcacaacctgtcatgttttgagtgttcggctcctgttcctgaatgcataaaacgaggcatctcagagccgaacacccctcatttcacccaggaggaaggtgcagctcagagctgttacgactagtcagagagagcgaggtggctggttcatgtttgcagatagagacctcactgtgtggtggacttccccacttccggctgccttcatcctgatgggtggcagccttgccctgcagtgggagacccaggtaatgtagttttttgttttgtatccctgatctcttcttgcagtttttgctgggcaggaaagaagaggaggcagtgctggttgggggtgaatggtctccttccctggatggcctcgacccccaggctgacccgcaggtgctggtgcgtaccgccatccgctgtgcgcaggcccagactggcattgatttgagcggctgtaccaagtggtgagtgggcttcctgagcctcagctgcaccaacgcaccaggttggggaggttttgttgggaaggcccggtccctgcccctttctgctggttagctctctgccccctagtcccgttccttccccctctggtgcctcagggtagggtggggtgtatgccaaaatctggctgagccaccaggctgcacttgagactccctggagttgtccttgcaccttgtagggtgattgtgtggttgcggcctccccactgactgatcatttcatgaggacttggtgtgtacactt

SEQ ID NO: 78727 - DNA, 615 bp, Homo sapiens; identical to SEQ ID NO: 62059

SEQ ID NO: 78728 - DNA, 987 bp, Homo sapiens; identical to SEQ ID NO: 62060

SEQ ID NO: 78729 - DNA, 946 bp, Homo sapiens
aagtctgcaaatggacttgaggttttcacattagtataaatgtcaatatgtagtttagggaatttgccttattcctccattcctagcaaaattagatacagaagcagctaattaaatcaggaaaaggaaactgacagtaagtcataggacccattgtcttctctcatgtaaaagtagaagttgtgattcaatctgttctgtaggatttaaaagtataatggcacattgaagtttgacatactgaaattcaggctctgtcaatttcatctctgtaacctttattgtttctgagtcttgagttttctcataagggctcactctccacctgcgcaaggactgcaattcccaggggcctccagggcacccggccgctccagtccagtcgtgcaggcggcgcgctctttctcgctccgctcaagtccaggaaccggttcccgggctcccagcctctcggcagcgcccacgcgcctgggccaaagtccgcgaacggaagccggcggcgaggaggattctgggagttggaggccgaggctgcgacctgcgcaggcgcaaacctgcccctggggtgagggctgtaagtggcgcgattcgcggcagcgccccgatggaacctcctggtcctgtgagggggcccttgcaagattccagctggtatgagccttctgcagagctagtgcagactaggatggctgtatcactaacagcagctgaaactctggcccttcagggtacacagggacaagagaagatgatgatgatgggaccaaaggaagaggaacagtcttgtgagtatgagaccaggctacctgggaaccactctaccagtcaagagatcttccgccaacgcttcaggcatctccgctaccaggagactcctggtccccgggaggccttgagccaactacgagtactctgctgtgagtggctgaggccagagaaacacacg

SEQ ID NO: 78730 - DNA, 1077 bp, Homo sapiens
gtgctacatattcttcagagaattctggtgacgggctataatgtggggttgattattgacattacatggcttccaagttttaaaataacgtaagttttgtgtagtggcaaacaggttctagggctacctctagagcttactagctagtatggtttacagcaattagttttcacagcgataaagggatcagtcactaaccctcctaggaaatatcgactgtgaaagcgccagatactgaagcagtatataaatattaaattagaatattttgcatgccatatagtttcaagttgccttgaaatgaatgggttcacttttatgttcctgttcacagcgcgagtgtatctctatccacgtggggcaggcgggtgtccagatcggcaatgcctgctgggaactgtactgccttgaacatggaattcagcccgatggccaaatgccaagtgataaacccattggtggcggggacgactccttcaacacgttcttcagtgagactggagctggcaagcacgtgcccagagcagtgtttgtggacctggagcccactgtggtcggtaggtgcctgggcactggatggcagctttcctgagagggtgggagagcattggtaaagccccgtgtgggctcctttgaatcctcctgctgaaaggatgggatagacaggcatatgcccatggcattgttaggagagaaactgaaaggttcgtgatcaaagtgtctgtgagactcggctcctaatttaggaaaacctgacctacagggaaaagctgctttgccagcagtaagatgggctgtgaagagattccctcgtgcgtgcctcagccctgctcaggtggccctgcctgcagggtgcagtggcattggttccctcccgaatgctgtgcattctcttatgctggtgcacgagagtcttgccctgcatcttaggcatagaaggtaagtacagaacagtcatttgcttccttcagattcgcagcctgatgtagtttccaaggagagctacaaagaggcagcacctttcagtggccccccaggagatgacagcatcacctaaagcctgggttcccgccagcg

SEQ ID NO: 78731 - DNA, 1523 bp, Homo sapiens
ttttttttttttcaggaaatagaaaccacactaggtatttcaaacagaggggatataagttagggactgattgtgcaggttttgcaaggctcagagagcaaaagtggatgttgcagaatctcagagctggatacttgcaggaagctgctaccacccttagggctggagaacccagggaagctaagaggagggtgcaacgaggctggtgttgggactgccaaaggaaacacagaatgacagctccatctctgcagacctcagatttgaccagggcctctggctgcctgggcagcctcattgccaatggggctggaaaggttctgtcactgtttcagtgggtctgactttctgagttctgtgcacaacccctgagctctgctcctctgggcctgggccaccagtccttgtctgagtgccccaggtctggttatgacttcaggcctcagcacctggttgtctcttctgcaaagaatgcattctcccccagtccacccagaacacacagcctccatccaggtactggctctgagcaggacagagagcatgcagcaggtgctcagcaatatggaaatgggaccaaacagagggagtctccacagctccccgtccctcacagcagaagccagagccgctgcagtgcccagctggtcttcatcacgtctatgagctctgcaatcgctctgcagtcgcctcaactcctggtctcctctgctccttctcactgcacccgcatctcccatgtttgcactggctgttccctctgcctggaatgctccttgcccagttatcccactgtcttctttgcatctggcacacagtagatgctcaataaatgcctttggtgtcacatgtgcagtgtggtgtgacagggaggggctcgctgggcttcagccccggcactctccacttgacctcagcagctccaggtagagtggggagaactcagcgtctccttctagaacaggttccaggatccaacactgaaatgagggtgaggtggttttagcatcattttatcactcttgatttagtttattaatcatacatgattattgattataattgttgctgggcatcctgaggcctcagaagttcaccctttgccctgaccccatgggggccctgcccccgccttccgggaaggacaaacacgggaagaggtcagtgcccgagccacccccaccgccctccctcggggcctcattgctgcagacgctcaccccagacactcactgcaccggagtgagcgcgaccatcatgtccatgctcgtggtctttctcttgctgtggggtgtcacctggggcccagtgacagaagcagccatattttatgagacgcagcccagcctgtgggcagagtccgaatcactgctgaaacccttggccaatgtgacgctgacgtgccaggcccgcctggagactccagacttccagctgcctaattctgaatatatatatatatatatcttttcaccataacccaagaagaacaagtttttatagcttttatttaaagaggtagg

SEQ ID NO: 78732 - DNA, 599 bp, Homo sapiens; identical to SEQ ID NO: 62064

SEQ ID NO: 78733 - DNA, 473 bp, Homo sapiens; identical to SEQ ID NO: 62065

SEQ ID NO: 78734 - DNA, 579 bp, Homo sapiens; identical to SEQ ID NO: 62066

SEQ ID NO: 78735 - DNA, 447 bp, Homo sapiens; identical to SEQ ID NO: 62067

SEQ ID NO: 78736 - DNA, 880 bp, Homo sapiens; identical to SEQ ID NO: 62068

SEQ ID NO: 78737 - DNA, 1227 bp, Homo sapiens; identical to SEQ ID NO: 62069

SEQ ID NO: 78738 - DNA, 629 bp, Homo sapiens; identical to SEQ ID NO: 62071

SEQ ID NO: 78739 - DNA, 480 bp, Homo sapiens; identical to SEQ ID NO: 62072
  misc_feature (1)...(480): n = a,t,c or g

SEQ ID NO: 78740 - DNA, 1203 bp, Homo sapiens
gagtctcctacacgcagtcaacacttgccacgagcggctagacttaggacaggcaagttgccctgccatccttctatcgcccccacccctcctttacttaagggcgatggcagagacgtcctcctcccccttctcctcctctttggtgcctccagccaggaggcgggagcgatccacagcagctgacccagctcaggcactgcctctctcacagccctcaagacacaccatgggcccagaggcaggtttgctacacagcagcgacgacgcaggcggcggccccagcgactcgcaactgcctccctgaccacagcggccaccgcccaacacccccgagaagccatcgccaccaccggcaggagaacctagggtccataaagccatcttcgcgatcgactaaagctacgtcaacaactatggcgggcgacgggcggcgggcagaggcggtgcgggaaggatggggtgtgtacgtcacccccagggcccccatccgagagggaaggggccggctcgcccctcaaaatggcggcagcagcgatgcgcctgcgtacagaactcctccgtcgcgccagggccggcgggaagtgaggttctcggacgagccgccagaagtgtacggcgacttcgagcccctggtggccaaagaaaggtccccggtgggaaaacgaacccggctagaagagttccggtccgattctgcgaaagaggaagtgagagaaagcgcgtactaccttcggtctaggcagcggaggcagccgcgaccccaggaaaccgaggaaatgaagacgcgaaggactacccgccttcagcagcagcactcagagcagcctccgctacagccgtctcctgttatgaccaggagagggctgcgggactctcattcctctgaagaggatgaagcatcttcccaaactgatttaagccaaacgatctcaaagaaaactgtcaggagcatacaagaggctccagcagtgagtgaagatcttgtaatcaggttacgtcgaccccctctaagatacccaagatatgaagccaccagtgtccaacagaaggtcaatttctctgaagaaggagaaactgaagaagatgatcaagacagctctcacagcagtgtcactactgttaaggccagatccagggattctgatgaatctggagataaaaccaccagatcatctagtcaatatatagaatcattttggc

SEQ ID NO: 78741 - DNA, 435 bp, Homo sapiens
  misc_feature (1)...(435): n = a,t,c or g
ttttttttttcaattatttataaaactttaatgagggagaggccctaactcttcctcagctctaccaactactgaaaggaaaagctggtgctggggagccctccacaccactgactgatgaatttcagcacgtcctggcacactgggctgtgggaggtctgtgagcaaatggaagaacatgagaggaacttgttaatgctggaaatacaaaatcagctccatcgcaggcttcagggtctgcatctgccttcctgtaatcccacccatctttntagtgtgtatgtgggttttttgtttgttttgagacaaagtcttgctttgtcgcccaggctggagtgcagtggcacaatctcagctcactgcaagctctgcctcccgggttcaagcaattctcctgcctcagcctcctcagtagctggcattataggcgcgtgc

SEQ ID NO: 78742 - DNA, 1616 bp, Homo sapiens; identical to SEQ ID NO: 62075

SEQ ID NO: 78743 - DNA, 675 bp, Homo sapiens; identical to SEQ ID NO: 62076

SEQ ID NO: 78744 - DNA, 898 bp, Homo sapiens; identical to SEQ ID NO: 62077

SEQ ID NO: 78745 - DNA, 2160 bp, Homo sapiens; identical to SEQ ID NO: 62078
  misc_feature (1)...(2160): n = a,t,c or g

SEQ ID NO: 78746 - DNA, 504 bp, Homo sapiens; identical to SEQ ID NO: 62079
  misc_feature (1)...(504): n = a,t,c or g

SEQ ID NO: 78747 - DNA, 894 bp, Homo sapiens
cggcacgaggttgaggcggcggcgcgaggcagtatggtttgaagtggtgaacatggatttttctcggcttcacatgtacagtcctccccagtgtgtgccggagaacacgggctacacgtatgcgctcagttccagctattcttcagatgctctggattttgagacggagcacaaattggaccctgtatttgattctccacggatgtcccgccgtagtttgcgcctggccacgacagcatgcaccctgggggatggtgaggctgtgggtgccgacagcggcaccagcagcgctgtctccctgaagaaccgagcggccaggtgagcaccgctgcacttcctctccatctgatctctaacaccagttaaaaccaagcttccatactttttggtctgtaaagccgcaccctgtctcgagcttaaggatatgtgtgtgtatgtgcgtgtacagacacacaaacctgccatataaagtggtagtttgctgcaaataaagactgaaaggaactctggaatctgtgtggcttgtctagtattgatgttctgctgttcttgtttcaagttctcttcgctggtgcacgccacgtgcagtgccagcactcaggtctggaagctttgtggtcctgtggtgggagctcagctacagctgtcctaccacatgtgtaaagaggaaggaatcttacagattacacatgctgtcgtggacgatctccgtgtccagttcattcttttttctggagacggagtctcgctcttgtcgcccagggtggaatgcagtggcacgatctcagctcactgcctcctctgtctcccgggttcaagcgattctactgcacgcagcctcctgagtagctgggattacaggcgcccgccaccacgcctgggcaacagagtgag

SEQ ID NO: 78748 - DNA, 410 bp, Homo sapiens; identical to SEQ ID NO: 62081
  misc_feature (1)...(410): n = a,t,c or g

SEQ ID NO: 78749 - DNA, 1179 bp, Homo sapiens
  misc_feature (1)...(1179): n = a,t,c or g
ttttttttttttatagaaaaataagctttatttcaaagcaatctgaaaacagcagtcagggggaccacatttacaaactgataggaaggagcacacagttacatgtccatttagcaaggtatcaagtcaggaatctcaccaattcctgcccaacacctactgagtttcctcttcaggttgaaactaaaaagtagacttgaacatcccagtgatgtctttgttatccaaacatgctccaagttcaggaaagaggacacctgggctcaacttattgagggatttgcttaattatttaaaaaatatttacatgagaatacagctaagttagtagctttcttcacattttcacgttttgaaagagccacagaggtttcattcatgttttaaccagttgagttggtaaagaccctgtctccattttgtaagagatggattacattcaattactcctcacgacagccaaatggaagattattctattgcttttgaaagattattccattgcttttgaagtgctggttggactggcatctgcaatggtagccaaataaatgagatttctatgtaacacatgctggtactgcacgcactcgttcccgcggcccttgttctgatactccacaatacagcggatcagctggtcattctcctcaaggagccgctggatagtctcttgattgacttccgccttgcccctcagccagtccggtacgaaggccaccgacatcccgaggaacctccggaaccacgaccgccaagcaactcgacccacgataggtggggcctacgctctcgaagttgattggatgctcccgcctaatctccttccagccagtcatccatctgtgggtgcctccgtccccagcttggggtgtgtccccctgggtcggactttggcgccccatccaggctggcagtaggttgtgctctttggtttgcctatctcgggcctcccgcccagccgcgcggaccgcagaacatacgccccgggcgttatcactctgtcacgcggagcctccccgcctccagacgtcagtccggttgctaccccggcaggaatcgagcttagatcacgaaggctccttctcacctccggacgtgagaattacaggcttggatctcaaaccgccgaattccnacgggctctcgatnggtctccagttnnnnnnnccccgcaac

SEQ ID NO: 78750 - DNA, 1524 bp, Homo sapiens
gttcggaaattgcgaaaccttgcgccatctctcgccaccgccgccatctttcgatattttggccttccgccgggccgggggttttggactgttagaatggagtcctcggagctgaaccatacgggctgagcccaagcagagtttttacggggcccggaggcgcccccgcttcgcgggacggtgggagtcaccgtccaccacctgctcctgtcgccagggcccgcgtcctctccggacctgaggctgctgctgttgcgtagcgtcaactccttcgagaagcaggtcccaaaccactttggccacaacatccccagactggtccgaagcctcgggagttcgccctggtcgttgcactccagcctgtcgctgtgcagacctggcttagaggacccctaaggctgaggcgtcacttccagaactgagtccggtccgcaggttctgctacgctccagccagcccctaactggtccccagaagcggcgctgcgacagggaccaggagctgctgcgaactgcgctggcgggggctcgtccttgggcgcggggcttcatcatggacacgctctcggcccaggccgcgaaacaagcccgcgtgactggcggaggcacagagaccaaggccgcttaacctggctggttgcactggtccctggagagcactgagcacaggggctgccacagtggccggctcagacatggcagagatcagcagagaatgggcaatcaggctcccctgagatgagcagcagcgcagaggaggtgcccctctcttactacaccaacttcagagggcgtcccctgcaggagagcttcatgcgcctggtggaggcctgtggggactcggagcaaagcatggacaactggctgagtcggctggacggctgccgctgactgtaacatgtaaagcaggcactgagcaccacctgcctggcagtccagggcatggagaggcacagacagcaccctgcttgtgacttcactggcccaactcatcctggaccccttgagcaagaccatggctggattccaggaactggtggagtggaagtggatccaggaaaatgccgtgtgaagggaggactcagatgcactccctgtggtctgggctcaaccagccaaaagagcaacaaagactccagaacccactctacctcctcaatcccttggccatctgtggagccccagagcctgcggctgtggcaaggcctgtttctgcgctggacctgctcacctgagcctgcagaagctgcatgggggaagagtgtggcaaatagtgacaggaagggagaagacagaagcctctcagccaactgcttcagccgagcccctattctaagcactggctccttggatagcagctgagatgttcctgaaacctctgcaggccccttaggacctttacaccttggatgagggtgcctgcaacccaggttagccaaaagtactgagggtcttaagtttgaagtgtccaaagtatagggaggtctcaataataaaagtctccatgatcagcaaaaaaaaaaaa

SEQ ID NO: 78751 - DNA, 576 bp, Homo sapiens; identical to SEQ ID NO: 62084
  misc_feature (1)...(576): n = a,t,c or g

SEQ ID NO: 78752 - DNA, 798 bp, Homo sapiens
ggggaggagcgtgcacccctcctggccttggtgcgcgccgcccgctaaggtactttggaagggacgcgcgggccagacgccgcaggacggccgcgatggcgctgttggccggcgggctctccagagggctgggctcccacccggccgccgcaggccgggacgcggtcgtcttcgtgtggcttctgcttagcacctggtgcacagctcctgccagggccatccaggtgaccgtgtccaacccctaccacgtggtgatcctcttccagcctgtgaccctgccctgtacctaccagatgacctcgacccccacgcaacccatcgtcatctggaagtacaagtctttctgccgggaccgcatcgccgatgccttctccccggccagcgtcgacaaccagctcaatgcccagctggcagccgggaacccaggctacaacccctacgtcgagtgccaggacagcgtgcgcaccgtcagggtcgtggccaccaagcagggcaacgctgtgaccctgggagattactaccagggccggaggattaccatcaccggaaatgctgacctgacctttgaccagacggcgtggggggacagtggtgtgtattactgctccgtggtctcagcccaggacctccaggggaacaatgaggcctacgcagagctcatcgtccttgactggctcttcgtggttgtggtatgcctggctgccttcctcatcttcctcctcctgggcatctgctggtgccagtgctgcccgcacacttgctgctgctacgtcaggtgcccctgctgcccagacaagg

SEQ ID NO: 78753 - DNA, 783 bp, Homo sapiens; identical to SEQ ID NO: 62086

SEQ ID NO: 78754 - DNA, 1135 bp, Homo sapiens; identical to SEQ ID NO: 62087

SEQ ID NO: 78755 - DNA, 1829 bp, Homo sapiens; identical to SEQ ID NO: 62088

SEQ ID NO: 78756 - DNA, 541 bp, Homo sapiens; identical to SEQ ID NO: 62089

SEQ ID NO: 78757 - DNA, 496 bp, Homo sapiens; identical to SEQ ID NO: 62090

SEQ ID NO: 78758 - DNA, 371 bp, Homo sapiens; identical to SEQ ID NO: 62091

SEQ ID NO: 78759 - DNA, 485 bp, Homo sapiens; identical to SEQ ID NO: 62092

SEQ ID NO: 78760 - DNA, 989 bp, Homo sapiens; identical to SEQ ID NO: 62093

SEQ ID NO: 78761 - DNA, 1731 bp, Homo sapiens
ttttttttttttgagatcatctactcaaagtttattggactgaacaaaggctgaatacagagatccaagccatgaggagtacatgaggtgtggtgcctataagccagggtcggaaactttccagacaaacctagatagctctactaggagggagtcaacgacctattgtatcaattagatcccagcctggacaagggcatgactattgctgtttggggacacgtggctctgtgttgaaggcaatgactgtgtggctgttgccatgtggcctgttctcccctaagccctgaaccaaaggttccaggcccagatgagaaggccactgggaatgcatgccataggggttgatgctggacattccccagccttccattaaatgaaaacattttctataaacttactgctttaaaaaaatgttttaaccaacaaacctaagaactgcaaatgagtttggtatagtataaatattgtcaaatataaaattccaagaaacccatttgagactgatctgatgatctgaagttctaactaatctatcaaactttctaagaaaaggcataggtcaagaaatctttttaaagcaaacattattgcttctgctatagcagagtggagatttggctgagctggtaagaacctcagtgaaaaggtgtcttagcaatgaaagggctgaatccgagattcctctagatgaaaaataaggggaatggtcaagtaaattcctggtactggttctttgctgccctgtaatcaatatggcatctcacccccgacaaccaagccagccacagagagaagtggggttcccagggaaaggggtcggctgaccaccctgacggagctggtgagcacaggtgagctctacctcatttgtctctcattcctcaaagtcttctgtggtttggcttcagtgagggcaaaagaggggagactggagtgaaagtgaactctgcttttaaaatgttctttttatctaaggtgtgcagggtgtgtggatagcaagtttgagtggtaagaaaaatcccagtccagggtctgagctctacctcttaaaactcttcagcttaacaaagtgacccacaggaacagacatgaacatctctacacagggcagggccaaaggtgttcccaggatcctgctagccaagggacaagtcctgattgagggtctagagctcagcagatttatggaggcagcatgcaccctgggagcctgcccagactcctctctggggtttccgttttatctctcaagcttttaagatgccaaaaggaaaagcctttaggaggacgctaaggataacttcgttattcttcagttctctgctcctcctccagctcctctttggtcatcatcttcttgtactggtttcccctcagcttcccggggctgtatttgaaggagaagccttctccgtcctcctcctcaggcccttccgatgatggccccttctcaccatccaagtcctgctcctcttcctgcctcgcctccaccgcctgctcctccgcctccgctggcgccgccgcgggatcccctggcccttcgggctcccccggtcccgcaggctccccgagctcccccagccccgcgggctctccaggctcctccggccccgcgggcgaggccgccggctcgggggcgcaggggcgggacggcgccggggccccggtggcctcggccgggggcgcgggttccgggggcgcgcgggcaggctccgggctcgcggccgc

SEQ ID NO: 78762 - DNA, 717 bp, Homo sapiens; identical to SEQ ID NO: 62094

SEQ ID NO: 78763 - DNA, 608 bp, Homo sapiens; identical to SEQ ID NO: 62095

SEQ ID NO: 78764 - DNA, 623 bp, Homo sapiens; identical to SEQ ID NO: 62096

SEQ ID NO: 78765 - DNA, 712 bp, Homo sapiens; identical to SEQ ID NO: 62097
  misc_feature (1)...(712): n = a,t,c or g

SEQ ID NO: 78766 - DNA, 495 bp, Homo sapiens; identical to SEQ ID NO: 62098
  misc_feature (1)...(495): n = a,t,c or g

SEQ ID NO: 78767 - DNA, 913 bp, Homo sapiens; identical to SEQ ID NO: 62099

SEQ ID NO: 78768 - DNA, 708 bp, Homo sapiens; identical to SEQ ID NO: 62100
  misc_feature (1)...(708): n = a,t,c or g

SEQ ID NO: 78769 - DNA, 703 bp, Homo sapiens; identical to SEQ ID NO: 62101

SEQ ID NO: 78770 - DNA, 1036 bp, Homo sapiens; identical to SEQ ID NO: 62102

SEQ ID NO: 78771 - DNA, 501 bp, Homo sapiens; identical to SEQ ID NO: 62103

SEQ ID NO: 78772 - DNA, 650 bp, Homo sapiens; identical to SEQ ID NO: 62104

SEQ ID NO: 78773 - DNA, 393 bp, Homo sapiens; identical to SEQ ID NO: 62105

SEQ ID NO: 78774 - DNA, 899 bp, Homo sapiens; identical to SEQ ID NO: 62106

SEQ ID NO: 78775 - DNA, 1134 bp, Homo sapiens; identical to SEQ ID NO: 62107

SEQ ID NO: 78776 - DNA, 697 bp, Homo sapiens; identical to SEQ ID NO: 62108

SEQ ID NO: 78777 - DNA, 426 bp, Homo sapiens; identical to SEQ ID NO: 62109

SEQ ID NO: 78778 - DNA, 1346 bp, Homo sapiens; identical to SEQ ID NO: 62110

SEQ ID NO: 78779 - DNA, 1431 bp, Homo sapiens; identical to SEQ ID NO: 62111

SEQ ID NO: 78780 - DNA, 1097 bp, Homo sapiens; identical to SEQ ID NO: 62112

SEQ ID NO: 78781 - DNA, 451 bp, Homo sapiens; identical to SEQ ID NO: 62113

SEQ ID NO: 78782 - DNA, 424 bp, Homo sapiens; identical to SEQ ID NO: 62114

SEQ ID NO: 78783 - DNA, 494 bp, Homo sapiens; identical to SEQ ID NO: 62115

SEQ ID NO: 78784 - DNA, 1537 bp, Homo sapiens
aaaccctcggagtccgtggctgtgcagcttgggtgtcctgtgctcggcttaggggcacaggcttgcgggcggacctagggacggcggaggcatcgtgtccttcctgcaggaaggaaggagcttccggcgctttcctgggaggctcgctggggccgcggagataacctgaggtcctgcaacaggctgggggcccaaggaccatcccaggccttggaacagttggtatctttcagtcgccgccctggagaggcaggtgtttgacttcctgggctaccagtgggcgcccatcctggccaactttgtccacatcatcatcgtcatcctgggactcttcggcaccatccagtaccggctgcgctacgtcatggtgtacacgctgtgggcagccgtctgggtcacctggaacgtcttcatcatctgcttctacctggaagtcggtggcctcttacaggacagcgagctactgaccttcagcctctcccggcatcgctcctggtggcgtgagcgctggccaggctgtctgcatgaggaggtgccagcagtgggcctcggggccccccatggccaggacctggtgtcaggtgctggctgtgccctggagcccagctatgtggaggccctacacagttgcctgcagatcctgatcgcgcttctgggctttgtctgtggctgccaggtggtcagcgtgtttacggaggaagaggacagctttgatttcattggtggatttgatccatttcctctctaccatgtcaatgaaaagccatccagtctcttgtccaagcaggtgtacttgcctgcgtaagtgaggaaacagctgatcctgctcctgtggcctccagcctcagcgaccgaccagtgacaatgacaggagctcccaggccttgggacgcgcccccacccagcaccccccaggcggccggcagcacctgccctgggttctaagtactggacaccagccagggcggcagggcagtgccacggctggctgcagcgtcaagagagtttgtaatttcctttctcttaaaaaaaaaaaggaaaagaaaccttccaaaagaaaaggcaaaaccccacatgcccacctcctctggcaacattgtgggtcaacagctttggcccacagcgctgtcgtcttgatagagggagcctgtccctcaggtgcccacctggggctgctggaccctcgggctgcaaagcactgctgctgggatgcagcctccccaggaagtcaatgtgaggcccgagacccctcaaagcggtgagggcccctgttgaacatggagggttcctaaccccaaactcgtgccagaagaacccccaccccacccaggagctgaggctgatggagccctagggtgggggctgggcttgaccaggaacagcagagccaggccccaaggcatagggcagggcacatggtggtgacgagcaggcagtactcttgtaaagggggctcttgggcaaacagtcccaaaggctcccccaggtatcatcaagttggtaaataaacaggaacatggccctcaaaaaaaaaaaa

SEQ ID NO: 78785 - DNA, 524 bp, Homo sapiens; identical to SEQ ID NO: 62117

SEQ ID NO: 78786 - DNA, 472 bp, Homo sapiens; identical to SEQ ID NO: 62118

SEQ ID NO: 78787 - DNA, 468 bp, Homo sapiens; identical to SEQ ID NO: 62119

SEQ ID NO: 78788 - DNA, 412 bp, Homo sapiens; identical to SEQ ID NO: 62120

SEQ ID NO: 78789 - DNA, 493 bp, Homo sapiens; identical to SEQ ID NO: 62121

SEQ ID NO: 78790 - DNA, 771 bp, Homo sapiens; identical to SEQ ID NO: 62122

SEQ ID NO: 78791 - DNA, 580 bp, Homo sapiens; identical to SEQ ID NO: 62123

SEQ ID NO: 78792 - DNA, 662 bp, Homo sapiens; identical to SEQ ID NO: 62124

SEQ ID NO: 78793 - DNA, 918 bp, Homo sapiens; identical to SEQ ID NO: 62125

SEQ ID NO: 78794 - DNA, 856 bp, Homo sapiens; identical to SEQ ID NO: 62126

SEQ ID NO: 78795 - DNA, 786 bp, Homo sapiens
  misc_feature (1)...(786): n = a,t,c or g
ctcgcatagcgtacgcttgcacgnaccggnccggaattnccggnnnncgatttcgtgtgccgaccggccggctggccggcgccgcctcctgggaagatggcgctgcacttccagagtttggctgaattggaagtgttatgtactcatctctacatagggactgatcttacacaaagaatagaggctgagaaagcactcttggaacttattgacagtccagaatgtctcagcaagtgtcaacttttattagaacaaggaacaacatcctatgctcagctccttgcagcaacatgtctttcaaaacttgtcagccgagtcagtcctttacctgttgagcagaggatggacatcagaaactacattctgaattacgtggcatcacagcccaagctggctccctttgtcatccaagctcttattcaagtcattgctaaaatcactaagttggggtggtttgaggttcagaaagaccaatttgtcttcagagaaattattgctgatgtgaagaagtttctccagggtactgtggaacactgcataataggagtaataatcctttctgaattgactcaggaaatgaacctggttgattattctagaccttcagcaaaacacaggaaaatagctacctcatttcgtgatacttctctcaaagacgttttagtgctagcatgctctcttttaaaagaggtgtttgccaaacctttaaatcttcaggatcaatgtcagcaaaatctggtaatgcaggtcttgaaactggtccttaactgccttaactttgacttc

SEQ ID NO: 78796 - DNA, 531 bp, Homo sapiens; identical to SEQ ID NO: 62128

SEQ ID NO: 78797 - DNA, 349 bp, Homo sapiens
ttttttttttgagactgcatagggctcggcgtgggggtcttcaggtgatggcagaggagccaggcacaacagggaagtaagaggaaagcatatgtggaggcatggaaggatggaagaaacagcctggagatcctgggaaactgctaccagttcagagaggggtgtggggggttggtggcactatgtggcgcgtctgtgcgcgacgggctcagaatgtagccccatgggcgggactcgaggctcggtggacggccttgcaggaggtacccggaactccacgagtgacctcgcgatctggcccggctcccgctcgtcgcaacagcgtgactacagggtattgactcatggt

SEQ ID NO: 78798 - DNA, 943 bp, Homo sapiens; identical to SEQ ID NO: 62130

SEQ ID NO: 78799 - DNA, 806 bp, Homo sapiens; identical to SEQ ID NO: 62131
  misc_feature (1)...(806): n = a,t,c or g

SEQ ID NO: 78800 - DNA, 594 bp, Homo sapiens; identical to SEQ ID NO: 62132

SEQ ID NO: 78801 - DNA, 521 bp, Homo sapiens; identical to SEQ ID NO: 62133
  misc_feature (1)...(521): n = a,t,c or g

SEQ ID NO: 78802 - DNA, 552 bp, Homo sapiens; identical to SEQ ID NO: 62134

SEQ ID NO: 78803 - DNA, 534 bp, Homo sapiens; identical to SEQ ID NO: 62135

SEQ ID NO: 78804 - DNA, 1290 bp, Homo sapiens; identical to SEQ ID NO: 62136

SEQ ID NO: 78805 - DNA, 763 bp, Homo sapiens; identical to SEQ ID NO: 62137
  misc_feature (1)...(763): n = a,t,c or g

SEQ ID NO: 78806 - DNA, 899 bp, Homo sapiens; identical to SEQ ID NO: 62138

SEQ ID NO: 78807 - DNA, 875 bp, Homo sapiens; identical to SEQ ID NO: 62139

SEQ ID NO: 78808 - DNA, 732 bp, Homo sapiens; identical to SEQ ID NO: 62140

SEQ ID NO: 78809 - DNA, 764 bp, Homo sapiens; identical to SEQ ID NO: 62141

SEQ ID NO: 78810 - DNA, 694 bp, Homo sapiens; identical to SEQ ID NO: 62142

SEQ ID NO: 78811 - DNA, 539 bp, Homo sapiens; identical to SEQ ID NO: 62143

SEQ ID NO: 78812 - DNA, 1164 bp, Homo sapiens
ataatgggcggtgggaaatctggaacagtgtcttctcagaaacaaccagcctcaaagactgcaagtgacaagacagattctgctttgaatacagctacagaaataaaggatggactacaatgtgggacagtgtcttctcagaaacaacaagccttgaaggctacaactgacgaggaaggttctgtttctaatatagccacagaaataaaggatggagaaaaatctgggacagtgtcttctcagaaaaaaccagccttgaaggccacaagtgctgagaaagattctttttcgaatataaccagagaaaaaaaggatggagaaatatctaggacaggtatcagcaaacaggtgtccaaggtgatcaattcaggactcttccactgaagagatgtgaagttgtcttctcagaaaccaccagccttgaaggctacaagtgtcaaggaagattctgttttgggtatagccagagaaaacaaggatggagaaaaatctaggacagtgtcttctgagaaaccaccaggcttgaaggcttcaagtgatgagaaagattctgttttgaatatagccagaggaaaaaagtatggagaaaaaactaagagagtgtcttctcggaaaaaaccatccttggaggccacaagtgatgagaaggattctttttcgaatataaccagagaaaaaaaggatggagaaatatctaggaaagtgtcttctcagaaaccaccagccttgaagggtacaagtgacgaggaagattctgttttgggtatagccagagaaaacaaggatggagaaaaatctaggacagtgtcttctgagaaaccaccaggcttgaaggctacaagtgatgagaaagattctgttttgaatatagccagaggaaaaaaggatggagaaaaaactaggacagtgtcttctcagaaaccaccaaccttgaaggctacaagtgatgaggaagattctgttttgagtatagccagagaaaacaaggatggagaaaaatctaggacagtgtcttctgagaaaccatcaggcttgaaggtaatgaaactgtcatttatattgtgaactagtaaatgtatagtctatgaaacttactttattaatttattatttcatttgaaattccattcaggctacaagtgccgagaaagattctgttttgaa

SEQ ID NO: 78813 - DNA, 573 bp, Homo sapiens; identical to SEQ ID NO: 62145

SEQ ID NO: 78814 - DNA, 709 bp, Homo sapiens; identical to SEQ ID NO: 62146

SEQ ID NO: 78815 - DNA, 1001 bp, Homo sapiens
gcggtggaattcctgaggcggcggtagcatggagggggagagtacgtcggcggtgctctcgggctttgtgctcggcgcactcgctttccagcacctcaacacggactcggacacggaaggttttcttcttggggaagtaaaaggtgaagccaagaacagcattactgattcccaaatggatgatgttgaagttgtttatacaattgacattcagaaatatattccatgctatcagctttttagcttttataattcttcaggcgaagtaaatgagcaagcactgaagaaaatattatcaaatgtcaaaaagaatgtggtaggttggtacaaattccgtcgtcattcagatcagatcatgacgtttagagagaggctgcttcacaaaaacttgcaggagcatttttcaaaccaagaccttgtttttctgctattaacaccaagtataataacagaaagctgctctactcatcgactggaacattccttatataaacctcaaaaaggactttttcacagggtacctttagtggttgccaatctgggcatgtctgaacaactgggttataaaactgtatcaggttcctgtatgtccactggttttagccgagcagtacaaacacacagctctaaattttttgaagaagatggatccttaaaggaggtacataagataaatgaaatgtatgcttcattacaagaggaattaaagagtatatgcaaaaaagtggaagacagtgaacaagcagtagataaactagtaaaggatgtaaacagattaaaacgagaaattgagaaaaggagaggagcacagattcaggcagcaagagagaagaacatccaaaaagaccctcaggagaacatttttctttgtcaggcattacggaccttttttccaaattctgaatttcttcattcatgtgttatgtctttaaaaatagacatgtttctaaaagtagctgtaactacaaccaccatctcgatgtagtagacaatctgacctt

SEQ ID NO: 78816 - DNA, 478 bp, Homo sapiens; identical to SEQ ID NO: 62148

SEQ ID NO: 78817 - DNA, 481 bp, Homo sapiens; identical to SEQ ID NO: 62149

SEQ ID NO: 78818 - DNA, 896 bp, Homo sapiens; identical to SEQ ID NO: 62151

SEQ ID NO: 78819 - DNA, 520 bp, Homo sapiens; identical to SEQ ID NO: 62152

SEQ ID NO: 78820 - DNA, 555 bp, Homo sapiens; identical to SEQ ID NO: 62153

SEQ ID NO: 78821 - DNA, 379 bp, Homo sapiens
ggcttactcactatagggctcgagcggccgcccgggcaggtgcaggctcagcacagattgtgtgtcaggtctgatggcagctgaggctcacagggcagggccgatggggcagggagtggctcacccatggggggtttgaagatccggttcaaccccagaggctgcggctccatgaagggatgctcagagcaggggcatcgggcagcccagcggtgtcaggaaggcagcagtaaccagcgagtcttccccatctttccaggagctgtccaagatcacgatgccaatcgccttcaacgagcctatgagcttcttgcagcggatcacggagtacatggagcacgtgtacctcatcctcagggcctcctgcaatcgctagtcg

SEQ ID NO: 78822 - DNA, 740 bp, Homo sapiens; identical to SEQ ID NO: 62155

SEQ ID NO: 78823 - DNA, 959 bp, Homo sapiens; identical to SEQ ID NO: 62156

SEQ ID NO: 78824 - DNA, 411 bp, Homo sapiens; identical to SEQ ID NO: 62157

SEQ ID NO: 78825 - DNA, 585 bp, Homo sapiens; identical to SEQ ID NO: 62158

SEQ ID NO: 78826 - DNA, 741 bp, Homo sapiens; identical to SEQ ID NO: 62159

SEQ ID NO: 78827 - DNA, 834 bp, Homo sapiens; identical to SEQ ID NO: 62160
  misc_feature (1)...(834): n = a,t,c or g

SEQ ID NO: 78828 - DNA, 1090 bp, Homo sapiens; identical to SEQ ID NO: 62161

SEQ ID NO: 78829 - DNA, 993 bp, Homo sapiens; identical to SEQ ID NO: 62162

SEQ ID NO: 78830 - DNA, 808 bp, Homo sapiens; identical to SEQ ID NO: 62163

SEQ ID NO: 78831 - DNA, 594 bp, Homo sapiens; identical to SEQ ID NO: 62164

SEQ ID NO: 78832 - DNA, 461 bp, Homo sapiens; identical to SEQ ID NO: 62165

SEQ ID NO: 78833 - DNA, 918 bp, Homo sapiens; identical to SEQ ID NO: 62166

SEQ ID NO: 78834 - DNA, 688 bp, Homo sapiens; identical to SEQ ID NO: 62167

SEQ ID NO: 78835 - DNA, 958 bp, Homo sapiens; identical to SEQ ID NO: 62168

SEQ ID NO: 78836 - DNA, 391 bp, Homo sapiens; identical to SEQ ID NO: 62169

SEQ ID NO: 78837 - DNA, 719 bp, Homo sapiens
tcaacatcaaggctcaaattgtggtggcacaagtaacaagcattcattggaagaggatgaaggcagtgactttataacagagaacaggaatttggtgagcccagcatactgcacgcaagaatcaagagaggaaatccctgggggagaagctcgaacagatccccctgatggtcagcaagattcagagtgcaacaggaacaaagaaaaaactttaggaaaagaagttttattactgatgcaagccctaaacaccctttcaaccccagaggagaagctggcagctctctgtaagaaatatgctgatcttctggaggagagcaggagtgttcagaagcaaatgaagatcctgcagaagaagcaagcccagattgtgaaagagaaagttcacttgcagagtgaacatagcaaggctatcttggcaagaagcaagctagaatctctttgcagagaacttcagcgtcacaataagacgttaaaggaggaaaatatgcagcaggcacgagaggaagaagaacgacgtaaagaagcaactgcacatttccagattaccttaaatgaaattcaagcccagctggagcagcatgacatccacaacgccaaactccgacaggaaaacattgagctgggggagaagctaaagaagctcatcgaacagtacgcactgagggaagagcacattgataaggtgttcaaacataaggaactgcaacagcagctcg

SEQ ID NO: 78838 - DNA, 397 bp, Homo sapiens; identical to SEQ ID NO: 62171
  misc_feature (1)...(397): n = a,t,c or g

SEQ ID NO: 78839 - DNA, 551 bp, Homo sapiens; identical to SEQ ID NO: 62172

SEQ ID NO: 78840 - DNA, 1923 bp, Homo sapiens
ttagccgtggggctgtcctcgccactggaccccaaacccctcagcccgggcgggcgcgaacacacaatcagagccgctggcgtcccggctgagaggacggggccccggcagaaagaccccgggccccctcagcccgagcgcgtcgccgagccggtccccaggttctccctccggaaccaacctgcgcacccgcggcggggccgggggcgccaggacccagacggaccgagggccggaagtgacgccagctggcccgcttgaggcgtagggggtggcgctctccgttcggcggcgctcccatggcgcacattaccattaaccagtacctgcagcaggtgtacgaagccatcgacagcagagatggagcatcttgtgcagagttggtgtcttttaaacatcctcatgttgcaaacccacgacttcaaatggcctctccagaggagaagtgtcaacaagtcttggaacccccttatgatgaaatgtttgcagctcatttaaggtgcacttatgcagtggggaatcatgacttcatagaggcatacaagtgccagaccgtgatagtccaatcattcttgcgagcattccaggcccacaaagaagaaaactgggctctgcctgtcatgtatgcagtagcgcttgaccttcgagtgtttgccaataatgcagatcaacagttggtaaagaaaggaaaaagcaaagttggggacatgttggaaaaagcagcagagttactgatgagctgtttccgggtctgtgccagcgacacccgtgctggtatagaggactctaagaagtggggcatgctgtttctggtgaaccagctgtttaaaatctacttcaagatcaacaaactccatttatgtaaacccctaattagagcaattgacagctcaaacctgaaagacgattacagcactgcacagagagtaacatacaaatactacgttggacgcaaggctatgtttgacagcgattttaagcaagctgaggagtacctgtcatttgcctttgagcattgtcaccgttctagtcagaagaacaaaaggatgattctgatctatttgcttccagtaaaaatgctattgggtcacatgcccactgtggagctcctgaaaaagtatcacctgatgcagtttgcggaagtaaccagagctgtgagcgagggcaacctgctgctgctgcacgaggcgctggcgaagcacgaggccttcttcattcgctgcggaatcttcctcatcctggagaagctgaagatcatcacctacaggaacctctttaagaaagtgtatttgttactgaaaacacaccagctgtctctggatgcttttctggttgccttgaagttcatgcaggtggaggacgtggacattgacgaagttcagtgtattctggctaacttgatatacatgggacacgtcaaaggctacatatcgcatcagcatcagaagctggtggtcagcaagcagaacccatttcctcccctgtccacggggtgttgaaagtacacggagccccgaggacggcctgatgaaaacctggaattcctttttcacagactcggctggttctggagtctttgtgagacttctttgaaggaggctttgcgtgaaggctgctcggctcacttttcctaagtgtggttcctgaaggctgtctttgtaactttttgtagttctttgtgtaaaaagcgtattctgaatttatacacatggcatgttcttcattatatcttccaggatacatctatttttatatattaaatttgaatgtgttatcaaaatgcttggttaacttaaggcacctttttaaaagcagaatttaatttgatttaaattttccagattttatagcttgcctgtatggatgctcctcaatttatgatggggttacatcccaataaacttattttatttgccaaaaaaa

SEQ ID NO: 78841 - DNA, 1326 bp, Homo sapiens; identical to SEQ ID NO: 62174
  misc_feature (1)...(1326): n = a,t,c or g

SEQ ID NO: 78842 - DNA, 970 bp, Homo sapiens
cccacgcgtccggaataacgacctgccttacgctttgctgctgtcgtcggagaggcatctgggttcggactggggccgccatggggaaagtgaatgtggccaagttgcgttacatgagccgagatgacttcagggtcttgaccgcggttgaaatgggcatgaagaaccatgaaattgttcccggcagtttgattgcttctatagccagccttaaacatggtggctgtaataaagttttaagagaattagtgaaacataaactcatagcttgggagcgtaccaaaactgtccagggctatcggttgacaaatgcaggatatgattacctagctttgaaaacactttcttctaggcaagtagttgagtctgttggaaaccagatgggtgttggcaaagaatcagatatttacattgttgcaaatgaagaaggacaacaatttgcattaaagcttcacagactaggaagaacctcgtttcgaaatttgaaaaacaaacgcgattatcataaacataggcacaatgtgtcatggctatatttatctcgtctctctgccatgaaggaatttgcctatatgaaggcattgtatgagaggaaatttccagttccaaagccaattgattacaatcgtcatgcagtggtcatggaactcataaatggttatccactatgtcagatacaccatgttgaagatcctgcatcagtatatgatgaagctatggaactaattgtcaaacttgcaaatcatgggctgattcatggagattttaatgaatttaatctcattttggatgaaagtgaccatatcaccatgattgattttccacagatggtttcaacttctcatcccaatgctgagtggtattttgacagagatgttaaatgcattatagatttctttatgaaacgtttcagctacgaagtgagctttttccaacttttaaggatatcaggagagagacactctcgatg

SEQ ID NO: 78843 - DNA, 524 bp, Homo sapiens; identical to SEQ ID NO: 62176

SEQ ID NO: 78844 - DNA, 784 bp, Homo sapiens; identical to SEQ ID NO: 62177

SEQ ID NO: 78845 - DNA, 1493 bp, Homo sapiens; identical to SEQ ID NO: 62178

SEQ ID NO: 78846 - DNA, 885 bp, Homo sapiens; identical to SEQ ID NO: 62179

SEQ ID NO: 78847 - DNA, 522 bp, Homo sapiens; identical to SEQ ID NO: 62180

SEQ ID NO: 78848 - DNA, 854 bp, Homo sapiens; identical to SEQ ID NO: 62181

SEQ ID NO: 78849 - DNA, 2468 bp, Homo sapiens; identical to SEQ ID NO: 62182

SEQ ID NO: 78850 - DNA, 1885 bp, Homo sapiens; identical to SEQ ID NO: 62183
  misc_feature (1)...(1885): n = a,t,c or g

SEQ ID NO: 78851 - DNA, 606 bp, Homo sapiens; identical to SEQ ID NO: 62184

SEQ ID NO: 78852 - DNA, 497 bp, Homo sapiens; identical to SEQ ID NO: 62185

SEQ ID NO: 78853 - DNA, 802 bp, Homo sapiens
aatagtagccgtggacaggccctgagttaccgcgtcgacgatttcgtccctgctgggcaaaggaggaagagccagaggatccagacgccttggaggacttggaacacctgtaacaggacaaggagttctgctcaggcacgtggccacagaaaactacttaggaagcctgtggtgagaacaacaacagtgcctgagaatcccacggctctggggaagtgagccccgaggatgaggctgctcgcctggctgattttcctggctaactggggaggtgccagggctgaaccagggaagttctggcacatcgctgacctgcaccttgaccctgactacaaggtatccaaagaccccttccaggtgtgcccatcagctggatcccagccagtgcccgacgcaggcccctggggtgactacctctgtgattctccctgggccctcatcaactcctccatctatgccatgaaggagattgagccagagccagacttcattctctggactggtgatgacacgcctcatgtgcccgatgagaaactgggagaggcagctgtactggaaattgtggaacgcctgaccaagctcatcagagaggtctttccagatactaaagtctatgctgctttgggaaatcatgattttcaccccaaaaaccagttcccagctggaagtaacaacatctacaatcagatagcagaactatggaaaccctggcttagtaatgagtccatcgctctcttcaaaaaaggtgccttctactgtgagaagctgccgggtcccagcggggctgggcgaattgtggtcc

SEQ ID NO: 78854 - DNA, 420 bp, Homo sapiens; identical to SEQ ID NO: 62187

SEQ ID NO: 78855 - DNA, 450 bp, Homo sapiens; identical to SEQ ID NO: 62188

SEQ ID NO: 78856 - DNA, 924 bp, Homo sapiens; identical to SEQ ID NO: 62189
  misc_feature (1)...(924): n = a,t,c or g

SEQ ID NO: 78857 - DNA, 679 bp, Homo sapiens; identical to SEQ ID NO: 62190

SEQ ID NO: 78858 - DNA, 429 bp, Homo sapiens; identical to SEQ ID NO: 62191

SEQ ID NO: 78859 - DNA, 506 bp, Homo sapiens; identical to SEQ ID NO: 62192

SEQ ID NO: 78860 - DNA, 1078 bp, Homo sapiens; identical to SEQ ID NO: 62193

SEQ ID NO: 78861 - DNA, 425 bp, Homo sapiens; identical to SEQ ID NO: 62194

SEQ ID NO: 78862 - DNA, 585 bp, Homo sapiens; identical to SEQ ID NO: 62195

SEQ ID NO: 78863 - DNA, 1014 bp, Homo sapiens; identical to SEQ ID NO: 62196

SEQ ID NO: 78864 - DNA, 492 bp, Homo sapiens; identical to SEQ ID NO: 62197

SEQ ID NO: 78865 - DNA, 422 bp, Homo sapiens; identical to SEQ ID NO: 62198

SEQ ID NO: 78866 - DNA, 443 bp, Homo sapiens; identical to SEQ ID NO: 62199

SEQ ID NO: 78867 - DNA, 696 bp, Homo sapiens; identical to SEQ ID NO: 62200

SEQ ID NO: 78868 - DNA, 549 bp, Homo sapiens; identical to SEQ ID NO: 62201

SEQ ID NO: 78869 - DNA, 769 bp, Homo sapiens; identical to SEQ ID NO: 62202

SEQ ID NO: 78870 - DNA, 413 bp, Homo sapiens; identical to SEQ ID NO: 62203

SEQ ID NO: 78871 - DNA, 525 bp, Homo sapiens; identical to SEQ ID NO: 62204

SEQ ID NO: 78872 - DNA, 437 bp, Homo sapiens; identical to SEQ ID NO: 62205

SEQ ID NO: 78873 - DNA, 1317 bp, Homo sapiens; identical to SEQ ID NO: 62206

SEQ ID NO: 78874 - DNA, 601 bp, Homo sapiens; identical to SEQ ID NO: 62207

SEQ ID NO: 78875 - DNA, 878 bp, Homo sapiens; identical to SEQ ID NO: 62208

SEQ ID NO: 78876 - DNA, 445 bp, Homo sapiens; identical to SEQ ID NO: 62209

SEQ ID NO: 78877 - DNA, 633 bp, Homo sapiens; identical to SEQ ID NO: 62210

SEQ ID NO: 78878 - DNA, 821 bp, Homo sapiens; identical to SEQ ID NO: 62211
  misc_feature (1)...(821): n = a,t,c or g

SEQ ID NO: 78879 - DNA, 562 bp, Homo sapiens; identical to SEQ ID NO: 62212
  misc_feature (1)...(562): n = a,t,c or g

SEQ ID NO: 78880 - DNA, 954 bp, Homo sapiens; identical to SEQ ID NO: 62213

SEQ ID NO: 78881 - DNA, 723 bp, Homo sapiens; identical to SEQ ID NO: 62214

SEQ ID NO: 78882 - DNA, 426 bp, Homo sapiens; identical to SEQ ID NO: 62215

SEQ ID NO: 78883 - DNA, 819 bp, Homo sapiens; identical to SEQ ID NO: 62216

SEQ ID NO: 78884 - DNA, 758 bp, Homo sapiens; identical to SEQ ID NO: 62217

SEQ ID NO: 78885 - DNA, 1915 bp, Homo sapiens; identical to SEQ ID NO: 62218

SEQ ID NO: 78886 - DNA, 760 bp, Homo sapiens; identical to SEQ ID NO: 62219

SEQ ID NO: 78887 - DNA, 1069 bp, Homo sapiens; identical to SEQ ID NO: 62220
  misc_feature (1)...(1069): n = a,t,c or g

SEQ ID NO: 78888 - DNA, 480 bp, Homo sapiens; identical to SEQ ID NO: 62221

SEQ ID NO: 78889 - DNA, 467 bp, Homo sapiens; identical to SEQ ID NO: 62222

SEQ ID NO: 78890 - DNA, 628 bp, Homo sapiens; identical to SEQ ID NO: 62223

SEQ ID NO: 78891 - DNA, 436 bp, Homo sapiens; identical to SEQ ID NO: 62224

SEQ ID NO: 78892 - DNA, 490 bp, Homo sapiens; identical to SEQ ID NO: 62225

SEQ ID NO: 78893 - DNA, 621 bp, Homo sapiens; identical to SEQ ID NO: 62226

SEQ ID NO: 78894 - DNA, 866 bp, Homo sapiens; identical to SEQ ID NO: 62227

SEQ ID NO: 78895 - DNA, 1061 bp, Homo sapiens; identical to SEQ ID NO: 62228

SEQ ID NO: 78896 - DNA, 919 bp, Homo sapiens; identical to SEQ ID NO: 62229

SEQ ID NO: 78897 - DNA, 428 bp, Homo sapiens; identical to SEQ ID NO: 62231

SEQ ID NO: 78898 - DNA, 1058 bp, Homo sapiens; identical to SEQ ID NO: 62232

SEQ ID NO: 78899 - DNA, 706 bp, Homo sapiens; identical to SEQ ID NO: 62233

SEQ ID NO: 78900 - DNA, 744 bp, Homo sapiens; identical to SEQ ID NO: 62234

SEQ ID NO: 78901 - DNA, 953 bp, Homo sapiens; identical to SEQ ID NO: 62235

SEQ ID NO: 78902 - DNA, 1401 bp, Homo sapiens
gcggccgccatggcggagaattggaagaactgcttcgaggaggagctcatctgccctatctgcctgcacgttttcgtggagccagtgcagctgccgtgcaaacacaacttctgccggggctgcatcggcgaggcgtgggccaaggacagcggcctcgtacgctgcccagagtgcaaccaggcctacaaccagaagccgggcctggagaagaacctgaagctcaccaacatcgtggagaagttcaatgccctgcacgtggagaagccgccggcggcgctgcactgcgtgttctgccgccgcggccccccgctgcccgcgcagaaggtctgcctgcgctgcgaggcgccctgctgccagtcccacgtgcagacgcacctgcagcagccctccaccgcccgcgggcacctcctggtggaggcggacgacgtgcgggcctggagctgcccgcagcacaacgcctaccgcctctaccactgcgaggccgagcaggtggccgtgtgccagtactgctgctactacagcggcgcgcatcagggacactcggtgtgcgacgtggagatccgaaggaatgaaatccggaagatgctcatgaagcagcaggaccggctggaggagcgagagcaggacattgaggaccagctgtacaaactcgagtcagacaagcgcctggtggaggagaaagtgaaccaactgaaggaggaagttcggctgcagtacgagaagctgcaccagctgctggacaaggacctgcggcagacagtggaggtcctagacaaggcccaggccaagttctgcagcgagaacgcagcgcaggcgctgcacctcggggagcgcatgcaggaggccaagaagctgctgggctccctgcagctgctctttgataagacggaggatgtcagcttcatgaagaacaccaagtctgtgaaaatcctgatggacaggacccagacctgcacgagcagcagcctttcccccactaagatcggccacctgaactccaagctcttcctgaacgaagtggccaagaaggagaagcagctgcggaaaatgctagaaggccccttcagcacgccggtgcccttcctgcagagtgtccccctgtacccttgcggcgtgagcagctctggggcggaaaagcgcaagcactcaacggccttcccagaggccagtttcctagagacgtcgtcgggccctgtgggcggccagtacggggcggcgggcacagccagcggtgagggccagtctgggcagcccctggggccctgcagctccacgcagcacttggtggccctgccgggcggcgcccaaccagtgcactcaagccccgtgttccccccatcgcagtatcccaatggctccttccgcccagcagcccatgctccccgcagtatggcggccgca

SEQ ID NO: 78903 - DNA, 452 bp, Homo sapiens; identical to SEQ ID NO: 62238

SEQ ID NO: 78904 - DNA, 523 bp, Homo sapiens
  misc_feature (1)...(523): n = a,t,c or g
acacaaaatttctgangccccaccctggggaaaaacgggtgggnccccatcgcactccccaaacctgtgctcccattcaggccttcagtcctgcttcccagccgcccgccctagggggtccctgggggctttgggtttgtggtggacgccccctgagtatgtcccttgtgcttgtgtggcaggtttggtttcagaacagaagggccaaagagaaacgcctgaagaaggatgcagggcggcaccgctgggggcagttctataagagcgtcaagaggagccggggcagcagcaagcaggagaaggagagctctgcagaggactgtggggttagtgacagtgagctgagcttccgaggtgagcagggctggaggggccaggccgaggccttaggaaagtcccctgggaatctgtaatccctggcactcaggagggatctttcttgaggccttggcaactccctcctgaacacaggcttttccttaagacttgcagtgaagggtgggggaaatggtagtggcccttt

SEQ ID NO: 78905 - DNA, 1438 bp, Homo sapiens; identical to SEQ ID NO: 62240

SEQ ID NO: 78906 - DNA, 674 bp, Homo sapiens
cagtagctggatctgtatccaaaatttaacgtattgtagctctcctgctgtgccaggctcagtttgttttaaagatttcccagaggggacgactcagaaagaggctctgagggtgtggcatcctctgcacactttgggtgccaccagctgacgtgtgactgtgacttcacgggtggtgccccggcctcatatgcttcgtggttctctgtctcactcctgctcacgggcggtgccccggcctcacgtgccccgtggttctctgtctctctcctgctcacaggaagtgccccggcctcacgtgccccgtggttctctgtctcgctcctgctcatgggcagtgccccggcctcacgtgccccgtggttctctgtctctctcctgctcacaggaagtgccccggcctcacgtgccccgtggtgctctgtctcgctcctgctcatgggcagtgccccggcctcacgtgccccgtggttctctgtctctctcctgctcacgggcgatgccctggcctcacgtgccccgtggttctctgtctctctcctgctcacaggaagtgccccggcctcacgtgccccgtggttctctgtctctctcctgctcacaggcggtgccctggcctcacgtgccccatggtgctctgtctctatgctgctcatgggcagtgccccggcgcg

SEQ ID NO: 78907 - DNA, 1833 bp, Homo sapiens; identical to SEQ ID NO: 62242

SEQ ID NO: 78908 - DNA, 1306 bp, Homo sapiens; identical to SEQ ID NO: 62243

SEQ ID NO: 78909 - DNA, 706 bp, Homo sapiens; identical to SEQ ID NO: 62244

SEQ ID NO: 78910 - DNA, 677 bp, Homo sapiens; identical to SEQ ID NO: 62245

SEQ ID NO: 78911 - DNA, 443 bp, Homo sapiens; identical to SEQ ID NO: 62246

SEQ ID NO: 78912 - DNA, 604 bp, Homo sapiens; identical to SEQ ID NO: 62247

SEQ ID NO: 78913 - DNA, 653 bp, Homo sapiens; identical to SEQ ID NO: 62248

SEQ ID NO: 78914 - DNA, 399 bp, Homo sapiens; identical to SEQ ID NO: 62249

SEQ ID NO: 78915 - DNA, 404 bp, Homo sapiens; identical to SEQ ID NO: 62250

SEQ ID NO: 78916 - DNA, 422 bp, Homo sapiens; identical to SEQ ID NO: 62251

SEQ ID NO: 78917 - DNA, 635 bp, Homo sapiens; identical to SEQ ID NO: 62252

SEQ ID NO: 78918 - DNA, 459 bp, Homo sapiens; identical to SEQ ID NO: 62253

SEQ ID NO: 78919 - DNA, 674 bp, Homo sapiens; identical to SEQ ID NO: 62254

SEQ ID NO: 78920 - DNA, 672 bp, Homo sapiens; identical to SEQ ID NO: 62255

SEQ ID NO: 78921 - DNA, 826 bp, Homo sapiens; identical to SEQ ID NO: 62256

SEQ ID NO: 78922 - DNA, 494 bp, Homo sapiens; identical to SEQ ID NO: 62257

SEQ ID NO: 78923 - DNA, 673 bp, Homo sapiens; identical to SEQ ID NO: 62258

SEQ ID NO: 78924 - DNA, 600 bp, Homo sapiens; identical to SEQ ID NO: 62259

SEQ ID NO: 78925 - DNA, 1029 bp, Homo sapiens
tttcgtgccgcttccggggtcgggcgcctggatagctgccggctccggcttccacttggtcggttgcgcgggagactatggcgtcctcctcggtcccaccagccacggtatcggcggcgacagcaggccccggcccaggtttcggcttcgcctccaagaccaagaagaagcatttcgtgcagcagaaggtgaaggtgttccgggcggccgacccgctggtgggtgtgttcctgtggggcgtagcccactcgatcaatgagctcagccaggtgcctcccccggtgatgctgctgccagatgactttaaggccagctccaagatcaaggtcaacaatcaccttttccacagggaaaatctgcccagtcatttcaagttcaaggagtattgtccccaggtcttcaggaacctccgtgatcgatttggcattgatgaccaagattacttggtgtcccttacccgaaacccccccagcgaaagtgaaggcagtgatggtcgcttccttatctcctacgatcggactctggtcatcaaagaagtatccagtgaggacattgctgacatgcatagcaacctctccaactatcaccaggtcaggcctctctctagccccattctttccctctcctccctactcacatatagctcagctattgtcagtaatagatgccaactggggagaaaactcattggaagagagaatccataatcatatcccgccctaaatgggtgagggaagctattctgtctgataagatttacaggctgggggcagtggctcacacctcggcctccccaagtgctgggattacaggcgtgagctagcatgcctggccagggattaaaatattcaaacatgttgtgtgtacccagatatgctgttaatttaggaaaaacagtacaatttctatgaaggggttgtgactattttctgtagtcaatacagttgggatatctgatctatttctctgtctactttggaaatgattgcataataaataaaattttactgtttttttaaaaacaaaata

SEQ ID NO: 78926 - DNA, 807 bp, Homo sapiens; identical to SEQ ID NO: 62261

SEQ ID NO: 78927 - DNA, 750 bp, Homo sapiens; identical to SEQ ID NO: 62262

SEQ ID NO: 78928 - DNA, 1116 bp, Homo sapiens; identical to SEQ ID NO: 62263

SEQ ID NO: 78929 - DNA, 988 bp, Homo sapiens; identical to SEQ ID NO: 62264

SEQ ID NO: 78930 - DNA, 530 bp, Homo sapiens; identical to SEQ ID NO: 62265

SEQ ID NO: 78931 - DNA, 428 bp, Homo sapiens; identical to SEQ ID NO: 62266

SEQ ID NO: 78932 - DNA, 481 bp, Homo sapiens; identical to SEQ ID NO: 62267

SEQ ID NO: 78933 - DNA, 1211 bp, Homo sapiens; identical to SEQ ID NO: 62268

SEQ ID NO: 78934 - DNA, 853 bp, Homo sapiens; identical to SEQ ID NO: 62269

SEQ ID NO: 78935 - DNA, 1152 bp, Homo sapiens; identical to SEQ ID NO: 62270

SEQ ID NO: 78936 - DNA, 1773 bp, Homo sapiens; identical to SEQ ID NO: 62271

SEQ ID NO: 78937 - DNA, 653 bp, Homo sapiens
cctaggcggtagaagcagccgcttttctgtcatgcgcattgcggagagtcgttcttccctctttcccgacttcaccactcactgggatcagacccctgtcatgcgcattgagagtcctctagacaggcgctcctcgcagcaccgtagtgcgcttgcgctgagcagcccgcgagggcggaagtgggagctgcgaccgcgctccctgtgaggtgggcaagcggcgaaatggcgccctccgggagtcttgcagttcccctggcagtcctggtgctgttgctttggggtgctccctggacgcacgggcggcggagcaacgttcgcgtcatcacggacgagaactggagagaactgctggaaggagactggatgatagaattttatgccccgtggtgccctgcttgtcaaaatcttcaaccggaatgggaaagttttgctgaatggggagaagatcttgaggttaatattgcgaaagtagatgtcacagagcagccaggactgagtggacggtttatcataactgctcttcctactatttatcattgtaaagatggtgaatttaggcgctatcagggtccaaggactaagaaggacttcataaactttataagtgataaagagtggaagagtattgagcccgtttcatcatggtttgg

SEQ ID NO: 78938 - DNA, 656 bp, Homo sapiens; identical to SEQ ID NO: 62272

SEQ ID NO: 78939 - DNA, 438 bp, Homo sapiens; identical to SEQ ID NO: 62273
  misc_feature (1)...(438): n = a,t,c or g

SEQ ID NO: 78940 - DNA, 627 bp, Homo sapiens; identical to SEQ ID NO: 62274

SEQ ID NO: 78941 - DNA, 394 bp, Homo sapiens; identical to SEQ ID NO: 62275

SEQ ID NO: 78942 - DNA, 1539 bp, Homo sapiens; identical to SEQ ID NO: 62276

SEQ ID NO: 78943 - DNA, 450 bp, Homo sapiens; identical to SEQ ID NO: 62277

SEQ ID NO: 78944 - DNA, 381 bp, Homo sapiens; identical to SEQ ID NO: 62278

SEQ ID NO: 78945 - DNA, 439 bp, Homo sapiens; identical to SEQ ID NO: 62279

SEQ ID NO: 78946 - DNA, 578 bp, Homo sapiens; identical to SEQ ID NO: 62280

SEQ ID NO: 78947 - DNA, 479 bp, Homo sapiens; identical to SEQ ID NO: 62281

SEQ ID NO: 78948 - DNA, 746 bp, Homo sapiens; identical to SEQ ID NO: 62282

SEQ ID NO: 78949 - DNA, 782 bp, Homo sapiens; identical to SEQ ID NO: 62283

SEQ ID NO: 78950 - DNA, 546 bp, Homo sapiens; identical to SEQ ID NO: 62284

SEQ ID NO: 78951 - DNA, 769 bp, Homo sapiens; identical to SEQ ID NO: 62285

SEQ ID NO: 78952 - DNA, 1745 bp, Homo sapiens; identical to SEQ ID NO: 62286

SEQ ID NO: 78953 - DNA, 236 bp, Homo sapiens
cggccgcgtcgaccgacgttagtgagggacccaatgtgagtccccggccagctgaatccaagccgtgtgtactgcgtggtcagcactgcccgacagtcctagctaaacttcgccaactccgctgcctttgccgtcaccatgccacagaatgaatatattgaattacaccgtaaacgctatggattccgtttggattaccatgagaaaaagagaaagaagcaaagtcgagaggctca

SEQ ID NO: 78954 - DNA, 340 bp, Homo sapiens; identical to SEQ ID NO: 62288

SEQ ID NO: 78955 - DNA, 528 bp, Homo sapiens; identical to SEQ ID NO: 62289

SEQ ID NO: 78956 - DNA, 447 bp, Homo sapiens; identical to SEQ ID NO: 62290

SEQ ID NO: 78957 - DNA, 807 bp, Homo sapiens; identical to SEQ ID NO: 62291

SEQ ID NO: 78958 - DNA, 958 bp, Homo sapiens; identical to SEQ ID NO: 62292

SEQ ID NO: 78959 - DNA, 922 bp, Homo sapiens
tttccctttccgggcgggcaggcggcggaccccagtgtctttatccctcttttgcacagtcagcttctgcagctctcccgggctagcatggcagcgtggaagagttggacggccctgcggctctgcgccacagttgttgtacttgatatggtcgtctgtaaaggatttgtagaagatttagatgaatcgtttaaagaaaatcgaaatgatgacatttggcttgtagatttttatgcgccatggtgtggccattgtaaaaagctggaaccaatttggaatgaagttggtcttgagatgaaaagcattggttctccagttaaggttggaaagatggatgctacttcctattctagcattgcttcagagtttggagttcgaggttatccaacaattaagctattaaaaggggacttggcatataattatagaggaccacgaacaaaagatgatattattgagtttgctcacagagtatctggggctctaattcggccacttccaagtcaacaaatgtttgaacatatgcagaagagacaccgtgtatttttcgtttatgtaggtggagaatcacctttgaaagagaaatacatagatgctgcttcagaattgattgtatatacatacttcttttctgcctcagaagaagtggttcctgaggtaatatttaaaatttgattttaacgacacaattttatttattaaattattacttgatttaataaactaaattgtgattttattacttgattaaactattgagtttaatatcagatttatttactgcgatatgtgtggaaaaagtaaacatgctgattctttaaattggaaaaaaaaaagatttttggcaaaaaaaaaatcaaaaaaaagttttgtgtggggggaaaagtttaattgatcgggccccggggggaatttctgctca

SEQ ID NO: 78960 - DNA, 700 bp, Homo sapiens; identical to SEQ ID NO: 62294

SEQ ID NO: 78961 - DNA, 811 bp, Homo sapiens; identical to SEQ ID NO: 62295
  misc_feature (1)...(811): n = a,t,c or g

SEQ ID NO: 78962 - DNA, 482 bp, Homo sapiens; identical to SEQ ID NO: 62296

SEQ ID NO: 78963 - DNA, 825 bp, Homo sapiens; identical to SEQ ID NO: 62297

SEQ ID NO: 78964 - DNA, 752 bp, Homo sapiens; identical to SEQ ID NO: 62298

SEQ ID NO: 78965 - DNA, 412 bp, Homo sapiens; identical to SEQ ID NO: 62299

SEQ ID NO: 78966 - DNA, 1599 bp, Homo sapiens; identical to SEQ ID NO: 62300

SEQ ID NO: 78967 - DNA, 616 bp, Homo sapiens; identical to SEQ ID NO: 62301
  misc_feature (1)...(616): n = a,t,c or g

SEQ ID NO: 78968 - DNA, 435 bp, Homo sapiens; identical to SEQ ID NO: 62302

SEQ ID NO: 78969 - DNA, 1385 bp, Homo sapiens; identical to SEQ ID NO: 62303

SEQ ID NO: 78970 - DNA, 437 bp, Homo sapiens; identical to SEQ ID NO: 62304

SEQ ID NO: 78971 - DNA, 375 bp, Homo sapiens; identical to SEQ ID NO: 62305

SEQ ID NO: 78972 - DNA, 375 bp, Homo sapiens; identical to SEQ ID NO: 62306

SEQ ID NO: 78973 - DNA, 1342 bp, Homo sapiens; identical to SEQ ID NO: 62307

SEQ ID NO: 78974 - DNA, 446 bp, Homo sapiens; identical to SEQ ID NO: 62308
  misc_feature (1)...(446): n = a,t,c or g

SEQ ID NO: 78975 - DNA, 588 bp, Homo sapiens; identical to SEQ ID NO: 62309

SEQ ID NO: 78976 - DNA, 682 bp, Homo sapiens; identical to SEQ ID NO: 62310

SEQ ID NO: 78977 - DNA, 802 bp, Homo sapiens; identical to SEQ ID NO: 62311

SEQ ID NO: 78978 - DNA, 730 bp, Homo sapiens; identical to SEQ ID NO: 62312

SEQ ID NO: 78979 - DNA, 491 bp, Homo sapiens; identical to SEQ ID NO: 62313

SEQ ID NO: 78980 - DNA, 801 bp, Homo sapiens; identical to SEQ ID NO: 62314

SEQ ID NO: 78981 - DNA, 929 bp, Homo sapiens; identical to SEQ ID NO: 62315

SEQ ID NO: 78982 - DNA, 944 bp, Homo sapiens; identical to SEQ ID NO: 62316

SEQ ID NO: 78983 - DNA, 1405 bp, Homo sapiens; identical to SEQ ID NO: 62317
  misc_feature (1)...(1405): n = a,t,c or g

SEQ ID NO: 78984 - DNA, 599 bp, Homo sapiens; identical to SEQ ID NO: 62318

SEQ ID NO: 78985 - DNA, 1052 bp, Homo sapiens; identical to SEQ ID NO: 62319

SEQ ID NO: 78986 - DNA, 603 bp, Homo sapiens; identical to SEQ ID NO: 62320
  misc_feature (1)...(603): n = a,t,c or g

SEQ ID NO: 78987 - DNA, 384 bp, Homo sapiens; identical to SEQ ID NO: 62321

SEQ ID NO: 78988 - DNA, 1064 bp, Homo sapiens; identical to SEQ ID NO: 62322

SEQ ID NO: 78989 - DNA, 374 bp, Homo sapiens; identical to SEQ ID NO: 62323

SEQ ID NO: 78990 - DNA, 988 bp, Homo sapiens; identical to SEQ ID NO: 62324

SEQ ID NO: 78991 - DNA, 617 bp, Homo sapiens; identical to SEQ ID NO: 62325

SEQ ID NO: 78992 - DNA, 1133 bp, Homo sapiens; identical to SEQ ID NO: 62326

SEQ ID NO: 78993 - DNA, 443 bp, Homo sapiens
ccagcgctatcagggctgagggagagggaaaatatggaaggtttgatgaaaggcaaacgcggcctcatcatgggggtcgcgaataatcactcactcgcttggggaatttcaaagcaactcgcagcacagggcgccgaactagccttcacctatcaaggtgatgcactcggcaagcgcgtaaagccgctggccgaacaggtcggctccgatttcgtactgccttgcgatgttgaagatatcgagtcggtcgatgcggtctttgccgaagtcgaaaagaagtggggcaagctcgatttcatcgttcacgccatcggcttctccgacaagaccgaactgaagggtcgctacgcagacgtcaccacgcgcgaaaatttcagccgcacaatggtgatttccgcctactccttcacggaaatcctcgtgccaagctgggcgtaatcatg

SEQ ID NO: 78994 - DNA, 687 bp, Homo sapiens; identical to SEQ ID NO: 62329
  misc_feature (1)...(687): n = a,t,c or g

SEQ ID NO: 78995 - DNA, 487 bp, Homo sapiens; identical to SEQ ID NO: 62330

SEQ ID NO: 78996 - DNA, 905 bp, Homo sapiens; identical to SEQ ID NO: 62331

SEQ ID NO: 78997 - DNA, 550 bp, Homo sapiens; identical to SEQ ID NO: 62332

SEQ ID NO: 78998 - DNA, 373 bp, Homo sapiens; identical to SEQ ID NO: 62333

SEQ ID NO: 78999 - DNA, 375 bp, Homo sapiens; identical to SEQ ID NO: 62334

SEQ ID NO: 79000 - DNA, 1200 bp, Homo sapiens
  misc_feature (1)...(1200): n = a,t,c or g
cgtgcgatcgaagacctgtccggnnnncccgggtcgacgatttcgtagatgaagctaccgtcactgaaggatatttattatataaaacaaagggaaaacaagcagttacctgagaggaatctcacttctgcttccaacccaaatcatccaccagaggtaaagttgtccacattctgccgagtgaacgtgaacaatgcttcctgactctaacttttacctcaagcttcattttccctaggagatctaaagcctactcacttcaaaacaagcaaaacaaagccgagttctgagggtaagacttcgttgttgtctggtttccaggtcctgactctagatcctacgttacacatgaagccaaagcagcagatttcagggattcaacctcacggccttccgaatgcccttgatgacagaatatccttttccccggactctgttctagagcctagtatgtctagtccctctgacatagactcattttcacaagcaagtaatgtcacttctcagttacctggatttccaaaatatccctcacacacaaaagcttctccggtggactcttggaaaaatcagacattccaaaacgaaagtaggaccagttccacgtttccgtcagtatataccattactagtaatgatatctcggtcaacactgtagatgaagaaaacactgtcatggttgcttcggcctcagtcagtcagtcccagcttccaggtacagccaacagtgtcccagaatgcatttcattgacttccttggaagatcctgtgatattgtctaagtatgtatttcagtgaatggcttgtaatgttaatagattttctgtgatatctgattgaaaatgatctttattgaacttcagtattgcataaagtcttagagatttagcatttttaagatggagcatataaaaactttttcacttgattgttaactttttgtgtattaatctatatattttgtagtatgcaaaggaaatatgctatatttttgcccatgagaatcattgtgttcttggtttctcttgtgggatggagactgaagatagctttcctaatatatattttttattctcactgaataaggattaggcagaatctgaaggaaaagcatgctcgacacatagcagatcttcgagcttattatgaatcacaaataaatagtttgaaacagaagctggaggcaaaagaaatctctgg

SEQ ID NO: 79001 - DNA, 415 bp, Homo sapiens; identical to SEQ ID NO: 62336

SEQ ID NO: 79002 - DNA, 458 bp, Homo sapiens; identical to SEQ ID NO: 62337

SEQ ID NO: 79003 - DNA, 501 bp, Homo sapiens; identical to SEQ ID NO: 62338

SEQ ID NO: 79004 - DNA, 867 bp, Homo sapiens; identical to SEQ ID NO: 62339

SEQ ID NO: 79005 - DNA, 647 bp, Homo sapiens; identical to SEQ ID NO: 62340

SEQ ID NO: 79006 - DNA, 667 bp, Homo sapiens; identical to SEQ ID NO: 62341
  misc_feature (1)...(667): n = a,t,c or g

SEQ ID NO: 79007 - DNA, 1452 bp, Homo sapiens
ctcctttctcaaccattcctgcccacaacaccccagcttgctgccagcaaagcccctccacacccctcaaactccagacccttcacatcaatttactgttttcttcgacctcaccccagcaattttctctgaatcaaccccctttcctcctctcctaagtctctgagtttctctctcctcctgccatcctgagttctgccatccttaggggccgccaagacctctcttttcgttcctctcccgcctcagaccagcagccttttattttagatcatgtctggagggaagtcagcccagggtccagaggaagggggcgtctgcatcactgaagcccttatcactaagcggaacttgactttccctgaagatggggaactgtcagagaagatgtttcacactcttgatgaactgcagactgtccgcctggaccgggaggggattactactatcaggaacttagaaggcctccagaatcttcacagtctctatctgcaagggaataagatccagcaaattgagaacctggcttgcatcccctccttgcgcttcctgtctctggcaggaaaccaaatcaggcaggtggaaaacctcctcgacctcccatgcctccagtttctggacctttctgagaacctgatagaaacattgaagctggatgagttcccccagagccttctcatcctcaacctgtctggaaacagctgcaccaaccaggatggctaccgcgagctggtgacagaagccctgccacttctcctggacctggacgggcagcctgtggtggagcgctggatttcggatgaggaggatgaagcctcaagcgatgaggagttcccagagctgagtggcccattctgctcagaacgaggcttcctcaaggagctggagcaggagctgagcaggcacagggagcaccggcaacagacggccccgacagagcacctgctgaggatggagatgcagcccaccctcaccgacctgcccctgctacctggggtgcccatggctggggacagcagcccttctgccactcctgcgcaaggggaggagacagtccctgaggccgtctcctcaccccaggcctcctctcccaccaagaaaccatgcagtctgattcccaggggccaccaaagctctttctggggaaggaagggggcacgagacgccacagcccccaaggcctctgtggctgaggcccccagcacaaccaaaactacggccaagagaagcaagaaatgattctctgtcaacctttctctactagtggagaggatgtgggcctgcccctcttctcagacctctgacctgtgacagaagcccatccccagtaaagtgtctctaggccctgagtatgcttttcatgtcacttggggtatctcaggggaagaaaccagtgaaagctccaggaaacaaaatacagagctcagtgagccacctgattctaaaaaaaaa

SEQ ID NO: 79008 - DNA, 929 bp, Homo sapiens; identical to SEQ ID NO: 62343

SEQ ID NO: 79009 - DNA, 556 bp, Homo sapiens; identical to SEQ ID NO: 62344

SEQ ID NO: 79010 - DNA, 718 bp, Homo sapiens
gggactgactgagtcttccgtgtgtcgccgccgttgccgcctcagcttcagcctcgttactcctgcggttctgtggctgtgctgctggcgttaacggcgcgaggtgaagggaggtgacggagtgtgcccgcgcgcgcgggggtcccctcagtcccagcagttcccttcgtgcgcggggggcggcgagggtcttcagcagtcgggagaggcccttgacggcgccatgtcggcgggcggtccatgcccagcagcagccggagggggcccagggggcgcctcctgctccgtgggggcccctggcggggtatccatgttccggtggctggaggtgctggagaaggagttcgacaaagcttttgtggatgtggatctgctcctgggagagatcgatccagaccaagcggacatcacttatgaggggcgacagaagatgaccagcctgagctcctgctttgcacagctttgccacaaagcccagtctgtgtctcaaatcaaccacaagctggaggcacagttggtggatctgaaatctgaactgacagaaacccaagcagagaaagttgttttggagaaagaagtacatgatcagcttttacagctgcactctattcagctgcagcttcatgctaaaactggtcaaagtgctgactctggtaccattaaggcaaaattgtctggcccctctgtggaggagctggaaagagagctaaaggcaaac

SEQ ID NO: 79011 - DNA, 397 bp, Homo sapiens
catatcagagacatcctgccccagctgtccagcagccctttatcaataaggcctccaacagtgttcttcaatccagaaatgctccgcttccatccctgcaaaatggacctaacacacccaacaagcctagttcacccccgccaccccagcaatttgtcgtccagcactctctatttgggagtccagtcgccaagacaaaagatcccccccgttatgaggaggccatcaagcagacacgcagcacacaggcccctctgccagagatttccaacgctcacagtcagcagatggatgacctctttgatatcctcattaagagtggagagatctccctccccataaaagaagaaccttctcctatttccaaaatgagaccagtgacagccagcattgtatt

SEQ ID NO: 79012 - DNA, 583 bp, Homo sapiens; identical to SEQ ID NO: 62351

SEQ ID NO: 79013 - DNA, 523 bp, Homo sapiens; identical to SEQ ID NO: 62352
  misc_feature (1)...(523): n = a,t,c or g

SEQ ID NO: 79014 - DNA, 1273 bp, Homo sapiens; identical to SEQ ID NO: 62353

SEQ ID NO: 79015 - DNA, 426 bp, Homo sapiens; identical to SEQ ID NO: 62354

SEQ ID NO: 79016 - DNA, 1341 bp, Homo sapiens; identical to SEQ ID NO: 62355

SEQ ID NO: 79017 - DNA, 1076 bp, Homo sapiens; identical to SEQ ID NO: 62356
  misc_feature (1)...(1076): n = a,t,c or g

SEQ ID NO: 79018 - DNA, 624 bp, Homo sapiens
cgcaggaactcggcacgagctgaacgccaggagaccaggataccgaggcaccggatcccctctctgtgccctggggagccccagtgctgcccagtcaccccagggctgaggtctgcgtccctagtggtgcaaggcctggtaggaccacggggcaggtaatgtgagcgccatctgagctcacggtgtcctgagtcgcggcttcgtgactttggcaggggcctccggaccagtgaccccagtcaaacccagagggtcttgggcggcagcgacgaaggaggtattcaggctccaggccaggtggggccggacgcccccagccatccaccatggtggtggcacaccccaccgccactgccaccaccacgcccactgccactgtcacggccaccgttgtgatgaccacggccaccatggacctgcgggactggctgttcctctgctacgggctcatcgccttcctgacggaggtcatcgacagcaccacctgcccctcggtgtgccgctgcgacaacggcttcatctactgcaacgaccggggactcacatccatccccgcagatatccctgatgatgccaccaccctctacctgcagaacaaccagatcaacaacgccggcatgtatt

SEQ ID NO: 79019 - DNA, 1416 bp, Homo sapiens; identical to SEQ ID NO: 62358

SEQ ID NO: 79020 - DNA, 717 bp, Homo sapiens
cctgagtaccccttcaagaccaagcaaatgatgtccccagtcagcaagacccaggagcacggacttttttatggtgaccagcaccccgggatgctccacgagatggtcaagccctaccctgctcctcagcctgtgagaacagatgtggccgtcctgcggtaccagccaccccctgagtatggggtaacgagccgcccatgccaacttccgttcccatcaaccatgcagcagcacagccccatgtcctcccagacctcttccgccagcgggccactgcactctgtctccctgccgcttccactcccgatggccctgggtgctccacagcccccgcctgccgcctcccccagccagcagcttggtccagatgcctttgcgattgtggagcgagcccagcaaatggtggagatattaacagaggagaaccgggtgcttcaccaggaacttcagggttactacgacaatgccgacaagctccacaagtttgaaaaagaacttcagagaatttcggaagcctatgaaagtctggtcaagtctaccaccaagcgagaatcgctggacaaggccatgagaaacaaattggaaggcgagattagaagacttcatgatttcaacagagacctccgagatcgactagagactgctaacaggcaactatccagcagggaatacgaagggcatgaagacaaagctgcagaggggcattatgcttcccag

SEQ ID NO: 79021 - DNA, 582 bp, Homo sapiens
ggccctccttacccatggagaaaatagtgatcaaaagtgaatactcaccgggcttgactcagggcccctcaggctctcctcagctgaggcccccatcagctggccccgcattctccatggccaactctgccctctccacttcgtctccaatcccttcagtccctcagagccaggctcagcctcagacaggctccggagcaagccgggccttgccaagctggcaggaagtatcccatgcccagcagctcaaacagatagctgctaatcgtcagcagcatgcccggatgcagcagcaccagcagcagcaccagcctaccaactggtcagccttgccctcctctgctggaccatcaccaggtccatttgggcaggagaaaatccccagcccttcttttggtcagcagacattcagcccacagagctcccccatgcctggggtagctggcggcagcggccagtcgaaagtaatggctaactacatgtacaaggccggcccctcagcccagggtgggcacctagatgtcctcatgcagcaaaagcctcagaatctcagtagaagttttattaacaacccggtgtctt

SEQ ID NO: 79022 - DNA, 1292 bp, Homo sapiens; identical to SEQ ID NO: 62361

SEQ ID NO: 79023 - DNA, 1067 bp, Homo sapiens
gaagtaagaagctttatgccaggcactattcaaagcactttgtggcttcatggaagcaaagagaaaaatgtttttctttttttcctccctttccagtctctcctgtgactttcacccctttaggcttaaacaagatacgcaggcatacaggaagcccttcttatgcgttcgctactagcggtactgatcttaatttttttgaagccgtgccggctccggcactttatttttggtgtgctcctccaaccaaccaagtttcgcagaattctgttgttgcctggtctgagtacctcccggcggccaggacccgccgttttcggtatagggaacaccagataacaatatataacgctacctaacaaacgtttctccacccacagcgccattagcggttaggtttgcagtgccgaagagcgcgccgactatttcttccgccgtccgccggtggcgaggcccaggctgtcgccgggtgtgcagcggcgtcgcggccagtagagggattctgggtaacggcccggacccccggctgggcttctggctcggcgcagcaggttccattcacgccaagtctgttggcagtggcagttgtagggccaagggcggttgtaggacccggagcagccggacatggaacaaccgtggccgcctccgggaccctggagcctccctcgggccgagggtgaggctgaggaagagagtgacttcgacgtgttccccagttctccccgctgcccgcagctgccaggcggcggcgcccagatgtatagccatggaattgaattggcttgccaaaagcagaaagagtttgtgaagagctctgtggcgtgcaaatggaatcttgctgaagctcaacagaaacttggtagcttagcactgcataattctgagtccttggatcaggagcatgccaaagcacaaacagcagtatcagaactgaggcaacgggaagaagagtggcgacagaaagaagaagctctagtacaaagagagaagatgtgtctgtggagcacggatgccattagcaaggatgtttttaataagagttttattaatcaagataaaagaaa

SEQ ID NO: 79024 - DNA, 2303 bp, Homo sapiens; identical to SEQ ID NO: 62363

SEQ ID NO: 79025 - DNA, 880 bp, Homo sapiens; identical to SEQ ID NO: 62364

SEQ ID NO: 79026 - DNA, 395 bp, Homo sapiens; identical to SEQ ID NO: 62365

SEQ ID NO: 79027 - DNA, 1580 bp, Homo sapiens; identical to SEQ ID NO: 62366

SEQ ID NO: 79028 - DNA, 778 bp, Homo sapiens; identical to SEQ ID NO: 62367

SEQ ID NO: 79029 - DNA, 1007 bp, Homo sapiens; identical to SEQ ID NO: 62368
  misc_feature (1)...(1007): n = a,t,c or g

SEQ ID NO: 79030 - DNA, 565 bp, Homo sapiens; identical to SEQ ID NO: 62369

SEQ ID NO: 79031 - DNA, 1296 bp, Homo sapiens; identical to SEQ ID NO: 62370

SEQ ID NO: 79032 - DNA, 591 bp, Homo sapiens; identical to SEQ ID NO: 62371

SEQ ID NO: 79033 - DNA, 454 bp, Homo sapiens; identical to SEQ ID NO: 62372

SEQ ID NO: 79034 - DNA, 615 bp, Homo sapiens; identical to SEQ ID NO: 62373

SEQ ID NO: 79035 - DNA, 1486 bp, Homo sapiens
gtgcagtggcgcaatctcagctcactgcaacaagagtgaaactccatctcaaaaaaacaaaaacaaaaacaaaaacaaacaaacaaaaaacacgctaattcaatcttccttttctgagagtctcaatttggagaaaaataattcaattttctattttgctagtaagaaatatatttgtttctcctccaattgtagaggaaaacaaggaaagagaagatgtatgatgcaaacatcaacagtttcataacgaagacatcaggaacataactaggagggctgaacattttaccattcctccttgaagtttacatataagctttgattcatattaaattttctgctaaaataactacttccttttcagacttcaattccattaaacacacatctatttccattttaaatcacatacaagtgctatgtgatcagagggatgggaaacactaggtaaggcctggtgggtggtaacttcttcatgactaggtaatggaatcacctgttcaacctctaaagcatttaagtcaatgaaaatgtaatctagacatccatgaaagccaccaacataatttgtgtaagcaggttcaccacaagcacttttcagcttgaagaaatgtgtaagagacatattgcatctttcctcctccccattggaagcccagtcttcatgatcctctggaatgctgccattgatgacaaaatgatacattcctgttgatggtgtactattaaagtccccacaaaatataactggtatgccaggatacagatcacatgaaacatgtcttatgtgagccaaggctactgccatttgaatgaggcgaatatacccacctttaggatgccagtaaagatgggtattagcaacacatatccttttagaagagtcctttgtagactgaagaactgaaacctgaagaacagaagatctctggagcaccttctcctgcgctgatgggtacaaaactagtttctccagcagttctttgtgaagtgggtcggactcgagggcttcgtagaatgaaatgtcatgctggctaagaaggctgaacttagactttcggtagaaagtggccaggccttcgtgctgcttgattcgaaacaccccctcgagcccgaaggcctctagggcgggtaccaagctgtcagaaaacactgcgcggtcaacctccttgcaaacagatgacatcggcgttgtagccggtgagttccttctggataaggttctggcggtagtcgagctccagggcgtagggggcacagtatgggtacagaaccggttcgcgagaactcaagtctgcgcgtacgtgtcctgccaggaatgttgtaagagacagtgcggatgagagcgtcctcagtcaccttcttccgtgtagagatgccggttggtcaaaagtgcaggttgccaggcccaagctcttaccacacacacacttttccaactcccggctgtgcccaaaagcgctgcccatcgcctggggtgcagtga

SEQ ID NO: 79036 - DNA, 475 bp, Homo sapiens; identical to SEQ ID NO: 62374

SEQ ID NO: 79037 - DNA, 755 bp, Homo sapiens; identical to SEQ ID NO: 62375

SEQ ID NO: 79038 - DNA, 433 bp, Homo sapiens; identical to SEQ ID NO: 62376

SEQ ID NO: 79039 - DNA, 515 bp, Homo sapiens; identical to SEQ ID NO: 62377

SEQ ID NO: 79040 - DNA, 443 bp, Homo sapiens; identical to SEQ ID NO: 62378

SEQ ID NO: 79041 - DNA, 703 bp, Homo sapiens; identical to SEQ ID NO: 62379

SEQ ID NO: 79042 - DNA, 798 bp, Homo sapiens; identical to SEQ ID NO: 62380

SEQ ID NO: 79043 - DNA, 1544 bp, Homo sapiens; identical to SEQ ID NO: 62381

SEQ ID NO: 79044 - DNA, 774 bp, Homo sapiens; identical to SEQ ID NO: 62382

SEQ ID NO: 79045 - DNA, 412 bp, Homo sapiens; identical to SEQ ID NO: 62383

SEQ ID NO: 79046 - DNA, 721 bp, Homo sapiens; identical to SEQ ID NO: 62384

SEQ ID NO: 79047 - DNA, 626 bp, Homo sapiens; identical to SEQ ID NO: 62385

SEQ ID NO: 79048 - DNA, 596 bp, Homo sapiens; identical to SEQ ID NO: 62386

SEQ ID NO: 79049 - DNA, 1173 bp, Homo sapiens; identical to SEQ ID NO: 62387

SEQ ID NO: 79050 - DNA, 401 bp, Homo sapiens; identical to SEQ ID NO: 62388

SEQ ID NO: 79051 - DNA, 571 bp, Homo sapiens; identical to SEQ ID NO: 62389

SEQ ID NO: 79052 - DNA, 793 bp, Homo sapiens; identical to SEQ ID NO: 62390

SEQ ID NO: 79053 - DNA, 1820 bp, Homo sapiens; identical to SEQ ID NO: 62391

SEQ ID NO: 79054 - DNA, 547 bp, Homo sapiens; identical to SEQ ID NO: 62392

SEQ ID NO: 79055 - DNA, 933 bp, Homo sapiens; identical to SEQ ID NO: 62393

SEQ ID NO: 79056 - DNA, 580 bp, Homo sapiens; identical to SEQ ID NO: 62394

SEQ ID NO: 79057 - DNA, 432 bp, Homo sapiens; identical to SEQ ID NO: 62395

SEQ ID NO: 79058 - DNA, 889 bp, Homo sapiens; identical to SEQ ID NO: 62396

SEQ ID NO: 79059 - DNA, 452 bp, Homo sapiens; identical to SEQ ID NO: 62397

SEQ ID NO: 79060 - DNA, 416 bp, Homo sapiens
agacctcgcttaaaggatgcactctggcactcacatttcagtttggggctgcccagcccatgtagaggcacggtactggaggactgggggaaggcgtgagaagtcaggtacatcagactgagccaccaactgtgtgcatgtgggtgttcggcatgcacacgcacagcctgtgacctggagtgaatgaaggacctctgtctctccagtgctgtgaacagtccagtccgatggtgatgggatggcatacatttcaggcccatatatcaaatggggcgggcgacgggaaggggaatccctggtttccaaggtagagtcgctctggcaggaaagaagccgtggtcctggggaccgaggacgcgctgccgccgccgctgcctcctccgggcagcctcccccgcaggccgcaacgaaatcgt

SEQ ID NO: 79061 - DNA, 423 bp, Homo sapiens; identical to SEQ ID NO: 62399

SEQ ID NO: 79062 - DNA, 656 bp, Homo sapiens; identical to SEQ ID NO: 62400

SEQ ID NO: 79063 - DNA, 407 bp, Homo sapiens; identical to SEQ ID NO: 62401

SEQ ID NO: 79064 - DNA, 631 bp, Homo sapiens; identical to SEQ ID NO: 62402

SEQ ID NO: 79065 - DNA, 582 bp, Homo sapiens; identical to SEQ ID NO: 62403

SEQ ID NO: 79066 - DNA, 420 bp, Homo sapiens; identical to SEQ ID NO: 62404

SEQ ID NO: 79067 - DNA, 785 bp, Homo sapiens; identical to SEQ ID NO: 62405

SEQ ID NO: 79068 - DNA, 495 bp, Homo sapiens; identical to SEQ ID NO: 62406

SEQ ID NO: 79069 - DNA, 580 bp, Homo sapiens; identical to SEQ ID NO: 62407

SEQ ID NO: 79070 - DNA, 713 bp, Homo sapiens; identical to SEQ ID NO: 62408

SEQ ID NO: 79071 - DNA, 1248 bp, Homo sapiens; identical to SEQ ID NO: 62409

SEQ ID NO: 79072 - DNA, 625 bp, Homo sapiens; identical to SEQ ID NO: 62410

SEQ ID NO: 79073 - DNA, 643 bp, Homo sapiens; identical to SEQ ID NO: 62411

SEQ ID NO: 79074 - DNA, 419 bp, Homo sapiens; identical to SEQ ID NO: 62412

SEQ ID NO: 79075 - DNA, 571 bp, Homo sapiens; identical to SEQ ID NO: 62413

SEQ ID NO: 79076 - DNA, 458 bp, Homo sapiens; identical to SEQ ID NO: 62414

SEQ ID NO: 79077 - DNA, 412 bp, Homo sapiens; identical to SEQ ID NO: 62415

SEQ ID NO: 79078 - DNA, 467 bp, Homo sapiens; identical to SEQ ID NO: 62416

SEQ ID NO: 79079 - DNA, 754 bp, Homo sapiens; identical to SEQ ID NO: 62417

SEQ ID NO: 79080 - DNA, 411 bp, Homo sapiens; identical to SEQ ID NO: 62418

SEQ ID NO: 79081 - DNA, 938 bp, Homo sapiens; identical to SEQ ID NO: 62419

SEQ ID NO: 79082 - DNA, 790 bp, Homo sapiens; identical to SEQ ID NO: 62420

SEQ ID NO: 79083 - DNA, 465 bp, Homo sapiens; identical to SEQ ID NO: 62421

SEQ ID NO: 79084 - DNA, 559 bp, Homo sapiens; identical to SEQ ID NO: 62422

SEQ ID NO: 79085 - DNA, 633 bp, Homo sapiens; identical to SEQ ID NO: 62423

SEQ ID NO: 79086 - DNA, 487 bp, Homo sapiens; identical to SEQ ID NO: 62426

SEQ ID NO: 79087 - DNA, 516 bp, Homo sapiens; identical to SEQ ID NO: 62427

SEQ ID NO: 79088 - DNA, 1008 bp, Homo sapiens; identical to SEQ ID NO: 62428

SEQ ID NO: 79089 - DNA, 427 bp, Homo sapiens; identical to SEQ ID NO: 62429

SEQ ID NO: 79090 - DNA, 830 bp, Homo sapiens; identical to SEQ ID NO: 62430

SEQ ID NO: 79091 - DNA, 813 bp, Homo sapiens; identical to SEQ ID NO: 62431

SEQ ID NO: 79092 - DNA, 1743 bp, Homo sapiens; identical to SEQ ID NO: 62432

SEQ ID NO: 79093 - DNA, 2609 bp, Homo sapiens; identical to SEQ ID NO: 62433

SEQ ID NO: 79094 - DNA, 531 bp, Homo sapiens; identical to SEQ ID NO: 62434

SEQ ID NO: 79095 - DNA, 622 bp, Homo sapiens; identical to SEQ ID NO: 62435

SEQ ID NO: 79096 - DNA, 1160 bp, Homo sapiens; identical to SEQ ID NO: 62437

SEQ ID NO: 79097 - DNA, 976 bp, Homo sapiens
ggaggaggtgctgactgaagaggagctgaccaccacactaaaggtactgtgcatgcctgctgaggagttcagagagcttaaagaccaggatggagggggagatgataaaagggaagagggcagcctgacgatcacaaatattcccaagctcaaagcatcgtggagacagctgcttcaaaacagtgttctactgactttgcagacctatgccacagacttaaaaactgaccaaggtttactcagtaataaggaagtctatgcgaaactcagctggagggaacagcaagccttacaggttcgctatggtcagaagatgatcttacatcagttgttggagctgacaagttagcagtttccctgttccctgaaggaacagcaataagaactttattctaagctaatactcattgatgtttgaaaaagaggaaaatttggatctttcttttgcttactaaacaccaagaggaaaagtagcaaagttggtgtgctaggattaactcaggtaagggtgatgtgttttaggattgagaacagcagacttgggaatcactgctaattgttacttaaagcatgttacagctgttttgttctcagttttaaccaaagccagtggacatacggtagtaataagtaagtcttgttgtgtttcagcatttaataatagactttggaggtagacccctggtttaaatctaagtctagtttgaggaagtcacttaacctttattgaaaagactctggatttaataagctgtgtaactggtactcgatagttacccaaagttcagtctagatggcacaaaccacctctcagggaataaaccctaagacatcactcaaggaggacttcaattatttaattttgaactgttttgtcctctctggccataaaacttgacagtcatgaaaggtaaggcaaattttaagtgggttaagtttttaaatacgtatctactcattttctttaaaaaaaaaa

SEQ ID NO: 79098 - DNA, 576 bp, Homo sapiens; identical to SEQ ID NO: 62438

SEQ ID NO: 79099 - DNA, 1220 bp, Homo sapiens; identical to SEQ ID NO: 62439

SEQ ID NO: 79100 - DNA, 1573 bp, Homo sapiens; identical to SEQ ID NO: 62440

SEQ ID NO: 79101 - DNA, 590 bp, Homo sapiens; identical to SEQ ID NO: 62441

SEQ ID NO: 79102 - DNA, 477 bp, Homo sapiens; identical to SEQ ID NO: 62442

SEQ ID NO: 79103 - DNA, 867 bp, Homo sapiens; identical to SEQ ID NO: 62443

SEQ ID NO: 79104 - DNA, 655 bp, Homo sapiens; identical to SEQ ID NO: 62444

SEQ ID NO: 79105 - DNA, 507 bp, Homo sapiens; identical to SEQ ID NO: 62445

SEQ ID NO: 79106 - DNA, 709 bp, Homo sapiens; identical to SEQ ID NO: 62446

SEQ ID NO: 79107 - DNA, 500 bp, Homo sapiens; identical to SEQ ID NO: 62447
  misc_feature (1)...(500): n = a,t,c or g

SEQ ID NO: 79108 - DNA, 1310 bp, Homo sapiens
tccacgtggcggaattcgtgttgctcccatctagaggggaggtcaggaggtttagacctctgcgctgtctggtcgggagtggggagggctccgaggggccgggcgggggctggaggggagcaccagcaaattgattcctggcactttctctgctccccttggtgagggctggccttgcctgtatcggccaagagacccagaataggctgagcggaccttgccagagctgcttgtcagcggggactgctctgtcagcagggagagccaaaaagggccgttccacccctgagaggcggcagggctgggctgggctgggcaggccaggcctcagacactggggggtggtgtgagggaaggctggtgaggcggcgagaagcgcggctgcctccgaaccttcccggctgaacctcccttgcgttgctttccccggcaggtgcccattctgcatttattccaccaaccgccccgctgccatggagtgccacctcaagacccactacaagatggagtacaagtgccggatctgccagacggtgaaggccaaccagctggagctggagacgcacacccgggagcaccgcctgggcaaccactacaagtgcgaccagtgcggctacctgtccaagaccgccaacaagctcatcgagcacgtgcgcgtccacaccggggagcggcccttccactgtgaccagtgcagctacagctgcaagcgcaaggacaatctcaacctgcacaagaagctgaagcacgccccacgccagaccttcagctgcgaagagtgcctgttcaagaccacacaccctttcgtcttcagccgccacgtcaagaagcaccagagtggggactgccccgaggaggacaagaagggcctgtgtccagcccccaaggaaccgggccggcccgggggccccgctcctggtggtcgggagctcccggaatctcctgtctcccctgtcagttatgtctgcctcccaggctctgcagaccgtggccgtgtcgggcagcccacggcagcagctcagagcccaacctggcactcaaggctttggccttcaacggctcccctttgcgctttgacaagtaccggaactcagattttgcccatctcattcccttgacaatgttataccccaagaaccacttggatctcacattccaccctccccgacctcagactgcgcctcccagcatcccctcacccaaacactccttcctggcctatctcggactgagagaaagagcagagactgactgagggaagccatgtatcatgtaccaaaaacagagagacaaaagacaaaaaaaaaaaa

SEQ ID NO: 79109 - DNA, 418 bp, Homo sapiens; identical to SEQ ID NO: 62449

SEQ ID NO: 79110 - DNA, 425 bp, Homo sapiens; identical to SEQ ID NO: 62450

SEQ ID NO: 79111 - DNA, 837 bp, Homo sapiens; identical to SEQ ID NO: 62451

SEQ ID NO: 79112 - DNA, 1013 bp, Homo sapiens; identical to SEQ ID NO: 62453
  misc_feature (1)...(1013): n = a,t,c or g

SEQ ID NO: 79113 - DNA, 560 bp, Homo sapiens; identical to SEQ ID NO: 62454

SEQ ID NO: 79114 - DNA, 1562 bp, Homo sapiens
cggaaccgtaggaggggtacttaaccggacggcctaccaggcctgtggccgtgcgcgggaagagcactgcagatctcaggatgatggggcgcagccctgggtttgccatgcagcacatcgtgggtgtgccccacgtactggttcggaggggcctccttggaagggacctcttcatgaccaggactctctgcagcccaggcccaagccagcccggagagaaaagacctgaggaggtggccctggggctgcaccaccgcctcccagcactgggaagagccctggggcacagcattcagcaacgagcgacctccacagccaagacttggtgggacagatatgaagagtttgttggactcaacgaggttcgagaggcccagggaaaggtgacagaggctgagaaagtgttcatggtggctcgagggcttgtccgagaggctcgggaggacttggaagttcaccaggccaagctgaaggaggtgagggaccgcttggaccgtgtctccagggaggacagtcagtacttggaactggctactctcgagcacaggatgctgcaggaggagaagaggcttcgcacagcctatctgcgtgcagaagactctgagcgagagaagttctccctcttctctgcagctgtgcgggaaagtcatgagaaggagcgcacaagggctgagaggaccaagaactggtccctcattggctcagtcctgggggccctgattggtgtggctggctccacctatgtgaaccgtgtgcgactacaggagctgaaggctttactcctggaggcgcagaaggggcctgtgagtctccaagaggccattcgagaacaggcgtctagctactcccgccagcagagggacctccacaatctcatggtggacttgaggggcctggtacatgctgctgggccagggcaggactctgggtcacaggcaggtagtcccccgaccagagacagagatgtagatgtcctttcagctgccttgaaagagcagcttagtcattccaggcaagtccattcatgtctagaaggcttacgagagcagcttgatggcctagaaaagacttgtagccaaatggctggggtggttcagcttgtaaagtctgcagcacacccaggcctggtggaaccagcagacggggctatgcccagcttcttgctggagcaggggagcatgatcttggcactgtcagacacggagcagagactagaagcccaagtcaacaggaacaccatctatagcaccctggtcacctgtgtgacatttgtggccacactgcctgtgctctacatgctattcaaagccagctaacccctggcccctcctccagagggtctgaggcaatagctgtgaatgtggatttaagtagagaatcgtagcaatgaagcgagcctttgggggcatgtacaacctcaatctgaaggagcagtatctgtgtggctcaccagcaggcatgcttcgctttgtagacaaggttcatttacattaattatcaaaactttgtgctaatgtccaattaaaatatcctgagttttattatttaaaacaaaaaaaaaa

SEQ ID NO: 79115 - DNA, 597 bp, Homo sapiens; identical to SEQ ID NO: 62456

SEQ ID NO: 79116 - DNA, 756 bp, Homo sapiens; identical to SEQ ID NO: 62457

SEQ ID NO: 79117 - DNA, 558 bp, Homo sapiens; identical to SEQ ID NO: 62458

SEQ ID NO: 79118 - DNA, 745 bp, Homo sapiens; identical to SEQ ID NO: 62459

SEQ ID NO: 79119 - DNA, 425 bp, Homo sapiens
ggctccgccatggcctcgggagccggaggagtcggagggggcggtggcggcaagatccggacgcggcgttgccaccaggggccaattaagccttaccagcaggggcgacaacagcatcaggtatgggaccccgacgccgcggtggcctggcgggtggggaaactcggctggaggggacgggcggttcgaggccccggcgccccacgtggagcagacaggagggcctgaggaaaggcccgagtgaggctccgggggagctcaggccgttgggggtggcgacgggaagtgggctgagacaggcccagccttgcggcgcacacgtgtggtttgggccgcctttcccccaactctctgggtcaggggctttcccaggcaggctctgggcgggaaaagaaattgtaggcccatgatgcgcgccggcattc

SEQ ID NO: 79120 - DNA, 369 bp, Homo sapiens; identical to SEQ ID NO: 62461

SEQ ID NO: 79121 - DNA, 1280 bp, Homo sapiens; identical to SEQ ID NO: 62462

SEQ ID NO: 79122 - DNA, 969 bp, Homo sapiens; identical to SEQ ID NO: 62463

SEQ ID NO: 79123 - DNA, 714 bp, Homo sapiens; identical to SEQ ID NO: 62464

SEQ ID NO: 79124 - DNA, 808 bp, Homo sapiens; identical to SEQ ID NO: 62465

SEQ ID NO: 79125 - DNA, 434 bp, Homo sapiens; identical to SEQ ID NO: 62466

SEQ ID NO: 79126 - DNA, 536 bp, Homo sapiens; identical to SEQ ID NO: 62467

SEQ ID NO: 79127 - DNA, 870 bp, Homo sapiens; identical to SEQ ID NO: 62468
  misc_feature (1)...(870): n = a,t,c or g

SEQ ID NO: 79128 - DNA, 1123 bp, Homo sapiens; identical to SEQ ID NO: 62469

SEQ ID NO: 79129 - DNA, 530 bp, Homo sapiens; identical to SEQ ID NO: 62470
  misc_feature (1)...(530): n = a,t,c or g

SEQ ID NO: 79130 - DNA, 857 bp, Homo sapiens; identical to SEQ ID NO: 62472

SEQ ID NO: 79131 - DNA, 460 bp, Homo sapiens; identical to SEQ ID NO: 62473

SEQ ID NO: 79132 - DNA, 675 bp, Homo sapiens; identical to SEQ ID NO: 62474

SEQ ID NO: 79133 - DNA, 718 bp, Homo sapiens; identical to SEQ ID NO: 62475

SEQ ID NO: 79134 - DNA, 469 bp, Homo sapiens; identical to SEQ ID NO: 62476

SEQ ID NO: 79135 - DNA, 632 bp, Homo sapiens; identical to SEQ ID NO: 62477
  misc_feature (1)...(632): n = a,t,c or g

SEQ ID NO: 79136 - DNA, 780 bp, Homo sapiens; identical to SEQ ID NO: 62478

SEQ ID NO: 79137 - DNA, 695 bp, Homo sapiens; identical to SEQ ID NO: 62479

SEQ ID NO: 79138 - DNA, 1333 bp, Homo sapiens; identical to SEQ ID NO: 62480
  misc_feature (1)...(1333): n = a,t,c or g

SEQ ID NO: 79139 - DNA, 659 bp, Homo sapiens; identical to SEQ ID NO: 62481

SEQ ID NO: 79140 - DNA, 620 bp, Homo sapiens; identical to SEQ ID NO: 62482

SEQ ID NO: 79141 - DNA, 634 bp, Homo sapiens; identical to SEQ ID NO: 62483

SEQ ID NO: 79142 - DNA, 2069 bp, Homo sapiens; identical to SEQ ID NO: 62484
  misc_feature (1)...(2069): n = a,t,c or g

SEQ ID NO: 79143 - DNA, 1662 bp, Homo sapiens; identical to SEQ ID NO: 62485

SEQ ID NO: 79144 - DNA, 973 bp, Homo sapiens; identical to SEQ ID NO: 62486

SEQ ID NO: 79145 - DNA, 602 bp, Homo sapiens; identical to SEQ ID NO: 62487

SEQ ID NO: 79146 - DNA, 459 bp, Homo sapiens; identical to SEQ ID NO: 62488

SEQ ID NO: 79147 - DNA, 553 bp, Homo sapiens; identical to SEQ ID NO: 62489

SEQ ID NO: 79148 - DNA, 470 bp, Homo sapiens; identical to SEQ ID NO: 62490

SEQ ID NO: 79149 - DNA, 619 bp, Homo sapiens
ggaattcccgggtcgacgatttcgtgctgcctctgggttggcgggctggcaggctgtagccgagcgcgggcaggactcgtcccggcagggttccagagccatgggagcggaaaggaggctgctgtcgattaaggaggcctttcggctggcgcagcagccgcaccagaaccaggcgaagctggtggtggcgctgagccgcacctaccgcacgatggatgataagacagtttttcatgaggagttcattcattaccttaaatatgttatggtggtctataaacgtgaaccagctgtggagagggtaatagaatttgcagcaaagtttgttacctcatttcaccaatcagatatggaagatgatgaggaagaggaagatggtggccttttaaattatttgtttacttttctcttaaagtctcatgaagcaaacagcaatgcagtgagatttagagtgtgcctgctcataaacaagcttttgggaagtatgccacaaaatgctcagattgatgatgatgtgtttgataaaattaataaagccatgcttattagattgaaagataagattccaaatgtgagaatacaggcagttctggcgctttcacgacttcaggatcccaag

SEQ ID NO: 79150 - DNA, 1056 bp, Homo sapiens; identical to SEQ ID NO: 62492

SEQ ID NO: 79151 - DNA, 2114 bp, Homo sapiens
tttcgtgcgtcttctaagggcgtgggcgagtttacgcgggccagttgttgctggtcgcatgggtaacgaagaaagttcggctaggcaagctcagtgatttttaactctgttggactcgatttgggagccgaatgcctatttcattcttttgtgggctgagactgggggtttgagaaagtggacgggggccaaggtattcatctcacagttggtagcaggatgagagacgagaagtcttgcggtgcaggagaaaccaagtcaggcaggcaggagacgcagcagtaggatctcgtttgcaggagccctgtttcttacacgctttctactccaggagctgctgctaaataatttctgctcagccatgtcgccggctccagatgcagccccggctcctgcgtcgatctccctgtttgacctcagcgcggatgctccggtctttcagggcctgagcctggtgagccacgcgcctggggaggctctggcccgggctccgcgtacttcctgttcaggctcaggggagagagaaagcccagaaagaaagctactccagggtcctatggatatttcagagaagttattttgttcaacttgtgaccagaccttccagaaccaccaagaacagagggaacattataagcttgactggcatcggtttaacctaaagcaacgtctcaaggacaagcctctcctgtctgccctggactttgaaaagcagagctccacaggagatctttccagcatctcgggatcagaagactcagactcagccagtgaggaggacttgcagacactggatcgggagagggctacatttgagaagttgagccgacccccaggcttttaccctcatcgagttcttttccagaatgcccagggccagtttctttatgcctaccgctgtgtcctaggccctcatcaggatcccccagaagaggcagaactgctgctacagaacctgcaaagtaaaggtcccagagactgcgtggtgctcatggctgcagctgggcactttgctggtgctatatttcaaggaagagaagtggtgacacacaaaacttttcaccgctatacggttcgggccaagcggggcacagcccaggggcttcgggatgcccgaggtgggccatcacactctgctggagccaacctgaggcgctacaatgaagccacactatataaggatgttcgtgacctgctggcagggccaagctgggctaaggcgctggaggaggctggtacaatactgttgcgtgctccccgctctggccggtctttgttctttggaggcaagggagcacccctgcaaaggggggatccccgactttgggatatccccctcgccacccgcagacccaccttccaagagctacagcgtgtgctccataagctgaccactttgcatgtctatgaagaagaccctcgggaagcagtcagactgcactcacctcagacacactggaaaacagtaagagaggagagaaagaagcctactgaggaagaaataagaaagatctgcagggatgaaaaggaagcgctggggcagaatgaggaatctcccaaacagggttcagggtcggagggagaagatggctttcaggtagagttggagctagtggagttgactgtggggactctggatctttgtgagtctgaagtattgcccaagcggaggaggagaaaaaggaataagaaggagaaaagccgagaccaggaggctggggcacatcggactcttctccagcaaactcaagaagaggagccttccacacagtcatcccaggcagttgctgcccccttgggccctttgctggatgaggccaaagcccctggtcagccagagctctggaatgcactgcttgctgcttgccgagctggagatgttggagtgctaaagctgcagctagctcccagccctgcagaccctagagttctgtctctgctcagtgcccccttgggctccggtggctttactctcctgcatgcagcagctgcagctggaagaggctcagtggttcgtctgctgctggaagcaggtgctgaccccactgtgcagtgccaggaccattgacaccagaaatggaggcacggcaggctacatggaaaagggagcagaa

SEQ ID NO: 79152 - DNA, 735 bp, Homo sapiens; identical to SEQ ID NO: 62494

SEQ ID NO: 79153 - DNA, 717 bp, Homo sapiens; identical to SEQ ID NO: 62495

SEQ ID NO: 79154 - DNA, 509 bp, Homo sapiens; identical to SEQ ID NO: 62496

SEQ ID NO: 79155 - DNA, 766 bp, Homo sapiens; identical to SEQ ID NO: 62497

SEQ ID NO: 79156 - DNA, 407 bp, Homo sapiens
gctcgctacctcgctcgcgcaggcactgcagattctcccaggccagtggatcccgagccaactcggccgggcgctggaggcaggtggcgagacagaacctcgcctgtttcctcacaaacccacactgtggcagccttgttaatgcagatggccatggtgaagtgtggacagattggaataatatgtccaagtttttccagtatggatggcgatgcaccactaatgagaatacctattcaaaccgtaccctgatgggcaactggaaccaggaaagatatgacctgaggaatatcgtgcagcccaaacccttgccttcccagtttggacactactttgaaacaacatatgatacaagctacaacaacaaaatgccactttcaacacatagatttaagcgagagcctcac

SEQ ID NO: 79157 - DNA, 460 bp, Homo sapiens; identical to SEQ ID NO: 62498

SEQ ID NO: 79158 - DNA, 469 bp, Homo sapiens; identical to SEQ ID NO: 62499

SEQ ID NO: 79159 - DNA, 619 bp, Homo sapiens; identical to SEQ ID NO: 62500

SEQ ID NO: 79160 - DNA, 460 bp, Homo sapiens; identical to SEQ ID NO: 62501

SEQ ID NO: 79161 - DNA, 1732 bp, Homo sapiens; identical to SEQ ID NO: 62502

SEQ ID NO: 79162 - DNA, 1013 bp, Homo sapiens; identical to SEQ ID NO: 62503

SEQ ID NO: 79163 - DNA, 401 bp, Homo sapiens; identical to SEQ ID NO: 62504

SEQ ID NO: 79164 - DNA, 441 bp, Homo sapiens; identical to SEQ ID NO: 62505

SEQ ID NO: 79165 - DNA, 520 bp, Homo sapiens; identical to SEQ ID NO: 62506

SEQ ID NO: 79166 - DNA, 540 bp, Homo sapiens; identical to SEQ ID NO: 62507

SEQ ID NO: 79167 - DNA, 611 bp, Homo sapiens; identical to SEQ ID NO: 62508

SEQ ID NO: 79168 - DNA, 517 bp, Homo sapiens; identical to SEQ ID NO: 62509

SEQ ID NO: 79169 - DNA, 640 bp, Homo sapiens; identical to SEQ ID NO: 62510
  misc_feature (1)...(640): n = a,t,c or g

SEQ ID NO: 79170 - DNA, 447 bp, Homo sapiens; identical to SEQ ID NO: 62511

SEQ ID NO: 79171 - DNA, 370 bp, Homo sapiens; identical to SEQ ID NO: 62512

SEQ ID NO: 79172 - DNA, 643 bp, Homo sapiens
  misc_feature (1)...(643): n = a,t,c or g
ggaattcccgggtcgacgatttcgtgcgcgctagggcgagggcggggacggccgggcgggcgcgccaggctacacacaacccagctgtaccagcatgtgccagagacacgctggccaatcgtgtactcgccgcgctacaacatcaccttcatgggcctggagaagctgcatccctttgatgccggaaaatggggcaaagtgatcaatttcctaaaagaagagaagcttctgtctgacagcatgctggtggaggcgcgggaggcctcggaggaggacctgctggtggtgcacacgaggcgctatcttaatgagctcaagtggtcctttgctgttgctaccatcacagaaatcccccccgttatcttcctccccaacttccttgtgcagaggaaggtgctgaggccccttcggacccagacaggaggaaccataatggcggggaagctggctgtggagcgaggctgggccatcaacgtggggggtggcttccaccactgctccagcgaccgtggcgggggcttctgtgcctatgcggacatcacgctcgccatcaagtttctgtttgagcgtgtggagggcatctccagggctaccatcattgatcttgatgcccatcanggcaatgggcatgagcgagacttca

SEQ ID NO: 79173 - DNA, 1178 bp, Homo sapiens; identical to SEQ ID NO: 62513

SEQ ID NO: 79174 - DNA, 471 bp, Homo sapiens; identical to SEQ ID NO: 62514

SEQ ID NO: 79175 - DNA, 546 bp, Homo sapiens; identical to SEQ ID NO: 62515

SEQ ID NO: 79176 - DNA, 476 bp, Homo sapiens; identical to SEQ ID NO: 62516

SEQ ID NO: 79177 - DNA, 502 bp, Homo sapiens; identical to SEQ ID NO: 62517

SEQ ID NO: 79178 - DNA, 572 bp, Homo sapiens; identical to SEQ ID NO: 62518

SEQ ID NO: 79179 - DNA, 1228 bp, Homo sapiens
gccttttccagctggctgcagagaaggggccagctccctcctggggacccggagccgcggtacaggtgtggttgcttctcttggagaaagaggctgagctgacatcccccgggctgataaagaatgggctcctcctcctgggcccagcaggctcccgggaccctccctccctccttccgggcagcagggaagatctgagttcatgtagctggtgttggcttagggtctgggaggaaggcttttgggaagatgtaaataagaacaaaatctgcagccacctgggaagcctggcctcagtgtggaagagaaggcagcaggattattacagaaccttgtgaagccaacgcgggcagccgccaggagctgcagaccgagaggatctcgtcctttcttgcggcccagggagaccaggcctttcattctgggctcgagaccaacaattcgaattccgaactccccctgcgtgtgggactcaaggttgcccagggctcacctctgatgggcgggcaggtgagcgcttccaacagcttctcgaggctgcactgcagaaatgccaacgaggactggatgtcggcactgtgtccccggctctgggatgtgcccctccaccacctctccatcccagggagccacgacacgatgacgtactgcctgaacaagaagtcccccatttcgcacgaggagtcccggctgctgcagctgctgaacaaggccttgccctgcatcacgcgccctgtcgtgctgaaatggtccgtcacccaggcactggacgtcacagagcagctggatgccggggtgcggtacctggatctgcggatagcccacatgctggagggctcggagaagaacctgcactttgtccatatggtgtacacaacggcgctggtggaggacacactcacggaaatctcggagtggctggagcggcatccacgcgaggtggtcatcctggcctgcagaaacttcgaggggctgagcgaggacctgcacgagtacctggtcgcctgtatcaagaacatcttcggggacatgctgtgtcctcgtggggaggtgccgacactgcggcagctgtggtcccggggccaacaggtcatcgtctcctatgaagacgagagctccttgcgccggcaccacgagctgtggccaggagtcccctactggtggggaaacagggtgaagaccgaggcactcatccgatacctggagaccatgaagagctgcggccgct

SEQ ID NO: 79180 - DNA, 678 bp, Homo sapiens; identical to SEQ ID NO: 62520

SEQ ID NO: 79181 - DNA, 700 bp, Homo sapiens; identical to SEQ ID NO: 62521

SEQ ID NO: 79182 - DNA, 890 bp, Homo sapiens; identical to SEQ ID NO: 62522

SEQ ID NO: 79183 - DNA, 982 bp, Homo sapiens; identical to SEQ ID NO: 62523
  misc_feature (1)...(982): n = a,t,c or g

SEQ ID NO: 79184 - DNA, 949 bp, Homo sapiens; identical to SEQ ID NO: 62524

SEQ ID NO: 79185 - DNA, 440 bp, Homo sapiens; identical to SEQ ID NO: 62525

SEQ ID NO: 79186 - DNA, 1487 bp, Homo sapiens; identical to SEQ ID NO: 62526

SEQ ID NO: 79187 - DNA, 471 bp, Homo sapiens; identical to SEQ ID NO: 62527

SEQ ID NO: 79188 - DNA, 756 bp, Homo sapiens; identical to SEQ ID NO: 62528

SEQ ID NO: 79189 - DNA, 491 bp, Homo sapiens; identical to SEQ ID NO: 62529

SEQ ID NO: 79190 - DNA, 2101 bp, Homo sapiens
aaaaactccgatggcaatgaacataaaaaggaggtgacagaagaatacattcagtttaattccatttattattctttaaggatacatacatggagataaagtgatgaaagacaagaaggctatggtcaacacaaagttcagtacaggggttccctctatcagacagggatagagataggttcaggaaaccgcacacggtacctcaaaggaaaggcaataaggtgggtggtaggcacacaggggtttgtttattgtcattattattactctttatactttagcatatatattatatgtgtatatacatatctatattccattgcatgtatgaaattttttaaaaattcaaatggcttataacaaaaacaaattatgtataatgtctcaaatggtgaatcacagcctggaggctcttaatttacctccactctatcattgaaccctggctaaaactgctgctttgtttctattcccctcatacttgagagtagagatattgccctgctctgacaacacttaccacattttaggggcttgatccatgctgacagaaaggatgaacaaacaaacctgacatgtatttctagaagaactaggaaaactctgaagatttgaatcacaagtaggcagtgatcattttggtttcacacatttctgcaaacctacagctcgttccctctgatcacttcctccaccctccttctgttctggtgcgtagggcttgaaatcgttcagtgctgagatcaacctcaaacaatgccttcagaaatactgttttcttctgctttctgatgtggctgctacaaaggtaataggggccgcagccactctgcccttgtcttctgcacccaattcagagaacatggccaccagcctgtggcttcagtgtactcaggagatcagtcatccatttgaaccaccccaccccacccaggggctgagtgatttaactccatcctcagtcctgatcactgtctgagatgaatctgtggtgtcctcccaacaccctcgtgcaggacctcatgtctggctccttgaatgatcacacgatctgtttgtatttttacaatttaatgtgctgctttcatgcatgaggttcacaggcaagagtaaaatcacagcctctcaattaaacagaactaaaattaagagaggtgtgaaaaatggcagggaacaaacactccattttcagaatatgtgttttctggaatttattctcctttatgctgaatataaaatatgtgatttcaccaatgctttaagagacaaacacatacaagttgaaatctgaaaacaataattatatggagcaaagtgcagcctgacacttaacaaaagctgttaaatgaaaagtatctctagaaaaagcaaaacccctatagtaaaatcaaacacaacagaaagaagctttggtacttttcaataacgggagacaaaaaaaagtttagtttattattaaattcatgtaatataaaaacatctatgtggaggtattgaattaaatctataaaacagaaacaaatctagaatatattagaatctgaggtgaaaaaataccttgctttcctcttctttgattgtaataaaacaccggaatttggaaaaacaagtattttcccaactaaattttcttgtggtctgtactcacctagcaggatggcactccatattttatctaattttaaaatggcataagttgatttttagcagcacatttcctttgctccagcaagccctacctacaggaaataaaaattctgtccttgaaatgccccttgatatgaaatcctatgccctacaattcccatcccacttctttccctagtattttaagactgtgattatcaaaatctaaaggcagctagttaaagaagggaacaagaaaatcattattatatgtttcaaaatcagctgataacagaatacaagtaaggaccccatattctctgagctaagtgtggtcccagagggcaacatcttggtactctgtggagcctgggtaccatgtaaatgccacacactgtgctgctgccccactcataacaagtacagcaccactcgagactggtctcctgtatttctttgctgatcaaaaaaaaaa

SEQ ID NO: 79191 - DNA, 446 bp, Homo sapiens; identical to SEQ ID NO: 62530

SEQ ID NO: 79192 - DNA, 581 bp, Homo sapiens; identical to SEQ ID NO: 62531

SEQ ID NO: 79193 - DNA, 451 bp, Homo sapiens; identical to SEQ ID NO: 62533

SEQ ID NO: 79194 - DNA, 440 bp, Homo sapiens; identical to SEQ ID NO: 62534

SEQ ID NO: 79195 - DNA, 541 bp, Homo sapiens; identical to SEQ ID NO: 62535

SEQ ID NO: 79196 - DNA, 693 bp, Homo sapiens; identical to SEQ ID NO: 62536

SEQ ID NO: 79197 - DNA, 562 bp, Homo sapiens; identical to SEQ ID NO: 62537

SEQ ID NO: 79198 - DNA, 899 bp, Homo sapiens; identical to SEQ ID NO: 62538

SEQ ID NO: 79199 - DNA, 780 bp, Homo sapiens; identical to SEQ ID NO: 62539

SEQ ID NO: 79200 - DNA, 551 bp, Homo sapiens; identical to SEQ ID NO: 62540

SEQ ID NO: 79201 - DNA, 663 bp, Homo sapiens; identical to SEQ ID NO: 62541

SEQ ID NO: 79202 - DNA, 519 bp, Homo sapiens; identical to SEQ ID NO: 62542

SEQ ID NO: 79203 - DNA, 447 bp, Homo sapiens; identical to SEQ ID NO: 62543

SEQ ID NO: 79204 - DNA, 460 bp, Homo sapiens; identical to SEQ ID NO: 62544

SEQ ID NO: 79205 - DNA, 731 bp, Homo sapiens; identical to SEQ ID NO: 62545

SEQ ID NO: 79206 - DNA, 759 bp, Homo sapiens; identical to SEQ ID NO: 62546

SEQ ID NO: 79207 - DNA, 519 bp, Homo sapiens; identical to SEQ ID NO: 62547

SEQ ID NO: 79208 - DNA, 544 bp, Homo sapiens; identical to SEQ ID NO: 62548

SEQ ID NO: 79209 - DNA, 469 bp, Homo sapiens; identical to SEQ ID NO: 62549

SEQ ID NO: 79210 - DNA, 749 bp, Homo sapiens; identical to SEQ ID NO: 62550

SEQ ID NO: 79211 - DNA, 437 bp, Homo sapiens; identical to SEQ ID NO: 62551

SEQ ID NO: 79212 - DNA, 1494 bp, Homo sapiens; identical to SEQ ID NO: 62552
  misc_feature (1)...(1494): n = a,t,c or g

SEQ ID NO: 79213 - DNA, 584 bp, Homo sapiens
gtccctgtccggaattcccgtgtcgactatttcgttgagcccgctgcccgcccgcagttcccggccccgctggccccagtcatggcgaagcagtacgatgtgctgttccggctgctgctgatcggggactccggggtgggcaagacctgcctgctgtgccgcttcaccgacaacgagttccactcctcgcacatctccaccatcggtgttgactttaagatgaagaccatagaggtagacggcatcaaagtgcggatacagatctgggacactgcagggcaggagagataccagaccatcacaaagcagtactatcggcgggcccaggtaagccaccacattgggggtttcaaagtgggaagctgccacccacactcccagctctgggtatttgagatgtctgtgccacggatcccctaaatacagttcgcctgcttggaggagcgcagggcgtctttcagctgttcactgatcatttgtccgtccattgttcatggcccactcactgcaggcaggcccctgccctcacccctgacttccaccctccatcctgggtcaaagatccaggtcaaagcatgtggtgt

SEQ ID NO: 79214 - DNA, 493 bp, Homo sapiens; identical to SEQ ID NO: 62554

SEQ ID NO: 79215 - DNA, 556 bp, Homo sapiens; identical to SEQ ID NO: 62555

SEQ ID NO: 79216 - DNA, 2249 bp, Homo sapiens; identical to SEQ ID NO: 62556

SEQ ID NO: 79217 - DNA, 685 bp, Homo sapiens; identical to SEQ ID NO: 62557

SEQ ID NO: 79218 - DNA, 646 bp, Homo sapiens; identical to SEQ ID NO: 62558

SEQ ID NO: 79219 - DNA, 636 bp, Homo sapiens
ttggatttatttgtaggagaggctcctgagcgctaggtccgcactgtggtgactgaacccagaagtcggggagcagttgtcctccgctgcacagaggctactctggagctctgtgacggcgcccagcgtgacccactcctgggccaggatacggaccgtcgtgcccatatctcctggctggtcgccctatcctcccgactctgcttaaaaccacgtggttcgatggctgccgcggctacgctgaggctctccgctcagggcacagtgacttttgaagatgtggctgtgaactttacctgggaggaatggaatctccttagtgaggctcagagatgcctgtaccgtgatgtgacgctggagaacctggcacttatatcctccctggatcctgcactggatggatcagcggacaacacacagaccggtaatctgggtcaatcagttctgccatcccacccagaacagaaaacagcatgaaaaactcactttaaccccctatgaatccatctccaaccagactgatcagcactccccacttcccaagcccctacccgccaaattttgaaaactctgatcccagaatgctcagggagactgatttgaataataaaactcctgtctcccgaacagcaaaaa

SEQ ID NO: 79220 - DNA, 422 bp, Homo sapiens; identical to SEQ ID NO: 62560

SEQ ID NO: 79221 - DNA, 1046 bp, Homo sapiens
ggaattcaattatgtgtacaggccatgaatccaaacaggaagttcccatatgtacagatcctatatccaagcaagaagactccatgtgtacacacgctgaaatcaatcaaaaattacctgtagcaacagattttgaatttaagctagaagctctcatgtgtacaaaccctgaaattaaacaagaagaccccacaaatgtggggcctgaagtaaagcaacaagtaaccatggtttcagacactgaaatcttaaaggttgctagaacacatcacgtccaagcagaaagctacctggtgtacaacatcatgagcagtggagagattgaatgcagcaacaccctagaagatgagcttgaccaggccttacccagccaggccttcatttaccgtcccattcgacagcgggtctactcactcttactggaggactgtcaagatgtcaccagcacctgcctagctgtcaaggagtggtttgtgtatcctgggaacccactgaggcacccggacctcgtcaggccgctgcagatgaccattccagggggaacgcctagtttgaaaatattatggctgaaccaagagccagaaatacaggttcggcgcttggacacactcctagcctgtttcaatctttcctcctcaagagaagagctgcaggctgtcgaaagcccatttcaagctttgtgctgcctcttgatctacctctttgtccaggtggacacgctttgcctggaggatttgcatgcgtttattgcgcaggccttgtgcctccaaggaaaatccacctcgcagcttgtaaatctacagcctgattacatcaaccccagagccgtgcagctgggctcccttctcgtccgcggcctcaccactctggttttagtcaacagcgcatgtggcttcccctggaagacgagtgatttcatgccctggaatgtatttgacgggaagctttttcatcagaagtacttgcaatctgaaaagggttatgctgtggaggttcttttagaacaaaatagatctcggctcaccaaattccacaacctgaaggca

SEQ ID NO: 79222 - DNA, 442 bp, Homo sapiens; identical to SEQ ID NO: 62562

SEQ ID NO: 79223 - DNA, 752 bp, Homo sapiens; identical to SEQ ID NO: 62563

SEQ ID NO: 79224 - DNA, 474 bp, Homo sapiens; identical to SEQ ID NO: 62564

SEQ ID NO: 79225 - DNA, 561 bp, Homo sapiens; identical to SEQ ID NO: 62565

SEQ ID NO: 79226 - DNA, 548 bp, Homo sapiens; identical to SEQ ID NO: 62566

SEQ ID NO: 79227 - DNA, 1151 bp, Homo sapiens; identical to SEQ ID NO: 62567

SEQ ID NO: 79228 - DNA, 523 bp, Homo sapiens; identical to SEQ ID NO: 62568

SEQ ID NO: 79229 - DNA, 932 bp, Homo sapiens; identical to SEQ ID NO: 62569

SEQ ID NO: 79230 - DNA, 850 bp, Homo sapiens; identical to SEQ ID NO: 62570

SEQ ID NO: 79231 - DNA, 790 bp, Homo sapiens; identical to SEQ ID NO: 62571

SEQ ID NO: 79232 - DNA, 932 bp, Homo sapiens; identical to SEQ ID NO: 62572

SEQ ID NO: 79233 - DNA, 977 bp, Homo sapiens; identical to SEQ ID NO: 62573
  misc_feature (1)...(977): n = a,t,c or g

SEQ ID NO: 79234 - DNA, 740 bp, Homo sapiens; identical to SEQ ID NO: 62574

SEQ ID NO: 79235 - DNA, 794 bp, Homo sapiens; identical to SEQ ID NO: 62575

SEQ ID NO: 79236 - DNA, 990 bp, Homo sapiens
ttttttttttttacttgtaatacgtattttaatttttgtttcatatgagtttaagtgttgtctaggtgacatcaaaatctaaggcaaacagacttgaccatcttcagacccactgcattctcaagctgaagtggtctgctcatagtttgtgtgccaggttgctcatcagtattgatactgtcccagaacaggttgtaggtataattcagagactgtcctttgcaaaggaaatgaccagcatttcaactgtatgtcttcctggaagggtagattctgctatatcttctttgtctgcatcaaaagactcaagaggaatgtggacacatttcatatcccatttgtagagtaaagcttcaagtgaccagtcagcactcctaacttgataagtagaccacaattggaccttgggattcttgtgcatcaaaaaatatattgtagccaaaatgtcttcaaaatcttctggttcaaagaacacatcagatgcaaggataatatcttgtggtggtagagccagaagatcccaagatatatgaccccatgttagtcctaccacctgcagatgtggcaggttattcatttggcagctttgccgacagacttccagacagtgaggcagttctgagctgtctgacagtattacttctgcaccacatttggcagccaaaattcctggaaggctcactccagctccaatctgcgggacgtggacctccaggacagccccgtcggcccccggacccggctcctccgagaatcgaaagcgctgggcccggaccccctgtcctcggaaatcgtgctcgcccagtagggcgtcgttgggccccgggcgggcgggggaccgcggaaggctccgggctgccagactgcgcgagcgggaagccgcgggccacgtggccgtagcacctgacggcaagaaggggaaagcccagatctggtgataaccctgccgcgctagcgagcgaagaaagcccggagcaaggcgaaagagac

SEQ ID NO: 79237 - DNA, 1040 bp, Homo sapiens; identical to SEQ ID NO: 62577

SEQ ID NO: 79238 - DNA, 479 bp, Homo sapiens; identical to SEQ ID NO: 62578

SEQ ID NO: 79239 - DNA, 1009 bp, Homo sapiens; identical to SEQ ID NO: 62579

SEQ ID NO: 79240 - DNA, 954 bp, Homo sapiens; identical to SEQ ID NO: 62580

SEQ ID NO: 79241 - DNA, 567 bp, Homo sapiens; identical to SEQ ID NO: 62581

SEQ ID NO: 79242 - DNA, 622 bp, Homo sapiens; identical to SEQ ID NO: 62582

SEQ ID NO: 79243 - DNA, 1057 bp, Homo sapiens; identical to SEQ ID NO: 62584

SEQ ID NO: 79244 - DNA, 1332 bp, Homo sapiens; identical to SEQ ID NO: 62585

SEQ ID NO: 79245 - DNA, 579 bp, Homo sapiens; identical to SEQ ID NO: 62586

SEQ ID NO: 79246 - DNA, 963 bp, Homo sapiens
gccctgtccagggtatgaataaggtacatggggtgaagatggtgtgcagagatatgtgttattcccaacagattctcaatttgctatataaggtatgcactacgtacccaccagcagaatcaccctgtgaaagaaccctcaggtccctggagatgggagctgggggcccagaggagacaatagaaaaaaatcagctgggtgtggtggcgggtgcctgtagtccctactacagaggctgaggtaggccaattagagtgggatggaagggatggggtgtgccaccctgcaggccgggctctgcctacctccatgccgttgggacagctcctcttgctgttgttgtttaggttctccgagttgagcaggttttgatcgagctgggttggaagctgcccccacctccctgctcccaggccctcctccctttccgtctcctccacctgcagcaaggagccgctccgacctttgggactcccaaactctagtttcttcttcacatccttctcacagagtccggaaccttgctggggctgtctggccggcctgtgcacctctgcagggggagcagcttcctccaacagagcctccctctccggatcctccagggtggaccaagctgccagtttcatcctcaggggaaggcagaagggggtctgagagtcgccggaaacagcaggggagggggggccctaagccgggctgggcggcatcatccaagaagggcagctggctttccggggtgccatctggggtctctggcaagaagtcgccaggtcctgcagggtcatccacaggctgctggaggctgctgtctgtctgctgacgccacagcttgttgtgccgctgtttgcttgcatccaagatgccttcatactcagacagctgcctcataaagcccgcgttggggcgcgtgatgctgcgcttctgctttacatagttatatgctttttccagaggccagcc

SEQ ID NO: 79247 - DNA, 798 bp, Homo sapiens; identical to SEQ ID NO: 62588

SEQ ID NO: 79248 - DNA, 1956 bp, Homo sapiens; identical to SEQ ID NO: 62589

SEQ ID NO: 79249 - DNA, 813 bp, Homo sapiens; identical to SEQ ID NO: 62590

SEQ ID NO: 79250 - DNA, 777 bp, Homo sapiens; identical to SEQ ID NO: 62591

SEQ ID NO: 79251 - DNA, 474 bp, Homo sapiens; identical to SEQ ID NO: 62592

SEQ ID NO: 79252 - DNA, 753 bp, Homo sapiens; identical to SEQ ID NO: 62593

SEQ ID NO: 79253 - DNA, 722 bp, Homo sapiens
ggcaccgctccggaatttccgggtcgacgatttcgtggccgcgcggactccccagagacttgccgccgcctgcgcctttgccgctgcagccatccctcttactccttgcctttcgtccccgtcgtctcctctgccgccgtgccgcagccgcaccagcatcgacaacagctaagtggccgattcggggacttggggtcggggttggggcggacgcaaggcacgaacagcactcgcgagcccgccatctctacgtcagccgccactgctgcagtaacccttctagggcgagagaggaaagcactgtggagaggcacacgctgtcccagtgctcacggttagagttcgagcgtttctgccaaaaccttggtgagagccttgcacttggagaagggagcacagaccaggtctttgagatcgcaaaaaatatatatatcatattgcatagtgttgactttttgtcagtttaatcgaccagggcagcagctttccccaagccctcttaatccctgagctatgtctcctccaaccgtgcctccgatgggggtagatggcgtgtccgcatacctgatgaagaaaaggcacacccacaggaagcaacggcgcaagcccactttcctcactcgtaggaacatcgtgggctgccgcattcaacacggctggaaggaaggcaacgagccagtggagcagtggaagggtactgtgctcgacccgggaattcgcgg

SEQ ID NO: 79254 - DNA, 616 bp, Homo sapiens; identical to SEQ ID NO: 62595

SEQ ID NO: 79255 - DNA, 734 bp, Homo sapiens; identical to SEQ ID NO: 62596

SEQ ID NO: 79256 - DNA, 1153 bp, Homo sapiens; identical to SEQ ID NO: 62597

SEQ ID NO: 79257 - DNA, 424 bp, Homo sapiens; identical to SEQ ID NO: 62598

SEQ ID NO: 79258 - DNA, 736 bp, Homo sapiens; identical to SEQ ID NO: 62599

SEQ ID NO: 79259 - DNA, 698 bp, Homo sapiens; identical to SEQ ID NO: 62600

SEQ ID NO: 79260 - DNA, 488 bp, Homo sapiens; identical to SEQ ID NO: 62601

SEQ ID NO: 79261 - DNA, 691 bp, Homo sapiens; identical to SEQ ID NO: 62603

SEQ ID NO: 79262 - DNA, 793 bp, Homo sapiens; identical to SEQ ID NO: 62604
  misc_feature (1)...(793): n = a,t,c or g

SEQ ID NO: 79263 - DNA, 1287 bp, Homo sapiens
gaaggaggaagtttcaaagccagcttgacctggttgtggccgttgggcgagatgaagctacactgtgaggtggaggtgatcagccggcacttgcccgccttggggcttaggaaccggggcaagggcgtccgagccgtgttgagcctctgtcagcagacttccaggagtcagccgccggtccgagccttcctgctcatctccaccctgaaggacaagcgcgggacccgctatgagctaagggagaacattgagcaattcttcaccaaatttgtagatgaggggaaagccactgttcggttaaaggagcctcctgtggatatctgtctaagtaaggccaattccagcagtttaaaaggtttcctttcagctatgagactggctcatagaggctgtaatgttgatacaccagtttcaacgctcacaccagtgaagacttcagaatttgaaaactttaaaactaaaatggttatcacatccaaaaaagactatcctctaagtaagaattttccatattccttggaacatcttcagacttcttactgtgggcttgtccgagttgatatgcgtatgctttgcttaaaaagccttaggaaattagacttgagtcacaaccatataaaaaagcttccagctacaattggagacctcatacaccttcaagaacttaacctgaatgacaatcacttggagtcatttagtgtagccttgtgtcattctacactccagaagtcactttggagtttggacctcagcaagaacaaaatcaaggcactccctgtgcagttttgccagctccaggaacttaagaatttaaaacttgacgataatgaattgattcaatttccttgcaagataggacaactaataaaccttcgctttttgtcagcagctcgaaataagcttccatttttgcctagtgaatttagaaatttatcccttgaatacttggatctttttggaaatacttttgaacaaccaaaagtccttccagtaataaagctgcaagcaccattaactttattggaatcttctgcacgaaccatattacataataggattccatatggctctcatatcattccattccatctctgtcaagatttggataccgcaaaaatttgtgtttgtggaagattctgtctgaactctttcattcaaggaactactaccatgaatctgcattctgttgcccacactgtggtcttagtagataatttgggtggtactgaagcacctattatctcttatttctgttctctaggctgttatgttaattcctctgatata

SEQ ID NO: 79264 - DNA, 1020 bp, Homo sapiens; identical to SEQ ID NO: 62606

SEQ ID NO: 79265 - DNA, 886 bp, Homo sapiens; identical to SEQ ID NO: 62607

SEQ ID NO: 79266 - DNA, 1330 bp, Homo sapiens
gggcttgtaaagtataggtcacacgcaattccagcccaaaaccgtgtccggttagaattcacccatgactttgcatgggagtgtttccaagctgagaggcatgcctgaaaagccaccgcttgcaatagaaccagaatcatccataaggtttgccttcacggctgcttttgcgaaattaacaccaaacaagtttgaggaaataatctgctattggacatttaagctttctcttcactaactctccatttttgcagtcaatatttgagatctaatacccacttacagggtgcttaggcattgccaggcacaaatgacattttttttctggaaggcaaaatcagaagatatggataataatatatttttgtcctccaacctctaaaaaggctaaaattcagctaaaagcatcagtgtcaccaacgtgtctgctgtaagaaactgctttataatttcctgttattctacagggttttatgttactctggtagtgaaccgatggtggaaccagtttgtgaatttgccctggccagacaggctaatgttcctcatctctagcagtgttcacggaagcgacgagcacgggcgcctgcttagaaggacgctgatgcgctacgtcaatctcacctccctgctcatctttcgctcggtgagcactgctgtgtacaaaagatttcccacaatggaccacgtggttgaagcagaaagaactggcatgaaacccattctgccttcaagttttgagatgcagagcttttagttcctctgctaatagagcctcgtttgaatactctgcttgaaaggcaaaagacatctgcctcaacttcaatcaaggaaaaatagagcaactgtacagcaggcagaatctctatgatgactggaattttgtctatcaatggatgtaattaatcctttggctcaagggcaataaaattttgtcttaaagtagcagatcctgctccatcaaagcacaactcaattgggagtaaatgcaaacatgtatctatattgagagatagattttactctgattagaaagatgaaggagggatttggggataaacaatatgaaaattgctgagcagagctgagccagccagaagaaaaagcgatagcgagagaaactgtatgcagatgcaacggcaggataaaatagctatgccaggggtgtgatggggcctgaggagagcatggcatggagacagacacgtgcagggaaccaagtggtgggaggacaagcccactcagagtgttgccgaactgtagcaaatcagtaactataattagcacagcctcagcaatgacaataatgatcatattctgaaaaaaatat

SEQ ID NO: 79267 - DNA, 502 bp, Homo sapiens; identical to SEQ ID NO: 62609

SEQ ID NO: 79268 - DNA, 593 bp, Homo sapiens; identical to SEQ ID NO: 62610

SEQ ID NO: 79269 - DNA, 513 bp, Homo sapiens; identical to SEQ ID NO: 62611

SEQ ID NO: 79270 - DNA, 721 bp, Homo sapiens; identical to SEQ ID NO: 62612

SEQ ID NO: 79271 - DNA, 661 bp, Homo sapiens; identical to SEQ ID NO: 62613

SEQ ID NO: 79272 - DNA, 883 bp, Homo sapiens
gaagcagcaccctggagaaaatcatttcacaagcaaagtgggccgagccttgtttgtgaagacctgcacattccatgtgtcaggggagccttccacctgcagagaatttgggaaggacttcctggccaagttgggatttctccatcaacaggctgctcacactggggagcaatccaatagcaaaagcgacggtggggccatcagtcacagaggaaaaactcattacaactgtggagaacacacaaaagcattcagcggtatgtgtgaactgcattgcaccttttgccctgcccagggcccatgtcagatttatgtctctgctgatactatagtggaagccattttacctctaccgcctggcaggtgaccaccagtgtgcaccactcgcccattcccatgggtgtacaagtaagggtaaccctcagggttcgggttaagggaggagtttgttaaaagcctaagcaggtagttcgggtgttttttaatcctttctgatgagttaggccatggacctgacccagtttggtccagaggactctgctggtgacctgaaaagagggactacatatttcaggatattgttggtctcacatgactcttgatagagtttgccagccttcaaatcaccaactgtgggaaccaactgcctcttattgccttgctgtgttcaattacaaaaaaagatggaaaagactgttatgaagccagatgaacctttctccagtcttccttcactatttttttttccttcaccatttatcatttcatagtcatttatgtttcatcggtcctcatgtgtactagtgggttattttacttatactcccggatatcatattatttaatgcatagcctcttcagaatgcaattttaaaatgtaaag

SEQ ID NO: 79273 - DNA, 375 bp, Homo sapiens; identical to SEQ ID NO: 62615
  misc_feature (1)...(375): n = a,t,c or g

SEQ ID NO: 79274 - DNA, 569 bp, Homo sapiens; identical to SEQ ID NO: 62616

SEQ ID NO: 79275 - DNA, 2130 bp, Homo sapiens; identical to SEQ ID NO: 62617

SEQ ID NO: 79276 - DNA, 911 bp, Homo sapiens
ggagggagaacatggctgctggcttttagcacctggtgggtttcgcgccttgcaactcgacaactgccgggacggagtctggctgcccgaccccctgcggcaggtgctgggcgaggcgcctcccctgcaactagcctgccgcttcccttccggcacccccgccgccagccccgagcgcggacctggagcggagaagagagagtcttgctctgttgcccaggccggagtgcaatggtgcaatctcagcttactgcaacctccacctcccaggttcaagccatcctcctgcctcagcctcctgagtagctgggagccatcacgcccagctagccatcttctaattttcattccttcaaagctcctgccccggagccgggccctggcgaggcaggaatggccccgaggcctccgaccgccgcgccccaggaatcagtgacattcaaagatgtgtctgtggacttcacccaggaagaatggtaccatgtcgaccctgctcagaggagcttatacagggatgtgatgctggagaactatagccacctggtttctcttggatatcaagtttccaagccagaggtgatcttcaaattggagcaaggagaagagccatggatatcagagggagaaatccaacgacctttctatccaggatttgtctgcctcctgccgctgtcgctaccatctgggagtaagggcgaaagaagccagaaacttccaagaaagaatcctgagtgatgtcagcaagaatggctaagtaaggacctccagaagttttttgccccgtacaagccatgcaaatactgacaaaactgtgagaatcagatttttcacaactttggaacatttattccagcaagcagcaaatgttccccttgcagcaagctaggaaacatttatttaaaaaaaaaaaa

SEQ ID NO: 79277 - DNA, 424 bp, Homo sapiens; identical to SEQ ID NO: 62619

SEQ ID NO: 79278 - DNA, 1489 bp, Homo sapiens; identical to SEQ ID NO: 62620

SEQ ID NO: 79279 - DNA, 783 bp, Homo sapiens; identical to SEQ ID NO: 62621

SEQ ID NO: 79280 - DNA, 588 bp, Homo sapiens; identical to SEQ ID NO: 62622

SEQ ID NO: 79281 - DNA, 759 bp, Homo sapiens; identical to SEQ ID NO: 62623

SEQ ID NO: 79282 - DNA, 648 bp, Homo sapiens; identical to SEQ ID NO: 62624

SEQ ID NO: 79283 - DNA, 1192 bp, Homo sapiens
ccccttttgaaagtagcagaaattttaaaagaaaaggaattttgtcctggagaaagaaatagttatgaacccatcaaagagtttcagaaagaagctgaaaaattcttgccactttttgggcacataggtggtacacaaagcaaaggaccatgggaagaattggcaaagggaagtccacatagcgtcattaatatttttacaaaatcctatcagttatatggaaaagggtttgaagacaagttggacagaggaacatcaacatcacggcctttgaatgccaccgcaactcctctaagtggtgtttcatatgaagatgattttgtctcctctccagggactgggacttcgacagaaaaaaaatcaactcttgaacctcatagcactttaagccctcaggaggaccattctaacagaaagtctgcctatgatccttcctctgtggatgttacctcccagcattcatcaggagcccagtctgctgcatcgtctcgttcatctacttcttctaaaggaaagaaaggaaaaaaggaaaagacagaatggttggattcattcactggaaatgttcagaactcacttcttgatgaggaaaaagcagaacgtggctcccatcaaggaaagaaatctgggaccagcagcaaactttctgttaaagattttgagcagactcttgatacagatagcactttggaggatctttctggacattctgtgagtgtctcatcagataagggaagatctcagaaaactccaacttctcccctgtcaccaagttcccagaaatcattgcagtttgacgttgcaggaacttcttcagaaagatctaagtcgtcagtaatgcctccaactataacaggatttaagcctaatgcacctctcactgatctgaacccggcagccagcagaacaacgacagagaacatggctccaataccaggttctaagcgcttttctcctgctggcctccatcatcgtatggcagcagaactcagttatctgaacgccattgaggagtcggtgcgccaactgtcagatgtagaaagagttagaggcatttcacttgctcagcaggagagtgtgtctctagctcagataataaaggcacaacagcaacgccatgaaagagacttggccctcttgaaactaaaggctgaacaagaggctctggagagtcagagacaaaaaaaaaaaa

SEQ ID NO: 79284 - DNA, 424 bp, Homo sapiens; identical to SEQ ID NO: 62626

SEQ ID NO: 79285 - DNA, 1461 bp, Homo sapiens
gatacttcggatcttccagagcggccgcgccttctgcacctgttgcggccctcgctaggcgggaagggagggagaagaggaggacaaaggggatgaccaggtggctctcccccgacggactcccggcccagggagcggatagaccactcccagagagagtgtggctttgagccttggagaggatgctctccttctccagggatcgcctccccagcggacgcagagtttcagggaaatgtccgcctccgccacttgggatggcagtggggagaggaggatctgggtgtccggaggagggcagtgggagaaagctggagctgctggagtcgcagctgcctgcggagcgggcccgggaggaagcggggccgagcgtgcggcgtccacgcgataagctccacaaacccaaagctacacagactgaggtcaaaccatctgtgaggtttaacctccgcacctccaaggacccagagcatgaaggatgctacctctccgtcggccacagccagcccttagaagactgcagtttcaacatgacagctaaaacctttttcatcattcacggatggacgatgagcggtatctttgaaaactggctgcacaaactcgtgtcagccctgcacacaagagagaaagacgccaatgtagttgtggttgactggctccccctggcccaccagctttacacggatgcggtcaataataccagggtggtgggacacagcattgccaggatgctcgactggctgcaggagaaggacgatttttctctcgggaatgtccacttgatcggctacagcctcggagcgcacgtggccgggtatgcaggcaacttcgtgaaaggaacggtgggccgaatcacaggtttggatcctgccgggcccatgtttgaaggggccgacatccacaagaggctctctccggacgatgcagattttgtggatgtcctccacacctacacgcgttccttcggcttgagcattggtattcagatgcctgtgggccacattgacatctaccccaatgggggtgacttccagccaggctgtggactcaacgatgtcttgggatcaattgcatatggaacaatcacagaggtggtaaaatgtgagcatgagcgagccgtccacctctttgttgactctctggtgaatcaggacaagccgagttttgccttccagtgcactgactccaatcgcttcaaaaaggggatctgtctgagctgccgcaagaaccgttgtaatagcattggctacaatgccaagaaaatgaggaacaagaggaacagcaaaatgtacctaaaaacccgggcaggcatgcctttcagagtttaccattatcagatgaaaatccatgtcttcagttacaagaacatgggagaaattgagcccaccttttacgtcaccctttatggcactaatgcagattcccagactctgccactggaaatagtggagcggatcg

SEQ ID NO: 79286 - DNA, 669 bp, Homo sapiens; identical to SEQ ID NO: 62628

SEQ ID NO: 79287 - DNA, 430 bp, Homo sapiens; identical to SEQ ID NO: 62629

SEQ ID NO: 79288 - DNA, 551 bp, Homo sapiens; identical to SEQ ID NO: 62630

SEQ ID NO: 79289 - DNA, 543 bp, Homo sapiens; identical to SEQ ID NO: 62631

SEQ ID NO: 79290 - DNA, 712 bp, Homo sapiens; identical to SEQ ID NO: 62632

SEQ ID NO: 79291 - DNA, 1452 bp, Homo sapiens; identical to SEQ ID NO: 62633

SEQ ID NO: 79292 - DNA, 600 bp, Homo sapiens
cagatttctcaggtgagctcagatagcaatccactgtgttcctttatctccagcagatatatatcaatatcttgaagcagttttctactcaatttagaagaacttctggttaaatttacaattcttttttctctcccatgcttgttgtttctcattcaaacaagactggcatagctactttatgagggtaggtctccctgaattttaagttccaaagatctctggacctgatcatattgactttattccgtgggatcaactcttcatggccagttcttcctctgtcactgagttcttagtgctgggcttctctagccttggggaattgcagcttgtcctctttgcagtctttctctgcctctatttgattatcttgagtggaaacatcatcatcatctcagtcattcatttggatcacagcctccacacacccatgtacttctttctaggtattctttctatctctgaaatcttctacacaactgttattctgcccaagatgcttatcaacttattctctgtattcaggacactctcctttgtgagttgtgccacccaaatgttctacgaaatcgtcggcccgggaactcaggaacggtc

SEQ ID NO: 79293 - DNA, 423 bp, Homo sapiens; identical to SEQ ID NO: 62635
  misc_feature (1)...(423): n = a,t,c or g

SEQ ID NO: 79294 - DNA, 985 bp, Homo sapiens; identical to SEQ ID NO: 62636

SEQ ID NO: 79295 - DNA, 451 bp, Homo sapiens; identical to SEQ ID NO: 62637

SEQ ID NO: 79296 - DNA, 1208 bp, Homo sapiens; identical to SEQ ID NO: 62638

SEQ ID NO: 79297 - DNA, 420 bp, Homo sapiens; identical to SEQ ID NO: 62639

SEQ ID NO: 79298 - DNA, 924 bp, Homo sapiens; identical to SEQ ID NO: 62640

SEQ ID NO: 79299 - DNA, 435 bp, Homo sapiens; identical to SEQ ID NO: 62641

SEQ ID NO: 79300 - DNA, 307 bp, Homo sapiens; identical to SEQ ID NO: 62642

SEQ ID NO: 79301 - DNA, 445 bp, Homo sapiens; identical to SEQ ID NO: 62643

SEQ ID NO: 79302 - DNA, 464 bp, Homo sapiens
ccgtatcggcgtttatatactgaagataagcctgatgagtaacaggcttgctcgtcatactttcgtgagtattggcgttgtacaggcaagtcgtaaaataacagcctggctattcagagtatgataaaaacagggggcaagggatgttgcttaatatgatgtgtggtcgtcagctgtcggcaatcagtttgtgcctggccgtaacattcgctccactgttcaatgcgcaggccgatgagcctgaagtaatccctggcgacagcccggtggctgtcagtgaacagggcgaggcactgccgcaggcgcaagccacggcaataatggcggggatccagccattgcctgaaggtgcggcagaaaaagcccgcacgcaaatcgaatctcaattacccgcaggttacaagccggtttatcttaaccagcttcaactgttgtatgccgcacgcggtatttcctgcagcgtg

SEQ ID NO: 79303 - DNA, 728 bp, Homo sapiens; identical to SEQ ID NO: 62645

SEQ ID NO: 79304 - DNA, 1237 bp, Homo sapiens
ggttatacaaactcttaacaaagtgtgcctcagattttcttcttctcttttctctctgaactgaaaagggatactgggtttcctcctagcttttttttttaaacccgtcctagccagggtccacacattttaacacgctgcctgaatgggggctctttctctctgcaggttcagggaacagcattttggacaggacatttggggccaggtctgagtagccagtttgctgaattattgtcccagtcagccaggattgtgagctgtttgggaagtttcgtggaaacgcccaagtgccagcacaggtggagggacacctggaggccagtttcaggaacttttgccacaagtataaaagacttcagaagtgcaaagatgctgaaacagatactgtcggagatgtacatagatcctgatctactggcagagctcagcgaagaacagaaacagatcctgttcttcaagatgagagaggaacagatccgacgatggaaagaaagagaagcagctatggaaagaaaggagtccctgccagtgaaacccagaccaaagaaagagaatggcaaatcggttcattggaagcttggagctgataaggaagtctgggtatgggtgatgggcgaacaccatctagataaaccctatgatgtgctctgtaatgaaattattgctgagagggcccggctgaaagcagaacaggaggcagaagagcccagaaaaactcactctgaagaattcaccaatagcttgaaaacaaaatcacagtaccatgatctgcaggctccggataaccagcagactaaagacatctggaagaaagtggcagaaaaggaggaactggagcaaggatcgaggccagcaccaaccctggaagaagagaaaatccgatcactctccagttcttcaagaaatattcaacaaatgttggcagattcaatcaatcgtatgaaggcatatgcatttcaccagaagaaagaatctatgaagaaaaaacaagatgaagaaataaatcaaatagaagaagagagaacgaagcagatttgtaagagctggaaagaagactcggaatggcaggcatctctgcggaaaatccaaagcagcttgatgaggaagagacgctccttgggcttaaacaagcacggggaagacttccaaggggtttttcccttcgggggccccaggaaagggaaggagggcggttgaggaggctttccaaacccccttttgcgttgttttcccg

SEQ ID NO: 79305 - DNA, 3464 bp, Homo sapiens
gcggccgcgggctgcatgggcagcgcccgcgccccgccgctgagccgtcgcggagccgcgcagccctcggagcacgcccgtgcagcctgccaggactcttccagacacgggatttgtcggtgaacaacgcagagctgatgcagacataatatatacagccctgcacctgggacacacttccattggatttaaaagacagtcctcgtcagcactgactttcagctatggaatcgcagacggttgatgatgaagcgccggccgtgtaaatgaagatcgagtgaggagcaggacgatgcccaagggtagggtgcccttaaagccccccaacaaggaagagctttcccctcagcagcgaccatggtggagaaccagcctgggaaaaaagataaagataaagtttctctaaccaagaccccaaaactggagcgtggcgatggcgggaaggaggtgagggagcgagccagcaagcggaagctgcccttcaccgcgggcgccaatggggagcagaaggactcggacacagagaagcagggccctgagcggaagaggattaagaaggagcctgtcacccggaaggccgggctgctgtttggcatggggctgtctggaatccgagccggctaccccctctccgagcgccagcaggtggcccttctcatgcagatgacggccgaggagtctgccaacagcccagtggacacaacaccaaagcacccctcccagtctacagtgtgtcagaagggaacgcccaactctgcctcaaaaaccaaagataaagtgaacaagagaaacgagcgtggagagacccgcctgcaccgagccgccatccgcggggacgcccggcgcatcaaagagctcatcagcgagggggcagacgtcaacgtcaaggacttcgcaggctggacggcgctgcacgaggcctgtaaccggggctactacgacgtcgcgaagcagctgctggctgcaggtgcggaggtgaacaccaagggcctagatgacgacacgcctttgcacgacgctgccaacaacgggcactacaaggtggtgaagctgctgctgcggtacggagggaacccgcagcagagcaacaggaaaggcgagacgccgctgaaagtggccaactcccccacgatggtgaacctcctgttaggcaaaggcacttacacttccagcgaggagagctcgacggagagctcagaagaggaagacgcaccatccttcgcaccttccagttcagtcgacggcaacaacacggactccgagttcgaaaaaggcctcaaagcacaaggcccaagaacccagagccacagaaggccacggcccccgtcaaggacgagtatgagtttgatgaggacgacgagcaggacagggttcctccggtggacgacaagcacctattgaaaaaggactacagaaaagaaacgaaatccaatagttttatctctatacccaaaatggaggttaaaagttacactaaaaataacacgattgcaccaaagaaagcgtcccatcgtatcctgtcagacacgtcggacgaggaggacgcgagtgtcaccgtggggacaggagagaagctgagactctcggcacatacgatattgcctggtagtaagacacgagagccttctaatgccaagcagcagaaaaaaaaaaataaagtgaaaaagaagcgaaagaaagaaacaaaaggcagagaggttcgcttcggaaagcggagcgacaagttctgctcctcggagtcggagagcgagtcctcagagagtggggaggatgacagggactctctggggagctctggctgcctcaaggggtccccgctggtgctgaaggacccctccctgttcagctccctctctgcctcctccacctcgtctcacgggagctctgccgcccagaagcagaaccccagccacacagaccagcacaccaagcactggcggacagacaattggaaaaccatttcttccccggcttggtcagaggtcagttctttatcagactccacaaggacgagactgacaagcgagtctgactactcctctgagggctccagtgtggaatcgctgaagccagtgaggaagaggcaggagcacaggaagcgagcctccctgtcggagaagaagagccccttcctgtccagcgcggagggcgctgtccccaaactggacaaggaggggaaagttgtcaaaaaacataaaacaaaacacaaacacaaaaacaaggagaagggacagtgttccatcagccaagagctgaagttgaaaagttttacttacgaatatgaggactccaagcagaagtcagataaggctatactgttagagaatgatctttccactgaaaacaagctaaaagtgttaaagcacgatcgcgaccactttaaaaaagaagagaaacttagcaaaatgaaattagaagaaaaagaatggctctttaaagatgaaaaatcactgaagagaatcaaagacacaaacaaagacatcagcaggtctttccgagaagagaaagaccgttcgaataaagcagaaaaggagagatcgctgaaggaaaagtctccgaaagaagaaaaactgagactgtacaaagaggagagaaagaagaaatcaaaagaccggccctcaaaattagagaagaagaatgatttaaaagaggacaaaatttcaaaagagaaggagaagatttttaaagaagataaagaaaaactcaaaaaagaaaaggtttatagggaagattctgcttttgacgaatattgtaacaaaaatcagtttctggagaatgaagacaccaaatttagcctttctgacgatcagcgagatcggtggttttctgacttgtccgattcatcctttgatttcaaaggggaggacagctgggactcgccagtgacagactacagggacatgaagagcgactctgtggccaagctcatcttggagacggtgaaggaggacagcaaggagaggaggcgggacagccgggcccgggagaagcgagactacagagagcccttcttccgaaagaaggacagggactatttggataaaaactctgagaagaggaaagagcagactgaaaagcataaaagtgtccctggctacctttcggaaaaggacaagaagaggagagagtccgcagaggccgggcgggacagaaaggacgccctggagagctgcaaggagcgcagggacggcagggccaagcccgaggaggtgcaccgggaggagctgaaggagtgtggctgcgagagtggcttcaaggacaagtccgacggcgactttgggaagggcctggagccgtgggaacggcaccacccagcacgagagaaggagaagaaggatggccccgataaggaaaggaaggagaagacaaaaccagaaagatacaaagagaaatccagtgacaaggacaaaagtgagaaatcaatcctggaaaaatgtcagaaggacaaagaatttgataaaaaa

SEQ ID NO: 79306 - DNA, 429 bp, Homo sapiens
tcgcacaagagctgctgatgtctatgtcttttcgctcacgggaaaatctcgaaacgtgagttcctcaaccgtgcggcgaagtgcggtaggcgggatgtcggcattagcgttgtttgatttgctcaagccaaattatgcgctggcgactcaggtagagtttaccgacccggaaattgttgctgagtacatcacgtatccttcgccaaatggtcacggcgaggtgcggggttatctggtgaagcccgcaaagatgagcggcaaaacgccagccgtagtggtggtgcatgagaatcgtggactgaatccgtatatcgaagatgtggcacggcgagtggcgaaggcggggtatatcgccctggcacctgacggcttaagttccgttggaggttatccgggaaatgatataaaggtggtatccgcagcggcccc

SEQ ID NO: 79307 - DNA, 556 bp, Homo sapiens
gagaataacctagacgttattgacttgatgccccgcgtcggtaaggcgctggataccacgcagcgcggcgtgctgtttaatgcagtaacccgatggggcaattaagtgaaacagagacatggcaattccttgctgacaacagaaacgaaatgtatatcatgccgcttaggtgtgccgttgtcacctcaacggcgattccaggctataaggatagaagaagtgaaattgagatggtttgcctttttgattgtgttattagcgggttgttcatcaaagcatgactatacgaacccgccgtggaacgcgaaagttccggtgcaacgtgcgatgcagtggatgccaataagccagaaagccggtgcagcctggggcgtcgatccacaattgatcacggcgattatcgctatcgaatcgggtggtaatccgaacgcggtgagtaaatcgaatgccattggtttgatgcagttaaaagcttcaacctccggacgtgatgtttatcgccgtatgggctggagtggtgagccgacgaccagcgagctgaagaattcctcaagac

SEQ ID NO: 79308 - DNA, 890 bp, Homo sapiens; identical to SEQ ID NO: 62650

SEQ ID NO: 79309 - DNA, 433 bp, Homo sapiens; identical to SEQ ID NO: 62651

SEQ ID NO: 79310 - DNA, 437 bp, Homo sapiens; identical to SEQ ID NO: 62652

SEQ ID NO: 79311 - DNA, 1076 bp, Homo sapiens; identical to SEQ ID NO: 62653

SEQ ID NO: 79312 - DNA, 762 bp, Homo sapiens; identical to SEQ ID NO: 62654

SEQ ID NO: 79313 - DNA, 1119 bp, Homo sapiens; identical to SEQ ID NO: 62655

SEQ ID NO: 79314 - DNA, 1255 bp, Homo sapiens; identical to SEQ ID NO: 62656

SEQ ID NO: 79315 - DNA, 1380 bp, Homo sapiens; identical to SEQ ID NO: 62657

SEQ ID NO: 79316 - DNA, 1083 bp, Homo sapiens
gcttgcggccgccagcgtggggatgtctaggagctcgaaggtggtgctgggcctctcggtgctgctgacggcggccacagtggccggcgtacatgtgaagcagcagtgggaccagcagaggcttcgtgacggagttatcagagacattgagaggcaaattcggaaaaaagaaaacattcgtcttttgggagaacagattattttgactgagcaacttgaagcagaaagagagaagatgttattggcaaaaggatctcaaaaatcatgacttgaatgtgaaatatctgttggacagacaacacgagtttgtgtgtgtgtgttgatggagagtagcttagtagtatcttcatcttttttttggtcactgtccttttaaacttgatcaaataaaggacagtgggtcatataagttactgctttcagggtcccttatatctgaataaaggagtgtgggcagacactttttggaagagtctgtctgggtgatcctggtagaagccccattagggtcactgtccagtgcttagggttgttactgagaagcactgccgagcttgtgagaaggaagggatggatagtagcatccacctgagtagtctgatcagtcggcatgatgacgaagccacgagaacatcgacctcagaaggactggaggaaggtgaagtggagggagagacgctcctgatcgtcgaatccgaggatcaggcatcagtggacttatcgcacgaccagagtggggattccctcaacagtgatgaaggagacgtgtcttggatggaggagcagctgtcctacttctgtgacaagtgccaaaaatggataccagccagtaaggagcttctcaattcctttgatttgtcaattcctgtgtgaaggtttgtttttccaacctgtgaaagaaacgtgaatgtaaaagagacctaaataaaaggataattatatttattctctaggttgatcagctattaaatttatataaaacataggcatgtttgtactaatgaaacgtactgtcaacctctatcacattgttaaattaacacttttggtggtaactcaataaaattgagaaaattggaaaaa

SEQ ID NO: 79317 - DNA, 756 bp, Homo sapiens; identical to SEQ ID NO: 62659
  misc_feature (1)...(756): n = a,t,c or g

SEQ ID NO: 79318 - DNA, 495 bp, Homo sapiens; identical to SEQ ID NO: 62660

SEQ ID NO: 79319 - DNA, 978 bp, Homo sapiens; identical to SEQ ID NO: 62661

SEQ ID NO: 79320 - DNA, 362 bp, Homo sapiens
tcccgggtcgacgatttcgtgttatctgctgtcagaaggaagcctgcctctttgcatgcaggtggcctgtggagaggagaaacacagggcaccaactatgaagactctcagggcgcgatttaagaagacagagctgcggctcagccccactgaccttggctcctgcccgccctgcggcccctgccccatcccgaagccggcagccagaggcaggcgccagagtcaagactggggcaagagtgacgagaggctgctacaagccgtggaaaacaacgatgcacctcgggtggccgccctcatcgcccgcaaggggctggtgcccacgaagctagaccccgagggcaagtccgcgttccacctgg

SEQ ID NO: 79321 - DNA, 393 bp, Homo sapiens; identical to SEQ ID NO: 62663

SEQ ID NO: 79322 - DNA, 843 bp, Homo sapiens; identical to SEQ ID NO: 62664

SEQ ID NO: 79323 - DNA, 346 bp, Homo sapiens
cattcagtgatctgcactgaacacagaggactcgccatggagtttgggctgagctgggttttccttgttgcttttttaaaaggtgtccagtgtgaggtgctgctggtggggtctgggggaggcttggtccagccgggggggtccctgagactctcctgtgcagcctctggattcaccgtcagtgacaactacatgacttgggtccgccaggctccagggaaggggctggagtgggtctccattatttataggggtggtaacacatactacgcagactccgtgaagggcagattcaccatctccagagacaattcccagaacacgctccatcttcaaatgaacagcc

SEQ ID NO: 79324 - DNA, 942 bp, Homo sapiens; identical to SEQ ID NO: 62666

SEQ ID NO: 79325 - DNA, 645 bp, Homo sapiens; identical to SEQ ID NO: 62667

SEQ ID NO: 79326 - DNA, 395 bp, Homo sapiens; identical to SEQ ID NO: 62668

SEQ ID NO: 79327 - DNA, 597 bp, Homo sapiens
cccgctttacccagtttaacctgcactttattctcaacgacttgcctgtattggctcccttttaatcactttgcgtcgggaagttatgctggaaaatttgaatctctctctattctctcttattaacgcgacgccagactcggctccgtggatgatctcgttggcgatttttattgctaaagatttgattaccgtggtgccgttgctggccgtggtactttggttgtgggggcttacagcacaacggcaactggtgataaaaatcgctatcgcgctggcggtcagcctgtttgtgtcctggacgatgggacatctttttccgcacgaccgaccctttgtcgaaaatatcggctataacttcctgcatcatgcggcggatgactcattcccaagcgatcacggtacggtgattttcacctttgcactggcatttttatgctggcatcgcctgtggtccggctcacttttaatggtgctggccgtcgtcattgcctggtcgcgcgtttatcttggcgtccactggccgctggatatgctcggtggattgctggcaggtatgattggctgccttagtgcccagattatctggcaagcgat

SEQ ID NO: 79328 - DNA, 207 bp, Homo sapiens
tggcgaaagccgctgctgaacaagaaaaattccgctttcgttatgaacaataatttacgtagggtacgaccatgaccagccgttttatgctgattttcgccgccattagcggcttcatttttgtggctctgggcgcttttggcgcgcatgtgttaagtaaaaccatgggggccgttacgatgggctggatgtccgggtaccgagatt

SEQ ID NO: 79329 - DNA, 331 bp, Homo sapiens; identical to SEQ ID NO: 62671

SEQ ID NO: 79330 - DNA, 437 bp, Homo sapiens; identical to SEQ ID NO: 62672

SEQ ID NO: 79331 - DNA, 397 bp, Homo sapiens
cagcgaaactatcaagtaatttggagtagtacgatggcgaaactgcatgattactacaaagacgaagtagttaaaaaactcatgactgagtttaactacaattctgtcatgcaagtccctcgggtcgagaagatcaccctgaacatgggtgttggtgaagcgatcgctgacaaaaaactgctggataacgcagcagcagacctggcagcaatctccggtcaaaaaccgctgatcaccaaagcacgcaaatctgttgcaggcttcaaaatccgtcagggctatccgatcggctgtaaagtaactctgcgtggcgaacgcatgtgggagttctttgagcgcctgatcactattgctgtacctcgtatccgtgacttccgtggcctgtccgctaagtctt

SEQ ID NO: 79332 - DNA, 494 bp, Homo sapiens
ggtattcaggggatgcgccgcgcggtgtatgacagcgaagattcccaggaagggatgaacgctttcctcgaaaaacgtaaacctaatttcgttggtcattaatccctgcgaacgaaggagtaaaaatggaaactcagtggacaaggatgcccgccaatgaagcggcagaaattatccagcataacgacatggtggcatttagcggctttaccccggcgggttcgccgaaagccctaccccccgcgattgcccgcagagctaacgaacagcatgaggccaaaaagccgtatcaaattcgccttctgacgggtgcgtcaatcagcgccgccgctgacgatgtactttctgacgccgatgctgtttcctggcgtgcgccatatcaaacatcgtccggtttacgtaaaaagatcattcagggcgcggtgagtttcgttgacctgcatttgagcgaagtggcgcaaatggtcaattacggtttcttcggccccattaat

SEQ ID NO: 79333 - DNA, 604 bp, Homo sapiens; identical to SEQ ID NO: 62675

SEQ ID NO: 79334 - DNA, 355 bp, Homo sapiens
aatcattgagtctacactcgcagagtgtgaagagcgtcataagaacttaagcggaatttatgctgccagcccaggagagtggaagatgttgtacctgacgaaaataagcaatgcggggagtgaattcaccgaaaacgagcaaaaaatcgctgactttctgcaggccaacgtgagtgagctgcaatccgtttcttcacggcagatggcgaaacagctcggcattagccagtcgagcatagtgaaatttgcccaaaaactcggcgcgcaaggatttactgaattgcgtatggcgttaataggcgaatacagtgccagccgggagaaaacgaatgccacggcactgcacctgcacagt

SEQ ID NO: 79335 - DNA, 392 bp, Homo sapiens
tcccctgcgtcaattttcctgacagagtacgcgtaataaccaaatcgcgcaacggaaggcgacctgggtcatgctgaagcgagccaccaggagacacaaagcgaaagctatgctaaaacagtcaggatgctacagtaatacattgatgtactgcatgtatgcaaaggacgtcacattaccgtgcagtacagttgatagccccttcccaggtagcgggaagcatatttcggcaatccagagacagcggcgttatctggctctggagaaagcttataacagaggataaccgcgcatggtgcttggcaaaccgcaaacagacccgactctcgaatggttcttgtctcattgccacattcataagtacccatccaagagcacgcttattccccagg

SEQ ID NO: 79336 - DNA, 600 bp, Homo sapiens; identical to SEQ ID NO: 62678

SEQ ID NO: 79337 - DNA, 791 bp, Homo sapiens
cacgaattccatcgtccgtacccggagatctggaccgctagatcctgaatgccggtggcgtgctcactgaccatgcaattgatgcgtacatcgctctgcgtcgcgaagaagatgaccgcgtgcgtatgactccgcatccggtagagtttgagctgtactacagcgtctaagtgttttagttgccgtggaaacttttcgcctgtctctggcaggcctgggatcggtggcaagcacatcacgccggatgcgacgcaaatgcgtcttatccggcctacacggtgatgatgtggtaggccggagcaggtgagtcgctctccaacgtgaagtttgtcagctatctgtagcccatctctgcatgggcttttttctccgtcaattctctgatgcttcgcgctttttatccgtaaaaagctataatgcactaaaatggtgcaacctgttcaggagactgctttatggcaacaggcacgcagcccgatgctgggcagatcctcaactcgctgattaacagtattttgttaatcgatgacaacctggcgatccattacgccaaccctgccgcgcaacaactgctcgcccaaagctcccgcaaattgtttggtacaccgttaccggaactgttgagctacttctcattaaatatcgagctgatgcaagaaagtctggaggcggggcaaggttttaccgataacgaagtgacgctggtcatcgtcgggcgcaagcagatcaagttgggtacggccagggttatcccggtcggcatgatgtacgggtacggacattgaatttgt

SEQ ID NO: 79338 - DNA, 607 bp, Homo sapiens
tcgattacaattcatctccgacccggagatccgcaatagtgtcgaaacgccgcaaaaaacacttttatttttatgagcggattcaggaaactgaaaaggcatttgagtgggctaatcttcgccgttacactcaaaggcggcgcggtgggaacgatatttcacagtatcggtcaaatgactatctccagaaatacaggatagaggttatgttcaggcagttgaaaaaaaacctggttgcaaccctcattgctgctatgaccattggtcaggtagccccggcgtttgccgacagcgcagacaccttgccggatatgggaacctccgcaggaagcacgctttccattggtcaggaaatgcagatgggcgactattatgtccgccagctacgcggcagcgcgccgttaattaatgacccgctgttaacgcaatatattaattcgctggggatgcgtctggtttcgcatgccaattcggttaagacaccgtttcatttttttctgatcaacaacgacgaaattaacgcctttgctttctttggcggcaacgtggtgctgcactctgccctgttccgttattccgataacgaaagtcaactggcttcagttat

SEQ ID NO: 79339 - DNA, 555 bp, Homo sapiens
tggctcgcgcgtcataatgggagttttgatactgtggattgccggttcgatgtggtagccttcaccgggaatgaggttgagtggattaaggatgcctttaatggccactcataattaaggtttaaggattagcgtgcaagaaagaattaaagcttgcttcactgaaagcattcaaactcaaattgcggcggcagaggcgcttccggatgccatctcccgtgcagccatgacgctggttcagtctctgctcaatggcaacaaaatcctctgttgtggtaatggaacttccgctgccaatgcacagcattttgctgccagcatgatcaaccgtttcgaaacggagcggcccagcttacctgccattgcactaaatactgataatgttgtcttaacggcgattgccaacgatcgcttacatgatgaagtgtatgcaaaacaggtgcgggcgctgggtcatgcgggagatgtattgttagccatttccacccgtggcaacagccgcgatattgttaaagcagttgaagccgccgttacgcgtgatacgaccattgtggc

SEQ ID NO: 79340 - DNA, 553 bp, Homo sapiens
ctatgacctgattacaattcaggtccgacccgagatctccaaaatgccaggacgctgtggctacacaagctaaccatgctgattaatgaaaagaaactcaacatgatgaatgccgagcaccgcaagctgcttgagcaggagatggtcaacttcctgttcgagggtaaagaggtgcatatcgagggctatacgccggaagataaaaaataaaaacagtgccggagcacgcctccggcaacttgcataaaaacaaacacaacacgcacccggaatgatgaaaaaatatctcgcgctggctttgattgcgccgttgctcatctcctgttcgacgaccaaaaaaggcgatacctataacgaagcctgggtcaaagataccaacggttttgatattctgatggggcaatttgcccacaatattgagaacatctggggcttcaaagaggtggtgatcgctggtcctaaggactacgtgaaatacaccgatcaatatcagacccgcagccacatcaacttcgatgacggtacgattactatcgaacccatccccgggaca

SEQ ID NO: 79341 - DNA, 310 bp, Homo sapiens
tctcgttacgacttcgagcgttggacccggggatctctctactatcgctgcaagcgagccagaaaaaactggatgaactgatcgaacagcactaaacccaggacaggaatccgcaatgaacaggcttttttcaggtcgttccgatatgccctttgcgctgctgcttctcgcgcccagcttattactgctgggcggtctggtggcgtggccgatggtgtcgaatatcgaaatcagttttttacgtctgccgctcaatcccaacatcgagtcaacgtttgttggggtgagcaactatgtgcgtatcctctcc

SEQ ID NO: 79342 - DNA, 423 bp, Homo sapiens
taaggcacttcagagcgcgcagcttggcgaagtcggggtccgttggaatatctggaccggcgagacgctttacgacgcctgtccgcacaaagtcagtctcggcgtcgagtatcaacatacctttaaggcgattaatcaacgtaacggagagcgcaacaacgcgtttctcaccattggagtgcactggtaaatgcgtaagttcattttcgtattgctgacactgcttttggtcagccctttttcctttgcgatgaaaggtattatctggcaaccacaaaaccgagatagtcaggttaccgatacccagtggcaggggctgatgagtcagttacgtttgcaaggcttcgatacccttgttttgcaatggacccgttacggcgatgcatttacccagccagaacagcgcacgttattgtttaagcg

SEQ ID NO: 79343 - DNA, 335 bp, Homo sapiens
cgaggctcaaagcgtaatgctgatggtttaggaatgctggtggcacaggcggctcatgcctttcttctctggcacggtgttctgcctgacgtagaaccagttataaagcaattgcaggaggaattgtccgcgtgaatcaggccatccagtttccggacagggaagagtgggacgagaataaaaaatgtgtatgttttcccgctctcgtgaatggtatgcaactgacatgcgcgatctctggcgagagtctggcgtatcgctttactggagatacgccagaacagtggttagcgagttttcgtcagcatcgctgggccctggaagaagaagcggat

SEQ ID NO: 79344 - DNA, 279 bp, Homo sapiens; identical to SEQ ID NO: 62686

SEQ ID NO: 79345 - DNA, 529 bp, Homo sapiens; identical to SEQ ID NO: 62687
  misc_feature (1)...(529): n = a,t,c or g

SEQ ID NO: 79346 - DNA, 471 bp, Homo sapiens; identical to SEQ ID NO: 62688

SEQ ID NO: 79347 - DNA, 344 bp, Homo sapiens
cctcatgtatggcagagtctacacggcctgagcatgaaggcgtgacgattttaagctcttcagaattacgcaaaagagctgaataattattcccaagaattgatagtgagcgtaatattcacgcgctcaattatcataacttattcctggggaatgctatgactggtcagtcttcatctcaggcggcaacgcccattcagtggtggaaacccgcgcttttctttctcgttgtcattgccggtctctggtatgtgaaatgggaaccttactacggcaaagcgtttactgctgccgaaacccacagtatcggtaaatctatccttgcgcaggcggatgctaaccca

SEQ ID NO: 79348 - DNA, 434 bp, Homo sapiens; identical to SEQ ID NO: 62690

SEQ ID NO: 79349 - DNA, 703 bp, Homo sapiens
  misc_feature (1)...(703): n = a,t,c or g
ctgnctgcgtgcgctggtcggcgcgccggacggttcgcagattattcgcggtgaacgccgcggtgcgccgcaagatgccgaacaaatggggatttcgctggcagaagagctactgaataacggcgcgcgcgagatcctcgctgaagtctataacggagacgccccggcatgagtatccttgtcacccgcccgtctcccgctggagaagagttagtgagccgtctgcgcacactggggcaggtggcctggcattttccgctgattgagttttctccgggtcaacaattaccgcaacttgctgatcaactggcagcgctgggggagagcgatctgttgtttgccctctcgcaacacgcggttgcttttgcccaatcacagctgcatcagcaagatcgtaaatggccccgactacctgattatttcgccattggacgcaccaccgcactggcactacataccgtaagtggacagaagattctctacccgcaggatcgggaaatcagcgaagtcttgctacaattacctgaattacaaaatattgcgggcaaacgtgcgctgatattacgtggcaatggtggtcgtgagctaattggggataccctgacggcgcgcggtgctgaggtcactttttgtgaatgttatcaacgatgcgcaatccattacgatggtgcagaagaagcgatgcgctggcaagcccgcgagg

SEQ ID NO: 79350 - DNA, 345 bp, Homo sapiens
cttatagtggcataatcagccgcaggcatggagcctgaagccaacaccctacggaaacaaaagacaacgggagatgttcatgacctgggaatatgcgctaattgggttagtcgtcggcatcattattggtgctgtggccatgcgttttggtaatcgtaaactacgccagcaacaggcgttgcagtacgaactggaaaagaataaagctgaactggacgagtatcgcgaagagctggttagccactttgcccgcagcgcggaattactggataccatggcgcacgactatcgccagctgtatcagcacatggcaaaaagctccagcagcctgctgccggaactgtt

SEQ ID NO: 79351 - DNA, 418 bp, Homo sapiens; identical to SEQ ID NO: 62693

SEQ ID NO: 79352 - DNA, 211 bp, Homo sapiens; identical to SEQ ID NO: 62694

SEQ ID NO: 79353 - DNA, 196 bp, Homo sapiens
tacgtcactcataactgcaacggataatttgttgttgcataaaatgtgtgctcgatctcattcatggccgcgttttctgctatcatgcgcggcatgaacatacttctctctattgcaatcacaacaggcattctctccggtatctggggatgggtggctgtttccctgggcttactaagctgggcgggcttcctgg

SEQ ID NO: 79354 - DNA, 526 bp, Homo sapiens; identical to SEQ ID NO: 62696

SEQ ID NO: 79355 - DNA, 691 bp, Homo sapiens; identical to SEQ ID NO: 62697
  misc_feature (1)...(691): n = a,t,c or g

SEQ ID NO: 79356 - DNA, 643 bp, Homo sapiens; identical to SEQ ID NO: 62698

SEQ ID NO: 79357 - DNA, 609 bp, Homo sapiens; identical to SEQ ID NO: 62699

SEQ ID NO: 79358 - DNA, 696 bp, Homo sapiens
atttattatcgctcaggattatgggcaccgcatccatgagtttcagagggagatggggcaatgggtgaaagaggataaaatccactaccgcgaagaaattactgacggtttaaagaatgcgccacagacgtttatcggcctgctgaagggtaaaaacttcggcaaagtggtgatccgcgtggcgggtgatgattaaagtttcaacggcggcgtaagccgccattaaaatccaggcaaaaagcttattttcagctttaattaactaaccacatcattgttctgctgctaataacaacaaaggtgagtggtttatgattattcactttaatacaccaggtgaattccttctgccatgcaggcagggttggacagaaaacacgcgaaggaattaaaatgcctggaacgggaaaaatgaaacatgtcagtttgactctgcaggttgagaacgacctgaaacatcagcttagtattggcgcattaaaacctggcgcacgcctgattactaaaaatctggcggagcaattaggtatgagtattacacctgtgcgtgaagcattattacgtctggtttcggtgaatgcgctttctgtcgcacctgcactagcatgcaaggctattaaggtgggtaaccccagggtattcccagtcactccgttgtacagcgtcggacaatgaatccgtgtcatgttctaataa

SEQ ID NO: 79359 - DNA, 358 bp, Homo sapiens; identical to SEQ ID NO: 62701

SEQ ID NO: 79360 - DNA, 451 bp, Homo sapiens; identical to SEQ ID NO: 62702

SEQ ID NO: 79361 - DNA, 569 bp, Homo sapiens; identical to SEQ ID NO: 62703

SEQ ID NO: 79362 - DNA, 409 bp, Homo sapiens
atgttggatacataaaagacaatctgttaattcagtatattatcgttgcataaatgaaggaatttcttttcagtgctgtaattttttttgtcccagctgtagttatagttcatagtttgaggtttaagacattatataattgtattaatggggcgaagtatgttttgtacctgtaatgttatttaattaggctacccttgtgcactgttttctaaaaatagaaaagttacttatcagcaagcctcagcatagaagtaaaatgtatctgtgtgtattataaagcagttttctatcattgtacttccaaatttccaacaggttgtaagaagatatatactgggttcagttgtcgacagtgaaaagaactacgtagatgctcttaagaggatttcggaggtacttaagtgtc

SEQ ID NO: 79363 - DNA, 618 bp, Homo sapiens
gcagcaatattttgtttatcctgtattttcagagggaatggagtgtaacgctctgtattaacaaggagagcattaaaatgggtaaactcacgggcaagacagcactgattacgggcgcattgcagggaattggcgaaggaattgccagaacttttgcacgtcatggcgcgaacctaatcttgctggatatctcccctgagatcgaaaagctggcggacgaactgtgtggtcgtggtcatcgctgtacggcggttgtcgccgatgtgcgtgacccggcgtcggtagccgcagctatcaaacgcgcgaaggaaaaagaagggcgcattgatatcctggtgaataacccaggcgtttgtcgtctgggcagtttcctcgatatgagcgatgacgatcgcgatttccatattgacatcaatattaaaggcgtatggaacgtcacgaaggcggtgctgccggagatgattgcccgcaaagatggtcgcattgtgatgatgtcttcagtccctggtgatatggtggccgatcctggcgaaacggcgtacgccttaacgaaagcggcgattgttggcctgacaaaatcgctggcggtggagtacgcgcagtctggccttcgcgtta

SEQ ID NO: 79364 - DNA, 579 bp, Homo sapiens; identical to SEQ ID NO: 62706

SEQ ID NO: 79365 - DNA, 449 bp, Homo sapiens; identical to SEQ ID NO: 62707

SEQ ID NO: 79366 - DNA, 768 bp, Homo sapiens; identical to SEQ ID NO: 62708

SEQ ID NO: 79367 - DNA, 437 bp, Homo sapiens; identical to SEQ ID NO: 62709

SEQ ID NO: 79368 - DNA, 1174 bp, Homo sapiens
ggcacgagggcggccgcctaagtcccacagagacgggagtcgggtgggatcccaggctgggccccgcggcggctggattctcttccctggccaagtctctgagatcttctcccagggcgatgcaaagctactcgctaccagcttggacctgtctgcagtatctcctctgggacctgccatgctgaggacccattctcacctctgagggactcctgtcctaggactaaggtggagcctgggccatggtacagctggctcctgcggcagccatggacgaggtcacctttaggagcgacactgtgctgtcagatgtccacctctataccccgaaccatagacatctcatggtacggctgaacagcgtggggcagccagttttcctgtcccaattcaagcttctatggagccaagactcttggacagattcaggagccaagggtggcagtcacagagatgttcacacaaaggagcctccttctgctgagacaggcagcacagggtcccctccaggaagtggccatggtaatgagggtttctccctccaggccgggactgacaccactggccaggaagtggctgaagctcagctggatgaggatggggatttggacgtggtgagaagaccacgagccgcctctgattccaacccagcagggcctctgagagacaaggtacatcccatgattctagcacaggaagaagacgacgtcctgggagaggaagcacaaggcagcccgcacgatatcatcagaatagagcacaccatggccacgcccctggaggatgttggcaagcaggtgtggcggggcgccctgctcctggcagactacatcctgttccgacaggacctcttccgaggatgtacagcgctggagctcggggccggcacggggctcgctagcatcatcgcagccaccatggcacggaccgtttattgtacagatgtcggtgcagatctcttgtccatgtgccagcgaaacattgccctcaacagccacctggctgccactggaggtggtatagatagggtcaaagaactggactggctgaaggacgacctctgcacagatcccaaggtccccttcagttggtcacaagaggaaatttctgacctgtacgatcacaccaccatcctggttgcagccgaagtgttttacgacgacgacttgactga

SEQ ID NO: 79369 - DNA, 628 bp, Homo sapiens; identical to SEQ ID NO: 62711

SEQ ID NO: 79370 - DNA, 675 bp, Homo sapiens; identical to SEQ ID NO: 62712

SEQ ID NO: 79371 - DNA, 962 bp, Homo sapiens; identical to SEQ ID NO: 62713

SEQ ID NO: 79372 - DNA, 720 bp, Homo sapiens; identical to SEQ ID NO: 62714

SEQ ID NO: 79373 - DNA, 667 bp, Homo sapiens; identical to SEQ ID NO: 62715

SEQ ID NO: 79374 - DNA, 966 bp, Homo sapiens; identical to SEQ ID NO: 62716

SEQ ID NO: 79375 - DNA, 2457 bp, Homo sapiens; identical to SEQ ID NO: 62717

SEQ ID NO: 79376 - DNA, 627 bp, Homo sapiens; identical to SEQ ID NO: 62718

SEQ ID NO: 79377 - DNA, 1261 bp, Homo sapiens; identical to SEQ ID NO: 62719

SEQ ID NO: 79378 - DNA, 896 bp, Homo sapiens; identical to SEQ ID NO: 62720

SEQ ID NO: 79379 - DNA, 844 bp, Homo sapiens; identical to SEQ ID NO: 62721

SEQ ID NO: 79380 - DNA, 424 bp, Homo sapiens; identical to SEQ ID NO: 62722

SEQ ID NO: 79381 - DNA, 465 bp, Homo sapiens; identical to SEQ ID NO: 62723

SEQ ID NO: 79382 - DNA, 553 bp, Homo sapiens
aaatctgatccgggatgcggcggcccaatcggaaggtggaccgaaatcccgcgacagcaagaggcccgtagcgacccgcggtgctaaggaacacagtgctttcaaaagaattggcgtccgctgttcgcctctcctcccgggagtcttctgcctactcccagaagaggagggaagcacagtatgaagactttggagactcaaccgttagctccggactgctgtccttcagaccaggacccagctccagcccatccttctccccacgcttccccgatgaataaaaatgcggactctgaactgatgccaccgcctcccgaaaggggggatccgccccggttgtccccagatcctgtggctggctcagctgtgtcccaggagctacgggagggggacccagtttctctctccactcccctggaaacagagtttggttcccctagtgagttgagtcctcgaatcgaggagcaagaactttctgaaaatacaagccttcctgcagaagaagcaaacgggagcctttctgaagaagaagcgaacgggccagagttggggt

SEQ ID NO: 79383 - DNA, 510 bp, Homo sapiens; identical to SEQ ID NO: 62724

SEQ ID NO: 79384 - DNA, 1114 bp, Homo sapiens
  sig_peptide (188)...(323): this location contains the signal peptide sequence, MLKSSVDLLFLFSMCVLSINNLRSSLLAVHALSGDTLVTEIQTGN, Run with SignalP
cactccttcaggtgcagaaaaggaaagcatgactgtgtgtcactgacttaaaataggagtgaggtgagaggggcagctgggctcatggacgtcaagtggacagtttctcagctggtatttcctatatttcctgttttggacagcaggttcctgcccttctaagctgggggtaggggtgagggagtgtatgttaaaaagctctgtggacttgctttttctcttctccatgtgtgttctttccatcaataatctgcgttcatctttactggctgttcatgcattatctggagatacgctagttacagaaattcaaacaggcaactcttcctctttctccctagctttacactacagatccatgaagttttcttgactgtccctgcctagggtacaacaaggaaaccactatttggataattcccctgattccatggtactgtggaagtggtgggctctccatatgtcagggtattctatgtctatgaaaaggtatctcttttgagaccaagggtggacgggagtctaagagtctaccaatttttaaaataatttagctatatttaagtcaataaattgtattcaaggctgactttgtagtgatgtattccatgaattatttcattcaaaataattttgaaaggacttctggtccagacaaaatagcatagatccatttctgtcttctctcctctcagttaaatgcaattataaagtctagaaataatgcaagaggtaaccaaaggagaactctgaaagatggaaacagaaagaggaattagttagggaccctaagactggaggaacaatagaggtaggatgtcttaccatcaccgcatccaacaagagaaggtgaccttaggcctggtattacctgatcccaacttggcaccaaaagacgagccaaacatagactcattcctcctgcttcctggtgagcctggtattctcctccacttccactgacagacatgtagggtgactgggtggtatcaacaataggaaccacatcataacaggcagcctagtttgggaagcactcttggtctccgtaggcctgagactccttttgcccatctagaggcaccaggtggcccagcccatggaaattccctca

SEQ ID NO: 79385 - DNA, 15214 bp, Homo sapiens
  sig_peptide (916)...(1051): this location contains the signal peptide sequence, MLSAILLLLQLWDSGAQETDNERSAQGTSAPLLPLLQRFQSIICR, Run with SignalP
atgccctctgaatctttctgtttggctgcccaggctcgcctcgactccaaatggttgaaaacagatatacagcttgcattcacaagagatgggctctgtggtctgtggaatgaaatggttaaagatggagaaattgtatacactggaacagaatcaacccagaacggagagctccctcctagaaaagatgatagtgtcgaaccaagtggaacaaagaaagaagatctgaatgacaaagagaaaaaagatgaagaagaaactcctgcacctatatatagggccaagtcaattctggacagctgggtatggggcaagcaaccagatgtgaatgaactgaaggagtgtctttctgtgctggttaaagagcagcaggccctggccgtccagtcagccaccaccaccctctcagccctgcgactcaagcagaggctggtgatcttggagcgctatttcattgccttgaatagaaccgtttttcaggagaatgtcaaagttaagtggaaaagcagcggtatttctctgcctcctgtggacaaaaaaagttcccggcctgcgggcaaaggtgtggaggggctcgccagagtgggatcccgagcggcgctgtcttttgcctttgccttcctgcgcagggcctggcgatcaggcgaggatgcggacctctgcagtgagctgttgcaggagtccctggacgccctgcgagcacttcccgaggcctcgctctttgacgagagcaccgtgtcctctgtgtggctggaggtggtggagagagcgaccaggttcctcaggtccgtcgtgacgggggatgttcacggaacgccagccaccaaagggccaggaagcatccccctgcaggaccagcacttggccctggccatcctgctggagctggctgtgcagagaggcacgctgagccaaatgttgtctgccatcctgttgttgcttcagctgtgggacagcggggcacaggagactgacaatgagcgttccgcccagggcaccagcgccccacttttgcccttgctgcaaaggttccagagcatcatttgcaggaaggatgcaccccactccgagggcgacatgcaccttttgtctggccctctgagccccaatgagagtttcctgaggtacctcacccttccacaagacaacgagcttgccattgatctgcgacaaacggcggttgttgtcatggcccatttagaccgtctggctacgccctgtatgcctccgctgtgtagctctccgacatctcataagggatcattgcaagaggtcataggttgggggttaataggatggaaatactatgccaatgtgattggtccaatccagtgcgaaggcctggccaacctgggagtcacacagattgcctgtgcagagaagcgtttcctgattctgtcacgcaatggccgcgtgtacacacaggcctataatagtgacacgctggccccacagctggtccaaggccttgcctccagaaacattgtaaaaattgctgcccattctgatggtcaccactacctagccttggctgctactggagaggtgtactcctggggctgtggggacggcggacggctgggccatggggacactgtgcctttggaggagcctaaggtgatctccgccttctctggaaagcaggccgggaagcacgtggtgcacatcgcttgcgggagcacttacagtgcggccatcactgccgagggggagctgtacacctggggccgcgggaactacggccggctgggccatggctccagtgaggacgaggccattccgatgctggtagccgggcttaaaggactgaaggtcatcgatgtggcgtgtgggagtggggatgctcaaaccctggctgtcactgagaacgggcaagtgtggtcttggggagatggtgactatgggaaattgggcagaggtggtagtgatggctgcaaaaccccaaagctgattgaaaagcttcaagacttggatgtggtcaaagtccgctgtggaagtcagttttccattgctttgacgaaagatggccaagtttattcatggggaaaaggtgacaaccagagacttggacatggaacagaggaacatgttcgttatccaaaactcttagaaggcttgcaagggaagaaggtgattgatgtggctgcaggctccacccactgcctggctctgactgaggacagcgaggtccacagctgggggagcaacgaccagtgccagcactttgacaccttgcgcgtgaccaagccagaacctgcagcattgccaggactggacaccaaacacatagtgggaattgcctgtgggcctgcccagagctttgcttggtcatcatgttctgagtggtccattggcctccgtgtcccttttgtggtggacatctgctcaatgacttttgagcagctagatctcctgcttcggcaggtgagtgaggggatggatggctccgcggactggcccccgccccaggagaaagagtgtgtggccgtggcaacgctgaatcttctacgacttcagttgcatgctgccattagtcaccaggttgacccggaattccttggtttaggtctgggcagcatcctcctgaacagcctgaagcagacggtggtgaccctggccagcagtgcgggcgtgctgagcaccgtgcagtcggccgcccaggccgtgctgcagagtggctggtccgtgctgctgcccaccgcggaggagcgggcccgggcactctctgctctcctgccctgcgcagtttcaggcaatgaagtgaacataagtccaggtcgtcgattcatgattgatcttctggtgggcagcttgatggctgatggagggttggagtcagccttacacgcagccattactgcagagatccaggatattgaagccaaaaaagaagcacagaaggaaaaagaaattgatgaacaggaagcgaatgcctcaacatttcatagaagcaggactccactggataaagaccttattaatacggggatctgtgagtcttctggcaaacagtgtttgcctctggttcagctcatacaacagcttcttagaaacatcgcttctcagactgtagccagattgaaagatgttgcccgtcggatttcatcatgtctggactttgagcaacacagtcgtgaaagatctgcttcattggattggttactgcgtttccaacgtttgcttattagtaaactttatccaggagaaagtattggtcagacctcagatatttctagtccagagctaatgggtgttggttccttgctgaagaagtacacagccctcctgtgcacgcacattggagatatactgcctgtggccgccagcattgcttctaccagctggcggcacttcgcggaggtggcttacattgtggaaggggactttactggtgttctccttccagaactagtagtttctatagtgcttctgctcagtaaaaatgctgatctcatgcaagaggctggagctgtacctctgctgggtggcctgttggaacatctggatcggttcaaccatctggcaccaggaaaggaacgggatgatcatgaagagttagcctggcctggcataatggagtcattttttacaggtcagaactgtagaaataatgaggaagtgacacttatacgcaaagctgatttggagaaccataataaagatggaggcttctggactgtgattgacgggaaggtgtatgatataaaggacttccagacacagtcgttaacaggaaatagtattcttgctcagtttgcaggggaagacccagtggtagctttggaagctgctttgcagtttgaagacacccgggaatccatgcacgcgttttgtgttggccagtatttggagcctgaccaagaaatcgtcaccataccagatctggggagtctctcttcacctctgatagacacagagaggaatctgggcctgcttctcggattacacgcttcgtatttggcaatgagcacaccgctgtctcctgtcgagattgaatgtgccaaatggcttcagtcatccatcttctctggaggcctgcagaccagccagatccactacaggtacaacgaggagaaagacgaggaccactgcagctccccagggggcacacctgccagcaaatctcgactctgctcccacagacgggccctgggggaccattcccaggcatttctgcaagccattgcagacaacaacattcaggatcacaacgtgaaggactttttgtgtcaaatagaaaggtactgtaggcagtgccatttgaccacaccgatcatgtttccccccgagcatcccgtggaagaggtcggtcgcttgttgttatgttgcctcttaaaacatgaagatttaggtcatgtggcattatctttagttcatgcaggtgcacttggtattgagcaagtaaagcacagaacgttgcctaagtcagtggtggatgtttgtagagttgtctaccaagcaaaatgttcgctcattaagactcatcaagaacagggccgttcttacaaggaggtctgcgctcctgtcatcgaacgtttgagattcctctttaatgaattgagacctgctgtttgtaatgacctctctataatgtctaagtttaaattgttaagttctttgccccgttggaggaggatagctcaaaagataattcgagaacgaaggaaaaagagagttcctaagaagccagaatctatggatgatgaagaaaaaattggaaacgaagagagtgatttagaagaagcttgcattttgcctcatagtccaataaatgtggacaagagacccattgcaattaaatcacccaaggacaaatggcagccgctgttgagtactgttacaggtgttcacaaatacaagtggttgaagcagaatgtgcagggtctttatccgcagtctccactcctcagtacaattgctgaatttgcccttaaagaagagccagtggatgtggaaaaaatgagaaagtgcctactaaaacagttggagagagcagaggttcgcctggaagggatagatacaattttaaaactggcgagcaagaatttcttacttccatctgtgcagtatgcgatgttttgtggatggcaaagacttattcctgagggaatcgatataggggaacctcttactgattgtttaaaggatgttgatttgatcccgccttttaatcggatgctgctggaagtcacctttggcaagctgtacgcttgggctgtacagaacattcgaaatgttttgatggatgccagtgccacatttaaagagcttggtatccagccggttcccctccaaaccatcaccaatgagaacccgtcaggaccgagcctggggaccatcccgcaagcccgcttcctcctggtgatgctcagcatgctcaccctgcagcacggcgcaaacaacctcgaccttctgctcaattccggcatgctggccctcacgcagacggcactgcgcctgattggccccagttgtgacaacgttgaggaagatatgaatgcttctgctcaaggtgcttctgccacagttttggaagaaacaaggaaggaaacggctcctgtgcagctccctgtttcaggaccagaactggctgccatgatgaagattggaacaagggtcatgagaggtgtggactggaaatggggcgatcaggatgggcctcctccaggcctaggccgcgtgattggtgagctgggagaggacggatggataagagtccagtgggacacaggcagcaccaactcctacaggatggggaaagaaggaaaatacgacctcaagctggcagagctgccggctgctgcacagccctcagcagaggattcggacacagaggatgactctgaagccgaacaaactgaaaggaacattcaccccactgcaatgatgtttaccagcactattaacttactgcagactctttgtctgtctgctggagttcatgctgagatcatgcagagcgaagccaccaagactttatgcggactgctgcgaatgttagtggaaagcggaacgacggacaagacatcttctccaaacaggctggtgtacagggagcaacaccggagctggtgcacgctggggtttgtgcggagcatcgctctcacgccgcaggtatgcggcgccctcagctccccgcagtggatcacgctgctcatgaaggtcgtggaagggcacgcacccttcactgccacctcgctgcagaggcagatcttagctgtgcatttgttgcaagcagtccttccatcatgggacaagaccgaaagggcgagggacatgaaatgcctcgtggagaagctgtttgacttcttgggaagcttgctcactacctgctcctctgacgtgccattactcagagagtccacgctgaggcggcgcagggtgcgcccgcaggcctcgctgactgccacccacagcagcacactggcggaggaggtggtggcactgctgcgcacgctgcactccctgactcagtggaatgggctcatcaacaagtacatcaactcccagctccgctccatcacccacagctttgtgggaaggccttccgaaggggcccagttagaggactacttccccgactccgagaaccctgaagtggggggcctcatggcagtcctggctgtgattggaggcatcgatggtcgcctgcgcctgggcggtcaagttatgcacgatgagtttggagaaggcactgtgactcgcatcaccccaaagggcaaaatcaccgtgcagttctctgacatgcggacgtgtcgcgtttgcccattgaatcagctgaaaccactccctgccgtggcctttaatgtgaacaacctgcccttcacagagcccatgctgtctgtctgggctcagttggtgaacctcgctggaagcaagttagaaaagcacaaaataaagaaatcgactaaacaggcctttgcaggacaagtggacctggacctgctgcggtgccagcagttgaagctatacatcctgaaagcaggtcgggcgctgctctcccaccaggataaactgcggcagatcctgtctcagccagctgttcaggagactggaactgttcacacagatgatggagcagtggtatcacctgaccttggggacatgtctcctgaagggccgcagccccccatgatcctcttgcagcagctgctggcctcggccacccagccgtctcctgtgaaggccatatttgataaacaggaacttgaggctgctgcactggccgtttgccagtgcttggctgtggagtccactcacccttcgagcccaggatttgaagactgcagctccagtgaggccaccacgcctgtcgccgtgcagcacatccaccctgccagagtgaagaggcgcaagcagtcgcccgttcccgctctgccgatcgtggtgcagctcatggagatgggattttccagaaggaacatcgagtttgccctgaagtctctcactggtgcttccgggaatgcatccagcttgcctggtgtggaagccttggtcgggtggctgctggaccactccgacatacaggtcacggagctctcagatgcagacacggtgtccgacgagtattctgacgaggaggtggtggaggacgtggatgatgccgcctactccatgtctactggtgctgttgtgacggagagccagacgtacaaaaaacgagctgatttcttgagtaatgatgattatgctgtatatgtgagagagaatattcaggtgggaatgatggttagatgctgccgagcgtatgaagaagtgtgcgaaggtgatgttggcaaagtcatcaagctggacagagatggattgcatgatctcaatgtgcagtgtgactggcagcagaaagggggcacctactgggttaggtacattcatgtggaacttataggctatcctccaccaagttcttcttctcacatcaagattggtgataaagtgcgggtcaaagcctctgtcaccacaccaaaatacaaatggggatctgtgactcatcagagtgtgggggttgtgaaagctttcagtgccaatggaaaagatatcattgtcgactttccccagcagtctcactggactgggttgctatcagaaatggagttggtacccagtattcatcctggggttacgtgtgatggatgtcagatgtttcctatcaatggatccagattcaaatgcagaaactgtgatgactttgatttttgtgaaacgtgtttcaagaccaaaaaacacaataccaggcatacatttggcagaataaatgaaccaggtcagtctgcggtattttgtggccgttctggaaaacagctgaagcgttgccacagcagccagccaggcatgctgctggacagctggtcccgcatggtgaagagcctgaatgtgtcgtcctccgtgaaccaggcatcccgtctcattgacggcagcgagccctgctggcagtcatcggggtcgcaaggaaagcactggattcgtttggagattttcccagatgttcttgttcatagattaaaaatgatcgtagatcctgctgacagtagctacatgccgtccctggttgtagtgtcaggtggaaattccctgaataaccttattgaactaaagacaatcaatattaacccttctgacaccacagtgccccttctgaatgactacacagagtatcacaggtatattgaaattgctataaagcagtgcaggagctcaggaatcgattgtaaaatccatggtctcatcctgctgggacggatccgtgcagaagaggaagatttggctgcagttcctttcttagcttcggataatgaagaggaggaggatgagaaaggcaacagcggaagcctcattagaaagaaggctgctgggctggaatcagcagctacgataagaaccaaggtgtttgtgtggggcctgaatgacaaggaccagctgggcgggctgaaaggctccaagataaaggttccttcgttctctgagacactgtcagctttgaatgtggtacaggtggctggtggatctaaaagtttgtttgcagtgactgtggaagggaaggtgtatgcctgtggagaagccacgaatggccggctggggctgggcatttccagcgggacggtgcccatcccacggcagatcacagctctcagcagctacgtggtcaagaaggtggctgttcactcaggtggccggcacgcgacggctttaactgtcgatggaaaagtgttttcgtggggcgaaggtgacgatggaaaacttggacacttcagcagaatgaactgtgacaaaccaaggctgatcgaggccctgaaaaccaagcgtatccgggatatcgcctgtgggagctcgcacagcgcagccctcacatccagcggagaactgtacacctggggcctcggcgagtacggccggctgggacatggggataatacgacacagctaaagcccaaaatggtgaaagtccttctcggtcacagagtaatccaggttgcatgtgggagtagagacgcgcagaccctggctctgaccgatgaaggtttggtattttcctggggtgatggtgactttggaaaactgggccggggcggaagtgaaggctgtaacattccccagaacattgagagactaaatggacagggggtgtgccagattgagtgtggagctcagttctccctggcgctcaccaagtctggagtggtgtggacatggggaaagggggattacttcagattgggccacggctctgacgtgcacgtgcggaaaccacaggtggtggaagggctgagagggaagaagatcgtgcatgtggctgtcggggccctgcactgcctggcggtcacggactcggggcaggtgtatgcttggggtgacaacgaccacggccagcagggcaatggcacgaccacggttaacaggaagcccacactcgtgcaaggcttagaaggccagaagatcacacgcgtggcttgtgggtcgtcccacagtgtggcgtggacaactgtggatgtggccacgccctctgtccacgagcccgtcctcttccagactgcaagagacccgttaggtgcttcctacttaggcgtgccctcagatgctgattcttctgctgccagtaataaaataagtggtgcaagtaattctaagccaaatcgcccttctcttgccaagattctcttgtcattggatggaaatctggccaaacagcaggccttatcgcatattcttacagcattgcaaatcatgtatgccagagatgctgttgtcggggccctgatgccggccgccatgatcgccccggtggagtgcccctcgttctcctcggcggccccttccgacgcatctgcgatggctagtcccatgaatggagaagaatgcatgctggctgttgatatcgaagacagactgagtccaaatccatggcaagaaaagagagagattgtttcctctgaggacgcagtgaccccctctgcagtgactccgtcggccccctcagcctccgctcggccttttatcccagtgacggatgacctgggagctgcaagcatcattgcagaaaccatgaccaaaaccaaagaggatgttgaaagccaaaataaagcagcaggtccggagcctcaggccttggatgagttcaccagtctgctgattgcggatgacactcgtgtggtggtagacctgctcaagctgtcagtgtgcagccgggccggggacaggggcagggatgtgctctccgcggtgctttccggcatggggaccgcctacccacaggtggcagatatgctgttggagctctgtgtcaccgagttggaggatgtggccacagactcgcagagcggccgcctctcttctcagcctgtggtggtggagagtagccacccttacaccgacgacacctccaccagtggcacagtgaagataccaggtgcagaaggactcagggtagaatttgaccggcagtgctccacagagaggcgccacgaccctctcacagtcatggacggcgtcaacaggatcgtctccgtgcggtcaggccgagagtggtccgactggtccagcgagctgcgcatcccaggggatgagttaaagtggaagttcatcagcgatgggtctgtgaatggctggggctggcgcttcaccgtctatcccatcatgccagctgctggccctaaagaactcctctctgaccgctgcgtcctctcctgtccatccatggacttggtgacgtgtctgttagacttccgactcaaccttgcctctaacagaagcatcgtccctcgccttgcggcctcgctggcagcttgtgcacagctgagtgccctagctgccagtcacagaatgtgggcccttcagagactgaggaagctgcttacaactgaatttgggcagtcaattaacataaataggctgcttggagaaaatgatggggaaacaagagctttgagttttacaggtagtgctcttgctgctttggtgaaaggtcttccagaagctttgcaaaggcagtttgaatatgaagatcctattgtgaggggtggcaaacagctgctccacagcccattctttaaggtactagtagctcttgcttgtgacctggagctggacactctgccttgctgtgccgagacgcacaagtgggcctggttccggaggtactgcatggcctcccgtgttgctgtggcccttgacaaaagaacaccgttgccccgtctgtttcttgatgaggtggctaagaaaattcgtgaattaatggcagacagcgaaaacatggatgttctgcatgagagccatgacatttttaaaagagagcaagacgaacaacttgtgcagtggatgaacaggcgaccagatgactggactctctctgctggtggcagtggaacaatttatggatggggacataatcacaggggccagctcgggggcattgaaggcgcaaaagtcaaagttcccactccctgtgaagcccttgcaactctcagacccgtgcagttaatcggaggggaacagaccctctttgctgtgacggctgatgggaagctgtatgccactgggtatggtgcaggtggcagactaggcattggagggacagagtcggtgtccaccccaacattgcttgaatccattcagcatgtgtttattaagaaagtagctgtgaactctggaggaaagcactgccttgccctgtcttcagaaggagaagtttactcttggggtgaggcagaagatgggaagttggggcatggcaacagaagtccgtgtgaccgccctcgtgtcatcgagtctctgagaggaattgaagtggtcgatgttgctgctggcggagcccacagcgcctgtgtcacagcagccggggacctctacacatggggcaaaggccgctacggccggctggggcacagcgacagtgaggaccagctgaagccgaagctggtggaggcgctgcagggccaccgtgtggttgacatcgcctgtggcagtggagatgcccagaccctctgcctcacagatgacgacactgtctggtcctggggggacggggactacggcaagctcggccggggaggcagcgatggctgtaaagtgcctatgaagattgattctcttactggtcttggagtagttaaagtggaatgcggatcccagttttctgttgcccttaccaaatctggagctgtttatacctggggcaaaggcgattatcacaggttgggccatggatcagatgaccatgttcgaaggcctcggcaggtccaagggttgcaggggaagaaagtcatcgccatcgccactggctccctgcactgtgtgtgctgcacagaggatggtgaggtttatacatggggcgacaatgatgagggacaactgggagacggaaccaccaatgccatccagaggcctcggttggtagctgcccttcagggtaagaaggtcaaccgtgtggcctgtggctcagcacataccctcgcctggtcgaccagcaagcccgccagtgctggcaaactccctgcacaggtccccatggagtacaatcacctgcaggagatccccatcattgcgctgaggaaccgtctgctgctgctgcaccacctctccgagctcttctgcccctgcatccccatgttcgacctggaaggctcgctcgacgaaactggactcgggccttctgttgggttcgacactctccgaggaattctgatatcccagggaaaggaggcggctttccggaaagtagtacaagcaactatggtacgcgatcgtcagcatggccccgtcgtggagctgaaccgcatccaggtcaaacgatcaaggagcaaaggcgggctggccggccccgacggcaccaagtctgtctttgggcagatgtgtgctaagatgagctcgtttggtcccgacagcctcctccttcctcaccgtgtctggaaagtcaagtttgtgggtgaatctgtggatgactgtgggggcggctacagcgagtccatagctgagatctgtgaggagctgcagaacggactcacgcccctgctgatcgtgacacccaacgggagggatgagtctggggccaaccgagactgctacctgctcagcccggccgccagagcacccgtgcacagcagcatgttccgcttcctgggtgtgttgctgggcattgccatccgaaccgggagtcccctgagcctcaacccttgccgagccctgtctggaagcagctggctgggatgaagcctcaccatcgcggacctcagtgaggtttgataaaggattttattcctggactcatgtacatccgagacaatgaagccacctcagaggagtttgaagccatgagcctgcccttcacagtgccaagtgccagtggccaggacattcagttgagctccaagcacacacacatcaccctggacaaccgcgcggagtacgtgcggctggcgataaactatagactccatgaatttgatgagcaggtggctgctgttcgggaaggaatggcccgcgttgtgcctgttcccctcctctctctgttcaccggctacgaactggagacgatggtgtgtggcagccctgacatcccgctgcaccttctcaagtcggtggccacctataaaggcatcgagccttccgcatcgctgatccagtggttctgggaggtgatggagtccttctccaacacagagcgctctcttttccttcgcttcgtctggggccggacgaggctgcccaggaccatcgccgacttccggggccgagacttcgtcatccaggtgttggataaatacaaccctccagaccacttcctccctgagtcctacacctgtttcttcttgctgaagctgcccaggtattcctgcaagcaggtgctggaggagaagctcaagtacgccatccacttctgcaagtccatagacacagatgactacgctcgcatcgcacttacaggagagccagccgccgacgacagcagcgacgattcagataacgaggatgtcgactcctttgcttcggactctacacaagattatttaacaggacactaagatggggaaacgtcctcgtgagatgagagcctgagccaggcagcagagcactcgctgctgtgtagactgtaggctgcctggtgtgtctgatgagaagcgtccgtcctcgagccaggcgggaggagggagtggagagactgactggccgtgatgggaatgacagtgagaaggtccgcctgtgcgcgtggaacactgtggacgctcgacttccaagggtcttctcacccgtaatgctgcattacatgtaggactgtgtttactaaagtgtgtaaatgtttatataaataccaaattgcagcatccccaaaatgaataaagcctttttacttgtgggtgcaatcgatttttttttctttctcctttctttcaagtgtcgtgagtcgtcttgattgtatattggaaataactgtgtaacaaatcgtattataaatatttcaattaattttactctgaatttgtttattaaaagacttttgaacatgaaatgattagtattacttgaatgcatccacaggatatttaaaccaaaatgaaaaaccagaaggccatttggtgtcccctctcccaggtgtccccttgtagcatatgcattatgtcatctgaattgaggcctttctgtgaacagcatcataacttctatcatggaaagtgtactatatataatgtttgtgtcatgtatatgcctaaattttaattatctataa

SEQ ID NO: 79386 - DNA, 15731 bp, Homo sapiens
  sig_peptide (13559)...(13424): this location contains the signal peptide sequence, MLTLALLVLRICVCEAASTFVCPCLPWLSLLFLHLLPRLFQVQIW, Run with SignalP
cgcgcggccccctccagcccccggctcccggcagcagaagcagaaggcagcgccaggggccgccgccgccgccgagctccgcggggctcgggagccggccccggcgaggaggcgcggaaccatggccgatgggggcgagggcgaagacgagatccagttcctgcgaactgatgatgaagtggttctgcagtgcaccgcaaccatccacaaagaacaacagaagctatgcttggcagcagaaggatttggcaacagactttgtttcttggagtccacttccaattccaagaatgtgcccccagacctctccatctgcacctttgtgctggagcagtccctctctgtccgggcgctgcaggagatgctggctaacaccgtggagaaatcagaagggcaagttgatgtggaaaaatggaaattcatgatgaagactgctcaaggtggtggtcatcgaacactcctctacggacatgccatattgctgcgccattcctatagtggcatgtatctgtgctgcctgtccacctcccggtcttcaactgataagctggcttttgatgttggcttgcaagaggacaccacaggggaggcttgttggtggaccatacaccctgcctctaagcagcgatcagaaggagaaaaagtacgagttggagatgacctcatcttagttagcgtgtcctctgaaaggtacttgcacttgtcttatggcaacggcagcttacacgtggatgccgctttccagcagactctctggagcgtggccccaatcagctcaggaagtgaggcagcccaagggtatctcattggtggtgatgtcctcaggttgctgcatggacacatggacgagtgtctcactgtcccttcaggagaacatggtgaagagcagcggagaactgttcattatgaaggtggcgctgtgtctgttcatgcacgttccctttggagactagagacgctaagagttgcgtggagtggaagccacataagatggggacagccattccgactacgccatgtcacaacaggaaaatacttgagtctcatggaagacaaaaaccttctactcatggacaaagagaaagctgatgtaaaatcaacagcatttaccttccggtcttccaaggaaaaattggatgtaggggtgagaaaagaagtagatggcatgggaacatctgaaataaaatacggtgactcagtatgctatatacaacatgtagacacaggcctatggcttacttaccagtctgtggacgtgaaatccgtgagaatgggatctatacaacgtaaggctattatgcatcatgaaggccacatggatgatggcataagtttgtcgagatcccagcatgaagaatcacgcacagcccgagttatccggagcacagtcttccttttcaatagatttataaggggccttgatgctctcagcaagaaagcgaaggcttccacagtcgatttgcctatagagtccgtaagcctaagtctgcaggatctcattggctacttccaccccccagatgagcatttagagcatgaagacaaacagaacagactacgagccctgaagaatcggcaaaatctcttccaggaagagggaatgatcaacctcgtgcttgagtgcatagaccgtttgcacgtctacagcagtgcagcacactttgctgatgttgctgggcgagaagcaggagagtcttggaaatccattctgaattctctgtatgagttgctggcggctctaattagaggaaatcgtaaaaactgtgctcaattttctggctccctcgactggttgatcagcagattggaaagactggaagcttcttcaggcattctggaagttttacactgtgttttagtagaaagtccagaagctctaaatattattaaagaaggacatattaaatctattatctcacttttagacaaacatggaagaaatcacaaggttctggatgtcttgtgctcactctgtgtttgccacggggttgcagtccgttctaaccagcatctcatctgtgacaatctcctaccaggaagagacttgttattgcagacacgtcttgtgaaccatgtcagcagcatgagacccaatatttttctgggcgtcagtgaaggttctgctcagtataagaaatggtactatgaattgatggtggaccacacagagccctttgtgacagctgaagcaactcacctgcgagtgggctgggcttccactgaaggatattctccctaccctggagggggcgaagagtggggtggaaatggtgttggagatgatctcttctcctatggatttgatggccttcatctctggtcaggttgtattgctcgtactgtaagctcaccaaaccaacatctgttaagaactgatgatgtcatcagttgctgtttagatctgagtgccccaagcatctcgttccgaattaatggacaacctgttcaaggaatgtttgagaatttcaacatcgatggcctcttctttccagtcgttagtttctctgcaggaataaaagtacgctttctgcttggagggcgacatggagaattcaaatttcttcctccacctgggtatgctccttgttatgaagctgttctgccaaaagaaaagttgaaagtggaacacagccgagagtacaagcaagaaagaacttacacacgcgacctgctgggccccacagtttccctgacgcaagctgccttcacacccatccctgtggataccagccagatcgtgttgcctcctcatctagaaagaataagagaaaaactggcagagaatatccatgaactctgggttatgaataaaattgagcttggctggcagtatggtccggttagagatgacaacaagagacaacacccatgcctggtggagttctccaagctgcctgaacaggagcgcaattacaacttacaaatgtcgcttgagaccctgaagactttgttggcattaggatgtcatgtgggtatatcagatgaacatgctgaagacaaggtgaaaaaaatgaagctacccaagaattaccagctgacaagtggatacaagcctgcccctatggacctgagctttatcaaactcaccccatcgcaagaagcaatggtggacaagttggcagaaaatgcacataatgtgtgggcgcgggatcgaatccggcagggctggacttatggcatccaacaggacgtaaagaacagaagaaatcctcgccttgttccctacactcctctggatgaccgaaccaagaaatccaacaaggacagcctccgcgaggctgtgcgcacgctgctggggtacggctacaacttggaagcaccagatcaagatcatgcagccagagccgaagtgtgcagcggcaccggggaaaggttccgaatcttccgtgccgagaagacctatgcagtgaaggccggacggtggtattttgaatttgagacggtcactgctggagacatgagggttggttggagtcgtcctggttgtcaaccggatcaggagcttggctcagatgaacgtgcctttgcctttgatggcttcaaggcccagcggtggcatcagggcaatgaacactatgggcgctcttggcaagcaggcgatgtcgtggggtgtatggttgacatgaacgaacacaccatgatgttcacactgaatggtgaaatccttcttgatgattcaggctcagaactggctttcaaggactttgatgttggcgatggattcatacctgtgtgtagccttggagtggctcaagtgggtaggatgaactttggaaaggatgtcagcaccttgaaatatttcaccatctgtggcttacaagagggctatgaaccatttgccgttaatacaaacagggatattaccatgtggctgagcaagaggcttcctcagtttcttcaagttccatcaaaccatgaacatatagaggtgaccagaatagacggcaccatagacagttccccatgtttaaaggtcactcagaagtcttttggttctcagaacagcaacactgatatcatgttttatcgcctgagcatgccgatcgagtgcgcggaggtcttctccaagacggtggctggagggctccctggggctggcctttttgggcccaagaatgacttggaagattatgatgctgattctgactttgaggttctgatgaagacagctcatggccatctagtgcccgatcgtgttgacaaagacaaagaagctactaaaccagagtttaacaaccacaaagattatgcccaggaaaagccctctcgtctgaaacaaagatttttgcttagaagaacaaagccagattacagcacaagccattctgcaagactcaccgaagatgtccttgctgatgatcgggatgactatgatttcttgatgcaaacgtccacgtactattactcagtgagaatctttcctggacaagaacctgctaatgtctgggtgggctggattacatcagatttccatcagtatgacacaggctttgacttggacagagttcgcacagtaacagttactctaggagatgaaaaaggaaaagtgcatgaaagcatcaaacgcagcaactgctatatggtatgtgcgggtgagagcatgagccccgggcaaggacgcaacaataatggactggagattggctgtgtggtggatgctgccagcgggctgctcacattcattgccaatggcaaggaactgagcacatactatcaggtggaaccgagtacaaaattatttcctgcggtttttgcacaagctacaagtcccaatgttttccagtttgagttgggaagaataaagaatgtgatgcctctctcggcgggattattcaagagtgagcacaagaaccccgtgccgcagtgccccccgcgcctccacgtgcagttcctgtcacacgtcctgtggagcagaatgcccaaccagtttttgaaggtagatgtgtctcgaataagtgaacgccaaggctggttggtgcagtgtttggatcctctgcagttcatgtctcttcatatccctgaggaaaacagatctgttgacatcttagagttgacagagcaggaggaattgctgaaatttcactatcacactctccggctctactcagccgtctgtgctcttgggaaccaccgggtggcccatgccctgtgcagccatgtggatgaacctcagctcctctatgccattgagaacaagtacatgcctggtttgctgcgtgctggctactatgacctgctgattgacatccacctgagctcctatgccactgccaggctcatgatgaacaacgagtacattgtccccatgacggaggagacgaagagcatcaccctgttccctgatgagaacaaaaaacacggccttccagggatcggcctcagcacctccctcaggccacggatgcagttttcctcccccagttttgtaagcattagtaatgaatgttaccagtacagtccagagttcccactggacatcctcaagtccaaaaccatacagatgctgacagaagctgttaaagagggcagtcttcatgcccgggacccagttggagggactactgaattcctctttgtacctctcatcaagcttttctataccctgctgatcatgggcatctttcacaacgaggacttgaagcacatcttgcagttgattgagcccagtgtgtttaaagaagctgccactccggaggaggagagtgacacgctggagaaagagctcagtgtggacgatgcaaagctgcaaggagctggtgaggaagaagccaaggggggcaagcggcccaaggaaggcctgctccaaatgaaactgccagagccagttaaattgcagatgtgcctactgcttcagtacctctgtgactgccaggtccggcaccggatagaagccattgtagccttttcagatgattttgtggctaagctccaagacaatcaacgtttccgatacaacgaagtcatgcaagccttaaacatgtcagctgcactcacagccaggaagacaaaggaatttagatcaccacctcaagaacagatcaatatgcttctcaattttaaggatgacaaaagtgaatgtccatgtccagaagaaattcgtgaccaactattggatttccatgaagatttgatgacacattgtggaattgagctggatgaagatgggtctctggatggaaacagtgatttaacaattagagggcgtctgctatccctggtagaaaaggtgacatatctgaagaagaagcaagcagaaaaaccagttgagagtgactccaaaaagtcctccactctgcagcagctgatttctgagaccatggtccgatgggctcaggagtctgtcattgaagaccccgagctggtgagggccatgtttgtgttgctccatcggcagtatgacggcattgggggtcttgttcgggccctgccaaagacctacacgataaatggtgtgtccgtggaggacaccatcaacctgctggcatcccttggtcagattcggtccctgctgagtgtgagaatgggcaaagaagaagagaagctcatgattcgtggattaggggatattatgaataacaaagtgttttaccagcaccctaatctcatgagggcactggggatgcacgagactgtgatggaggtcatggtgaacgtccttggaggtggagagtccaaggaaatcacctttcccaagatggtggccaactgttgccgttttctctgttacttctgtcgtataagtaggcagaatcaaaaagctatgtttgatcatctcagttatttactggaaaacagcagtgttggtcttgcctccccagctatgagaggttcaacaccactggatgtggctgcagcttcggtgatggataataatgaactagcattagctctgcgtgagccggatctagaaaaggtagttcgttatttggctggttgtggactgcaaagttgccagatgctggtgtctaagggctatccagacattgggtggaacccagttgaaggagagagatatcttgactttctcagatttgctgtcttctgtaatggggagagtgtggaggaaaatgcaaatgtcgtggtgagattgctcattcggaggcctgagtgttttggtcctgctttgagaggagaaggtgggaatgggcttcttgcagcaatggaagaagccatcaaaatcgccgaggatccttcccgagatggtccctcaccaaatagcggatccagtaaaacacttgacacagaggaggaggaagatgacactatccacatggggaacgcgatcatgaccttctattcagctttgattgacctcttgggacgctgtgctcctgagatgcatttgattcatgccgggaagggagaagccatcagaattaggtccattttgagatccctcattcccctgggagatttggtgggcgttatcagcatcgcttttcagatgccaacaatagccaaagatgggaatgtggtggaacctgacatgtctgcggggttttgcccagatcacaaggcagccatggttttattccttgacagggtctatgggattgaggttcaagacttcctcctccatcttcttgaggttggctttctgccagatctccgggcggctgcttctttagatacggcagctttgagtgctacagacatggccttggccctcaatcggtacctttgcacagccgtcttgccattgttaacaagatgtgctcctctctttgctggcacagagcaccacgcttctctcattgactcattacttcatactgtgtatagactttctaagggctgttcacttaccaaagctcagcgggattccatagaagtttgtttactctctatttgtggacaactgagaccttctatgatgcagcacttactcagaagattagtatttgatgtcccattattaaatgaacacgcaaagatgcctcttaaactgctgacaaatcattatgaaagatgctggaaatattactgcctgcctggagggtggggaaactttggtgctgcctcagaagaagaacttcatttatcaagaaagttgttctggggcatttttgatgccctgtctcaaaagaaatatgaacaagaacttttcaaactggcactgccttgcctgagtgcagttgcgggagctttgcctccagactacatggagtcaaattatgtcagtatgatggaaaaacagtcatcaatggattctgaagggaactttaacccacaacctgttgatacctcaaatattacaattcctgagaaattggaatacttcattaacaaatatgcagaacactcccatgacaaatggtcaatggacaagttggcaaatggatggatttatggagaaatatattcagactcttctaaggttcagccattaatgaagccatataagctattgtctgaaaaggaaaaagaaatttatcgctggccaatcaaagaatctttaaaaactatgctggctaggactatgagaactgaaagaactcgggagggagacagcatggccctttacaaccggactcgtcgtatttctcagacaagccaggtttctgtggacgctgcccatggttacagtccccgggccattgacatgagcaatgttacactatctagagacctgcatgctatggcagaaatgatggctgaaaactaccataatatatgggcaaagaaaaagaaaatggagttggagtccaaaggaggaggaaaccatcctctgctggtgccctatgatacactgacagccaaagagaaagccaaggatagagaaaaagcacaggacatcctcaagttcttgcagatcaatggatatgctgtatccagaggatttaaggacctggaactggacacgccttctattgagaaacgatttgcctatagtttcctccaacaactcattcgctatgtggatgaagcccatcagtatatcctggagtttgatggtggcagcagaggcaaaggagaacatttcccttatgaacaagaaatcaagttctttgcaaaagtcgttcttcctttaattgatcagtatttcaaaaaccatcgtttatacttcttatctgcagcaagcagacctctctgctctggaggacatgcttccaacaaagagaaagaaatggtgactagcctattctgcaaacttggagttcttgtcaggcataggatttcactatttggcaatgatgcaacatcaattgtcaactgtcttcatattttgggtcagactttggatgcaaggacagtgatgaagactggcctggagagtgttaaaagtgcactcagagcttttctggacaacgctgcagaggatctggagaagaccatggaaaacctcaagcagggccagttcactcacacccgaaaccagcccaaaggggttactcagattatcaattacaccacagtggccctgctgccaatgctgtcgtcattatttgaacatattggccagcatcagttcggagaagacctaatattggaagatgtccaggtgtcttgttatagaattctgactagcttatatgctttgggaaccagcaagagtatttacgtggagaggcaacgttctgcattaggagaatgtctagctgcctttgctggtgcttttcctgtagcatttttggaaactcatctggacaaacataatatttactccatctacaataccaagtcttcacgagaaagagcagctctcagtttgccaactaatgtggaagatgtttgtccaaacattccgtctttggagaaactcatggaagaaatcgtggaattagccgagtccggcattcgctacactcaaatgccacatgtcatggaagtcatactgcccatgctttgcagctacatgtctcgttggtgggagcatggacctgagaacaatccagaacgggccgagatgtgctgcacagccctgaactcagagcacatgaacacacttctagggaacatattgaaaatcatatataataacttggggattgatgagggagcctggatgaagaggctagcagtgttttcccagcctataataaataaagtgaaacctcagctcttgaaaactcatttcttgccgttaatggagaaactcaagaaaaaggcagctacggtggtgtctgaggaagaccacctgaaagctgaggccaggggggacatgtcggaggcagaactcctcatcctagatgagttcaccacactggccagagatctctatgccttctaccctctcttgattagatttgtggactataacagggcaaagtggctaaaggagcctaacccagaagcagaggagctcttccgcatggtggctgaagtgtttatctactggtcgaagtcccataatttcaaaagagaagagcagaacttcgttgtacagaatgaaatcaacaatatgtctttccttattactgataccaagtcaaagatgtcaaaggcagctgtttctgatcaggaaaggaagaaaatgaagcgcaaaggagatcggtattccatgcagacctctctgattgtagcagctctgaagcggttactgcccattgggttgaacatctgtgcccctggggaccaggagctcattgctctggccaaaaatcgatttagcctgaaagatactgaggatgaagtacgagatataatccgcagcaatattcatttacaaggcaagttggaggatcctgctattagatggcaaatggctctttacaaagacttaccaaacaggactgatgatacctcagatccagagaagacggtagaaagagtattggatatagcaaatgtgctttttcatcttgaacagaagtctaaacgtgtgggtcgaagacattactgtctggtggaacatcctcagagatctaaaaaggctgtatggcataaactactgtctaagcagaggaaaagggctgttgtagcctgcttccggatggcccccttatataatctgccaaggcatcgggctgtcaatctctttcttcagggatatgaaaagtcttggattgaaacagaagaacattactttgaagataaactgatagaagatttagcaaaacctggggctgaacctccagaagaagatgaaggcactaagagagttgatcctctacatcagctgatccttctgtttagtcggacagctttaacagagaaatgcaaactggaggaagattttttatatatggcctatgcagatattatggcaaagagttgtcatgatgaggaagatgacgatggtgaagaggaagtgaagagttttgaagaaaaagaaatggaaaagcaaaagcttctataccagcaagcccgactccacgatcgtggcgcggctgagatggtgctacagacaatcagtgccagcaaaggtgaaactggaccaatggtagcagctactctgaaacttggaattgctattttaaatggtgggaactccacagtacagcagaaaatgcttgactacctcaaggagaaaaaggatgtgggcttctttcagagcctggccggcctgatgcagtcatgtagtgtccttgacctaaatgcatttgagcgacaaaacaaagctgaaggtcttgggatggtgacagaggaaggatcaggagaaaaggttctgcaggacgatgagttcacctgtgacctcttccgattcctgcaactactctgtgagggacacaactcagattttcagaattatctgagaactcagactggcaataatacaactgtcaacataattatctccactgtagactacctactgagagttcaggaatcaattagtgacttttattggtattactctgggaaagatgttattgatgaacaaggacaacggaatttctccaaagctatccaagtggcaaaacaagtctttaacactcttacagagtatattcagggtccttgcactgggaatcaacagagtttggcacacagcaggctgtgggatgctgtggtcggctttcttcatgtgtttgcccatatgcagatgaagctgtcgcaggattccagtcaaattgagctattaaaagaattaatggatctgcagaaggatatggtggtcatgttgctgtccatgttagaaggtaatgttgttaatggaacgattggcaaacagatggtggatatgcttgtggaatcttccaacaacgtggagatgattctcaaattttttgacatgttcttaaaactaaaggatttgacgtcgtctgatacttttaaagaatatgaccccgatggcaagggagtcattttcaagagggacttccacaaagcgatggagagccataagcactacacgcagtcagaaacggaatttcttttgtcttgtgcggagacggatgagaatgaaaccctcgactacgaagagttcgtcaaacgcttccacgaacctgcgaaggacatcggcttcaacgtcgccgtccttctgacaaacctctctgagcacatgcccaacgatacccgacttcagacttttctggaattagcagagagcgtcctgaattatttccagccctttctgggccgcatcgaaatcatgggaagcgccaaacgcatcgagagggtctattttgaaatcagtgagtccagccgaacccagtgggagaagccccaggtcaaggagtccaaaagacagttcatatttgacgtggtcaacgaaggcggagagaaagagaagatggaactctttgtgaacttctgcgaggacaccatctttgaaatgcagctggcggctcagatctcggagtcggacttgaacgagaggtcagcgaataaggaagaaagcgagaaggagaggccggaagagcaggggccgaggatggctttcttctccattctgacggtcaggtcggccctgtttgcgctcaggtacaatatcttgacccttatgcgaatgctcagtctgaagagcctgaagaagcagatgaaaaaagtaaaaaagatgaccgtgaaggacatggtcacggccttcttttcatcctactggagtattttcatgaccctcttgcacttcgtggccagcgttttcagaggctttttccgcatcatttgcagcctgctgcttgggggaagcctcgtcgaaggtgctaaaaagatcaaagttgcagaactgttagccaacatgccagaccccactcaggatgaggttagaggagatggggaggagggagagaggaaacccctggaagccgccctgccctccgaggatctgaccgacttaaaggagctgacagaggaaagtgaccttctttcggacatctttggcctggatctgaagagagaaggaggacagtacaaactgattcctcataatccaaatgctgggctcagtgacctcatgagcaacccagtccccatgcctgaggtgcaggaaaaatttcaggaacagaaggcaaaagaagaagaaaaggaagaaaaagaagaaaccaaatctgaacctgaaaaagccgagggagaagatggagaaaaagaagagaaagccaaggaagacaagggcaaacaaaagttgaggcagcttcacacacacagatacggagaaccagaagtgccagagtcagcattctggaagaaaatcatagcatatcaacagaaacttctaaactattttgctcgcaacttttacaacatgagaatgttagccttatttgtcgcatttgctatcaatttcatcttgctcttttataaggtctccacttcttctgtggttgaaggaaaggagctccccacgagaagttcaagtgaaaatgccaaagtgacaagcctggacagcagctcccatagaatcatcgcagttcactatgtactagaggagagcagcggctacatggagcccacgttgcgtatcttagctattctgcacacggtcatttctttcttctgcatcattggatactactgcttgaaagtcccattggttatttttaagcgagaaaaggaagtggcacggaaattggaatttgatgggctttatattacagaacagccttcagaagatgatattaaaggccagtgggatagactcgtaatcaacacacagtcatttcccaacaactactgggacaaatttgttaaaagaaaggttatggataaatatggagagttctacggccgagacagaatcagtgaattacttggcatggacaaggcagctctggacttcagtgatgccagagaaaagaagaagccaaagaaagacagctccttatcagctgtactgaactccattgatgtgaagtatcagatgtggaaactaggagtcgttttcactgacaactccttcctctacctagcctggtatatgactatgtctgttcttggacactataacaactttttttttgccgctcaccttctcgacattgctatgggattcaagacattaagaaccatcttgtcctcagtaactcacaatggcaaacagctcgtattaaccgttggcttattagctgttgttgtatacctatacactgtggtggcattcaattttttccgaaaattctacaataaaagtgaagatggtgatacaccagatatgaaatgtgacgatatgctaacatgctatatgttccacatgtatgttggagttcgtgctggaggagggatcggggatgaaatcgaagacccagcaggagatgaatatgagatctatcgaatcatctttgacatcactttcttcttctttgttattgtcattctcttggccataatacaaggtctaattattgatgcttttggagaactaagagaccaacaggaacaagtcaaagaagacatggagaccaaatgcttcatctgtgggataggcaatgattacttcgacacagtgccacatggctttgaaacccacactttacaggagcacaacttggctaattacttgttttttctgatgtatcttataaacaaagatgaaacagaacacacaggacaggaatcttatgtctggaagatgtatcaagaaaggtgttgggaatttttcccagcaggggattgcttccggaaacagtatgaagaccagctaaattaaactcagacccaatcacctctaaaaaccaaaaccctacccctctctctccctctctcaatttctctgctctcttggaaacattttgctgattttgtgaattgccagcgatgtgtgttttctgggagcatcgaagctctgtttcggaagagctgtttcctccccccaccttttgtatttactttgagactaaagactgaagaataatctaaattcatactcagacaaaaaaaggaattctggaaagaaaaccattctggacactgtcataacacacatagatagattttcttctgagactcccggagtcttctcgagctacgagaccttcacagagacacgtggcagccacactcacccagcctctttatttcaccatcctggaaggaaactgtctgtctaatggtcacagagcactgtagcacttaacagattgccatggacaccagttgcgaagggaaatagtgccttactatatgtgggttgagctatgcagaagatacgtgcatgaaaaaacatctttattttctttatgtcgacctttcttttcttagattgattttgtgaggttttttttttttcctttagtcttttctttagtgggggagggtaagaaaagcagtttgcacttaaaaagaaaaaaaaaaaacgggtggtgtgtctcaggacaaaaggaggctcttctcattcagctaaattcacatttgcc

SEQ ID NO: 79387 - DNA, 14139 bp, Homo sapiens
  sig_peptide (11219)...(11354): this location contains the signal peptide sequence, MLRSLLVYMLFLLVTLLASYGDASCHGHAYRLQSAIKQELHSRAF, Run with SignalP
gcactgcagcgccagcgtccgagcgggcggccgagctcccggagcggcctggccccgagccccgagcgggcgtcgctcagcagcaggtcgcggccgcgcagccccatccagccccgcgcccgccatgccgtccgcgggccccgcctgagctgcggtctccgcgcgcgggcgggcctggggacggcggggccatgcgcgcgctgccctaacgatgccgcccgccgcgcccgcccgcctggcgctggccctgggcctgggcctgtggctcggggcgctggcggggggccccgggcgcggctgcgggccctgcgagcccccctgcctctgcggcccagcgcccggcgccgcctgccgcgtcaactgctcgggccgcgggctgcggacgctcggtcccgcgctgcgcatccccgcggacgccacagcgctagacgtctcccacaacctgctccgggcgctggacgttgggctcctggcgaacctctcggcgctggcagagctggatataagcaacaacaagatttctacgttagaagaaggaatatttgctaatttatttaatttaagtgaaataaacctgagtgggaacccgtttgagtgtgactgtggcctggcgtggctgccgcgatgggcggaggagcagcaggtgcgggtggtgcagcccgaggcagccacgtgtgctgggcctggctccctggctggccagcctctgcttggcatccccttgctggacagtggctgtggtgaggagtatgtcgcctgcctccctgacaacagctcaggcaccgtggcagcagtgtccttttcagctgcccacgaaggcctgcttcagccagaggcctgcagcgccttctgcttctccaccggccagggcctcgcagccctctcggagcagggctggtgcctgtgtggggcggcccagccctccagtgcctcctttgcctgcctgtccctctgctccggccccccgccacctcctgcccccacctgtaggggccccaccctcctccagcacgtcttccctgcctccccaggggccaccctggtggggccccacggacctctggcctctggccagctagcagccttccacatcgctgccccgctccctgtcactgccacacgctgggacttcggagacggctccgccgaggtggatgccgctgggccggctgcctcgcatcgctatgtgctgcctgggcgctatcacgtgacggccgtgctggccctgggggccggctcagccctgctggggacagacgtgcaggtggaagcggcacctgccgccctggagctcgtgtgcccgtcctcggtgcagagtgacgagagccttgacctcagcatccagaaccgcggtggttcaggcctggaggccgcctacagcatcgtggccctgggcgaggagccggcccgagcggtgcacccgctctgcccctcggacacggagatcttccctggcaacgggcactgctaccgcctggtggtggagaaggcggcctggctgcaggcgcaggagcagtgtcaggcctgggccggggccgccctggcaatggtggacagtcccgccgtgcagcgcttcctggtctcccgggtcaccaggagcctagacgtgtggatcggcttctcgactgtgcagggggtggaggtgggcccagcgccgcagggcgaggccttcagcctggagagctgccagaactggctgcccggggagccacacccagccacagccgagcactgcgtccggctcgggcccaccgggtggtgtaacaccgacctgtgctcagcgccgcacagctacgtctgcgagctgcagcccggaggcccagtgcaggatgccgagaacctcctcgtgggagcgcccagtggggacctgcagggacccctgacgcctctggcacagcaggacggcctctcagccccgcacgagcccgtggaggtcatggtattcccgggcctgcgtctgagccgtgaagccttcctcaccacggccgaatttgggacccaggagctccggcggcccgcccagctgcggctgcaggtgtaccggctcctcagcacagcagggaccccggagaacggcagcgagcctgagagcaggtccccggacaacaggacccagctggcccccgcgtgcatgccagggggacgctggtgccctggagccaacatctgcttgccgctggacgcctcttgccacccccaggcctgcgccaatggctgcacgtcagggccagggctacccggggccccctatgcgctatggagagagttcctcttctccgttgccgcggggccccccgcgcagtactcggtcaccctccacggccaggatgtcctcatgctccctggtgacctcgttggcttgcagcacgacgctggccctggcgccctcctgcactgctcgccggctcccggccaccctggtccccaggccccgtacctctccgccaacgcctcgtcatggctgccccacttgccagcccagctggagggcacttgggcctgccctgcctgtgccctgcggctgcttgcagccacggaacagctcaccgtgctgctgggcttgaggcccaaccctggactgcggatgcctgggcgctatgaggtccgggcagaggtgggcaatggcgtgtccaggcacaacctctcctgcagctttgacgtggtctccccagtggctgggctgcgggtcatctaccctgccccccgcgacggccgcctctacgtgcccaccaacggctcagccttggtgctccaggtggactctggtgccaacgccacggccacggctcgctggcctgggggcagtgtcagcgcccgctttgagaatgtctgccctgccctggtggccaccttcgtgcccggctgcccctgggagaccaacgataccctgttctcagtggtagcactgccgtggctcagtgagggggagcacgtggtggacgtggtggtggaaaacagcgccagccgggccaacctcagcctgcgggtgacggcggaggagcccatctgtggcctccgcgccacgcccagccccgaggcccgtgtactgcagggagtcctagtgaggtacagccccgtggtggaggccggctcggacatggtcttccggtggaccatcaacgacaagcagtccctgaccttccagaacgtggtcttcaatgtcatttatcagagcgcggcggtcttcaagctctcactgacggcctccaaccacgtgagcaacgtcaccgtgaactacaacgtaaccgtggagcggatgaacaggatgcagggtctgcaggtctccacagtgccggccgtgctgtcccccaatgccacgctagcactgacggcgggcgtgctggtggactcggccgtggaggtggccttcctgtggaactttggggatggggagcaggccctccaccagttccagcctccgtacaacgagtccttcccggttccagacccctcggtggcccaggtgctggtggagcacaatgtcatgcacacctacgctgccccaggtgagtacctcctgaccgtgctggcatctaatgccttcgagaacctgacgcagcaggtgcctgtgagcgtgcgcgcctccctgccctccgtggctgtgggtgtgagtgacggcgtcctggtggccggccggcccgtcaccttctacccgcacccgctgccctcgcctgggggtgttctttacacgtgggacttcggggacggctcccctgtcctgacccagagccagccggctgccaaccacacctatgcctcgaggggcacctaccacgtgcgcctggaggtcaacaacacggtgagcggtgcggcggcccaggcggatgtgcgcgtctttgaggagctccgcggactcagcgtggacatgagcctggccgtggagcagggcgcccccgtggtggtcagcgccgcggtgcagacgggcgacaacatcacgtggaccttcgacatgggggacggcaccgtgctgtcgggcccggaggcaacagtggagcatgtgtacctgcgggcacagaactgcacagtgaccgtgggtgcggccagccccgccggccacctggcccggagcctgcacgtgctggtcttcgtcctggaggtgctgcgcgttgaacccgccgcctgcatccccacgcagcctgacgcgcggctcacggcctacgtcaccgggaacccggcccactacctcttcgactggaccttcggggatggctcctccaacacgaccgtgcgggggtgcccgacggtgacacacaacttcacgcggagcggcacgttccccctggcgctggtgctgtccagccgcgtgaacagggcgcattacttcaccagcatctgcgtggagccagaggtgggcaacgtcaccctgcagccagagaggcagtttgtgcagctcggggacgaggcctggctggtggcatgtgcctggcccccgttcccctaccgctacacctgggactttggcaccgaggaagccgcccccacccgtgccaggggccctgaggtgacgttcatctaccgagacccaggctcctatcttgtgacagtcaccgcgtccaacaacatctctgctgccaatgactcagccctggtggaggtgcaggagcccgtgctggtcaccagcatcaaggtcaatggctcccttgggctggagctgcagcagccgtacctgttctctgctgtgggccgtgggcgccccgccagctacctgtgggatctgggggacggtgggtggctcgagggtccggaggtcacccacgcttacaacagcacaggtgacttcaccgttagggtggccggctggaatgaggtgagccgcagcgaggcctggctcaatgtgacggtgaagcggcgcgtgcgggggctcgtcgtcaatgcaagccgcacggtggtgcccctgaatgggagcgtgagcttcagcacgtcgctggaggccggcagtgatgtgcgctattcctgggtgctctgtgaccgctgcacgcccatccctgggggtcctaccatctcttacaccttccgctccgtgggcaccttcaatatcatcgtcacggctgagaacgaggtgggctccgcccaggacagcatcttcgtctatgtcctgcagctcatagaggggctgcaggtggtgggcggtggccgctacttccccaccaaccacacggtacagctgcaggccgtggttagggatggcaccaacgtctcctacagctggactgcctggagggacaggggcccggccctggccggcagcggcaaaggcttctcgctcaccgtgctcgaggccggcacctaccatgtgcagctgcgggccaccaacatgctgggcagcgcctgggccgactgcaccatggacttcgtggagcctgtggggtggctgatggtgaccgcctccccgaacccagctgccgtcaacacaagcgtcaccctcagtgccgagctggctggtggcagtggtgtcgtatacacttggtccttggaggaggggctgagctgggagacctccgagccatttaccacccatagcttccccacacccggcctgcacttggtcaccatgacggcagggaacccgctgggctcagccaacgccaccgtggaagtggatgtgcaggtgcctgtgagtggcctcagcatcagggccagcgagcccggaggcagcttcgtggcggccgggtcctctgtgcccttttgggggcagctggccacgggcaccaatgtgagctggtgctgggctgtgcccggcggcagcagcaagcgtggccctcatgtcaccatggtcttcccggatgctggcaccttctccatccggctcaatgcctccaacgcagtcagctgggtctcagccacgtacaacctcacggcggaggagcccatcgtgggcctggtgctgtgggccagcagcaaggtggtggcgcccgggcagctggtccattttcagatcctgctggctgccggctcagctgtcaccttccgcctgcaggtcggcggggccaaccccgaggtgctccccgggccccgtttctcccacagcttcccccgcgtcggagaccacgtggtgagcgtgcggggcaaaaaccacgtgagctgggcccaggcgcaggtgcgcatcgtggtgctggaggccgtgagtgggctgcagatgcccaactgctgcgagcctggcatcgccacgggcactgagaggaacttcacagcccgcgtgcagcgcggctctcgggtcgcctacgcctggtacttctcgctgcagaaggtccagggcgactcgctggtcatcctgtcgggccgcgacgtcacctacacgcccgtggccgcggggctgttggagatccaggtgcgcgccttcaacgccctgggcagtgagaaccgcacgctggtgctggaggttcaggacgccgtccagtatgtggccctgcagagcggcccctgcttcaccaaccgctcggcgcagtttgaggccgccaccagccccagcccccggcgtgtggcctaccactgggactttggggatgggtcgccagggcaggacacagatgagcccagggccgagcactcctacctgaggcctggggactaccgcgtgcaggtgaacgcctccaacctggtgagcttcttcgtggcgcaggccacggtgaccgtccaggtgctggcctgccgggagccggaggtggacgtggtcctgcccctgcaggtgctgatgcggcgatcacagcgcaactacttggaggcccacgttgacctgcgcgactgcgtcacctaccagactgagtaccgctgggaggtgtatcgcaccgccagctgccagcggccggggcgcccagcgcgtgtggccctgcccggcgtggacgtgagccggcctcggctggtgctgccgcggctggcgctgcctgtggggcactactgctttgtgtttgtcgtgtcatttggggacacgccactgacacagagcatccaggccaatgtgacggtggcccccgagcgcctggtgcccatcattgagggtggctcataccgcgtgtggtcagacacacgggacctggtgctggatgggagcgagtcctacgaccccaacctggaggacggcgaccagacgccgctcagtttccactgggcctgtgtggcttcgacacagagggaggctggcgggtgtgcgctgaactttgggccccgcgggagcagcacggtcaccattccacgggagcggctggcggctggcgtggagtacaccttcagcctgaccgtgtggaaggccggccgcaaggaggaggccaccaaccagacggtgctgatccggagtggccgggtgcccattgtgtccttggagtgtgtgtcctgcaaggcacaggccgtgtacgaagtgagccgcagctcctacgtgtacttggagggccgctgcctcaattgcagcagcggctccaagcgagggcggtgggctgcacgtacgttcagcaacaagacgctggtgctggatgagaccaccacatccacgggcagtgcaggcatgcgactggtgctgcggcggggcgtgctgcgggacggcgagggatacaccttcacgctcacggtgctgggccgctctggcgaggaggagggctgcgcctccatccgcctgtcccccaaccgcccgccgctggggggctcttgccgcctcttcccactgggcgctgtgcacgccctcaccaccaaggtgcacttcgaatgcacgggctggcatgacgcggaggatgctggcgccccgctggtgtacgccctgctgctgcggcgctgtcgccagggccactgcgaggagttctgtgtctacaagggcagcctctccagctacggagccgtgctgcccccgggtttcaggccacacttcgaggtgggcctggccgtggtggtgcaggaccagctgggagccgctgtggtcgccctcaacaggtctttggccatcaccctcccagagcccaacggcagcgcaacggggctcacagtctggctgcacgggctcaccgctagtgtgctcccagggctgctgcggcaggccgatccccagcacgtcatcgagtactcgttggccctggtcaccgtgctgaacgagtacgagcgggccctggacgtggcggcagagcccaagcacgagcggcagcaccgagcccagatacgcaagaacatcacggagactctggtgtccctgagggtccacactgtggatgacatccagcagatcgctgctgcgctggcccagtgcatggggcccagcagggagctcgtatgccgctcgtgcctgaagcagacgctgcacaagctggaggccatgatgctcatcctgcaggcagagaccaccgcgggcaccgtgacgcccaccgccatcggagacagcatcctcaacatcacaggagacctcatccacctggccagctcggacgtgcgggcaccacagccctcagagctgggagccgagtcaccatctcggatggtggcgtcccaggcctacaacctgacctctgccctcatgcgcatcctcatgcgctcccgcgtgctcaacgaggagcccctgacgctggcgggcgaggagatcgtggcccagggcaagcgctcggacccgcggagcctgctgtgctatggcggcgccccagggcctggctgccacttctccatccccgaggctttcagcggggccctggccaacctcagtgacgtggtgcagctcatctttctggtggactccaatccctttccctttggctatatcagcaactacaccgtctccaccaaggtggcctcgatggcattccagacacaggccggcgcccagatccccatcgagcggctggcctcagagcgcgccatcaccgtgaaggtgcccaacaactcggactgggctgcccggggccaccgcagctccgccaactccgccaactccgttgtggtccagccccaggcctccgtcggtgctgtggtcaccctggacagcagcaaccctgcggccgggctgcatctgcagctcaactatacgctgctggacggccactacctgtctgaggaacctgagccctacctggcagtctacctacactcggagccccggcccaatgagcacaactgctcggctagcaggaggatccgcccagagtcactccagggtgctgaccaccggccctacaccttcttcatttccccggggagcagagacccagcggggagttaccatctgaacctctccagccacttccgctggtcggcgctgcaggtgtccgtgggcctgtacacgtccctgtgccagtacttcagcgaggaggacatggtgtggcggacagaggggctgctgcccctggaggagacctcgccccgccaggccgtctgcctcacccgccacctcaccgccttcggcaccagcctcttcgtgcccccaagccatatccgctttgtgtttcctgagccaacagcggatgtaaactacatcgtcatgctgacatgtgctgtgtgcctggtgacctacatggtcatggccgccatcctgcacaagctggaccagttggatgccagccggggccgcgccatccccttctgtgggcagcggggccgcttcaagtacgagatcctcgtcaagacaggctggggccggggctcaggtaccacggcccacgtgggcatcatgctgtatggggtggacagccggagcggccaccggcacctggacggcgacagagccttccaccgcaacagtctggacatcttccagatcgccaccccgcacagcctgggtagcatgtggaagatccgagtgtggcacgacaacaaagggctcagccctgcctggttcctgcagcacatcatcgtcagggacctgcagacggcacgcagcaccttcttcctggtcaatgactggctttcggtggagacggaggccaacgggggcctggtggagaaggaggtgctggccgcgagtcacgcagcccttttgcgcttccggcgcctgctggtggctgagctgcagcgtggcttctttgacaagcacatctggctctccatatgggaccggccgcctcgtagccgtttcactcgcatccagagggccacctgctgcgttctcctcatctgcctcttcctgggcgccaacgccgtgtggtacggggctgttggcgactctgcctacagcacggggcatgtgtccaggctgagcccgctgagcgtcgacacagtcgctgttggcctggtgtccagcgtggttgtctatcccgtctacctggccatcctttttctcttccggatgtcccggagcaaggtggctgggagcccgagccccacacctgccgggcagcaggtgctggacatcgacagctgcctggactcgtccgtgctggacagctccttcctcacgttctcaggcctccacgctgagcaggcctttgttggacagatgaagagtgacttgtttctggatgattctaagagtctggtgtgctggccctccggcgagggaacgctcagttggccggacctgctcagtgacccgtccattgtgggtagcaatctgcggcagctggcacggggccaggcgggccatgggctgggcccagaggaggacggcttctccctggccagcccctactcgcctgccaaatccttctcagcatcagatgaagacctgatccagcaggtccttgccgagggggtcagcagcccagcccctacccaagacacccacatggaaacggacctgctcagcagcctgtccagcactcctggggagaagacagagacgctggcgctgcagaggctgggggagctggggccacccagcccaggcctgaactgggaacagccccaggcagcgaggctgtccaggacaggactggtggagggtctgcggaagcgcctgctgccggcctggtgtgcctccctggcccacgggctcagcctgctcctggtggctgtggctgtggctgtctcagggtgggtgggtgcgagcttccccccgggcgtgagtgttgcgtggctcctgtccagcagcgccagcttcctggcctcattcctcggctgggagccactgaaggtcttgctggaagccctgtacttctcactggtggccaagcggctgcacccggatgaagatgacaccctggtagagagcccggctgtgacgcctgtgagcgcacgtgtgccccgcgtacggccaccccacggctttgcactcttcctggccaaggaagaagcccgcaaggtcaagaggctacatggcatgctgcggagcctcctggtgtacatgctttttctgctggtgaccctgctggccagctatggggatgcctcatgccatgggcacgcctaccgtctgcaaagcgccatcaagcaggagctgcacagccgggccttcctggccatcacgcggtctgaggagctctggccatggatggcccacgtgctgctgccctacgtccacgggaaccagtccagcccagagctggggcccccacggctgcggcaggtgcggctgcaggaagcactctacccagaccctcccggccccagggtccacacgtgctcggccgcaggaggcttcagcaccagcgattacgacgttggctgggagagtcctcacaatggctcggggacgtgggcctattcagcgccggatctgctgggggcatggtcctggggctcctgtgccgtgtatgacagcgggggctacgtgcaggagctgggcctgagcctggaggagagccgcgaccggctgcgcttcctgcagctgcacaactggctggacaacaggagccgcgctgtgttcctggagctcacgcgctacagcccggccgtggggctgcacgccgccgtcacgctgcgcctcgagttcccggcggccggccgcgccctggccgccctcagcgtccgcccctttgcgctgcgccgcctcagcgcgggcctctcgctgcctctgctcacctcggtgtgcctgctgctgttcgccgtgcacttcgccgtggccgaggcccgtacttggcacagggaagggcgctggcgcgtgctgcggctcggagcctgggcgcggtggctgctggtggcgctgacggcggccacggcactggtacgcctcgcccagctgggtgccgctgaccgccagtggacccgtttcgtgcgcggccgcccgcgccgcttcactagcttcgaccaggtggcgcacgtgagctccgcagcccgtggcctggcggcctcgctgctcttcctgcttttggtcaaggctgcccagcacgtacgcttcgtgcgccagtggtccgtctttggcaagacattatgccgagctctgccagagctcctgggggtcaccttgggcctggtggtgctcggggtagcctacgcccagctggccatcctgctcgtgtcttcctgtgtggactccctctggagcgtggcccaggccctgttggtgctgtgccctgggactgggctctctaccctgtgtcctgccgagtcctggcacctgtcacccctgctgtgtgtggggctctgggcactgcggctgtggggcgccctacggctgggggctgttattctccgctggcgctaccacgccttgcgtggagagctgtaccggccggcctgggagccccaggactacgagatggtggagttgttcctgcgcaggctgcgcctctggatgggcctcagcaaggtcaaggagttccgccacaaagtccgctttgaagggatggagccgctgccctctcgctcctccaggggctccaaggtatccccggatgtgcccccacccagcgctggctccgatgcctcgcacccctccacctcctccagccagctggatgggctgagcgtgagcctgggccggctggggacaaggtgtgagcctgagccctcccgcctccaagccgtgttcgaggccctgctcacccagtttgaccgactcaaccaggccacagaggacgtctaccagctggagcagcagctgcacagcctgcaaggccgcaggagcagccgggcgcccgccggatcttcccgtggcccatccccgggcctgcggccagcactgcccagccgccttgcccgggccagtcggggtgtggacctggccactggccccagcaggacaccccttcgggccaagaacaaggtccaccccagcagcacttagtcctccttcctggcgggggtgggccgtggagtcggagtggacaccgctcagtattactttctgccgctgtcaaggccgagggccaggcagaatggctgcacgtaggttccccagagagcaggcaggggcatctgtctgtctgtgggcttcagcactttaaagaggctgtgtggccaaccaggacccagggtcccctccccagctcccttgggaaggacacagcagtattggacggtttctagcctctgagatgctaatttatttccccgagtcctcaggtacagcgggctgtgcccggccccaccccctgggcagatgtcccccactgctaaggctgctggcttcagggagggttagcctgcaccgccgccaccctgcccctaagttattacctctccagttcctaccgtactccctgcaccgtctcactgtgtgtctcgtgtcagtaatttatatggtgttaaaatgtgtatatttttgtatgtcactattttcactagggctgaggggcctgcgcccagagctggcctcccccaacacctgctgcgcttggtaggtgtggtggcgttatggcagcccggctgctgcttggatgcgagcttggccttgggccggtgctgggggcacagctgtctgccaggcactctcatcaccccagaggccttgtcatcctcccttgccccaggccaggtagcaagagagcagcgcccaggcctgctggcatcaggtctgggcaagtagcaggactaggcatgtcagaggaccccagggtggttagaggaaaagactcctcctgggggctggctcccagggtggaggaaggtgactgtgtgtgtgtgtgtgtgcgcgcgcgacgcgcgagtgtgctgtatggcccaggcagcctcaaggccctcggagctggctgtgcctgcttctgtgtaccacttctgtgggcatggccgcttctagagcctcgacacccccccaacccccgcaccaagcagacaaagtcaataaaagagctgtctgactgc

SEQ ID NO: 79388 - DNA, 11795 bp, Homo sapiens
  sig_peptide (34)...(169): this location contains the signal peptide sequence, MAWKTLPIYLLLLLSVFVIQQVSSQDLSSCAGRCGEGYSRDATCN, Run with SignalP
gcggccgcgactattcggtacctgaaaacaacgatggcatggaaaacacttcccatttacctgttgttgctgctgtctgttttcgtgattcagcaagtttcatctcaagatttatcaagctgtgcagggagatgtggggaagggtattctagagatgccacctgcaactgtgattataactgtcaacactacatggagtgctgccctgatttcaagagagtctgcactgcggagctttcctgtaaaggccgctgctttgagtccttcgagagagggagggagtgtgactgcgacgcccaatgtaagaagtatgacaagtgctgtcccgattatgagagtttctgtgcagaagtgcataatcccacatcaccaccatcttcaaagaaagcacctccaccttcaggagcatctcaaaccatcaaatcaacaaccaaacgttcacccaaaccaccaaacaagaagaagactaagaaagttatagaatcagaggaaataacagaagaacattctgtttctgaaaatcaagagtcctcctcctcctcctcctcttcctcttcttcttcaacaatttggaaaatcaagtcttccaaaaattcagctgctaatagagaattacagaagaaactcaaagtaaaagataacaagaagaacagaactaaaaagaaacctacccccaaaccaccagttgtagatgaagctggaagtggattggacaatggtgacttcaaggtcacaactcctgacacgtctaccacccaacacaataaagtcagcacatctcccaagatcacaacagcaaaaccaataaatcccagacccagtcttccacctaattctgatacatctaaagagacgtctttgacagtgaataaagagacaacagttgaaactaaagaaactactacaacaaataaacagacttcaactgatggaaaagagaagactacttccgctaaagagacacaaagtatagagaaaacatctgctaaagatttagcacccacatctaaagtgctggctaaacctacacccaaagctgaaactacaaccaaaggccctgctctcaccactcccaaggagcccacgcccaccactcccaaggagcctgcatctaccacacccaaagagcccacacctaccaccatcaagtctgcacccaccacccccaaggagcctgcacccaccaccaccaagtctgcacccaccactcccaaggagcctgcacccaccaccaccaaggagcctgcacccaccactcccaaggagcctgcacccaccaccaccaaggagcctgcacccaccaccaccaagtctgcacccaccactcccaaggagcctgcacccaccacccccaagaagcctgccccaactacccccaaggagcctgcacccaccactcccaaggagcctacacccaccactcccaaggagcctgcacccaccaccaaggagcctgcacccaccactcccaaagagcctgcacccactgcccccaagaagcctgccccaactacccccaaggagcctgcacccaccactcccaaggagcctgcacccaccaccaccaaggagccttcacccaccactcccaaggagcctgcacccaccaccaccaagtctgcacccaccactaccaaggagcctgcacccaccactaccaagtctgcacccaccactcccaaggagccttcacccaccaccaccaaggagcctgcacccaccactcccaaggagcctgcacccaccacccccaagaagcctgccccaactacccccaaggagcctgcacccaccactcccaaggaacctgcacccaccaccaccaagaagcctgcacccaccgctcccaaagagcctgccccaactacccccaaggagactgcacccaccacccccaagaagctcacgcccaccacccccgagaagctcgcacccaccacccctgagaagcccgcacccaccacccctgaggagctcgcacccaccacccctgaggagcccacacccaccacccctgaggagcctgctcccaccactcccaaggcagcggctcccaacacccctaaggagcctgctccaactacccctaaggagcctgctccaactacccctaaggagcctgctccaactacccctaaggagactgctccaactacccctaaagggactgctccaactaccctcaaggaacctgcacccactactcccaagaagcctgcccccaaggagcttgcacccaccaccaccaaggagcccacatccaccacctctgacaagcccgctccaactacccctaaggggactgctccaactacccctaaggagcctgctccaactacccctaaggagcctgctccaactacccctaaggggactgctccaactaccctcaaggaacctgcacccactactcccaagaagcctgcccccaaggagcttgcacccaccaccaccaaggggcccacatccaccacctctgacaagcctgctccaactacacctaaggagactgctccaactacccccaaggagcctgcacccactacccccaagaagcctgctccaactactcctgagacacctcctccaaccacttcagaggtctctactccaactaccaccaaggagcctaccactatccacaaaagccctgatgaatcaactcctgagctttctgcagaacccacaccaaaagctcttgaaaacagtcccaaggaacctggtgtacctacaactaagactcctgcagcgactaaacctgaaatgactacaacagctaaagacaagacaacagaaagagacttacgtactacacctgaaactacaactgctgcacctaagatgacaaaagagacagcaactacaacagaaaaaactaccgaatccaaaataacagctacaaccacacaagtaacatctaccacaactcaagataccacaccattcaaaattactactcttaaaacaactactcttgcacccaaagtaactacaacaaaaaagacaattactaccactgagattatgaacaaacctgaagaaacagctaaaccaaaagacagagctactaattctaaagcgacaactcctaaacctcaaaagccaaccaaagcacccaaaaaacccacttctaccaaaaagccaaaaacaatgcctagagtgagaaaaccaaagacgacaccaactccccgcaagatgacatcaacaatgccagaattgaaccctacctcaagaatagcagaagccatgctccaaaccaccaccagacctaaccaaactccaaactccaaactagttgaagtaaatccaaagagtgaagatgcaggtggtgctgaaggagaaacacctcatatgcttctcaggccccatgtgttcatgcctgaagttactcccgacatggattacttaccgagagtacccaatcaaggcattatcatcaatcccatgctttccgatgagaccaatatatgcaatggtaagccagtagatggactgactactttgcgcaatgggacattagttgcattccgaggtcattatttctggatgctaagtccattcagtccaccatctccagctcgcagaattactgaagtttggggtattccttcccccattgatactgtttttactaggtgcaactgtgaaggaaaaactttcttctttaaggattctcagtactggcgttttaccaatgatataaaagatgcagggtaccccaaaccaattttcaaaggatttggaggactaactggacaaatagtggcagcgctttcaacagctaaatataagaactggcctgaatctgtgtattttttcaagagaggtggcagcattcagcagtatatttataaacaggaacctgtacagaagtgccctggaagaaggcctgctctaaattatccagtgtatggagaaaccgacacaggttaggaagacgtcgctttgaacgtgcctataggaccctcctcaaacacacaccatcagaattcaatattcacctgccagactggcttatcaagacaaaggtgtccttcataatgaagttaaagtgagtatactgtggagaggacttccaaatgtggttacctcagctatatcactgcccaacatcagaaaacctgacggctatgattactatgccttttctaaagatcaatactataacattgatgtgcctagtagaacagcaagagcaattactactcgttctgggcagaccttatccaaagtctggtacaactgtccttagactgatgagcaaaggaggagtcaactaatgaagaaatgaataataaattttgacactgaaaaacattttattaataaagaatattgacatgagtataccagtttatatataaaaatgtttttaaacttgacaatcattacactaaaacagatttgataatcttattcacagttgttattgtttacagaccatttaattaatatttcctctgtttattcctcctctccctcccattgcatggctcacacctctctgtctgttaaactgacgaccacggacaccttgtctcaatgttgtctgaagtcttactcgtctgaaaggctttggttgactactactagtatctacagatgagctagaaggaggatcctggctggtggaggggagatctgactcatcagatgcttgaaccggctcttcttcctgctggctatcaatttctaggcctgcttctgaactaataccttcagattctgcctccacaaatacttcatctccatcatcacctgttgctgtttcatttgttgtagataaagtgccagtggatgtagtcaccattggaacagattgagaggcatgttccgaagcatcagaggtggtgctctcagtaaatacagtcactggggctgctacttgtagtggagtagtgggaacacttcggccacctgactcttcttcatgagctaggaacaggggtgtttcatacattcctaaacctccttgagaagcaagctggccaagatcagagtgactagaacttgtttgtggcatatcttcaggtggcccaaaccggaatctagggacaccagcaacctgcggcgaatgaattgcttcagcaaatccatcagtacgatgtggcaccacaagagttggagtacttggaactgttctgtcttcatcatcaaaaaaatgctgttgcatgccacctattcctggagtcaactgaaggccacgtcctacagactgccttcgggtcatctgaattctctgaactggtggtcccaactcctgaggtggggcatgaatggtcagtcttgggggaagtggatgtggtgggcgtctcggtgactgaggtgctcgaggggcctgtctttcagatgctgatgatggctgttgttctctagaaacctcctgagaaaaagaagattctgcagcacctgtatttccttcaccactgttttgagaatcagcagctctgtgattaccttcacctccacccatactttcttctgtttctgtacctggatcagtcccatcaccaccctcagcatcatcagcttcataaccatcattgccatcggcactaccagttccttcattactatcttcaccctcatctcccatccctgtgtcatcttcatcatcatcatcatcttcctcatcctcttcttcatcatcactgtcaattacaatgacatcatctcctttgccttgaccatcctgggatgaagttgtcgtctgctgatctgattgaagtggcccaagatctatttgtagagactgagaggtttcttcactgtcttccataggtgtataatctccctgggtaactccttctccaatggaatcttgagaatcctggttgtatacctgagtctctacctctccatcagtactttcttctgccataacttcttcctcagttcctacaggtgtgacacttttcaacttctttggaagaggcatttccactgtatcatcagagacttggtctgatgcttctatggtactatcctcttcctcttcacgtgtacgctttggcaaagaagaactgggggtagccgaaactgtgccaaatactgctgtggaagtagaaggccgctcaactggtgaactctgaacaacctctactatgtttgaagataactcttgattggcaggctcaatctgaggatgactctgttgagtgggttgcacaaaagctgtagcctgtgtttgttgctgaacagttaaaataggttgagagatagaaggctggacattaggactagtagaacgaacggatccacttgtgcttccaaaaactggaacatgttccacaggcccttctgactgcatagcttcctgtgattccacttgtgtagtgggcatcactgtagctgttggggtagtagtgggatttgtaacagttgcaggtgtaaccattgggcggatactagccctgggtgttgacttatttccagccatagctgcagctgtcactttacttggagtagacacaacaggagttggcttgatattggctgttggtgggtctgatgtgctggcaattcctctttcaccagaagctggagttgttttcaatgtgatctgtctctgctgttcagggaccttattagaaggttcttgaggctcatctctctgctcaaggtgtctctcttgatgctccctgagttctctttccaagcgactaattcgaccttcatattgggactttagcgcagtaatgcgaacatccaattcatctttctgctgatctaaggctccattcctttgtttaagctcctcattttctttagttagctgatcttttacaccagctaagtgtgcaatttttgactttgctgctacaatagcctttctggttttttcttccttttcagttatctgttgtcggagctgctcctcctgtgtggttctatcttgaagatcctgacgaagtcgtgaaagttcagactgaagttgcacagtctgttcctggagatttcttgcttctgtctctttttcagataatgtcttctgcagattctctacttgactttcaagtgattttgattttgtttcagcttggttgagcgtttctttgagttcctgcatttcctggactgaaacatgctgctcctgatggtctccagaggactgagccgatgtctccataaccttatcctgttgtgctttaagttcttcatattgagtcttgtacctacgtccaattttcttaacttgagtaatagttttgactttttcttggatatcaattattttggcatctaagtccttctggatggtttccttttcagttcttactttatttagatcttccttcagactctgaattaagttctggttgttagtcaaagatgcatttgatcttgcaatttcagctttaagtctaccaatttcttctgtcaattgttgaatacgcttagtatgaacttccttttcagaaaggagcttccgatattcttctgtatctggatctttctgttgacttactagatgctggttacgtgctttccaacgtttgacatcctcttctaagagcttcttctctgcctgcaacataccgcttttctcactcagctcagcatttgcttcttgtaagggtaaaatatctaactccagtttcctcacctttgcttgcatttgctgtagatcctgttctagtctctccttctcttctcttagcattttattggtctccataactacattcattgtttcagttttcttcatcagttcttcatgctgagccattgtttttgcagttacctggactttctccctttcagcatttagactatcttgcagttcctgcagctctctttctaaaagttcaaccctttgtcgataacgcagactctcaacctgagccacctcaaacctagtttcagcaatttctttttctcgtcgtataaatctgagaatttccaaaatttgttcttgagattttccttcttcactgagagatacattcagtggaccttgtacaccttccttcacagaggcaacgaccttgtcacttaatttttcgatctgatcatgaagtaatctgttttgtttctccagatcttcacagcgacatacacatttggaaacttcatcctttaacattctctctctttcctcccaagatgctttacactccaacaactgtgattctgctttctgtgttgtttcttccaaatgctgacggactgatgccatttttgaaacctgctccttcgcagcttgtagagcttcaacatcagcagcatgcagcatcaattctctctcatacttattctgagcttccacagctattttagcttgttcctgacagtcacgtctggcttgctgctcattacttaaagctgtgcttgctctctgaagagcttcttgtacttcattctgaacactagaaagtgttttcttcaattcagataactgttgttccatgctctctatggctcttcttttatcatcctgaagttcttgtttttccttctctacttccatcaacttcttttccaactgtgtctgaaattcagctgactcttttaaacgaacttcaatattcttacgcacttcttctgtcacctgtttttccttgttcagggattcttctaaactagtaaccattgcttgatattgttccacattgctcgtacttgttttgagtctctcctttaagtcattcacctgcccttctgtctgtcttagctgactcacaagatcatccacatcttctttgttgctaggctgacctttaccagttctctgtgaagactgagaagcaacttggacttccatattactgaggtgctgtttcaatgtggcaatttctttttgagcattttttaatagttcttttgtgttaagatgaagatttgtctctgtatccagttgtctctttgtatctaaaagttgaacatctagatttctagtaagtgtatgcctttgttccacctcattttccaacttcttctttagatgagagatctcatgttccagtttttctatctggctactaagcctttgtttggtttctgtttcagatcgctccagtattccctgaattgtttgcagattagttagcagtaagttttgccccctttgttcagctaacaaagactctctttgctgagaaagacgaacttcagacaatttaagcatttccttttccttcttcaaattttctgctcttacttctgcgacagctagcttctcatttgctcctctcaaatcttgagtcatcgtattgataatctgttcttgcttttgagttgtggcagtgagtttctgatttctctcatgaagtgatgttatttctcgacgatatccttcaacattatcttgcagcatttcataacgtttagaagcaaaatctagctgggtagaaattttggtattttgtgatcgcaaatctgtaacttgttcttgaagtttctcaagctgctcattttgtattttttcattttctgctttttcttttttgtagttctcaaaaatttcctgcaactgtttaagggcagccttagcctctatagcctctgttgattcaataacaggtactggagcaggagtggaaacagtctgtgatgtacttggacgttttggagttgatgcaagagaaacatcatctaagcttgaagcatgtaatggaatggcaactcctgttgtttgtgacaataaaatacggtacatatcacgctgacgaactatggaatcaacaagctgcatttgatgctgtcgtgatttgcggagttgttctagttcagtaagggcactctcaagtttgagctgaagctcagtgattttggatgaagttgtttcttgttcttctctttctctggtttccccaagctctctaagggccactaagagacgttgattttgttgttgaagctcttcaatatttctgtaagatactagatgctgtgatattacctcagatgaactacttatatcagcagagcttacttcctcatcacgaattacgtggttaccccttgcttcttcaagttccatcaaaagcactctaatctgttgtgaaagatcttttacttgtatttccattcttcgattatctctctcaagtacagatgattgcttgttggctttatcagtgtcctcctgcaatcgctgaatctccttcatagcttgttcaagcttaacagataaacttgctacagctttctgtgcacgttcatattcctcacgctggcgtttcaaaattggtgctttggcttccacttctttcactatttcatctaggtacttattaattcttttgttctctagtttctccaaaagcaactgatcctgagtttccacataagcattatagagctcagttagtttcatcccaggtttcactatcttagctacagctgctgcagtaggagacatggcggcaagctcttcttcagacaatatggctcctttacgttttgtggcagaaagaaggtcatttgcattctctaattccttctccaatctccctattttctcaagcatttctttttccatttgatctttggattgctccacctctagaagatgatcttgtattgctttgttggcttcaccagcttctttcaaaagtttgtgtagttcctctactgcccgggttagttcattgctctttgcttctgagtcatcagcggcactcttgtacaaattagaaagttttatgtgggcatttaattcattgtggaatttctcttccatactggcctgttgttccttggcctcttttaatttggtcaacagatcctccacatgcttttgaagatgttcatttgatgtttttaagccattcatttgttcttccagtctagaaacctcttcttttttattttcaagattacatttaagctctagaatctcattccctttttctcttccaagagccagaagttcatcagttttggttttcaactctgtattcagccatgtattctgactatgtagcaattccttttcttgctccaagcgtttttctcgatacttaacagaaacatcagaagcttgaagttcatccaattttaactgaagttcaccctttgttgtattgctttctttaagtttttcattcagacgtttaacatcctctgttaagtattcaagttcttgagatagtctctcattgggttctaattaagtctcttttctcagcttctaattcttcctttgttcttgtaaattggctctgaatgggcaatattgcgatcctgaggcaatttcaagttctttgtttttctcaggtaggggccttcagttgattgttgagtttctctagctcaagccgcaagctttgacactctcgggtttcattcacaagtctctcctgactgtgggacaacctcttttctatttcaaaatactgttgttcgctctccaccttaaatttctcatgccgccccttcaggccatcgatctcggattgccgatcagcaaggaacttttcaagtttgttctggacagacttgggcagcttgttcagctccgtgcgctccaggacttgctgcaacaccgccgccatgtcggtggggccagggaccccagtggcagcggccgacggggtagaagcggagaagaaaggcgaagaccagcaggacccagacgcctgggccgccgcctctatcacctcgctcggtggctcgcgcgcgcccgcccgccggagactcccgcggcgggaccctgggaaatcgagtccaccctcagcggcagcgtttcagcaacagcacctcaccgcccgcgaccgaagtgcgcgcgcagccgttggaagctacgaaccctgggaacccgagctcagaggctatccctgatcctcttgcgc

SEQ ID NO: 79389 - DNA, 15789 bp, Homo sapiens
  sig_peptide (7698)...(7563): this location contains the signal peptide sequence, MESELTWQIAWRLLLLPVVAATVVAVAAVRAGTQDRVLADRKLGS, Run with SignalP
atggacagccagaacctggctggtgaggataaagattcacaaccggcagctgatggacctgcagcctctgaggacccaagtgccactgagtcagacctgcccaacccacatgtgggagaggtctctgtccttagttctgggagtcccaggcttcaggagactcctcaggactgcagtgggggtccggtgcggcgttgtgctctctgtaactgcggggagcccgctctacacgggcagcgggagctacggcgctttgagttgccatttgattggccccggtgtccagtggtgtcccctggggggagcccagggcccaatgaggcagtgctgcccagtgaggacctatcacagattggtttccctgagggccttacacctgcccacctaggagaacctggagggtcctgctgggctcaccattggtgtgctgcatggtcggcaggcgtatgggggcaggagggcccacaactatgtggtgtggacaaggccatcttctcagggatctcacagcgctgctcccactgcaccaggctcggtgcctccatcccttgccgctcacctggatgtccacggctttaccacttcccctgcgcgactgccagcggttccttcctatccatgaaaacactgcagctgctatgcccagagcacagtgagggggctgcatatctggaggaggctcgctgtgcagtgtgtgaggggccaggggagctgtgtgacctgttcttctgtaccagctgtgggcatcactatcacggggcctgcctggacactgctctgactgcccgcaaacgtgctggctggcagtgccctgaatgcaaagtgtgccaagcctgcaggaaacctgggaatgactctaagatgttggtttgcgagacgtgtgacaaaggataccatactttctgcctaaaaccacccatggaggaactgcctgctcactcttggaagtgcaaggcgtgccgggtgtgccgggcctgtggggcgggctcagcagaactgaatcccaactcggagtggtttgagaactactctctctgtcaccgctgtcacaaagcccagggaggtcagactatccgctccgttgctgagcagcataccccggtgtgtagcagattttcacccccagagcctggcgatacccccactgacgagcccgatgctctgtacgttgcatgccaagggcagccaaagggtgggcacgtgacctctatgcaacccaaggaaccagggcccctgcaatgtgaagccaaaccactagggaaagcaggggtccaacttgagccccagttggaggcccccctaaacgaggagatgccactgctgcccccacctgaggagtcacccctgtccccaccacctgaggaatcacccacgtccccaccacctgaggcatcacgcctgtcgccaccacctgaggaattgcccgcatccccacttcctgaggcattgcacctgtcccggccgctggaggaatcgcccctctctccgccgcctgaggagtctcctctgtctcccccacctgaatcatcacctttttctccactggaggagtcgcccttgtctccaccggaagagtcacccccatctcctgcacttgagacgcctctatccccaccacctgaagcatcgcccctgtccccaccatttgaagaatctcctttgtccccgccacctgaggaattgcccacttccccgccacctgaagcatctcgcctgtctccaccacctgaggagtcacccatgtcccctccacctgaagagtcacccatgtctccaccaccggaggcatctcgtctgttcccaccatttgaagagtctcctctgtcccctccacctgaggagtctcccctttccccaccacctgaggcatcacgcctgtccccaccacctgaggactcgcctatgtccccaccacctgaagaatcacctatgtcccccccacctgaggtatcgcgcctatcccccctgcctgtggtgtcacgcctgtctccaccgcctgaggaatctcccttgtccccaccggccctgtctcctttgggggagttagagtacccctttggtgccaaaggggacagtgaccctgagtcaccgttggctgcccccatcctggagacacccatcagccctccaccagaagctaactgcactgaccctgagcctgtcccccctatgatccttcccccatctccaggctccccagtggggccggcttctcccatcctgatggagccccttcctcctcagtgttcgccactccttcagcattccctggttccccaaaactcccctccttcccagtgctctcctcctgccctaccactgtccgttccctccccgttgagtcccatagggaaggtagtgggggtctcagatgaggctgagctgcacgagatggagactgagaaagtttcagaacctgaatgcccagccttggaacccagtgccaccagtcctctcccttccccaatgggggacctttcctgccccgcccccagccctgccccagccctggatgacttctctggcctaggggaagacacagcccctctggatgggattgatgctccgggttcacagccagagcctggacagacccctggcagtttggctagtgaacttaaaggctcccctgtgctcctggaccccgaggagctggcccctgtgacccctatggaggtctaccccgaatgcaagcagacagcagggcggggctcaccatgtgaagaacaggaagagccacgtgcaccggtggcccccacaccacccactctcatcaaatccgacatcgttaacgagatctctaatctgagccagggtgatgccagtgccagttttcctggctcagagcccctcctgggctctccagacccggaggggggtggctccctgtccatggagttgggggtctctacggatgttagtccagcccgagatgagggctccctacggctctgtactgactcactgccagagactgatgactcactattgtgcgatgctgggacagctatcagcggaggcaaagctgagggggagaaggggcggcggcgcagctccccagcccgttcccgcatcaaacagggtcgcagcagcagtttcccaggaagacgccggcctcgtggaggagcccatggagggcgtggtagaggacgggcccggctaaagtcaactgcttcttccattgagactctggtagttgctgacattgatagctctcccagtaaggaggaggaggaagaagatgatgacaccatgcagaataccgtggttctcttctccaacacagacaaatttgtcctaatgcaggacatgtgtgtggtatgtggcagctttggccggggggcagagggccacctccttgcctgttcgcagtgctctcagtgctatcacccttactgtgtcaacagcaagatcaccaaggtgatgctgctcaagggctggcgttgtgtggagtgtattgtgtgtgaggtgtgtggccaggcctccgacccctcacgcctgctgctctgtgatgactgtgatattagctaccacacatactgcctggaccccccactgctcaccgtccccaagggcggctggaagtgcaagtggtgtgtgtcctgtatgcagtgtggggctgcttcccctggcttccactgtgaatggcagaatagttacacacactgtgggccctgtgccagcctggtgacctgccctatctgtcatgctccttacgtagaagaggacctactaatccagtgccgccactgtgaacggtggatgcatgcaggctgtgagagcctcttcacagaggacgatgtggaccacgcacccgatgaaggctttgactgtgtctcctgccagccctacgtggtaaagcctgtggcgcctgttgcacctccagagctggtgcccatgaaggtgaaagagccagagccccagtactttcgcttcgaaggcgtgtggctgacagaaactggcatggccttgctgcgtaacctgaccatgtcaccactgcacaagcggcgccaacggcgaggacggcttggcctcccaggcgaggcaggattggagggttctgagccctcagatgcccttggccctgatgacaagaaggatggggacctggacaccgatgagctgctcaagggtgaaggtggtgtggagcacatggagtgcgaaattaaactggagggccccgtcagccctgatgtggagcctggcaaagaggagaccgaggaaagcaaaaaacgcaagcgtaaaccatatcggcctggcattggtggtttcatggtgcgacagcggaaatcccacacacgcacgaaaaaggggcctgctgcacaggcggaggtgttgagtggggatgggcagcccgacgaggtgatacctgctgacctgcctgcagagggcgccgtggagcagagcttagctgaaggggatgagaagaagaagcaacagcggcgagggcgcaagaggagcaaactggagggcatgttccctgcttacttgcaggaagccttctttgggaaggagctgctggacctgagccgtaaggccctttttgcagttggggtgggccggccaagctttggactagggaccccaaaagccaagggagatggaggctcagaaaggaaggaactccccacatcgcagaaaggagatgatggtccagatattgcagatgaagaatcccgtggcctcgagggcaaagccgatacaccaggacctgaggatgggggcgtgaaggcatccccagtgcccagtgaccctgagaagccaggcaccccaggtgaagggatgcttagctctgacttagacaggatttccacagaagaactgcccaagatggaatccaaggacctgcagcagctcttcaaggatgttctgggctctgaacgagaacagcatctgggttgtggaacccctggcctagaaggcagccgtacgccactgcagaggccctttcttcaaggtggactccctttgggcaatctgccctccagcagcccaatggactcctacccaggcctctgccagtccccgttcctggattctagggagcgcgggggcttctttagcccggaacccggtgagcccgacagcccctggacgggctcaggtggcaccacgccctccacccccacaacccccaccacggagggtgagggcgacggactctcctataaccagcggagtcttcagcgctgggagaaggatgaggagttgggccagctgtccaccatctcgcctgtgctctatgccaacattaattttcctaatctcaagcaagactacccagactggtcaagccgttgcaaacaaatcatgaagctctggagaaaggttccagcagctgacaaagccccctacctgcaaaaggccaaagataaccgggcagctcaccgcatcaacaaggtgcagaagcaggctgagagccagatcaacaagcagaccaaggtgggcgacatagcccgtaagactgaccgaccggccctacatctccgcattcccccgcagccaggggcactgggcagcccgccccccgctgctgcccccaccattttcattggcagccccactacccccgccggcttgtctacctctgcggacgggttcctgaagccgccggcgggctcggtgcctggccctgactcgcctggtgagctcttcctcaagctcccaccccaggtgcccgcccaagcgccttcgcaggacccctttggactggcccctgcctatcccctggagccccgcttccccacggcaccgcccacctatcccccctatcctagtcctacgggggcccctgcgcagcccccgatgctgggcgcctcatctcgtcctggggctggccagccaggggaattccacactaccccacctggcacccccagacaccagccctccacacctgacccgttcctcaaaccccgctgcccctcgctggataacttggctgtgcctgagagccctggggtagggggaggcaaagcttccgagcccctgctctcgcccccaccttttggggagtcccggaaggccctagaggtgaagaaggaagagcttggggcatcctctcctagctatgggcccccaaacctgggctttgttgactcaccctcctcaggcacccacctgggtggcctggagttaaagacacctgatgtcttcaaagcccccctgacccctcgggcatctcaggtagagccccagagcccgggcttgggcctaaggccccaggagccaccccctgcccaggctttggcaccttctcctccaagtcacccagacatctttcgccctggctcctacactgacccatatgctcagcccccattgactcctcggccccaacctccgccccctgagagctgctgtgctctgccccctcgctcactgccctccgaccctttctcccgagtgcctgtcagtcctcagtcccagtccagctcccagtctccactgacaccccggcctctgtctgctgaagctttttgcccatcacccgttacccctcgcttccagtcccctgacccttattctcgcccaccctcacgccctcagtcccgtgacccatttgccccattgcataagccaccccgaccccagccccctgaagttgcctttaaggctgggtctctagcccacacttcgctgggggctggggggttcccagcagccctgcccgcggggccagcaggtgagctccatgccaaggtcccaagtgggcagccccccaattttgtccggtcccctgggacgggtgcatttgtgggcaccccctctcccatgcgtttcactttccctcaggcagtaggggagccttccctaaagccccctgtccctcagcctggtctcccgccaccccatgggatcaacagccattttgggcccggccccaccttgggcaagcctcaaagcacaaactacacagtagccacagggaacttccacccatcgggcagccccctggggcccagcagcgggtccacaggggagagctatgggctgtccccactacgccctccgtcggttctgccaccacctgcacccgacggatccctcccctacctgtcccatggagcctcacagcgatcaggcatcacctctcctgtcgaaaagcgagaagacccagggactggaatgggtagctctttggcgacagctgaactcccaggtacccaggacccaggcatgtccggccttagccaaacagagctggagaagcaacggcagcgccagcggctacgagagctgctgattcggcagcagatccagcgcaacaccctgcggcaggagaaggaaacagctgcagcagctgcgggagcagtggggcctccaggcagctggggtgctgagcccagcagccctgcctttgagcagctgagtcgaggccagaccccctttgctgggacacaggacaagagcagccttgtggggttgcccccaagcaagctgagtggccccatcctggggccagggtccttccctagcgatgaccgactctcccggccacctccaccagccacgccttcctctatggatgtgaacagccggcaactggtaggaggctcccaagctttctatcagcgagcaccctatcctgggtccctgcccttacagcagcaacagcaacaactgtggcagcaacaacaggcaacagcagcaacctccatgcgatttgccatgtcagctcgctttccatcaactcctggacctgaacttggccgccaagccctaggttccccgttggcgggaatttccacccgtctgccaggccctggtgagccagtgcctggtccagctggtcctgcccagttcattgagctgcggcacaatgtacagaaaggactgggacctgggggcactccgtttcctggtcagggcccacctcagagaccccgtttttaccctgtaagtgaggacccccaccgactggctcctgaagggcttcggggcctggcggtatcaggtcttcccccacagaaaccctcagccccaccggcccctgaattgaacaacagtcttcatccaacaccccacaccaagggtcctaccctgccaactggtttggagctggtcaaccggcccccgtcgagcactgagcttggccgccccaatcctctggccctggaagctgggaagttgccctgtgaggatcccgagctggatgacgattttgatgcccacaaggccctagaggatgatgaagagcttgctcacctgggtctgggtgtggatgtggccaagggtgatgatgaacttggcaccttagaaaacctggagaccaatgacccccacttggatgacctgctcaatggagacgagtttgacctgctggcatatactgatcctgagctggacactggggacaagaaggatatcttcaatgagcacctgaggctggtagaatcggctaatgaggaggctgaacgggaggccctgctgcggggggtggagccaggacccttgggccctgaggagcgccctccccctgctgctgatgcctctgaaccccgcctggcatctgtgctccctgaggtgaagcccaaggtggaggagggtggacgccacccttctccttgccaattcaccattgctacccccaaggtagagcccgcacctgctgccaattcccttggcctggggctaaagccaggacagagcatgatgggcagccgggatacccggatgggcacagggccattttctagcagtgggcacacagctgagaaggcctcctttggggccacgggagggccaccagctcacctgctgacccccagcccactgagtggcccaggaggatcctccctgctggaaaagtttgagctcgagagtggggctttgaccttgcctggtggacctgcagcatctggggatgagctagacaagatggagagctcactggtagccagcgagttacccctgctcattgaggacctgttggagcatgagaagaaggagctgcagaagaagcagcagctttcagcacagttgcagcctgcccagcagcagcagcaacagcagcagcagcattccctactgcctgcaccaggccctgcccaggccatgtctttgccacatgagggctcttctcccagtttggctgggtcccaacagcagctttccctgggtcttgcagttgcccgacagccaggtttgccccagccactgatgcccacccagccaccagctcatgccctccagcaacgcctggctccatccatggctatggtgtccaatcaagggcatatgctaagtgggcagcatggagggcaggcaggcttggtaccccagcagagctcacagccagtgctatcacagaagcccatgggcaccatgccaccttccatgtgcatgaagccgcagcaattggcaatgcagcagcagctggcaaacagcttcttcccagatacagacctggacaaatttgctgcagaagatatcattggtcccattgcaaaggccaagatggtggctttgaaaggcatcaagaaagtgatggctcagggcagcattggggtggcacctggtatgaacagacagcaagtgtctctgctagcccagaggctctcggggggacctagcagtgatctgcagaaccatgtggcagctgggagtggccaggagcggagtgctggtgatccctcccagcctcgtcccaacccgcccacttttgctcagggagtgatcaatgaagctgaccagcggcagtatgaggagtggctgttccatacccagcagctcctacagatgcagctgaaggtgctagaggagcagattggtgtacaccgcaagtcccggaaggctctgtgtgccaagcagcgcactgccaaaaaagctggccgtgagttcccagaagctgatgctgagaagctcaagctggttacagagcagcagagcaagatccagaaacaactggatcaggtccggaaacagcagaaggagcacactaatctcatggcagaatatcggaacaagcagcagcaacaacagcagcagcagcagcaacaacagcaacagcactcagctgtgctggctctcagcccttcccagagtccccggctgctcaccaagctccctggtcagctgctccctggccatgggctgcagccaccacaggggcctccgggtgggcaagccggaggtcttcgcctgacccctgggggtatggcactacctggacagcctggtggccccttccttaatacagctctggcccaacagcagcaacagcaacattctggtggggctggatccctggctggcccttcagggggcttcttccctggcaaccttgctcttcgaagcctcggacctgattcaaggcttttacaggaaaggcagctgcagctgcagcagcaacgtatgcagctggcccagaaactgcagcagcagcagcagcagcaacagcagcagcagcaccttctaggacaggtggcaatccagcagcaacagcagcagggtcctggagtacagacaaaccaagctctgggtcccaagccccagggccttatgcctcccagcagccaccaaggcctcctggtccagcagctgtcccctcaaccaccccaggggccccagggcatgctgggccctgcccaggtggctgtgttgcagcagcagcaccctggagctttgggcccccagggccctcacagacaggtgcttatgacccagtcccgggtgctcagttccccccagctggcacagcagggtcagggccttatgggacacaggctggtcacagcccagcagcagcagcagcaacaacagcaccaacagcaagggtccatggcagggctgtcccatcttcagcaaagtctgatgtcacacagtgggcagcccaaactgagcgctcagcccatgggctctttacagcagcttcagcagcagcagcagctgcaacagcaacagcaacttcagcagcagcagcagcagcagctacaacagcaacagcaacttcagcagcaacagcttcaacagcagcaacagcagcagcagcttcaacaacagcagcagcaacagcttcaacagcagcaacagcagctacaacagcaacagcaacaacaacagcagcagtttcaacagcagcagcaacagcagcagatgggccttttaaaccagagtcgaactttactgtcccctcagcaacaacagcagcagcaagtggcacttggccctggcatgccagcaaagcctcttcaacacttttctagccctggagccctgggtccaaccctcctcctgacgggcaaggaacaaaacaccgtagacccagccgtttcttcagaggccactgaggggccctctacacatcagggagggccgttagcaataggaactacccctgagtcaatggccactgaaccaggagaggtaaagccctcactctctggggactcacaactcctgcttgtccaaccccagccccagcctcagcccagctctctgcagctgcagccacctctgaggcttccaggacaacagcagcagcaagttagcctgctccacacagcaggtggaggaagccatgggcagctaggcagtggatcatcttctgaggcctcatctgtgccccacctgctggctcagccctctgtttccttaggggatcagcctgggtccatgacccagaaccttctgggcccccaacagcccatgctagagcggcccatgcaaaataatacagggccacaacctcccaaaccaggacctgtcctccagtctgggcagggtctgcctggggttggaatcatgcctacggtgggtcagcttcgagcacagctccaaggagtcctggccaaaaacccacagctgcggcacttaagtcctcagcagcagcagcagctacaggcactcctcatgcagcggcagctgcagcagagtcaggcagtacgccagaccccaccctaccaggagcctgggacccagacctctcccctccagggcctcctgggctgccaacctcaacttgggggcttccctggaccacagacaggccccctccaggagctaggggcagggcctcgacctcagggcccaccccggctccctgccccaccaggagccttatctacaggaccagtccttggccctgtccatcccacacctccaccatccagccctcaagagccaaagagaccttcacaattaccttcccccagctcccagcttcccactgaggcccagctccctcccacccatccagggacccccaaacctcaggggccaaccttggagccgcctcctgggagggtctcacctgctgctgcccagcttgcagataccttgtttagcaagggtctgggaccttgggatcccccagacaacctagcagaaacccagaagccagagcagagcagcctggtacctgggcatctggaccaggtgaatggacaggtggtgcctgaggcatcccaactcagcatcaagcaggaacctcgggaagagccatgtgccctgggagcccagtcagtgaagagggaggccaatggggagccaataggggcaccaggaaccagcaaccacctcctgctggcaggccctcgctcagaagctgggcatctgctcttgcagaagctactccgggcaaagaatgtgcaactcagcactgggcaggggtccgaggggctgcgagctgagatcaacgggcacattgacagcaagctggctgggctggagcagaaactacagggtacccccagcaacaaggaggatgcagcagcaaggaagcctttgacaccgaagcccaagcgggtacagaaggcaagcgacaggttggtgagctcccgaaagaagctgcggaaggaggacggcgtcagggccagcgaggccttgctgaaacagctgaaacaggagctgtccctgctgcccctaacggagcctgctatcaccgccaattttagcctctttgccccctttggcagtggctgcccagtcaatgggcagagccagctgaggggggcctttggaagtggggcgctgcccactggccctgactactattcccagctgcttaccaagaataacctgagtaacccgccgacaccaccctcgtcgctgccccccaccccacccccatcggtgcagcagaagatggtgaatggcgtcaccccatctgaagagctgggggagcaccccaaggatgctgcctctgcccgggatagtgaaagggcactgagggatacttcagaggtgaagagtctagacctgctggctgccttgcctacaccccctcacaatcagactgaggatgtcaggatggagagtgatgaggatagcgattctcctgacagcattgtgccagcttcatcccctgagagcatcttgggggaggaggcccctcgtttccctcatctgggctcaggccggtgggagcaagaggaccgggccctctcccctgtcatccccctcattcctcgggacagcatcccagtcttcccagataccaaaccttatggggcccttggcctggaggtccctggaaagctgcctgtcacaacttgggaaaagggcaaaggaagtgaggtgtcagtcatgctcacagtctctgctgctgcagacaagaacctgaatggcgtgatggtggcagtggcggagctgctgagcatgaagatccccaactcctatgaggtgctgttcccagagagccccgcccggggaggcactgagccaaagaagggggaagctgagggtcctggtgggaaggaaaagggtctggaaggcaagagcccagacactggccctgattggctgaagcagtttgatgcagtgttggctggctataccctgaagaggcaactagacatcttgagcctcctgaaacaggagagccccgccccagagccacccactcagcacaggtatacctacaatgtctccaatctggatgtgcgacagctctcggccccacctcctgaagaaccctccccgcccccttcccccttggcaccttctcctgccagtccccctactgagcccttggttgaacttcccaccgaacccttggctgagccacccgtcccctcacctctgccactggcctcatcccctgaatcagcccgacccaagccccgtgcccggccccctgaagaaggtgaagatacccgtcctcctcgcctcaagaaatggaaaggagtgcgctggaagcggcttcggctgctgctgaccatccagaagggcagtggacggcaggaggatgagcgggaagtggcagagtttatggagcagcttggcacagccttgcgacctgacaaggtaccgcgagacatgcgtcgctgctgtttctgtcatgaggagggtgacggggccactgatgggcctgcccgtctgctgaacctggacctggacctgtgggtgcacctcaactgtgccctttggtccacggaggtgtatgagacccagggcggagcactgatgaatgtggaggttgccctgcaccgaggactgctaaccaagtgctccctgtgccagcgaactggtgccaccagcagctgcaatcgcatgcgttgccccaatgtctaccattttggttgtgccatccgcgccaagtgcatgttcttcaaggacaagaccatgctgtgtccaatgcataagatcaaggggccctgtgagcaagagctgagctcttttgctgtcttccggcgggtctacattgagcgggacgaggtgaagcaaatcgctagcatcattcagcggggagaacggctgcacatgttccgtgtgggggggcttgtgttccacgccatcggacagctgctgcctcaccagatggctgactttcatagtgccactgccctctatcccgtgggctacgaggccacgcgcatctattggagcctccgcaccaacaatcgtcgctgctgctatcgctgttctattggtgagaacaacgggcggccggagtttgtaatcaaagtcatcgagcagggcctggaggacctggtcttcactgacgcctctccccaggccgtgtggaatcgcatcattgagcctgtggctgccatgagaaaagaggctgacatgctgcgactcttccctgagtatctgaagggcgaggagctctttgggctgacggtgcatgccgtgcttcgcatagctgaatcactgcccggggtggagagctgtcaaaactatttattccgctatgggcgccacccccttatggagctgccactcatgatcaaccccactggctgtgcccgatcagagcctaaaatcctcacacactacaaacggccccataccctgaacagcaccagcatgtctaaggcatatcagagcaccttcacaggcgagaccaacaccccctacagcaagcagtttgtgcactccaagtcatctcagtaccggcggctgcgcaccgaatggaagaacaacgtgtacctggctcgctcccgtatccagggcctggggctctatgcagccaaggacctagaaaagcacacaatggttatcgagtacattggcaccatcattcggaacgaggtggccaaccggcgggagaaaatctacgaagagcagaatcgaggcatctacatgttccgaataaacaatgaacatgtgattgatgctacgttgaccggcggccctgccaggtacattaaccattcctgtgcccctaactgtgtggccgaagtcgtgacatttgacaaagaggacaaaatcatcatcatctccagccggcgaatccccaaaggagaggagctaacctatgactatcagtttgattttgaggacgatcagcacgagatcccctgccactgtggagcctggaattgtcggaaatggatgaactaa

SEQ ID NO: 79390 - DNA, 14503 bp, Homo sapiens
  sig_peptide (13595)...(13730): this location contains the signal peptide sequence, MFRFLGVLLGIAIRTGSPLSLNLAEPVWKQLAGMSLTIADLSEVD, Run with SignalP
atgccctctgaatctttctgtttggctgcccaggctcgcctcgactccaaatggttgaaaacagatatacagcttgcattcacaagagatgggctctgtggtctgtggaatgaaatggttaaagatggagaaattgtatacactggaacagaatcaacccagaacggagagctccctcctagaaaagatgatagtgtcgaaccaagtggaacaaagaaagaagatctgaatgacaaagagaaaaaagatgaagaagaaactcctgcacctatatatagggccaagtcaattctggacagctgggtatggggcaagcaaccagatgtgaatgaactgaaggagtgtctttctgtgctggttaaagagcagcaggccctggccgtccagtcagccaccaccaccctctcagccctgcgactcaagcagaggctggtgatcttggagcgctatttcattgccttgaatagaaccgtttttcaggagaatgtcaaagttaagtggaaaagcagcggtatttctctgcctcctgtggacaaaaaaagttcccggcctgcgggcaaaggtgtggaggggctcgccagagtgggatcccgagcggcgctgtcttttgcctttgccttcctgcgcagggcctggcgatcaggcgaggatgcggacctctgcagtgagctgttgcaggagtccctggacgccctgcgagcacttcccgaggcctcgctctttgacgagagcaccgtgtcctctgtgtggctggaggtggtggagagagcgaccaggttcctcaggtccgtcgtgacgggggatgttcacggaacgccagccaccaaagggccaggaagcatccccctgcaggaccagcacttggccctggccatcctgctggagctggctgtgcagagaggcacgctgagccaaatgttgtctgccatcctgttgttgcttcagctgtgggacagcggggcacaggagactgacaatgagcgttccgcccagggcaccagcgccccacttttgcccttgctgcaaaggttccagagcatcatttgcaggaaggatgcaccccactccgagggcgacatgcaccttttgtctggccctctgagccccaatgagagtttcctgaggtacctcacccttccacaagacaacgagcttgccattgatctgcgacaaacggcggttgttgtcatggcccatttagaccgtctggctacgccctgtatgcctccgctgtgtagctctccgacatctcataagggatcattgcaagaggtcataggttgggggttaataggatggaaatactatgccaatgtgattggtccaatccagtgcgaaggcctggccaacctgggagtcacacagattgcctgtgcagagaagcgtttcctgattctgtcacgcaatggccgcgtgtacacacaggcctataatagtgacacgctggccccacagctggtccaaggccttgcctccagaaacattgtaaaaattgctgcccattctgatggtcaccactacctagccttggctgctactggagaggtgtactcctggggctgtggggacggcggacggctgggccatggggacactgtgcctttggaggagcctaaggtgatctccgccttctctggaaagcaggccgggaagcacgtggtgcacatcgcttgcgggagcacttacagtgcggccatcactgccgagggggagctgtacacctggggccgcgggaactacggccggctgggccatggctccagtgaggacgaggccattccgatgctggtagccgggcttaaaggactgaaggtcatcgatgtggcgtgtgggagtggggatgctcaaaccctggctgtcactgagaacgggcaagtgtggtcttggggagatggtgactatgggaaattgggcagaggtggtagtgatggctgcaaaaccccaaagctgattgaaaagcttcaagacttggatgtggtcaaagtccgctgtggaagtcagttttccattgctttgacgaaagatggccaagtttattcatggggaaaaggtgacaaccagagacttggacatggaacagaggaacatgttcgttatccaaaactcttagaaggcttgcaagggaagaaggtgattgatgtggctgcaggctccacccactgcctggctctgactgaggacagcgaggtccacagctgggggagcaacgaccagtgccagcactttgacaccttgcgcgtgaccaagccagaacctgcagcattgccaggactggacaccaaacacatagtgggaattgcctgtgggcctgcccagagctttgcttggtcatcatgttctgagtggtccattggcctccgtgtcccttttgtggtggacatctgctcaatgacttttgagcagctagatctcctgcttcggcaggtgagtgaggggatggatggctccgcggactggcccccgccccaggagaaagagtgtgtggccgtggcaacgctgaatcttctacgacttcagttgcatgctgccattagtcaccaggttgacccggaattccttggtttaggtctgggcagcatcctcctgaacagcctgaagcagacggtggtgaccctggccagcagtgcgggcgtgctgagcaccgtgcagtcggccgcccaggccgtgctgcagagtggctggtccgtgctgctgcccaccgcggaggagcgggcccgggcactctctgctctcctgccctgcgcagtttcaggcaatgaagtgaacataagtccaggtcgtcgattcatgattgatcttctggtgggcagcttgatggctgatggagggttggagtcagccttacacgcagccattactgcagagatccaggatattgaagccaaaaaagaagcacagaaggaaaaagaaattgatgaacaggaagcgaatgcctcaacatttcatagaagcaggactccactggataaagaccttattaatacggggatctgtgagtcttctggcaaacagtgtttgcctctggttcagctcatacaacagcttcttagaaacatcgcttctcagactgtagccagattgaaagatgttgcccgtcggatttcatcatgtctggactttgagcaacacagtcgtgaaagatctgcttcattggattggttactgcgtttccaacgtttgcttattagtaaactttatccaggagaaagtattggtcagacctcagatatttctagtccagagctaatgggtgttggttccttgctgaagaagtacacagccctcctgtgcacgcacattggagatatactgcctgtggccgccagcattgcttctaccagctggcggcacttcgcggaggtggcttacattgtggaaggggactttactggtgttctccttccagaactagtagtttctatagtgcttctgctcagtaaaaatgctgatctcatgcaagaggctggagctgtacctctgctgggtggcctgttggaacatctggatcggttcaaccatctggcaccaggaaaggaacgggatgatcatgaagagttagcctggcctggcataatggagtcattttttacaggtcagaactgtagaaataatgaggaagtgacacttatacgcaaagctgatttggagaaccataataaagatggaggcttctggactgtgattgacgggaaggtgtatgatataaaggacttccagacacagtcgttaacaggaaatagtattcttgctcagtttgcaggggaagacccagtggtagctttggaagctgctttgcagtttgaagacacccgggaatccatgcacgcgttttgtgttggccagtatttggagcctgaccaagaaatcgtcaccataccagatctggggagtctctcttcacctctgatagacacagagaggaatctgggcctgcttctcggattacacgcttcgtatttggcaatgagcacaccgctgtctcctgtcgagattgaatgtgccaaatggcttcagtcatccatcttctctggaggcctgcagaccagccagatccactacaggtacaacgaggagaaagacgaggaccactgcagctccccagggggcacacctgccagcaaatctcgactctgctcccacagacgggccctgggggaccattcccaggcatttctgcaagccattgcagacaacaacattcaggatcacaacgtgaaggactttttgtgtcaaatagaaaggtactgtaggcagtgccatttgaccacaccgatcatgtttccccccgagcatcccgtggaagaggtcggtcgcttgttgttatgttgcctcttaaaacatgaagatttaggtcatgtggcattatctttagttcatgcaggtgcacttggtattgagcaagtaaagcacagaacgttgcctaagtcagtggtggatgtttgtagagttgtctaccaagcaaaatgttcgctcattaagactcatcaagaacagggccgttcttacaaggaggtctgcgctcctgtcatcgaacgtttgagattcctctttaatgaattgagacctgctgtttgtaatgacctctctataatgtctaagtttaaattgttaagttctttgccccgttggaggaggatagctcaaaagataattcgagaacgaaggaaaaagagagttcctaagaagccagaatctatggatgatgaagaaaaaattggaaacgaagagagtgatttagaagaagcttgcattttgcctcatagtccaataaatgtggacaagagacccattgcaattaaatcacccaaggacaaatggcagccgctgttgagtactgttacaggtgttcacaaatacaagtggttgaagcagaatgtgcagggtctttatccgcagtctccactcctcagtacaattgctgaatttgcccttaaagaagagccagtggatgtggaaaaaatgagaaagtgcctactaaaacagttggagagagcagaggttcgcctggaagggatagatacaattttaaaactggcgagcaagaatttcttacttccatctgtgcagtatgcgatgttttgtggatggcaaagacttattcctgagggaatcgatataggggaacctcttactgattgtttaaaggatgttgatttgatcccgccttttaatcggatgctgctggaagtcacctttggcaagctgtacgcttgggctgtacagaacattcgaaatgttttgatggatgccagtgccacatttaaagagcttggtatccagccggttcccctccaaaccatcaccaatgagaacccgtcaggaccgagcctggggaccatcccgcaagcccgcttcctcctggtgatgctcagcatgctcaccctgcagcacggcgcaaacaacctcgaccttctgctcaattccggcatgctggccctcacgcagacggcactgcgcctgattggccccagttgtgacaacgttgaggaagatatgaatgcttctgctcaaggtgcttctgccacagttttggaagaaacaaggaaggaaacggctcctgtgcagctccctgtttcaggaccagaactggctgccatgatgaagattggaacaagggtcatgagaggtgtggactggaaatggggcgatcaggatgggcctcctccaggcctaggccgcgtgattggtgagctgggagaggacggatggataagagtccagtgggacacaggcagcaccaactcctacaggatggggaaagaaggaaaatacgacctcaagctggcagagctgccggctgctgcacagccctcagcagaggattcggacacagaggatgactctgaagccgaacaaactgaaaggaacattcaccccactgcaatgatgtttaccagcactattaacttactgcagactctttgtctgtctgctggagttcatgctgagatcatgcagagcgaagccaccaagactttatgcggactgctgcgaatgttagtggaaagcggaacgacggacaagacatcttctccaaacaggctggtgtacagggagcaacaccggagctggtgcacgctggggtttgtgcggagcatcgctctcacgccgcaggtatgcggcgccctcagctccccgcagtggatcacgctgctcatgaaggtcgtggaagggcacgcacccttcactgccacctcgctgcagaggcagatcttagctgtgcatttgttgcaagcagtccttccatcatgggacaagaccgaaagggcgagggacatgaaatgcctcgtggagaagctgtttgacttcttgggaagcttgctcactacctgctcctctgacgtgccattactcagagagtccacgctgaggcggcgcagggtgcgcccgcaggcctcgctgactgccacccacagcagcacactggcggaggaggtggtggcactgctgcgcacgctgcactccctgactcagtggaatgggctcatcaacaagtacatcaactcccagctccgctccatcacccacagctttgtgggaaggccttccgaaggggcccagttagaggactacttccccgactccgagaaccctgaagtggggggcctcatggcagtcctggctgtgattggaggcatcgatggtcgcctgcgcctgggcggtcaagttatgcacgatgagtttggagaaggcactgtgactcgcatcaccccaaagggcaaaatcaccgtgcagttctctgacatgcggacgtgtcgcgtttgcccattgaatcagctgaaaccactccctgccgtggcctttaatgtgaacaacctgcccttcacagagcccatgctgtctgtctgggctcagttggtgaacctcgctggaagcaagttagaaaagcacaaaataaagaaatcgactaaacaggcctttgcaggacaagtggacctggacctgctgcggtgccagcagttgaagctatacatcctgaaagcaggtcgggcgctgctctcccaccaggataaactgcggcagatcctgtctcagccagctgttcaggagactggaactgttcacacagatgatggagcagtggtatcacctgaccttggggacatgtctcctgaagggccgcagccccccatgatcctcttgcagcagctgctggcctcggccacccagccgtctcctgtgaaggccatatttgataaacaggaacttgaggctgctgcactggccgtttgccagtgcttggctgtggagtccactcacccttcgagcccaggatttgaagactgcagctccagtgaggccaccacgcctgtcgccgtgcagcacatccaccctgccagagtgaagaggcgcaagcagtcgcccgttcccgctctgccgatcgtggtgcagctcatggagatgggattttccagaaggaacatcgagtttgccctgaagtctctcactggtgcttccgggaatgcatccagcttgcctggtgtggaagccttggtcgggtggctgctggaccactccgacatacaggtcacggagctctcagatgcagacacggtgtccgacgagtattctgacgaggaggtggtggaggacgtggatgatgccgcctactccatgtctactggtgctgttgtgacggagagccagacgtacaaaaaacgagctgatttcttgagtaatgatgattatgctgtatatgtgagagagaatattcaggtgggaatgatggttagatgctgccgagcgtatgaagaagtgtgcgaaggtgatgttggcaaagtcatcaagctggacagagatggattgcatgatctcaatgtgcagtgtgactggcagcagaaagggggcacctactgggttaggtacattcatgtggaacttataggctatcctccaccaagttcttcttctcacatcaagattggtgataaagtgcgggtcaaagcctctgtcaccacaccaaaatacaaatggggatctgtgactcatcagagtgtgggggttgtgaaagctttcagtgccaatggaaaagatatcattgtcgactttccccagcagtctcactggactgggttgctatcagaaatggagttggtacccagtattcatcctggggttacgtgtgatggatgtcagatgtttcctatcaatggatccagattcaaatgcagaaactgtgatgactttgatttttgtgaaacgtgtttcaagaccaaaaaacacaataccaggcatacatttggcagaataaatgaaccaggtcagtctgcggtattttgtggccgttctggaaaacagctgaagcgttgccacagcagccagccaggcatgctgctggacagctggtcccgcatggtgaagagcctgaatgtgtcgtcctccgtgaaccaggcatcccgtctcattgacggcagcgagccctgctggcagtcatcggggtcgcaaggaaagcactggattcgtttggagattttcccagatgttcttgttcatagattaaaaatgatcgtagatcctgctgacagtagctacatgccgtccctggttgtagtgtcaggtggaaattccctgaataaccttattgaactaaagacaatcaatattaacccttctgacaccacagtgccccttctgaatgactacacagagtatcacaggtatattgaaattgctataaagcagtgcaggagctcaggaatcgattgtaaaatccatggtctcatcctgctgggacggatccgtgcagaagaggaagatttggctgcagttcctttcttagcttcggataatgaagaggaggaggatgagaaaggcaacagcggaagcctcattagaaagaaggctgctgggctggaatcagcagctacgataagaaccaaggtgtttgtgtggggcctgaatgacaaggaccagctgggcgggctgaaaggctccaagataaaggttccttcgttctctgagacactgtcagctttgaatgtggtacaggtggctggtggatctaaaagtttgtttgcagtgactgtggaagggaaggtgtatgcctgtggagaagccacgaatggccggctggggctgggcatttccagcgggacggtgcccatcccacggcagatcacagctctcagcagctacgtggtcaagaaggtggctgttcactcaggtggccggcacgcgacggctttaactgtcgatggaaaagtgttttcgtggggcgaaggtgacgatggaaaacttggacacttcagcagaatgaactgtgacaaaccaaggctgatcgaggccctgaaaaccaagcgtatccgggatatcgcctgtgggagctcgcacagcgcagccctcacatccagcggagaactgtacacctggggcctcggcgagtacggccggctgggacatggggataatacgacacagctaaagcccaaaatggtgaaagtccttctcggtcacagagtaatccaggttgcatgtgggagtagagacgcgcagaccctggctctgaccgatgaaggtttggtattttcctggggtgatggtgactttggaaaactgggccggggcggaagtgaaggctgtaacattccccagaacattgagagactaaatggacagggggtgtgccagattgagtgtggagctcagttctccctggcgctcaccaagtctggagtggtgtggacatggggaaagggggattacttcagattgggccacggctctgacgtgcacgtgcggaaaccacaggtggtggaagggctgagagggaagaagatcgtgcatgtggctgtcggggccctgcactgcctggcggtcacggactcggggcaggtgtatgcttggggtgacaacgaccacggccagcagggcaatggcacgaccacggttaacaggaagcccacactcgtgcaaggcttagaaggccagaagatcacacgcgtggcttgtgggtcgtcccacagtgtggcgtggacaactgtggatgtggccacgccctctgtccacgagcccgtcctcttccagactgcaagagacccgttaggtgcttcctacttaggcgtgccctcagatgctgattcttctgctgccagtaataaaataagtggtgcaagtaattctaagccaaatcgcccttctcttgccaagattctcttgtcattggatggaaatctggccaaacagcaggccttatcgcatattcttacagcattgcaaatcatgtatgccagagatgctgttgtcggggccctgatgccggccgccatgatcgccccggtggagtgcccctcgttctcctcggcggccccttccgacgcatctgcgatggctagtcccatgaatggagaagaatgcatgctggctgttgatatcgaagacagactgagtccaaatccatggcaagaaaagagagagattgtttcctctgaggacgcagtgaccccctctgcagtgactccgtcggccccctcagcctccgctcggccttttatcccagtgacggatgacctgggagctgcaagcatcattgcagaaaccatgaccaaaaccaaagaggatgttgaaagccaaaataaagcagcaggtccggagcctcaggccttggatgagttcaccagtctgctgattgcggatgacactcgtgtggtggtagacctgctcaagctgtcagtgtgcagccgggccggggacaggggcagggatgtgctctccgcggtgctttccggcatggggaccgcctacccacaggtggcagatatgctgttggagctctgtgtcaccgagttggaggatgtggccacagactcgcagagcggccgcctctcttctcagcctgtggtggtggagagtagccacccttacaccgacgacacctccaccagtggcacagtgaagataccaggtgcagaaggactcagggtagaatttgaccggcagtgctccacagagaggcgccacgaccctctcacagtcatggacggcgtcaacaggatcgtctccgtgcggtcaggccgagagtggtccgactggtccagcgagctgcgcatcccaggggatgagttaaagtggaagttcatcagcgatgggtctgtgaatggctggggctggcgcttcaccgtctatcccatcatgccagctgctggccctaaagaactcctctctgaccgctgcgtcctctcctgtccatccatggacttggtgacgtgtctgttagacttccgactcaaccttgcctctaacagaagcatcgtccctcgccttgcggcctcgctggcagcttgtgcacagctgagtgccctagctgccagtcacagaatgtgggcccttcagagactgaggaagctgcttacaactgaatttgggcagtcaattaacataaataggctgcttggagaaaatgatggggaaacaagagctttgagttttacaggtagtgctcttgctgctttggtgaaaggtcttccagaagctttgcaaaggcagtttgaatatgaagatcctattgtgaggggtggcaaacagctgctccacagcccattctttaaggtactagtagctcttgcttgtgacctggagctggacactctgccttgctgtgccgagacgcacaagtgggcctggttccggaggtactgcatggcctcccgtgttgctgtggcccttgacaaaagaacaccgttgccccgtctgtttcttgatgaggtggctaagaaaattcgtgaattaatggcagacagcgaaaacatggatgttctgcatgagagccatgacatttttaaaagagagcaagacgaacaacttgtgcagtggatgaacaggcgaccagatgactggactctctctgctggtggcagtggaacaatttatggatggggacataatcacaggggccagctcgggggcattgaaggcgcaaaagtcaaagttcccactccctgtgaagcccttgcaactctcagacccgtgcagttaatcggaggggaacagaccctctttgctgtgacggctgatgggaagctgtatgccactgggtatggtgcaggtggcagactaggcattggagggacagagtcggtgtccaccccaacattgcttgaatccattcagcatgtgtttattaagaaagtagttgtgaactctggaggaaagcactgccttgcccttgttttcagaaggagaagtttactcttggggtgaggcagaagatgggaagttggggcatggcaacagaagtccgtgtgaccgccctcgtgtcatcgagtctctgagaggaattgaagtggtcgatgttgctgctggcggagcccacagcgcctgtgtcacagcagccggggacctctacacatggggcaaaggccgctacggccggctggggcacagcgacagtgaggaccagctgaagccgaagctggtggaggcgctgcagggccaccgtgtggttgacatcgcctgtggcagtggagatgcccagaccctctgcctcacagatgacgacactgtctggtcctggggggacggggactacggcaagctcggccggggaggcagcgatggctgtaaagtgcctatgaagattgattctcttactggtcttggagtagttaaagtggaatgcggatcccagttttctgttgcccttaccaaatctggagctgtttatacctggggcaaaggcgattatcacaggttgggccatggatcagatgaccatgttcgaaggcctcggcaggtccaagggttgcaggggaagaaagtcatcgccatcgccactggctccctgcactgtgtgtgctgcacagaggatggtgaggtttatacatggggcgacaatgatgagggacaactgggagacggaaccaccaatgccatccagaggcctcggttggtagctgcccttcagggtaagaaggtcaaccgtgtggcctgtggctcagcacataccctcgcctggtcgaccagcaagcccgccagtgctggcaaactccctgcacaggtccccatggagtacaatcacctgcaggagatccccatcattgcgctgaggaaccgtctgctgctgctgcaccacctctccgagctcttctgcccctgcatccccatgttcgacctggaaggctcgctcgacgaaactggactcgggccttctgttgggttcgacactctccgaggaattctgatatcccagggaaaggaggcggctttccggaaagtagtacaagcaactatggtacgcgatcgtcagcatggccccgtcgtggagctgaaccgcatccaggtcaaacgatcaaggagcaaaggcgggctggccggccccgacggcaccaagtctgtctttgggcagatgtgtgctaagatgagctcgtttggtcccgacagcctcctccttcctcaccgtgtctggaaagtcaagtttgtgggtgaatctgtggatgactgtgggggcggctacagcgagtccatagctgagatctgtgaggagctgcagaacggactcacgcccctgctgatcgtgacacccaacgggagggatgagtctggggccaaccgagactgctacctgctcagcccggccgccagagcacccgtgcacagcagcatgttccgcttcctgggtgtgttgctgggcattgccatccgaaccgggagtcccctgagcctcaaccttgccgagcctgtctggaagcagctggctgggatgagcctcaccatcgcggacctcagtgaggttgataaggattttattcctggactcatgtacatccgagacaatgaagccacctcagaggagtttgaagccatgagcctgcccttcacagtgccaagtgccagtggccaggacattcagttgagctccaagcacacacacatcaccctggacaaccgcgcggagtacgtgcggctggcgataaactatagactccatgaatttgatgagcaggtggctgctgttcgggaaggaatggcccgcgttgtgcctgttcccctcctctctctgttcaccggctacgaactggagacgatggtgtgtggcagccctgacatcccgctgcaccttctcaagtcggtggccacctataaaggcatcgagccttccgcatcgctgatccagtggttctgggaggtgatggagtccttctccaacacagagcgctctcttttccttcgcttcgtctggggccggacgaggctgcccaggaccatcgccgacttccggggccgagacttcgtcatccaggtgttggataaatacaaccctccagaccacttcctccctgagtcctacacctgtttcttcttgctgaagctgcccaggtattcctgcaagcaggtgctggaggagaagctcaagtacgccatccacttctgcaagtccatagacacagatgactacgctcgcatcgcacttacaggagagccagccgccgacgacagcagcgacgattcagataacgaggatgtcgactcctttgcttcggactctacacaagattatttaacaggacac

SEQ ID NO: 79391 - DNA, 1729 bp, Homo sapiens
  sig_peptide (1527)...(1392): this location contains the signal peptide sequence, MWYGVFLWALVSSLFFHVPAGLLALFTLRHHKYGAAIAGVYRAAG, Run with SignalP
tggaaaggatcacattaaatacttaatttctgcgattcttccctctcaaagagtcacagttttcaggccttttaatgaaaaagaaagttaggcagtagaataaaaatttaaatagctaaaattaagttttaaaaaaactcttgatatttaaatctctttaaagatataaattcttttgaataaaaatgtaaaggggagagtgggtacatatctgaacattaaactttaggcactttctgggagttgatacccaatactgtaaaagtgggctgaagagttaccactaggtaaacacattaagctaaaaaatcaataaccactaactctagtttcagatgcacttctatagtttctcaagggtcattagtataccaaagtcactaagaaaaactatgacagaatgcctaaagtatcttatgtgtgcctcaatgtccaaacaaatctggcttaaaatttccaactcaagccatttaatagggtatgtatgtttccaattaaatgaaataaaattaagagaattaaaagtgatagggaaaggtggtacagaaaatctaaaaagtctaaattagctagcttattttgataaaacatacaaaataacaaattcacatctcttaaaatatcttaatcagaagtcaagacagttgtccagaaaatgtcacattattcattgttatctactttttatttataaacagtggaaccaaagccactacttgagttatacttaaatttttttgccctgctttatccacccaaatttgttttcaaaactatactcaaccaaaacctatttggcatttattgtcactaagatgtagcaaagaaaagagtttgccaaattttaatcaagattagataagattttaatacaacatactctgctcatttgaaataaaccagtatcttccacggtttcttcaaaatatgcggacatctcacaggaatactgtaaatttcagtgcaaaggatgccaccccaggaggacactgttggacttgggcttgcgttaaagggtacacatggaaaactgctttaaattaaatatctacaaaaaaggaaagccaaaaggacttgttttgggttgaggaacaataggagtccacataagtcttcaattctaggagcttcaaaatgaagaaaagggctgagatgtgttgtccttcatgttcctgttcatccaagttgcttccctttgaagaactaaagaaacacttacactccataatgtattccttttgggaggattccccataaagtttaagttcaacatctcagcataaggatgtatgctatagagtagctaaaatccgtaaaaaggagaccaccaagacgcaaaatgtctgtccagtgcccagtgtgagggcttcaaatggtatcatttccttccctgctgctcggtaaactccagcaatagctgcaccatatttgtgatgtctgagggtgaagagggccagtaatccagcagggacatgaaagaagagagaagacaccagtgcccacaggaatacaccataccacatctctgggaaggagcagagggaagtagagttggggcacagggtcccgttgcccacccgcggcacaaccttcaggctcaggatctgctgcaggagcccggccgacccgccgctgccgccgctcccctcgcgctccatcccgtcgccattcaccacagagaaatgagggacgagcgcccgaagtgcggtagcggccggcgccgactcac

SEQ ID NO: 79392 - DNA, 1884 bp, Homo sapiens
  sig_peptide (1683)...(1548): this location contains the signal peptide sequence, MWYGVFLWALVSSLFFHVPAGLLALFTLRHHKYGAAIAGVYRAAG, Run with SignalP
tttcggagccaggggcagggaaaaggcgtgggggatccggctgctggggggcggagggaaaaaaaaggtctggacttagtcaccagagactatggcgcagatatcctccgccactaccaccacagtgattgtattccatacaaaacagtttaggtggaaaggatcacattaaatacttaatttctgcgattctttccctctcaaagagtcacagttttcaggccttttaatgaaaaagaaagttaggcagtagaataaaaatttaaatagctaaaattaagttttaaaaaaactcttgatatttaaatctctttaaagatataaattcttttgaataaaaatgtaaaggggagagtgggtacatatctgaacattaaactttaggcactttctgggagttgatacccaatactgtaaaagtgggctgaagagttaccactaggtaaacacattaagctaaaaaatcaataaccactaactctagtttcagatgcacttctatagtttctcaagggtcattagtataccaaagtcactaagaaaaactatgacagaatgcctaaagtatcttatgtgtgcctcaatgtccaaacaaatctggcttaaaatttccaactcaagccatttaatagggtatgtatgtttccaattaaatgaaataaaattaagagaattaaaagtgatagggaaaggtggtacagaaaatctaaaaagtctaaattagctagcttattttgataaaacatacaaaataacaaattcacatctcttaaaatatcttaatcagaagtcaagacagttgtccagaaaatgtcacattattcattgttatctactttttatttataaacagtggaaccaaagccactacttgagttatacttaaatttttttgccctgctttatccacccaaatttgttttcaaaactatactcaaccaaaacctatttggcatttattgtcactaagatgtagcaaagaaaagagtttgccaaattttaatcaagattagataagattttaatacaacatactctgctcatttgaaataaaccagtatcttccacggtttcttcaaaatatgcggacatctcacaggaatactgtaaatttcagtgcaaaggatgccaccccaggaggacactgttggacttgggcttgcgttaaagggtacacatggaaaactgctttaaattaaatatctacaaaaaaggaaagccaaaaggacttgttttgggttgaggaacaataggagtccacataagtcttcaattctaggagcttcaaaatgaagaaaagggctgagatgtgttgtccttcatgttcctgttcatccaagttgcttccctttgaagaactaaagaaacacttacactccataatgtattccttttgggaggattccccataaagtttaagttcaacatctcagcataaggatgtatgctatagagtagctaaaatccgtaaaaaggagaccaccaagacgcaaaatgtctgtccagtgcccagtgtgagggcttcaaatggtatcatttccttccctgctgctcggtaaactccagcaatagctgcaccatatttgtgatgtctgagggtgaagagggccagtaatccagcagggacatgaaagaagagagaagacaccagtgcccacaggaatacaccataccacatctctgggaaggagcagagggaagtagagttggggcacagggtcccgttgcccacccgcggcacaaccttcaggctcaggatctgctgcaggagcccggccgacccgccgctgccgccgctcccctcgcgctccatcccgtcgccattcaccacagagaaatgagggacgagcgcccgaagtgcggtagcggccggcgccgactcac

SEQ ID NO: 79393 - DNA, 1404 bp, Homo sapiens; identical to SEQ ID NO: 62869
  sig_peptide (466)...(331): this location contains the signal peptide sequence, MGKSLASQFPITLIFSAFSSTFCLLDGLFISCPCTSTELPKVNSL, Run with SignalP
  misc_feature (206)...(1289): similar to gi1001357 in the genepept database release 114, Run with FASTXY 3.3t00, default parameters

SEQ ID NO: 79394 - DNA, 1846 bp, Homo sapiens
  sig_peptide (768)...(633): this location contains the signal peptide sequence, MVLSGIHWYSVLLLAVEFCRYCPLRYRCSTFSSWARVSSTPQASS, Run with SignalP
  misc_feature (1396)...(1787): similar to gi3877661 in the genepept database release 114, Run with FASTXY 3.3t00, default parameters
cgagggcgcgcaaggcgatggactttagcggcacgatatgggcagctgcgtcgcgagttcggggtacggaggggctgctatcggctggcggcccacaagctgcttaaggagatggtgctgctggagcggctgcggcaccccaacgtgctgcagctctatggctactgctaccaggacagcgaggacatcccagacaccctgaccaccatcacggagctgggcgcccctgtagaaatgatccagctgctgcaaacttcctgggaggatcgattccgaatctgcctgagcctgggccgcctcctccaccacctggcccactccccactgggctccgtcactctgctggacttccgccctcggcagtttgtgctggtggatggggagctcaaagtgacggacctggatgacgcacgtgtggaggagacgccgtgtgcaggcagcaccgactgcatactcgagtttccggccaggaacttcaccctgccctgctcagcccagggctggtgcgagggcatgaacgagaagcggaacctctataatgcctacaggtttttcttcacatacctcctgcctcacagtgccccgccttcactgcgtcctctgctggacagcatcgtcaacgccacaggagagctcgcctggggggtggacgagaccctggcccagctggagaaggtgctgcacctgtaccggagcgggcagtatctgcagaactccacggcaagcagcagtaccgagtaccagtgtatcccagacagcaccatcccccaggaagactaccgctgctggccatcctaccaccacgggagctgcctcctttcagtgttcaacctggctgaggctgtggatgtctgtgagagccatgcccagtgtcgggcctttgtggtcaccaaccagaccacctggacaggtcggcagctggtctttttcaagactggatggagccaagtggtccctgatcccaacaagaccacatatgtgaaggcctctggctgacctatctgagggctcggctgaccagctgactatcctcagcagctgggcttgcctgtggagggagtgacttgcactggcagcactgcatgtcacctgggaacccctgcagacaaagctaacatcccagacagacagatgtgaccaggacaaacgtgcaataatgccaaatgttaaaatgtgagtttaccagcctagctatgggactgctggctcctagtccaggaatcatgggggtatgactgcctctccaaccctgtgggctgtaagcaagctcaggctagtctccccactgggggctgtgcccctccctgggacggttccgtgggcagccccatcactgtgttcaatagtgtgagaatgtagctaaagcccctgctgctgctgctgcacatgccacagcaggcggtgggggctgcgtggggacaatccatcgtggagtgttctctcagcttaggtctggacaggagacttggcgggagatgctccaggatgtgggtgattctgtacctggggaggctatctctgacctcccgacaggggacactcccaggccagcccaggggtcaggggcagaggtgcacacctcagcatgagccaagactggggtcagggagcaggtgtggtttgagccaggacctggggcgggggtggggccggggcctttctgcctcatttgctttcaatgaaagcctcaaagcagccaaaaccaggctttcccccttcctcgagtttgaatatccagaatcttttgtacttcttgttggttaaattgtttatttttgtaaaaaataaaataaaattagttaataaaatgatgtttcacagcaaactcttccctaaaaaaaaaaaa

SEQ ID NO: 79395 - DNA, 805 bp, Homo sapiens
  sig_peptide (604)...(739): this location contains the signal peptide sequence, MMCLVMASFGFILCGLCADSSVCLGLCHLLNLGSFQPLVLWIFFS, Run with SignalP
  misc_feature (496)...(104): similar to gi4589600 in the genepept database release 114, Run with FASTXY 3.3t00, default parameters
cctctgtgagtttctgttcagatcttttgcacagaaagagctgtatcatggaaccagtaaaataaccaaggagaggttgattaaagttctgtttataaccctagaagattcctgccctagggatatgggatggctgaacgtaggacaccgacactggacagatgaaatagcagtttattagtcacgcatgctcacagccctggggtgggggacaccgcatgccacacgggggctgcacttgggaacagagcgaaccacgaggggctgtgggaggcacattttgtagtaacaggagggtgagatgaccttgcttccatgggaagatgtgactggcttgtttgaataactctgggccggcagggatgagcaggctggggtcgggtttccgcgataaggaggttgtttggctttgggatcttatccgtgagagcagagctcaggggagaccttgtggttaggctatttgaggccttcttgattttaccaatgtcaaggcagcacgtaatatttagtcttaatttcaggccacacgagaaattcttctgtatctactttccgtggcacttttcaaaaggttttgtccttagtgtttagcagttgattatgatgtgcctcgtcatggcttcctttggatttatcttgtgtgggctttgtgcagattcttcagtctgcctgggtttatgtcatttgctgaacctaggaagttttcagccattagttctttggatatttttttcagcattcaccttttctctcttgttattaacctgtggggtctgtgctaattctaggtagttagtttcaa

SEQ ID NO: 79396 - DNA, 429 bp, Homo sapiens
  sig_peptide (189)...(54): this location contains the signal peptide sequence, MYLVKGLLIGLHSILLCLREQGGLRRVERDEGTASWYSSQNTYNI, Run with SignalP
  misc_feature (176)...(427): similar to gi2226004 in the genepept database release 114, Run with FASTXY 3.3t00, default parameters
atggttatgtatgatccgtgacctttgacgttactgtgaggtgaagttaataaatgttgtatgtgttctgactgctgtaccagctggctgttccctcatctctctctactctccttaggcctccttgttccctaagacacaacaatattgaatgtaggccaattagtaaccctttgacaaggtacatagtcacctaagagctctgttgaagatgtacaagaaaatgttcttttcatacctgctaacaacatccatcctgcagtctgtggatccaggagtcaatttgacatagaagtctgatttaagaaacacctttcgaaaggctatggctgctatacagaggatgattcctctgatggatctgggcaaagtacattgaaaactttctggagagaattcaccattctgggtaccattaagaacctttgg

SEQ ID NO: 79397 - DNA, 1556 bp, Homo sapiens
  sig_peptide (1012)...(877): this location contains the signal peptide sequence, MIQLFFVLYGILALAFLSGYYVTLAAQILAVLLPPVMLLIDGNVA, Run with SignalP
  misc_feature (64)...(1551): similar to gi2981221 in the genepept database release 114, Run with FASTXY 3.3t00, default parameters
ttttttttttctatataaaatgtttatttttggaggactgtgtggtctggtgtttgggagggaactccacccccaccaggccaaccatggagctagaaacagagacagcaggaagggcaaagctggccactgcctgctccaccccttcacagcccagagcagaacagggtctgctctactctcaaggtgagtgacagaaaagccggtactgtttctgcccctggcattcccttagaaccccatgtgacttctgtagtgctcagccccctgtgcccttccctggggcctgatccacatgttgtcaacaaaacacactccctctcacagtctccaaacagcactgcagagcctaagctcgcatcttgccaggatcaaagaggaatttttcacatttgctcacttccaatctccatcttccttcctctgtctcccactctcccactctcagtagccgcatcccagccctgccatactcccttctcagggacaggagactcagtgggcagctggcctcagctctcctaacaggaaaaaaacctgtacagcattagtgccagggctcctgccctcccaagcgctgagcccagaaatttggacaaatgagctgcctcttaactgcaaaaaacaattttaaaaaagcaaaagatcaaacaaacagaccaaaaagcataaataaacagcagctgggccagcaaggaggaaggcagggtgaccctcagtggctccctgtgcccatctcagcctcttgccataaaactcagccatcagtggccaggatgacagcagttccgaagatgcccacactctctccaaggagcttcatctggttccagaactcaacacgccgcgtgttgtgccagtaagcaacattgccatcaatgagcagcatgacagggggcagcagtacagccaggatctgggcagcgagggtcacgtagtagcctgacagaaaggccagggccaggatgccatacagcacgaagaacagctggatcatcagctcccctcctgggagatggttcagatacgccagccggtcctccttgctgtgctgcagtgagtaggccacacagatgaggtagatacccaggaacacctggccggtggactgcagggagcggctgcgaggtttccggcggtacagctccccagcaccgctggccaacacaagaaagccgccgatgatggcaactgtgcgcgagtacatacggaccttcagccagtccccgtagtggacgtagcccccgatgtaggcggcgtaggtgctaatggccaattggagtgcggcccccagcgcgaaccagcgccgcttcacgccaaaggacatgaaactagcgcacagcacggctgcccccatgtcgaaatacaggtaaggcactgggatgtcgggcttccggcgtgcctcagccctctcagcgtacagcatgagctggctgaagcagccccaaaaggggcagcgtgtgagcagcaccgaacccaactgcatgatcagctgcaacatccaccgtctcgaacctatcttcgacgccatcttgggaaagggcagtccgctgcgg

SEQ ID NO: 79398 - DNA, 352 bp, Homo sapiens
  sig_peptide (191)...(326): this location contains the signal peptide sequence, MTNFFWCCLSLVVGLQSRFREYLTSTFLVLGESPCHTHLLKGCSV, Run with SignalP
  misc_feature (9)...(333): similar to gi486120 in the genepept database release 114, Run with FASTXY 3.3t00, default parameters
gcctcctttttttcatatcgtgatatttttatatctttatatataatatatctttataaagatatcttcatatctttataattgttcctatctttataattgaaacatacttcattgttattctggacctaatttcttattcattatcaccttacagaaatattcatcttacagaaatatttctgagcttatgaccaacttcttttggtgctgcctgtctctagtggtaggtcttcagagtagatttagggaatacttaacatctacatttctggtattaggagaatctccctgccacacacacctacttaaaggttgtagtgtagtagcagttctctccacaactctagtg

SEQ ID NO: 79399 - DNA, 378 bp, Homo sapiens
  sig_peptide (206)...(71): this location contains the signal peptide sequence, MPWGSLFGVESLWCSLTFLPFDDLSLLRLWEGNCVYCFAVLMYYS, Run with SignalP
  misc_feature (15)...(380): similar to gi2072969 in the genepept database release 114, Run with FASTXY 3.3t00, default parameters
ggagcgagtgaactcatcttgagaggtgaagctagagactaagagggtcgcaagaggaaagcacgaaagacggaatagtacatcaacacagcaaagcaatatacacagttcccttcccaaagacgtaataaagatagatcatcgaaaggtaagaaggtcagagaacaccaaagagattcaaccccaaaaagactgccccaaggcatataataaactctccaaggtcaaggacaaagataggatcctaaaagcaagaagagaaaagcaaataacatataaaggaactccaattcatctagaaacagacttctcaaaagaaaccatacaggccaagaggaagtagactatcattttcaaagtactaaaagaaaaaaactg

SEQ ID NO: 79400 - DNA, 367 bp, Homo sapiens
  sig_peptide (284)...(149): this location contains the signal peptide sequence, MLHSQLLAVSFRLIVTLPLSIQDWDDAENMKGLQYIFNTLWSVSS, Run with SignalP
  misc_feature (38)...(367): similar to gi3075377 in the genepept database release 114, Run with FASTXY 3.3t00, default parameters
attcagatccattccgaaatatcctgtcaactttttaagttcaagatcaggctctattaaaaatccttccctaaatgaatcagatgtcgcattctcttcacagccatcccgtcaatgcttgctggataaaattgatgttataacaggggaggaaacagaccataatgtgttaaagatatactgcaagcctttcatattctcagcatcatcccaatcctggattgaaaggggcagagtaacgataagcctgaatgacacagcaagcagctgactgtgtaacattacagtcaaggctgattatgcgcaatcaaggcagtctaaggctgatcctcaacacctaactctgggcccaaatgaagattcaaag

SEQ ID NO: 79401 - DNA, 363 bp, Homo sapiens
  sig_peptide (311)...(176): this location contains the signal peptide sequence, MHLPTLFFFLRIILPTQGPLQFPYEFEDGLFHFCRKGGHWNFDRD, Run with SignalP
  misc_feature (1)...(358): similar to gi1619936 in the genepept database release 114, Run with FASTXY 3.3t00, default parameters
ggaataaatttaactgagaaggtaaaagatttttacatttaaaaactgtaaaatattgctgaaagatattaaagatggtctaaataaatataaagatgtccccatgttcatggactggaagtcttaatactgtgaaggtatcaatattttccaaaaaaatccacagatccggcacaatccctatcaaaattccaatgaccaccttttctgcagaaatggaaaagtccatcctcaaattcatatggaaattgcaagggaccttgagtaggcaatataatcctgagaaagaagaacaaagttggaagatgcatatttcctgaattcaaaacttactacagaggtacagtaatcaaaacattgtgt

SEQ ID NO: 79402 - DNA, 346 bp, Homo sapiens
  sig_peptide (154)...(289): this location contains the signal peptide sequence, MVLHRKLVSFFSIWIFSFPSVIHLKRLSFPQRMFLACSSKISWLE, Run with SignalP
  misc_feature (346)...(293): similar to gi1196433 in the genepept database release 114, Run with FASTXY 3.3t00, default parameters
tttgttgtttgcctatgcttctgatgtcttacccataaaaatctttgtgcagactaatgtcctcaagcattttccctatatttacttagagtagtttgataattttgggccttacatttcagtcttcaatcgattctgagtttatgttgttatatggtgttacataggaagctagtatcattcttctccatatggatatttagttttcccagtgtcattcatttgaagaggctgtcctttccccagcgtatgttcttggcatgttcgtccaaaatcagttggctggaaatatgtggatttatttctgggtgccgtattctatggtctttaccccaagaatcattac

SEQ ID NO: 79403 - DNA, 440 bp, Homo sapiens
  sig_peptide (112)...(247): this location contains the signal peptide sequence, MSKVKPLHGAPAPLLVSLCLLSWCGLPGVIVHVTYVSPRHLSNTR, Run with SignalP
  misc_feature (1)...(349): similar to gi968973 in the genepept database release 114, Run with FASTXY 3.3t00, default parameters
cccttttcatcctccagtgtctcctcaaaaggatcagatccctttggaaccttagatcccttcggaagtgggtccttcaatagtgctgaaggctttgccgacttcagccagatgtccaaggtaaagcccctccacggagcccccgcgcctctgctagtgtctttgtgcctcttgtcatggtgtgggctgccaggcgtaattgttcatgtcacgtatgtatctccccggcacctttccaacacaaggtcaggtctggaaagcatccatggctgtgatccaatgcacggcagtcccgtggggtgagccctgacccttcccagtggcataggtgccctgggctcccctggctcccactggtgtctgacgaccatcaggtctcagacggtgaagtcattgccatgaccgagtagaaacttgagaaggcgttgggcacaggcgtc

SEQ ID NO: 79404 - DNA, 509 bp, Homo sapiens
  sig_peptide (252)...(117): this location contains the signal peptide sequence, MFPCPAVRFCLAWSAHISCQFKFHVKYALAEKQVQAKCFISKGGR, Run with SignalP
  misc_feature (17)...(465): similar to gi1249620 in the genepept database release 114, Run with FASTXY 3.3t00, default parameters
acacactccagtaaaatttaaattattgaaagaattaaaagctagtgtggttaataatggaatacagagcccatttactttaggattgttagaatctgtattcagcactatgcgcctcccacccttggatataaagcatttagcttgcacttgtttctctgctagtgcatatttgacatggaatttaaattggcaagaaatgtgtgcagaccaggctagacagaatctcaccgctggacatgggaacattacagaggaaatgctattgggtagtgactcttattcagatctggtgcaacaattgacacttccagatgctgcttaccatcagtgcgcctggccgctaagcgtgccagggccgccattcgtgagaaaggggtctcgatacaatcttttccgcagatcatgcaaaaatctcagcagccctaggcacaacatagcgcacagttgcaacagtcagtgaggcttcagattcctcatgctgctcatgagaaaatgcgtatttggac

SEQ ID NO: 79405 - DNA, 859 bp, Homo sapiens
  sig_peptide (845)...(710): this location contains the signal peptide sequence, MAPARPWWLTPVIPALWEAEEDGSRGQEFKTSLASMVKPRLYYKY, Run with SignalP
  misc_feature (298)...(834): similar to gi3002527 in the genepept database release 114, Run with FASTXY 3.3t00, default parameters
ggcccttcgcccttgggccaaatctttttttggttttttttccctttggccccccctttttccaacctaaagccctaaagggtgggttcaaatcaacctttttctttaaacccttcgggggtttttttttgccccaagtggaaaaaattttttttttgaattgttaaaaacaaaaaacttgatttttgccctttttttttttggcatttcacttgtggcttgctttatgttcttaatttctcctaagagattgtaaactcatgagagatctggcctagtgttcttaacttttaatccccaaagtgctttgtacacagtatggctcaatacatgcatttatatggcacaggaaaaatgtacttaagatgttgggtggcttttaccaacatagcatgtcattactgactcatcgatgctcactggaaaagcttgctcccagagccatgtccccaggactctctactaggtagccaccaaactgccaaagaccctatcctatgcaagtcacataaattgtctgtttgtagaaattctttctttttttctttttttgagatcgagtctcactctgttgcccaggctggagtgcagtggtgtgaacttggctcactgcactacctccgcctcctgggtttaggcaattttcctgcctcagcctcccaagtagctgggattacaggtgcgtgccaccatgcctggctaatttttgtatttgtagtagagacggggtttcaccatgctggccaggctggtcttgaactcctgacctcgtgatccgtcctcctcggcctcccaaagtgctgggattacaggggtgagccaccatggccgggcgggagccatgtctgacacagactcc

SEQ ID NO: 79406 - DNA, 342 bp, Homo sapiens
  sig_peptide (300)...(165): this location contains the signal peptide sequence, MVTLPPLASTWKPSTSPAPICLSWLCLFMNFVIHMLPGGLLFRRW, Run with SignalP
  misc_feature (111)...(345): similar to gi882258 in the genepept database release 114, Run with FASTXY 3.3t00, default parameters
cttggtggagggggtgggaaaagcaaatgggagctaatattatcagggtgtctctcattcaagttctgttagtcttcaacctccctgagcttcagagaacagaaaagatggcccccagtgaggacagtggtggtgttcctgccatggcccaactaggagacacccatcttctgaaaaggaggcccccaggcagcatgtgtatcacaaaattcatgaataagcacagccatgaaaggcagattggagctggggatgtagatggcttccaggtggacgcaagaggaggaagagtgaccatatgttcatggacacccagatgttaggaagtccaggcctcgtgcc

SEQ ID NO: 79407 - DNA, 326 bp, Homo sapiens
  sig_peptide (165)...(300): this location contains the signal peptide sequence, MSFSCPALNLYSLWLGEFPFAPCTMTALWTRKCLVHPHLSDKFSE, Run with SignalP
  misc_feature (9)...(204): similar to gi220579 in the genepept database release 114, Run with FASTXY 3.3t00, default parameters
ggcacgagatcttcctatctactctcctatctacctacctatttaccagtctattatctacctatctacctacctattatctatttatttatctatctaatctagctatcatctatcttccataaacttactcagaaactagcacttacagctgctcaagataaatgtctttttcttgtcctgccctcaatttgtatagcctatggctgggtgagtttccctttgccccatgcaccatgactgccctgtggacaaggaagtgtctggtccacccacatctctcagacaagttcagtgaatatggtgtacccaaattgttggttggg

SEQ ID NO: 79408 - DNA, 350 bp, Homo sapiens
  sig_peptide (306)...(171): this location contains the signal peptide sequence, MVALNGLLGFWLVKLDEWWGPELQWGILGGDGIQEGDREFRLQAW, Run with SignalP
  misc_feature (54)...(30): similar to gi511599 in the genepept database release 114, Run with FASTXY 3.3t00, default parameters
taatagacctactgctctagtcatccacctggtaccttcatccagacttataacttcaatttccaaactatacaccaatttgtaaaacaccccagtcatcttcctctcgctccacagcaatatatccacctgcctacttggcatctccacttgggcacctcaaattcaccatgcctgtaacctgaactcacggtcaccttcctgtatcccatcccctcccagaattccccattgaagctcaggaccccaccattcatccagctttacaagccagaaacctaatagcccattcaaggctaccatatttccttgtatctacctgtattttctcataaacatctcctcgtgcc

SEQ ID NO: 79409 - DNA, 950 bp, Homo sapiens
  sig_peptide (261)...(396): this location contains the signal peptide sequence, MWKQISPIGNLVTAIFFCVLCQQRYQWLARDAFNTQSILSPPIWV, Run with SignalP
  misc_feature (106)...(950): similar to gi2688551 in the genepept database release 114, Run with FASTXY 3.3t00, default parameters
ccaactcctgacctcaggtcatccacccacctccgccaccgtgcccggccgaaatttgtgattttataactaagaatttttagttaagaacattatcagtaaagacaacgtaatcccaccctggagagtttattgggagcccaggaatattcatttttaatacacacacacacacacacacacacacacacacactgatcagagtaacaggagtttctctcaggagtcatactccatgagcctggacccagtggttctttatgtggaaacaaatttcacctataggtaacctggtaactgctattttcttctgtgtgctctgtcaacaaaggtatcagtggcttgcaagagatgcctttaatactcagagcattctatctccccctatctgggtttagaaggaaggccttcattagttaccttttgagaagttactagaactctctattagagacttaccctcctgacctgataaaaagggatacccatgtctctattaacagctttatctctttctacagttttgggtatttgataaggttaaggcaaaattttagttatgcttaaggaggagttcttttttcacaattacagagaaaattttggtttgttgaagattgcagaaacagcaatggtaatgtaagacagttttggcctttaatttttttcttgaaactctacagtatactacaatagtgaaggaaactattaacatgagagatccttctgaataggatgtctttctgagttccactattcagttacaaaactccttaatgcttaaaattcattatgaaaattagatttattttaaatactttcaagtgtatacatttttatttcataatttttattgtcttttaactaaagcatttagttcatttatatttactgtgtaccttttatatttaataaatatatttacttattaaaagataaaaaaaaaaaat

SEQ ID NO: 79410 - DNA, 421 bp, Homo sapiens
  sig_peptide (410)...(275): this location contains the signal peptide sequence, MLHETLRVCWSRIRVWPLMPALLGPPRALSSLAAQMGEHRTMWNP, Run with SignalP
  misc_feature (3)...(398): similar to gi553234 in the genepept database release 114, Run with FASTXY 3.3t00, default parameters
ctcgtcctgagggtggtggacctccagcgcgtaggccagggtgtcctcagtcagcggggagaagttggcctgggccagcatgggctccagagtccgaagcacgtcctgctcattagtcagacgctgaggatccgttagtgatggctgatcgagggtctccctgtcagggttgatggggtcatataaggcctgtattaggaggcgcagcagctgctccttggagaagggaatgaagcgctcgcggtgctggtgggtccagtcgcggggctccctggggttccacatcgtgcgatgctcccccatttgggcggccagggatgagagggcccgggggggcccgaggagcgcgggcatcagtggccatactcggatcctggaccaacagaccctcagggtctcatgcagcatggctagacccctt

SEQ ID NO: 79411 - DNA, 842 bp, Homo sapiens
  sig_peptide (54)...(189): this location contains the signal peptide sequence, MRQINKKGFWSYGPVILVVLVVAVVASSVNSYYSSPAQQVPKNPA, Run with SignalP
  misc_feature (105)...(836): similar to gi769859 in the genepept database release 114, Run with FASTXY 3.3t00, default parameters
cccacgcgttcgaacaaaaattggaagaaattaaagagaatgcacaggacaccatgagacagattaataaaaagggtttttggagctatggccctgtgattcttgtcgtcctggttgtggctgttgtggcaagttctgtgaatagctactattcctctccagcccagcaagtgcccaaaaatccagctttggaggcctttttggcccagtttagccaattggaagataaatttccaggccagagttccttcctgtggcagagaggacggaagtttctccagaagcacctcaatgcttccaaccccactgagccagccaccatcatatttacagcagctcgggagggaagagagaccctgaagtgcctgagccaccatgttgcagatgcctacacctcttcccagaaagtctctcccattcagattgatggggctggaaggacctggcaggacagtgacacggtcaagctgttggttgacctggagctgagctatgggtttgagaatggccagaaggctgctgtggtacaccacttcgaatccttccctgccggctccactttgatcttctataagtattgtgatcatgagaatgctgcctttaaagatgtggccctggtcctgactgttctgctagaggaggaaacattagaagcaagtgtaggcccaagggaaacggaagaaaaagtgagagacttactctgggccaagtttaccaactcttgacactcccacctccttcaaccacatgggattcaggacaaatttgagtggggctgtgggagccgaatttcacacctggtactgccagtccagccagtgagtagcatagaagaacagggg

SEQ ID NO: 79412 - DNA, 707 bp, Homo sapiens
  sig_peptide (222)...(87): this location contains the signal peptide sequence, MFQFLSQGFYCGVGLFTRFLKLLGALLLLALALFLGFLQLGWRFL, Run with SignalP
  misc_feature (59)...(646): similar to gi5821153 in the genepept database release 114, Run with FASTXY 3.3t00, default parameters
tgatgactggtggcgtatgagtcattgacggtgaatacaggtagccttatccctccagcctaaccggtcacctagtcccaccagaaaccgccatcccaactgtagaaagcccaaaaagagggccagagccaggagcagcaaagcacccagcagcttaagaaaacgagtaaacagtcctactccacagtaaaacccctggcttagaaactgaaacatgacctgggcccagccccctaaccgccctgtccacactcccatccaaactcgaaaaaggtccaaatcactgcttttcagttgcctgcaggcatagatgagatggccacaagtttctacgtactctcccaccaataccagcagttcaatcagccaccaaaagcctgcctgtccaagttgacatagttcctcggctccccacaatcccaggcctttgcgcttatctgcctgacttcgtttccgacccagccgatgtcgaccaggggacctgggatccctacgtccaccctcccgagtatcctccttcgttggaaagcggtgccgctgtctccgggatgggggtttctttccgctggacacacgtgaaaaatcactggggaacttgagagattcttcatcatcatattcctcttccaactcatcttcccccaaagctggagaggtacagtggtggcaaaagttgctagaagaaccatttcctccggacgcgtggg

SEQ ID NO: 79413 - DNA, 894 bp, Homo sapiens
  sig_peptide (176)...(311): this location contains the signal peptide sequence, MFTCLFLFSAVLRALFRKSDPKRFQNIFTTIFTLFTLLTLDDWSL, Run with SignalP
  misc_feature (1)...(720): similar to gi5420389 in the genepept database release 114, Run with FASTXY 3.3t00, default parameters
cccactccttcgccatctaccaccaaagcctcttccggatcctcaaggtcttcaagagcctgcgggccctgagggaatccgggtcctgcggaggctcagcttcctgaccagcgtccaggaagtgacagggaccctgggccagtccttgccgtccatcgcagccatcctcatcctcatgtttacctgcctcttcctcttctccgcggtcctccgggcactgttccgcaaatctgaccccaagcgcttccagaacatcttcaccaccatcttcaccctcttcaccttgctcacgctggatgactggtccctcatctacatggacagccgtgcccagggcgcctggtacatcattcccatcctcataatttacatcatcatccagtacttcatcttcctcaacctggtgattactgtcctggtggatagcttccagacggcgctgttcaaaggccttgagaaagcgaagcaggagagggccgcccggatccaagagaagctgctggaagactcactgacggagctcagagctgcagagcccaaagaggtggcgagtgaaggcaccatgctgaagcggctcatcgagaaaaagtttgggaccatgactgagaagcagcaggagctcctgttccattacctgcagctggtggcaagcgtggagcaggagcagcagaagttccgctcccaggcagccgtcatcgatgagattgtggacaccacatttgaggctggagaagaggacttcaggaattgaccccaggaggacaccagatacagacttcagcccctggcagtctgcccacctgggtgcactgggacgggtccccagatctgctggaatgattgtccggggctgcagagcaggggccccaacagagtttttaaaccccaaaaaaa

SEQ ID NO: 79414 - DNA, 399 bp, Homo sapiens
  sig_peptide (127)...(262): this location contains the signal peptide sequence, MLGLCFYLFQIFFYFSLNFFVYPCHSETNCVILIYFCGFEFILVF, Run with SignalP
  misc_feature (366)...(18): similar to gi56525 in the genepept database release 114, Run with FASTXY 3.3t00, default parameters
cccacgcgtccgtttggtgtgttgttgagttcttaatttgagatatttatatcttttcaatataggtatttaaccatataaaatttcattttaagactgcttttgctgtgtcccaaaggtttaggtatgttgggtctctgtttctatttatttcaaatatttttttatttcagccttaatttctttgtttacccctgtcattcagaaaccaattgtgtaattttaatatatttctgtggttttgagtttattttggtgttcatttacaattatttgattttcttgaatttattgagactcaatttatggtcaagtatatggactactttgaagaatatatatgtattattttgaagaatgatgtaaagaatgacgaaacaattctagttttttgtttca

SEQ ID NO: 79415 - DNA, 731 bp, Homo sapiens
  sig_peptide (185)...(320): this location contains the signal peptide sequence, MFIKFLRILISLQCSSFKFTVTAKVLFMTYKKRAQSDFFLVFVDR, Run with SignalP
  misc_feature (724)...(458): similar to gi1196433 in the genepept database release 114, Run with FASTXY 3.3t00, default parameters
agatggtggatgaacccccaggtaggttagagtgaatacaacagacaacatggatgagaggcccaaatcaagaagaaagcaagtctttaaagtgatttgggaagctgtgttcaaaaggaaatagtttctggaaagcctgaaatttttaaaaattatactctcacgtaggggcatcttatgtcttatgtttataaaatttctaagaattctaatttcccttcagtgttcttccttcaaatttacagtgacagctaaagtactattcatgacatacaaaaagagggcacaatctgacttttttcttgtttttgtggacagagagagatctccataattttgagatactctatgttaaactattttttaagttctctttttacatcacgtctgaaatgcacgagagtggcggtttctgtttcactggttttcttgttcattttttctgcacatttcatcctgttttcattaccatagttttgaaatatagtttgaaattataaagtatgatgtccttctgctttgttcttttttcttaagattgctttggctattcaaagtttattgtagtttcatgtatgttttagggttgtgtttttcattactgtgaaaaaagaacactggaattttgacagggagtttattgaatctagagatcactttggataatatggcagtttcacaatacttattctttcagtagaaataaaatatttttaaatttaaaaaaaaaa

SEQ ID NO: 79416 - DNA, 412 bp, Homo sapiens
  sig_peptide (209)...(74): this location contains the signal peptide sequence, MIITSIFLGVITVIIIGLCLAAVTYVDEDENEILELSSNKTFFIM, Run with SignalP
  misc_feature (3)...(388): similar to gi3873550 in the genepept database release 114, Run with FASTXY 3.3t00, default parameters
acacatctgtgagcctttcggtgagcaggtgaggcaattcctcttcagcaacacactcctctggaatcttcagcatgatgaagaatgttttgtttgatgataattcaagtatttcattttcatcttcatcaacataagttactgcagcaagacataagcctatgatgatcactgtaatgacacctaggaaaatggaggtgatgatcatccacagtttgcatcttccaaccacattcttattacaggagctccaggggctttccttgttagcctcggccggggggacctcctcgtccaaagaagggaagacctcgtcggcaccattgagaggcgtgttctcttctggctgccgctcgagcaccgagagctccagctcgtctactggctgtgagggttgggccaggtccatgtg

SEQ ID NO: 79417 - DNA, 386 bp, Homo sapiens
  misc_feature (1)...(386): n = a,t,c or g
  sig_peptide (294)...(159): this location contains the signal peptide sequence, MWAFRAINFPLITALAVSHRFWDVLFVLIGYKELLSSALISLFIQ, Run with SignalP
  misc_feature (53)...(385): similar to gi2072967 in the genepept database release 114, Run with FASTXY 3.3t00, default parameters
nttttttttttttttttttgcaataaaaataaatgttttttattaggcagaatccagatgctcaaggcccttcataatatcccccagtttagtagttggacttagggaacaaaggaacctttaatagaaattggacaacctgctcctgaatgactcctggataaataatgaaattaaggcggaactcagaagttctttgtaaccaatgagaacaaagagcacatcccagaatctgtgggacacagctaaagcagtgataagagggaagtttatagctctaaatgcccacatcaaaaagctagaaggatctcaaattgacaccctaacatcacaactaaaagaactagggagccaagcccaaacaaaccctaaagctagcagaggac

SEQ ID NO: 79418 - DNA, 2563 bp, Homo sapiens
  misc_feature (1)...(2563): n = a,t,c or g
  sig_peptide (255)...(390): this location contains the signal peptide sequence, MVTQLTLEVLHLSLVVGQVSNNLLLHIGPLASEQMFYAVATKIRD, Run with SignalP
  misc_feature (2563)...(0): similar to gi3002527 in the genepept database release 114, Run with FASTXY 3.3t00, default parameters
tggagaagcagttggtggctctcattccctatggggaccagaggctgaagcccaagcacacgaagctctttgtgttcctggccgtgctcatctgcctggtgacctcctccttcatcgtctttttcctgtttccccggtccgtcattgtgcagcctgcaggcctcaactcctccacagtggcctttgatgaggctgatatctacctcaacataacgaatatcttaaacatctccaatggcaactactaccccattatggtgacacagctgaccctcgaggttctgcacctgtccctcgtggtggggcaggtttccaacaaccttctcctacacattggccctttggccagtgaacagatgttttacgcagtagctaccaagatacgggatgaaaacacatacaaaatctgtacctggctggaaatcaaagtccaccatgtgcttttgcacatccagggcaccctgacctgttcatacctgagccattcagagcagctggtctttcagagctatgaatatgtggactgccgaggaaacgcatctgtgccccaccagctgacccctcacccaccatgacctgtctgctgtccctgtactccaggcacctgcaaccctggtctatatctcccacaactccctggtgactaaggaaggactacagaggctttgccaaaggagaagccctgcctcatcacacccttacctcccaccccctcagcacaggaagcttgctttgaagttaacttcatacacacacactcatatcctccagtttcccccagattctttcaggggctgccatcagattctgcccttggttagttttttgttttttttttggtagagacagagtctcactgttggtccaggttggttttgaactcctgggctcaagcgatcctccttttttggcctcccaaagcacttggattacaagatgtgagcctgtgcctggctggtcttytcttgaggaaaatctgacctggcattttcttgaggcaccttagattccctggagtgggcacctggcctttctgtamtgagrsmacctggtcagbctgwagggggscatttcaccccagctccatcmagggctggcagtcccvgcytgaatkdtkggagagagctgtaagttttatcttggcttttwaaaacatggaccyygccggcttggssgcaagtdggctytacacctngtaatcccagtgctttgggnaggccagaagtkkggtcggkatcaactatgagggmagsagttcccgtagaccagcctggmtcaaaaaartraaaaccctgtctctwcttaaaaaaacaaaaattagctgggtgtggtggcatgcgcctgtaatcccagctactcgggaggctgaggcagcagaatgsacttgaaccrraaggcagaggtttcagtgaaccaagatcgttcaactgcactccagcctgggcaaaagagcaaaactttgtctcaaaaaaagactcttttcaagttttctaccctctgataagaaaatttggggatatccagtgccatctccaaggactttcaggggatcatagatgcttttctgtgcctatctgctttgaccatgtgaaaaagtgatagtctgcttctctctggtaacttgtctgccacccatctgatagtaagattagccaaggccctttagccctctgtcctttctggttattgactgtccctggttcctaggaagacagagttgttctccagctaaagcgtctcctctctataaagtagttttactattcttttcatagcaggagccaaaatagtagaggaggggagagaggcacctggcactctgcgggcctgcacaggaaaaacagagccaaagacagaatcattgtataagatatttattaaaggagagcctctaagtccacatcctgagcccatgtgagtggacacaggtaggtaaaacgggtgggtccagctgctgtcatctgaaagccttcaggagatgaagctatcagtatccagctgaagggcttgctgkggttcctgtwmgccaccaccaccttagcaccagggccctctctggtcccaagaggcctcatctctcccttgggctttgacaatgtggagcagcacatcagcagggactggtctagaccctccctttcctgttcacttagctggagctaagctccagattaacccctaggttcccactggctcctagtagaaatagtttctgtactttagcagaacaggaaggatatttgttcattaaaggtggcttggtcttacagctgggtgcagttgtatatacctgtagtcccagctaattcagggaagctgaggtgagaggatctttaggagcccgggatttcaattttaacatgagcagcaacattagcaagaccccgtttaaaaaaaaaaaaagagctgggcgtaatggcgcacacctgtaatcccacctactcaggaggctgaggcaggagaatcactttgaacccgggaggcagaggttgcagttgagccaagtttcgcaccattgcattccagcngggggcaacaaggggcgagattctgttttcaaaaa

SEQ ID NO: 79419 - DNA, 421 bp, Homo sapiens
  sig_peptide (131)...(266): this location contains the signal peptide sequence, METQRGLGWGLGALAAFSGLGGTLALGLSEDLATLSPSSHAGMMQ, Run with SignalP
  misc_feature (32)...(405): similar to gi29549 in the genepept database release 114, Run with FASTXY 3.3t00, default parameters
cccacgcgtccgggaaactgacgctcagaaggagccaacacaagatgggtcacaccagtgaccaggactacagacagtcctgcagacccatgatcagccctcctgagcctcagcctggggctttctccccatggaaacacagagggggttgggatggggtctgggggccctggcagcgttctcagggttgggagggactctggctctgggcctgtctgaggacctagcaactctgtcccccagctcgcatgcagggatgatgcaagaggtgctctcccccacccgcagccctgcccccccctggagcctgctgccccctccgctggctgggtgatgccccgcacccccagcacactcctgtgctctttgtggggaaagacaggaaggggagatgggccccaagttgtaccttaaaggggtg

SEQ ID NO: 79420 - DNA, 1052 bp, Homo sapiens
  sig_peptide (550)...(415): this location contains the signal peptide sequence, MTIATFMTVILFFSLLSITLWRNSRRAFSVSLFASGRRMTRRFKA, Run with SignalP
  misc_feature (52)...(726): similar to gi4902678 in the genepept database release 114, Run with FASTXY 3.3t00, default parameters
gatgtattgggtattgagctgaaacaacaaaaagctgtgaaaatcaaaacaaaagattctggtcttttttgcgttccattgacagcgctattagaacaagatcagaggaaagtaccaggaatgcgaataccccttgatctttcaaaaactgatttctcgaattgaagagagaggtttggaaacagaaggccctcttacggatccccctgagctgccattagaatcaagaatctttgccaagaactagaagcaaagttttatgaagggacttttaattgggaaagtgtcaaacagcatgatgccgccagcctgctgaagctcttcattcgggagttgccccagccactgctcagtgtggagtatctcaaagcctttcaggctgtccagaatcttccaaccaagaagcagcaactacaggctttgaaccttcttgtcatcctcctacctgatgcaaacagggacacactgaaggcccttcttgaatttctccaaagagtaatagataataaagaaaaaaataaaatgacagtcatgaatgtagcaatggtcatggccccgaatctctttatgtgtcatgcattgggattgaagtccagtgaacagcgagaatttgtaatggcagctgggacagcaaataccatgcacttattgattaagtaccaaaaacttctgtggacaattcccaagtttattgtaaaccaagtgaggaagcaaaacacggaaaatcataaaaaggataaaagagccatgaagaaattgctgaagaaaatggcttatgaccgagaaaaatatgaaaagcaagataagagtacaaatgatgctgacgttcctcagggagtgattcgagtgcaagctccccatctttcgaaagtttccatggcaatacagctaactgaagaactaaaagccagtgatgtacttgccaggtttctcagccaagaaagtggggttgcccagactctcaagaaaggagaagtttttttgtatgaaattggaggaaatattggtaagcacttttttttctctttacattttatatgccggtttgaaag

SEQ ID NO: 79421 - DNA, 524 bp, Homo sapiens
  sig_peptide (145)...(10): this location contains the signal peptide sequence, MASASFSLLICGFLASLSLQRIEELGLGLGLGFGLRECCGWFGLL, Run with SignalP
  misc_feature (11)...(524): similar to gi2226004 in the genepept database release 114, Run with FASTXY 3.3t00, default parameters
ggcacgagggatagaagaccaaaccagccacaacattcccttaagccaaaacctaatcctaatccaagccctaactcttcaattctctgaaggctcagagaggcgaggaagccacagatgagaaggctgaagctagcagaggccattcagaggttgaagaagccgtctctgtaacataaaagtgcaaggtgagggagaaagtgctgatgaagatgttgcagcaagttactcagaagacctagctaagatctttgataaaggtgactgcattaaacaacagatcttccatgtagacaaaacagccttctactggaagagtccaaaacttcaaaagacaggctgactctcttgttaggggctaatgcgaggggtgacatttaagttgaagccagtgctcctttaccattctgaaaatcctaggccacttaagaattatgcttgggctaactccctgtgctctagaaatggaacaaagcctagatgacagcatggtttacagaatggcttgtgaatatttaagccca

SEQ ID NO: 79422 - DNA, 1208 bp, Homo sapiens
  sig_peptide (301)...(166): this location contains the signal peptide sequence, MFKSKLLNFYIFVNCMNFLMLSIASFNPFWSEIIVCNIQFFYYTL, Run with SignalP
  misc_feature (308)...(707): similar to gi804788 in the genepept database release 114, Run with FASTXY 3.3t00, default parameters
ggggaacatctcacattgggacctgtttgggggtgagggactatgaaaggaatagcgttaggagaaatacctaatgtaaatgatgagttgatgggagcagcaaaccaacatggcacatgtatacctgtgtaacaaacctgcacgttctgcacatgtaccctagaacttaaagtataataaaaaaattgaatgttacatactataatttctgaccaaaaaggattaaaactagcaatcgataacataagaaaattcatacaattcacaaatatgtaaaaattaagcaatttactcttgaacatgcttttgttcaagagttagaaaacttaatattttgaacatgtctataatgccaaaagtgacctacagatttaatacaatccctataaaattcttaattttatttttgacagatacagaaaatgtgactcccaaaagtatatggaatttcaggagaccacaaagaactctacagttttcaaaaagagaaaaattttggaaacattacaattcctgttttcaaaacctgttacaaatctacagtaatctaagtagtttgttactggcataaagacagacaaatagactaataaaaccgagtgcaaaaaagatgtaaacgctcacatatttattgtagctttacttacaaaaatcaataggttaaagcaatccatacttccctcaacaaacaaatgaatgggtacaatttggaatataaaaacaatagaatattacccagcttttgaaaagcagaaaaccttttatctataataaaaataaaatcttgatgacattatgctaaataaaaaaagccagctacaagacagatactgagtgtatccacatgtataaaatatctaaagtagtaacatccttacgaaacagagaataagatagcatttgtaaagggctgaacaaaggagaagacaggcagttgtttcaggtggtattggagttttagttttcgtaagattaaaaatgttctagagatacgtccgaataatggtccatggtgctggaaaggtctaaactatataattattgccattgcaaattattgtaaaactgaaaataattgccaatttttatatggttcttataacagtggtacccatgataatatctaagtgagaaaccggtttaatgcatttcaattaaatatctttcggaacttggcccaaaaactggagtctgttcctctcggtttg

SEQ ID NO: 79423 - DNA, 1460 bp, Homo sapiens
  sig_peptide (220)...(355): this location contains the signal peptide sequence, MPSSHLVWRLLTCSSLGPGLPSPHSYDPAPPRPRLGRGWEVGEGT, Run with SignalP
  misc_feature (78)...(1019): similar to gi4519617 in the genepept database release 114, Run with FASTXY 3.3t00, default parameters
tgcttggcacgaggaggtccctgtggggtgggtggggagctggcagctacaactgatgccacagaaaggctgtaccacccaggaaccagccttcctgggaaggtcagcccgtccctcttgctgaatgcgactagaatcagagccaggctggctgctttgccccaagttgaggagtgggcagtacactcaggctggagagacctcggcaccacgtgccccatgccctcatcccatcttgtttggaggcttctcacctgttcatctttagggcctggcctcccctcgccccacagctatgaccctgctccccctcggcccaggttggggagaggttgggaagttggggaagggaccagcaggggcggccaccaactgcttaccagggtacaggcaacccagagcgagcctggctcacaggccactgctgccaggcctggctcaggggtccttccagccagagtggcaaggtaggccaaggagagtgccaggcccaggccactgccctggctctgatgggcctaagggagcagatggaagccacacttgcttcagggttacctggcccgaggactaaggccaagccggtgccatcatcttttgggaaggttcaaaagatggcatctctgccaccaggctgggggcccagagggacaggaaggagcagccaggggctttgatggggaggtagggagctggtggaacagctttctcactcctgtcagcaaggagtcaggaggtaccatctcgtccccccacagtggccccggcatctatggcccaccgttcagagggggatgctatcttctcacaccaggacaggcccatttgtaggagcccattggtattccaagtgagaccaccaactttatagtccccatgtccctgtcccaactccacagcttctagagaatccagctgcaggggaagcctgtccccaactcccattctcctgtctggaggcagagacgggatcaaatgagcccccagggctccagcaggccactgcctctgcaggagtcagcctgcttcacactgggagaagggaagagggggcaagagagagacaagaaaccaaagcttgctaaaatgtttctgagatggcatggggtgtggttatattctgtatcaaaattggaagtgccttccttccacattacctaagaaccagttaggactctgaagacaccacaagagtgagaaatggttaagttcagtgtccgtgacaaaaatctcctttgtacaagataaaattatccttggggaggaggactgactgactaggaggcagaagggaaacagttcccatgtacagacttggcatggggagcaaaagcgggatgagggctgactgttcccataagccaaggacccatggttcgtcttcccacccaagtgacaatcacactcacacttggtgtgttttatattttttaataaagtttgtaatccaatggacacac

SEQ ID NO: 79424 - DNA, 329 bp, Homo sapiens
  sig_peptide (91)...(226): this location contains the signal peptide sequence, MHLTLIAVRTPTVLFSPWTLSSMSVLRRIRPEAAYCIATAVFMNL, Run with SignalP
  misc_feature (96)...(330): similar to gi899296 in the genepept database release 114, Run with FASTXY 3.3t00, default parameters
cctcacccggcccggacacggacaggattgacagattgatagctctttctcgattccgtgggtggtggtgcttcttcttggggggcgaggatgcaccttaccctcatagctgtaaggacccctacagtcctctttagcccctggactttatcatctatgtctgttttgaggagaatacgcccagaggccgcttattgtatagcgactgctgtcttcatgaaccttattaacatggctcatgcatgccatcggcacttcttccgcagatattacaaacaccgaggggagggagagcgcaaagacattgtttcgtcgactcggccgcgaat

SEQ ID NO: 79425 - DNA, 449 bp, Homo sapiens
  misc_feature (1)...(449): n = a,t,c or g
  sig_peptide (360)...(225): this location contains the signal peptide sequence, MNCFSLRLETRQACPLLLLAFSIVLEVQACAIIKEEKVKDIPTGK, Run with SignalP
  misc_feature (358)...(337): similar to gi2197085 in the genepept database release 114, Run with FASTXY 3.3t00, default parameters
attgaaaaccttgatgacactcggccagngcggnggaattcaataataataataatggctttgtttttaaaatttcagttcccattgtttgagctagtatatggaaattcaattgacacttgggtctgctaacttattagttctagtagcttatttcatatctcctgggactttctatacagatgatcatgttgtctgcaataagaacagtattacttcctcctttccagttggtatgtcttttactttttcttcttttattattgcacaagcttgaacctctagtactatgctaaatgcaagcagcaagagtggacatgcttgccttgtttctaatcttagggagaaacaattcatactttatccattaaaatattagctttaagtttttgtagctgtattttttctggttgagatagttcccttttatatttagnttgctgattttn

SEQ ID NO: 79426 - DNA, 687 bp, Homo sapiens
  sig_peptide (330)...(465): this location contains the signal peptide sequence, MYREVCSIRFLFTAVSLLSLFLSAFWLGLLYLVSPLENEPKEMLT, Run with SignalP
  misc_feature (675)...(0): similar to gi293188 in the genepept database release 114, Run with FASTXY 3.3t00, default parameters
gtgtggtggaattcctggagccgggatagggctgcggtgggaccaaagcctgtgagagacttcccagctgtctggcttgtggactgagcaatctgcggcccggtctcgaggggaaaataggtctgtggtccgcaaggccccagtggagcccttgggttcccgcagaaccgactgggtctccagtagtctctgaggagccgctcgaccttctcccgaccctggatctgaggcaggagatgcctcccccgcgggtgttcaagagctttctgagcctgctcttccaggggctgagcgtgttgttatccctggcaggagacgtgctggtcagcatgtacagggaggtctgttccatccgcttcctgttcacggctgtgtcgctgctgagcctctttctgtcagcattctggctggggcttctgtacctggtctctcctttggagaatgaacctaaggagatgctgactctaagtgagtaccacgagcgcgcgcgctcccaggggcagcagctgctgcaatttcaggccgagctggataaactccacaaggaggcgtcccttgtttgcggctgcccctccctgagagaggtgccaagctccgccgtctcaaggctggaaccaccttctatcgcgcaaccccttctctctcgtctccagctttatttatccgacccctcatcatatctcgtcc

SEQ ID NO: 79427 - DNA, 357 bp, Homo sapiens
  sig_peptide (91)...(226): this location contains the signal peptide sequence, MFWRGWGAPLWAWPTLLTPIKCSSLYDSFFSPTDALGLESLLGTA, Run with SignalP
  misc_feature (30)...(358): similar to gi183296 in the genepept database release 114, Run with FASTXY 3.3t00, default parameters
cggacgcgggggcggacgctgggccttgctccttcctcattgggatcatcagtcagtgaattggaaggaaatgggccatgctggtcaacaatgttctggcggggctggggggcacccttatgggcctggccaacgttgctgactcctataaaatgctcatccttgtacgattcctttttttcgcctactgacgcgctgggcttggagtcccttctgggaactgccagcctgtggccactgctcctgagcctcacagagctacctgccctcctgcaaatgtgactgctgaccttctgttccgaaagaccccgctacctctacgtaatacataatttcgagggacctgccagaattagt

SEQ ID NO: 79428 - DNA, 626 bp, Homo sapiens
  sig_peptide (443)...(578): this location contains the signal peptide sequence, MGTWPVLCCTLVAGETAILISVKTLPWRGLYLARVAIIARIKVYT, Run with SignalP
  misc_feature (623)...(119): similar to gi1524161 in the genepept database release 114, Run with FASTXY 3.3t00, default parameters
gaagaagcttgcaggtttccttaatgacaacaaaaaagggagtaatcctacccactgtaagagtcatgactcttgattgcagctgacagaaactcatgacagcctgctttagatgaagggggagagaaggactggaagaatcttggagttgggaatgtcacacgtaattgaaggaagaacaagaaaactatattaaagaaccctggggtggtgatgtagtcatgggccaagtgtcctggaaccctggggtggtgatgtagttgtgggccaagtgtcctggaaccctggggtggtgatgtagtcatgggccaagtgtcctggaaccctggggtggtgatgtagttgtgggccaagtgtcctgggttttgggtggagaaagagtcccctatataagttattaggtgggtgcaaaggcccatagatcaccttacccttataatttatggggacctggcctgtactttgctgcactcttgtagctggggaaactgcaatactcatatctgtgaaaaccctgccatggaggggtctatatcttgcgagggtggctatcatcgcacgaattaaagtatatacataacgttggtcagcgattgtgttaggaggaaacagcttaccctaatggt

SEQ ID NO: 79429 - DNA, 867 bp, Homo sapiens
  sig_peptide (47)...(182): this location contains the signal peptide sequence, MPQIYLPVLLLFSVRNYAALNIHIYISWSSHLKVSLGIYIVVKLQ, Run with SignalP
  misc_feature (650)...(30): similar to gi1196433 in the genepept database release 114, Run with FASTXY 3.3t00, default parameters
ggcacgaggttcattcatttttacttttgtattccactgtataaatatgccacaaatttacttacctgttctcttgctattttcagttagaaactatgctgcattgaatattcatatatacatctcctggtcctcacatctaaaggtttctctgggcatatacatagtagtgaaattacaagctcaacctaaaaagataatgctaaattgttttcccaagtgattgacccagattatattcctgccagaagtttatgagttcccatatccttaccagcttgcaccctctttaaactttaaatccttgctaaactagttggtacttaatgatgtattcttgtagttttaatgttcatttcacttgtgttttatcttctaagacacacctgtttgtgtcttttgtctatttaaaaaatgtttctctttttcttaaagatttataggaattctatatcgaattctttttcatttatatatattgctatattttctcctagtttgaagcttgcattttctctgttgttaacatcttttgataaacagaaattgtcaattttaatgtaaccaaattaatcatcttttcctctgagactatcattctttgttttgctttcttttggtgacttgtttatgaaattcttctctaccctgagggcaaaatatcatcttatgctttctactaagagcattaaaattttggcttttacttttctactctagtacacagaaaaaacaaaccaaaaaaacccccacaatatgaaaaatagttttggctttgatatttaaggccttaccttcatccggaattaattttaacgtctgaggagaatccaatccaacttcatttttttcccaaacgctaaacct

SEQ ID NO: 79430 - DNA, 1279 bp, Homo sapiens
  sig_peptide (840)...(705): this location contains the signal peptide sequence, MLQNSVYVNFLLTGLVAQLACHPQPLLRSFLLNTNMVFQPSVKSL, Run with SignalP
  misc_feature (93)...(1231): similar to gi995557 in the genepept database release 114, Run with FASTXY 3.3t00, default parameters
ttttttttttttagagatttcccttttatacatattgcaacaagttctccataaaacattcatctgaaataaattaaaaagtccttttgccactgcctccaaacataaaaaggagcctgtgccctagccccagcccgggccacccatggccctgattgtccatggaagaaagttaaggattgaggggcccacagcctgagatgagagggccagatccttcctctgaagtctccaacaagaaaggcgaggtgacggcatgagcctgggagatggcagccaactccttgagaaattcagggaaaatgactgcacagtagacagcattcttgactcgaagagcctcaccttggcgttcaggggccccgccccgggtgagtagaactggagttgaagccccaggggagcccccacttaggccaagtcctgctccgtctcgcccaggctgaaggaccaattgtgccgcctgccgggccctggttggactgtgtgcatgccgcaggagtaactcccccaaggatggcctccggctcttcactaggggatcagaacggcgtggggcaggtcctgctgcagggccctcagcccagtccaacttgccacgggcaatgaggtacttcttggctttggacagcagtgctgggaagtcctcctgggaagccgcaaagttctcaatcttattcttcacagagcccagcacctgcagcagggacttgacactgggctggaagaccatgttggtgttgagcaggaaagagcggagcaggggctgggggtgacaggccagctgggccaccagccccgtcagcaggaagttgacatagacggagttctgcagcatgttctcgagtttggcaaagagcacagccatgaaggggccagtgaagggctggcttggcagctggttgagagtccgcaaagggctgctgaggaaggggccagggggctcagggggacaggtgaagctctcgtaggcctcctcctcctcaaggggcagtggaggttctaagggggactctgagccagttcccccattgctcaatgccacctctagctcccggagctcctgcccaaagccctctagtcctgccatgccctcggagatgccctctagcagttccccagctccctcctttggcaccagacgaaccttcttggccccctcaggccatgatcctggcactccattgagctggggagggggcaggtgaccaggtacggcaggctcggacacagcggtccacaccacgacgtgcctcacgcagatactccaggtaattgt

SEQ ID NO: 79431 - DNA, 346 bp, Homo sapiens
  sig_peptide (205)...(340): this location contains the signal peptide sequence, MSFNSLYCLIWVLSFTVLLQISVTVHIWDWQTTTTTKPEWRRRAP, Run with SignalP
  misc_feature (9)...(261): similar to gi12882 in the genepept database release 114, Run with FASTXY 3.3t00, default parameters
tgagaattttcaattctgccttctgattcatctgtagaagttctcatttctgctatcatgctttcagtttccaaaagctctgttttctaaatattcctttcttaatagcaccctgttttttttgtgaatgcaatttctttccttacctctccaaatatatgagtgacaacttcttgacagtttttctcttcttacaaagtatttatgtcttttaactcactttattgtctgatttgggttctttcatttacagttcttcttcaaatatctgtaactgttcatatctgggactggcaaacaaccactacaacaaaaccagagtggaggcggagggcaccgtggaggc

SEQ ID NO: 79432 - DNA, 534 bp, Homo sapiens
  sig_peptide (293)...(428): this location contains the signal peptide sequence, MSLEWLVAWSWSLDGLRDCIATGIQSVRDCDTTAVITVACLLVLF, Run with SignalP
  misc_feature (56)...(519): similar to gi4884836 in the genepept database release 114, Run with FASTXY 3.3t00, default parameters
cctaaacaaatcctttcacagggaccgacggcacttgataatgtgacaaaaaccagcctcttccaccccactgcagtgacttttgccggaaagtggagcagtgggcacggccaaccttgtcgttcatcaatgccgcccctggcagtatctgaggatcggtggcagccatgcctccccctgccccagccgctccttcccccccacgctaatctgcatggtgtgggcgcccttgggacccccgaggactgattgtctgaccttgcttcacacgcccagtaaggactcccccaagatgtcgctcgagtggctggtggcctggagctggtcgctggatggcctgagggactgcatcgccaccggcatccagtccgtgcgggactgcgacaccaccgctgtcatcactgtggcctgcctcctggtcctcttcgtgtggtactgttatcacgtgggcagggagcagccccggccctacgtctccgtcaactccctcatgcaggctgccgatgccaaacggggctgcagaatggctaacgt

SEQ ID NO: 79433 - DNA, 423 bp, Homo sapiens
  sig_peptide (397)...(262): this location contains the signal peptide sequence, MEQEFKLLTGFITAILRLLQLTGFLGNHQPLDRSSHLDQKALDLP, Run with SignalP
  misc_feature (5)...(421): similar to gi5410607 in the genepept database release 114, Run with FASTXY 3.3t00, default parameters
ccctctcagggaatggctccttggaagcaaccataccagtggtcttcaggaacaaccccccacgactggctcccccaaaagcagacgttggagaatagacttcttccagagcctgcagtttcttcagtaatgtctcaggcaacctaaagggctttgaaaacttgctcctcaagagtcagcaacaagaagttccagaaaaaccaagttatccaaagtgacagccattttactaccagttctttctccatttaattgaaaaggtggaagatctagagctttctgatcaaggtgagatgatctatctagtggctggtgattccccaggaatcctgtaagttggagaagcctgagaatggcagttatgaaaccagtgagaagtttaaattcttgttccattcctacaatgtgaatgattggcttgcc

SEQ ID NO: 79434 - DNA, 411 bp, Homo sapiens
  sig_peptide (15)...(150): this location contains the signal peptide sequence, MVPVFFDGHIWTCLCVKWTQKTGPLPWPKTWRWLLLLARQHGSWV, Run with SignalP
  misc_feature (85)...(312): similar to gi1236781 in the genepept database release 114, Run with FASTXY 3.3t00, default parameters
ggcaggaagtcctgatggtcccagttttctttgatggccacatctggacttgcctgtgtgtaaagtggacacaaaagacggggcccctgccgtggccgaaaacgtggcggtggctcctgctgcttgccaggcagcacgggagctgggtctccctcggacccctcaaaagatggttcctcaccgtcttctacaggctgatgtaaaatttctgtgaggcgaaagccacatttgccagctctgggtacgaagttcacttcacagtcggtccttcacttggtgagctttgggagccaggctgccgtggccagatgtttatgagcacgacggtggctctgcagagggcgatggtgtgcagccgggctttcctgtcgcccacaccttgtaggccctcaccccttcccgtgccttcac

SEQ ID NO: 79435 - DNA, 439 bp, Homo sapiens
  misc_feature (1)...(439): n = a,t,c or g
  sig_peptide (299)...(434): this location contains the signal peptide sequence, MGYNLLFFLIILYCGWLFMSLSVHLQYYFEWLNNVSMCTYILVYL, Run with SignalP
  misc_feature (93)...(396): similar to gi340613 in the genepept database release 114, Run with FASTXY 3.3t00, default parameters
tcnaactgaaaacagctgatagacttcgcaccacgctnggnacgaggggagactttctttgaatctatagaatctcatcaaagcaacttattgtgatttgcttttttaaattcctgttttcttattgtgaaactggtatgtggtttttgcacaaaatgcatacaaacaaaaataagagtacaaaaattacctgtaatgcaaccaccaagaaataactcctattggcatattactggttctccttgagtttttccatggctgtttacttaatttacagaaatggaaacatattataaatatgggttataacttgctttttttcctcatcatcctatattgtgggtggcttttcatgtctttaagtgtgcatcttcaatattattttgaatggcttaataatgtttcaatgtgtacatacatcttagtttatttagccaan

SEQ ID NO: 79436 - DNA, 470 bp, Homo sapiens
  sig_peptide (298)...(433): this location contains the signal peptide sequence, MVLIYSGLSSLPWAPPMILLYCVLGTSLNTQKVPVGKIGAYNLGV, Run with SignalP
  misc_feature (93)...(300): similar to gi2253595 in the genepept database release 114, Run with FASTXY 3.3t00, default parameters
agcctcccatgaccacatcattagaacactacgccaagcttggcacgagggcgaaatggggataataatcatcatgatgatgatgacgatgacccttccatcaaaacaagacaataacagctgccaacctttgtgacactcaggatgcgccccactctgagcacttcatggatgtaccctcatttaaccctgacaatagctgtggggcaggttggcaattctgtctgtttgggagctgtgtagtctgaagcacagagaggttgaatctcctacctgaggtcacacagctggtgggagatggtgctgatttactcaggcctgagctctttgccctgggctccacctatgatacttctctactgtgtgcttggcacatctttaaatactcaaaaggtacctgtaggtaaaatcggggcttacaacttgggagtactgagaattacaaataaaggagtctttcacattctgtc

SEQ ID NO: 79437 - DNA, 838 bp, Homo sapiens
  misc_feature (1)...(838): n = a,t,c or g
  sig_peptide (77)...(212): this location contains the signal peptide sequence, MFFLIIYLSRFFLPALLNCFKYFFCSQCALPFRMLDFSSPSVLIA, Run with SignalP
  misc_feature (55)...(838): similar to gi3037018 in the genepept database release 114, Run with FASTXY 3.3t00, default parameters
atatattctgcctagattacttctggccacaaagctatcatccactgagattatcttgttggtttttggcatcaatatgttcttcttaatcatatatttaagcaggttttttttgcctgctttgttgaattgttttaagtattttttttgcagtcaatgtgctctgccattcaggatgctagatttcagctctccatctgtcttgattgctgatttgtatgtagtaaagatgtattcttgaacaattctctttttttccttatctggggctacagggaaagagttaatgtagagccctggtgtttgtttcagtatgtttcatattttagattagttcattcttccttttttaatttccctttaacacaaactctcatactatgactgaaatttttcatcattttttttctccttttccacaactttcttaaacatacttcaaaactcactttttattatcccatgttacatctgtccctttagagacttggacaaatcaactactacagtatcctgctctgtgttcctcataaacaaattctttttctgagttaggcttagacttttgaaataggcattttgaaaagaaaaccaaattcttcctttgctttatntatcacatctcgcacaaaggggaactttttcaaaatgccctttttaaatatgttggcctttcttttttcactttttcaagggtactcaatctgactttttttccccccataatatggtgccggtgggccttaaaaccatttgttatagcccccccaactagcctggatctaatattcctggggaccggcccatttttttccttggaggggcgctaactttaaag

SEQ ID NO: 79438 - DNA, 426 bp, Homo sapiens
  misc_feature (1)...(426): n = a,t,c or g
  sig_peptide (184)...(319): this location contains the signal peptide sequence, MPWWALICANTSPLCAPPLCSPLPQPRPGLQAPFPSGPPRRWGHK, Run with SignalP
  misc_feature (385)...(322): similar to gi758593 in the genepept database release 114, Run with FASTXY 3.3t00, default parameters
acagacacgagtcactgcgcctggcagcgtgagacccaaggtgaaggaggtcttccatatggagtctttatttttgtcaccagggtcacccctttcatgttccagagtggctgacagtgaggactggtgtccactggggagttattttgtctgcttggctgttccgcgcctcatgtgtgctggatgccttggtgggcactgatatgtgcgaacacctccccactctgtgcccctcctttgtgttcaccactgcctcaacccagacctggtctgcaggctccttttccttctggcccccccagaaggtggggacacaaggccactgcccagaagtctgggcactctcacctcaggccacttctgcttgcagatggtggggtgaccgggcatgccgcctgcagttctgcccactgagaaggatttccn

SEQ ID NO: 79439 - DNA, 382 bp, Homo sapiens
  misc_feature (1)...(382): n = a,t,c or g
  sig_peptide (189)...(324): this location contains the signal peptide sequence, MRMQCCSTGLCSSRVVLILLPLXXXXXXXXXXXXXXXXXXXXXXX, Run with SignalP
  misc_feature (4)...(382): similar to gi313720 in the genepept database release 114, Run with FASTXY 3.3t00, default parameters
aaaggtgtttccagcaggagcagcaggaaactgagttgctgcatcgctctaacctcacatatttccctttccccctcctctgacattaaccaaacataccacgcaggagacactggcagttgaggctctgtgggtggaggctgcccagcttagtgagcaggggcaggtagctgcgaaactcccccaggatgcgcatgcagtgctgcagcacggggctgtgcagctccagggttgtgctcatcctgctgccgctgnnannnnnnnnnnnnnnnnnnnnnnnncnnnnnnnnnnnnnnnnnnnnnnannnnnntnnnnnnnnnnnnnnnnnnnnnnnnnnngnnnnnnnnnnntnnaaaaancncnaannaaaanntaatatag

SEQ ID NO: 79440 - DNA, 435 bp, Homo sapiens
  misc_feature (1)...(435): n = a,t,c or g
  sig_peptide (6)...(141): this location contains the signal peptide sequence, MCGSPERLCVRCARVCAVFMRALCVVCVYLRRRIKYERFLGWELR, Run with SignalP
  misc_feature (125)...(435): similar to gi2913997 in the genepept database release 114, Run with FASTXY 3.3t00, default parameters
gggaaatgtgtgggagccctgagcgtttgtgtgtgcgctgcgctcgtgtgtgcgctgtgttcatgcgtgcgctgtgtgttgtgtgtgtatatctgcggagacgcataaagtatgagcgctttttaggatgggaattgagatgtaagatttgggggtgagggccnccctgacccataggcctgacatcctcatcctatggaccctagagtctggccactccaggaacctgacctgctctgtgccccgcccctgtaagcatagaacaccccccatgatctcctggagtggggcctccgagacctccccgggccccactactgcccgttcctcagtgctcacccttaccccaaagccccaggannaccggnccagccctcacctgtnaggttgaccttgcctggggacagggtgtgacccacgaccnatacctntncg

SEQ ID NO: 79441 - DNA, 401 bp, Homo sapiens
  misc_feature (1)...(401): n = a,t,c or g
  sig_peptide (217)...(352): this location contains the signal peptide sequence, MNICTNTMPCSICFYFTAIWLIXKYLEILLMFHPWLSWICPITSL, Run with SignalP
  misc_feature (106)...(404): similar to gi642534 in the genepept database release 114, Run with FASTXY 3.3t00, default parameters
cccctctccccgcttccccagcagctaggagaggggtcagggaggctaatggttgctttgctgaatgtttctggggtaccaatacgannttttntaagggctgcttccttttactagcttgactttaacttagtgaaattgctatacttccttttgatccttttctctctcttataattctgtatttaaacgactataagatcagcttcatcccttatgaatatttgcaccaatacaatgccttgcagtatctgcttttatttcacagcgatctggctgatagngaaataccttgaaattcttttaatgtttcatccctggttgagctggatctgtcctataacaagcttaaaatctttccaactgtcaatgaaaacctttgaaactattaccttgaggtc

SEQ ID NO: 79442 - DNA, 481 bp, Homo sapiens
  misc_feature (1)...(481): n = a,t,c or g
  sig_peptide (250)...(385): this location contains the signal peptide sequence, MLVLSFWFAFVCLQGNVMFKEKRKSYQSMLSEHFNQCKVKSQMTP, Run with SignalP
  misc_feature (85)...(336): similar to gi2315465 in the genepept database release 114, Run with FASTXY 3.3t00, default parameters
ggactggtttaaaatgaaggcattgagtgtctngcgganngcggggagatccaggcgtgacgccacgcgtncgcatctgtggaatgtaaagagcaatctgtatttatttttctgtaactggtcacagcattgtgttctagactagggagtgtgtgctcatacagcaccatgtgtgttcaacaacacacaaagttggatgacaaaatcactttagtgagaaggcagctatttccaggggcaccaatactaatgttagttttgagtttttggtttgcttttgtttgtttacaaggcaatgtaatgtttaaggaaaaaagaaaatcttaccagtccatgttgagtgaacatttcaatcaatgtaaagtcaaaagtcagatgacaccatgccatgcaaaccttacagtacatgacatattaaatcagtaacctcaaaagggacttcttataagctatgagtaaaaggcatacacaaaatgcctct

SEQ ID NO: 79443 - DNA, 477 bp, Homo sapiens
  sig_peptide (196)...(331): this location contains the signal peptide sequence, MIMNMCFLLSYVSFCYTCFGAILSDAYKFRIVLSSCRTDLVIIMN, Run with SignalP
  misc_feature (455)...(18): similar to gi1335196 in the genepept database release 114, Run with FASTXY 3.3t00, default parameters
atagaccagcgctgcaggttttggtaaatgtagactgtgcacttgagaagaatgtattttgagttgttgggtacattgttttgtgtgtgtcaggtgacattgactaatcctgttgctcagagctcctgtacccttactgactgacttaagcctggtttctcagttactgagagaggcctgtgaacagttctagctatgatcatgaacatgtgttttcttcttagttatgtgagtttttgctatacgtgttttggggctattttgtcagatgcctacaaatttaggattgttttatcttcctgtcgaactgaccttgtcattattatgaactatttctcttcgcctctccttttcacttcttgccttctgaggattttgtctgatactaatccaggcacactgctgctgttttggtcagcgttttcataatgcatcttcttccctccttctactgtactggatttaaagcgcaccttt

SEQ ID NO: 79444 - DNA, 478 bp, Homo sapiens
  misc_feature (1)...(478): n = a,t,c or g
  sig_peptide (65)...(200): this location contains the signal peptide sequence, MSVRRALTPSALGLVFILQIFAHGLPGPGPCHLGPGICLRICQCA, Run with SignalP
  misc_feature (237)...(480): similar to gi2961385 in the genepept database release 114, Run with FASTXY 3.3t00, default parameters
ggtcacgcaagcggcnncnnnttttgagacctttgatagcgtgtaggaanncccaggccagtgaatgtcagttcgtcgggcactgactccgtctgctcttggccttgtgttcattttacaaatatttgcccacggcctcccaggcccaggcccatgccacctgggccccggcatctgtttgaggatctgccaatgtgctcttaactgaggacgaaggaagaacacctttctatgagtcttgcaaagattacctccttcaggccacaaatatttgagtgcacactacgtgccaggcactgtgcagggctgcaggcatagagacagaatgtaatctatctgggccttggaccccatagggagaggggaccactcaggtccatacttcctttggacttggggctttggccttgggaggggcggaggtggcgtggcaagatgaaaaagacatcctgcccccatccacttgggcagagcttct

SEQ ID NO: 79445 - DNA, 1206 bp, Homo sapiens
  sig_peptide (970)...(835): this location contains the signal peptide sequence, MLCHPHVHHHLVCLLATLTFSLNASCAEQTFHSQQSNGEFMATLP, Run with SignalP
  misc_feature (10)...(1144): similar to gi3834293 in the genepept database release 114, Run with FASTXY 3.3t00, default parameters
ttttttttttcaacagcttccttctcccccaagaacccagaaggcatggaacatggacgacctacagggcctgctggagaagaccaatgggtgcatgggatgaccggcagcttccctcaagtggcttcccagagactactaggagaacttggtcctatcgctgcccccacctggaagctggacttaaggatcccccaaagaacggggcaattagaaacctcccacccagcgaagggataagcttctcaactcagtcccaccactcttcatcgcaaccctctgagtctgcagcagaaacaaacatctccaagttacagaggaggggatggaatccccaaggggccgagcggtagcccttttaacttataagcctgttgattagcctatacgagttatttgcacgtcaagaaaggaagtagcctgctccttcctgcagcgtcctgctggtgtgacagcacgtccccaagctcagtgctaacctccttattaaacatcccctgctgtgactcagggaacccacatgggtactctaaaacagtcattcagggaccccacggggtcatgtgggagggagacagatcccagaaagagcacaagtgagtcattaccaaaaactccaaggcccgcacaccggacgcacatacccagctaggggcagactcaaagatcccagcccttatcttctccccatatcagagctcggaagccagaaatcttcctaaggcaggtgaaagcaagccgagccccactgctgaaggacaaagccacaggaagcctgatgacatctttcctctgaggcttccaaacgatcaccccaaattgcttgctgatactgggaagagtggccatgaactctccattgctctgctggctgtggaatgtttgctcagcacaggaagcatttaaggagaaagtcaaagtagccaaaaggcaaaccagatggtggtggacatgtgggtgacagagcatcctgcatttgttgcctcggggtgcagccccaaagataaagccagcagtgtgcaaatgacaaatgctaccccacctccgccaggcagccagagccagggccgaaggacgcggaaaggaactggtgtggaaacctgcccaggaaccgcactctcaactgagaagagtccggggcgcgtccccgcccggccgcccggctgtgaattccgccacacggcctagggtgctcgaggtctcgat

SEQ ID NO: 79446 - DNA, 413 bp, Homo sapiens
  sig_peptide (98)...(233): this location contains the signal peptide sequence, MLSLPCGWLCTAIGLPTMFGYIICGVLLGPSGLNSIKVRTKLDCF, Run with SignalP
  misc_feature (2)...(413): similar to gi4191789 in the genepept database release 114, Run with FASTXY 3.3t00, default parameters
tgactcccagaacaaccagtatattttgaccaaacccagagattcaaccatcccacgtgcagatcaccactttataaaggacattgttaccataggaatgctgtctttgccttgtggctggctatgtacagccataggattgcctacaatgtttggttatattatttgtggtgtacttctgggaccttcaggactaaatagtattaaggtaagaacaaaattggattgttttggtatctgtttaacagaatataaaaagagaattcatgaagactaaaaagtattgaatgtgattaatgcagataccagcttcgtataaaccatttcaaagatgtcctttcaggtgtcacgggaagtctctgaaccctcaggaagtcgctgtgcctgttagtgaaggggcggtgttactggaa

SEQ ID NO: 79447 - DNA, 1871 bp, Homo sapiens
  sig_peptide (537)...(402): this location contains the signal peptide sequence, MTWAGLFLFLRVGSPNRKWAASGGSGGDGVDGEDWSLARSHPQSP, Run with SignalP
  misc_feature (1757)...(449): similar to gi560151 in the genepept database release 114, Run with FASTXY 3.3t00, default parameters
atggctgccgctgcccttacaagcctgtccaccagccctctccttctgggggccccggttgcagccttcagcccagtgccccctactgaggccaaagcggcaggacccaggccttctggcctccctgacctgctcacctccacgcggctggccacacacgtctgccaaccctttcctgtgccgggggggtttctccccaagccctggggccagctcctccaagacgctctgcccaccagtctcaccggacttggtgaacaggggcagctcaggattagggactccctggacccacccgaagttctaaggcggggggcccgtgtccccacagagcctggcctggagccctggaaggaggccctggtgcggcccccaggcagctacagcagcagcagcaacagtggagactggggatgggacctggccagtgaccagtcctctccgtccaccccgtcacccccactgccccccgaggcagcccactttctgtttggggagcccaccctgagaaaaaggaagagcccggcccaggtcatgttccagtgtctgtggaagagctgcgggaaggtgctgagcacggcgtcggcgatgcagagacacatccgcctggtgcacctggggaggcaggcagagcctgatcagagtgatggtgaggaggacttctactacacagagctggatgttggtgtggacacgctgaccgacgggctgtccagcctgactccagtgtcccccacggcctccatgccgcctgccttcccccgcctggagctgccagagctgctggagcccccagccctgcctagtcccctgcggccgcctgccccgcccctgcccccgccccctgtcctgagcaccgttgctaacccccagtcctgtcacagtgaccgtgtctaccagggctgcctgacgcccgcccgcctggagccgcagcccacggaggtcggagcctgcccacccgccttgtcctccaggatcggagtcaccctgaggaagccccgcggcgacgcgaagaagtgccggaaggtgtatggcatggagcgccgggacctctggtgcacagcctgccgctggaagaaagcctgccagcggttcctggactaagtccggctcgttcaagaacataagctaccaccttctccctccccaccccctccaggcccggggctgaaacagcccgaggacagccccaggggctggccttcaccagctgcagggtctgcttttacttggggtgggggggcggggctgaccctgaaccctcccccccgccaggtcggggaggggtcccaccactcaaagtgcctctaaagaaaccagctttttgcactaaagccaaaccacaccgctgtccccttagccccaagggccctgggggcagccaccctcccgcctgtcggcccgtagatttatcaagggtgttatgggcccagctttggggggccagtcccgatgcactttgaggggtgttggagaggggactcccccactcgcacttaactcaacggctctcgggccctggggctgtttttaccatgtttgtttttgaagctcaggtgtctcacgtctgggctgcaccaggcgaagagagaaattaaagatttgaggtttttccagaagctttgtctgcctctcgggaggaaggccgtggggctgggaccctgtggtgggcaagtgggtggagtctggcagctgcccacagagggccgagggtcacccgtcggccgccgccaccccaggcgaggccggaggaaggatcatctgagacgcaggaggcatctgctggagcagcaatttcccaatttattgaaagtgatcgctttgcaaggatgtctaagctaatcccgtcacagaaaggaaacgcacaggcg

SEQ ID NO: 79448 - DNA, 844 bp, Homo sapiens
  misc_feature (1)...(844): n = a,t,c or g
  sig_peptide (293)...(428): this location contains the signal peptide sequence, MTLATILFLLGILIVISKKVKCRKADSRSESPTCKSCKSELPSSA, Run with SignalP
  misc_feature (390)...(844): similar to gi409219 in the genepept database release 114, Run with FASTXY 3.3t00, default parameters
aggtttcgagaccactaggccagngcgttcgatattcgttagagggcacgggaggaaagtanagggtacagagggcaaggggagctaacggtgctcaagcccacaccctacatcctcacatcaaccccctgaaggagtgtccagcacagtccacagcctccctgggcgattctgggttcctggctgggccacccagagccaggactgggctccaggtgcagccaaggtgctgtccctgcctcgatgtcccccattatcttccccagactacaacacggtgcagactgtgggcatgactctggcaaccatcttgttcctgctgggtatcctcatcgtcatcagtaagaaggtgaagtgcaggaaggcggactccaggtctgagagcccaacctgcaaatcctgtaagtctgagcttccctcttcagcccctggtggcggcggcgtgtaacaccttcccgaggaaactccgctgccgaccctgcctgagcgcgggagcctgaggaccgggtggaggcggtggggacccagccgcgcgccgggagcgctccccggaatgagccgccccacccaccccaaggctggagccgctgcaccctgctgtccctctccaggccttggcaatgacgatcccccaaagagcccgtctgcaccccagacccagggcctcaggcctccagctcctgggatccgggagtccatcccggcccagcacccccagcatccccgtgtatggcccccctgcacctccttgtctcatccccgaagatccgtccccctggcccctcagtgtccatgtcttgagcttaataaatgtgcatttggttttttcctcaaaaaaaaaaaa

SEQ ID NO: 79449 - DNA, 1334 bp, Homo sapiens
  sig_peptide (267)...(402): this location contains the signal peptide sequence, MAVAVLLCGCIVATVSFFWEESLTQHVAGLLFLMTGIFCTISLCT, Run with SignalP
  misc_feature (45)...(1334): similar to gi164836 in the genepept database release 114, Run with FASTXY 3.3t00, default parameters
ggaattccggcgggctggacgccgagtgcggccggcccctcttcgccacctactcgggcctctggaggaagtgctacttcctgggcatcgaccgggacatcgacaccctcatcctgaaaggtattgcgcagcgatgcacggccatcaagtaccacttttctcagcccatccgcttgcgaaacattccttttaatttaaccaagaccatacagcaagatgagtggcacctgcttcatttaagaagaatcactgctggcttcctcggcatggccgtagccgtccttctctgcggctgcattgtggccacagtcagtttcttctgggaggagagcttgacccagcacgtggctggactcctgttcctcatgacagggatattttgcaccatttccctctgtacttatgccgccagtatctcgtatgatttgaaccggctcccaaagctaatttatagcctgcctgctgatgtggaacatggttacagctggtccatcttttgcgcctggtgcagtttaggctttattgtggcagctggaggtctctgcatcgcttatccgtttattagccggaccaagattgcacagctaaagtctggcagagactccacggtatgactgtcctcactgggcctgtccacagtgcgagcgactcctgaggggaacagcgcggagttcaggagtccaagcacaaagcggtcttttacattccaacctgttgcctgccagccctttctggattactgatagaaaatcatgcaaaacctcccaacctttctaaggacaagactactgtggattcaagtgctttaatgactatttatgcgttgactgtgagaatagggagcagtgccatgggacatttctaggtgtagagaaagaagaaactgcaatggaaaaatttgtatgatttccatttatttcagaaagtttgtatgtaacaattacccgagagtcatttctacttgcaaaaggattcgtaacaaagcgagtataattttcttgtcattgtatcatgcttgttaaattttaatgcagcatcttcagaacttgtcctgatggtgtcttattgtgtcagcaccaaatatttgtgcattatttgtggacgttccttgtcacaggaagattcttcttctgttgccttattgtttttttttttttaagtctcttctctgtctttgtactggaatcgaaatcataagataaacagatcaaacgtgcttaagagctaactcgtgacactatgcagtattgtttgaagacctgttgttcaacctctgtctctttatgttaactggatttctgcattaaaagactgcccccttgttaaaaaaaaaa

SEQ ID NO: 79450 - DNA, 861 bp, Homo sapiens
  sig_peptide (107)...(242): this location contains the signal peptide sequence, MCTPVRVSIVCVMGAVGAVWTAPLPLPWAPTPSIHLREEGAAFPF, Run with SignalP
  misc_feature (414)...(832): similar to gi4878035 in the genepept database release 114, Run with FASTXY 3.3t00, default parameters
catcgcattcatgactcctagtccagcgtggtggaattccggtgtgtctgcagtgtgtgcagcatgtgcgtaagtgcatgtgaatgtgcgtgtgttgcatgtgagcatgtgcacgcctgtgcgtgtgagcattgtgtgcgtgatgggagccgtgggtgctgtgtggacagcccctctgcccctcccatgggctcccacgcccagcatccacctgagagaggagggagctgccttcccattctgcggagtctgtgtgctgaggccccgcagaagcaagtggaggagctgggatgtgaacctgggaccccggcgtagggggctgcttggctgtggaccctgcccctcaggaaagcccagggtccacctccagaggactcgttctggggcgggggcggaggcggggggcctccccacccggggctcgatgaggggctgtccgtttcttggctcgagtgctgccaagtgctccctgctgctgcgcccaccttcccggggagaggcgagcccctggcttcctgagttcatgacccaccctgtgcaccatcagcagctggcttgtggctctgggtggcttggcaccaaacatcctggaggcacatgtgccctgggctccacaatgtgaggcccctgctatgccgcttataatcctggggtgacccgcaagtggtgaagggtcagccctgccttgtgcagccaactcgcagaccgggcgacatctgcactggttgggcactcctgggacggtgattgccttcatttgtcggggacgcaaactacgtgttgcagtttgtgcacctccacattgcattcgcgacaaacaaggacgacctggaacagcgattactaactcctccggctaca

SEQ ID NO: 79451 - DNA, 737 bp, Homo sapiens
  sig_peptide (78)...(213): this location contains the signal peptide sequence, MTSLMFLWRALLETISTNMTFSLPLAAVVRAWMKPTGSGMFLYQY, Run with SignalP
  misc_feature (494)...(77): similar to gi3800835 in the genepept database release 114, Run with FASTXY 3.3t00, default parameters
tcgggtgagtaattcgtccaaagagtctcgtactctttatttggttgtagagaagagaaaattaagtttctttacctatgacttctctcatgtttctctggagggctctcttagagactatttcaacaaatatgacattttcccttcctttggctgcggttgtgagagcctggatgaaaccaactggctctggaatgttcctgtatcaatatttgccagtagtcaaatcttcacaagctgtttttcctgttgttattgaaatcagctccatttctggctccatcctccccaaattcccaatgctctctttaatgtctttgcacactggatccatcatataattgtgattagcagctggaactgacagaatatatgaaaatatcctgcttttctcaaactgctgagccacctttcatgacacttggctgtagcttctgcctctcctgacaggatataggagcaaggactgttaaaggctgccatgcacattcttctggagaaggacactacagccttcgagatttctgttctcggaatctataaaggctctaaaaaatgaagtatatatcttttaaaaataaaaaataaataaatcataactgcatacaattagatctagtacatactgcactattgtaatgatctcatagccacctcctgttgctattgcagtgaactcaagtgttgcaggtatccacttaaaacgccaaatgatgctcatcatctccacagaagcg

SEQ ID NO: 79452 - DNA, 739 bp, Homo sapiens
  misc_feature (1)...(739): n = a,t,c or g
  sig_peptide (263)...(398): this location contains the signal peptide sequence, MSPMSYMVFPFKGVLLCMPKCMALWIRHSGNNGQLRSQDNLGAHI, Run with SignalP
  misc_feature (658)...(534): similar to gi2065210 in the genepept database release 114, Run with FASTXY 3.3t00, default parameters
gtcgagtaattcacttaatggtgaaaaactaaatgatttccccataagatcaagaaaaggtaagaataacaatatattctttcaccacttctattcattattgtactggaggcttaatccatgacaattgggcaagaaaataaaatttaaaatatccagtttgaaggaatgagctaggagagtaaaagtaatgcagcaggaattgcatcatgggcatttgtgccatttcctcatgcaacttgttggtgccttcaggaaattcatgagcccaatgtcctatatggtatttccatttaagggagtgctgctgtgcatgcccaaatgtatggctttgtggatcagacactcaggtaataatgggcagcttagatctcaggataatttgggggctcatatttgagctttaatctgtacttaagccttgtagcaagctgaaatcttgttcttaaaaagggaagagttattggcagagaagggcaagactttgcttcaaaatcctaaaggacttaactgtaattcacctatagggatctgccaaagcctccaaacagcatctttctctgcctctgataattaaagcataattgaatatttcagatggatcgtatggcctaagtgacaaaacagctttcacatcaactgttgcagagctttctcttgttctggtcccactcaaaactagcagcttttgagtagtacacccaaattagaaatatgttttctctannatcaaaagagt

SEQ ID NO: 79453 - DNA, 413 bp, Homo sapiens
  sig_peptide (118)...(253): this location contains the signal peptide sequence, MFSTRNTILAFMLSCIIYCKLNFCMVLYKGCSSFSPCECPLFQFY, Run with SignalP
  misc_feature (9)...(226): similar to gi2981297 in the genepept database release 114, Run with FASTXY 3.3t00, default parameters
tagcttgtgtaataatccttcaggtgagggtgggattggtttggttgatgattcatgattttgtgacaaaacgaataaatcattatatatacaccaagattgtagaatttttcttctatgttttccacaagaaataccattttagcttttatgttaagctgtataatatactgtaaattaaatttttgtatggtgttatataagggttgcagttcattttctccatgtgaatgtccactgttccaattctatttgttggtaagattagcatctcttcaattaattagattggtatctttgttgaaccatacaggtgtggagaaatcaggactgtgtgatttgataaattgatctatatatttatatttacatcaatacgtgatctttgttactttagctttacagtaaatatt

SEQ ID NO: 79454 - DNA, 758 bp, Homo sapiens
  sig_peptide (236)...(371): this location contains the signal peptide sequence, MLLLFLIVVLLGLFAWHRRRQKEKGRDLAPRVSYTPAMRMTSTDY, Run with SignalP
  misc_feature (109)...(669): similar to gi188864 in the genepept database release 114, Run with FASTXY 3.3t00, default parameters
tagtcacatagggactcaggaatcgggccaaagcagaaccagatctcctaacattagaggggttacacgcatctgaacccaggcccaggagacctgaagcgcaagaaggccagccccaggctcaggccctccctctgcccgcagctgccctcatgatggaggagctgaatccctacaccaagatcagcccagcactgggtgagagcggcactcggtgggtgctgtcacaggcatcatgctcctgttattcctcattgtggtgctgctgggcctatttgcctggcatcggcggcggcagaaagagaagggccgagacctggctccccgtgtctcctacacacctgccatgaggatgaccagcaccgactactccctctcagatttgtctcaaagtagcagccatgcccactgcttttccaattccagctaccacgcactggcatgtggggggcctgccaccagccaggccagcactctggacaggaacagccccaccaagctcagtaacaagtcccttgacagagacacagcaggctggaccccctacagctatgtgaacgtgttagactcccatttccagatcagtgccctggagggcaggtacccgcccgaggacttctacattgaacttagacacctcagccgccccgctgagccacactcaccagataagccttggatccaggagaggacagacaggaccagagctgagaggtgcttgtggaatggatagacgtcagaacacatacattatggac

SEQ ID NO: 79455 - DNA, 438 bp, Homo sapiens
  sig_peptide (60)...(195): this location contains the signal peptide sequence, MMNILMLITIIVMTIMANILVYSCLIYVISLILENNLLLGPIVII, Run with SignalP
  misc_feature (6)...(343): similar to gi5524408 in the genepept database release 114, Run with FASTXY 3.3t00, default parameters
ttttgctggaacccagcatataatacatgctgaataaatgtttgttaaatcatgagagaatgatgaatatattaatgttgataacaataatagtaatgacaataatggccaacattttggtatactcatgcttaatatatgtcatctcacttatccttgaaaacaacctattgttaggtcctattgttatcattcctgttttacatatgcagacactgaaactcagagaggttatttgttttccccaaatcacacagttgacaataaagacctgggatttgaaccccaaatttatcggacttcaaagtttatatccttgataaaaatagagaacccatgaatttgggtgacagccatcctttacaaagacatatcaagctgcttctttgctcaatatatttaaaaatagaacagaatctttcctttcagtggttggtg

SEQ ID NO: 79456 - DNA, 834 bp, Homo sapiens
  sig_peptide (262)...(397): this location contains the signal peptide sequence, MADEKTFRIGFIVLGLFLLALGTFLMSHDRPQVYGTFYAMGSVMV, Run with SignalP
  misc_feature (827)...(87): similar to gi1835264 in the genepept database release 114, Run with FASTXY 3.3t00, default parameters
cgggcccagagggaaggtgagagggcaaggagtaaaggtggctgggtgtgggtccgttgaagcgagccgcctccagccctgttgaactggtgggcccagggactggagcgggattgaaagggatcttgctctcccttgaagcctcgagttgcagcgatttcagtggcttctctccctgtgtaagcctgtctgggtgtttaggctgaactacagccaccccctctcccgggggtgtgcaggccagggactggccaggcagccatggctgacgagaagaccttccggatcggcttcattgtgctggggcttttcctgctggccctcggtacgttcctcatgagccatgatcggccccaggtctacggcaccttctatgccatgggcagcgtcatggtgatcgggggcatcatctggagcatgtgccagtgctaccccaagatcaccttcgtccctgctgactctgactttcaaggcatcctctccccaaaggccatgggcctgctggagaatgggcttgctgccgagatgaagagccccagtccccagccgccctatgtaaggctgtgggaggaagccgcctatgaccagagcctgcctgacttcagccacatccagatgaaagtcatgagctacagtgaggaccaccgctccttgctggcccctgagatggggcagccgaagctgggaaccagtgatggaggagaaggtggccctggcgacgttcaggcctggatggaggctgccgtggtcatccacaagggcttaaacgagagtgaaggggaaagacgcctaactcagagctggcccggccccctggcctgtccccagggccct

SEQ ID NO: 79457 - DNA, 451 bp, Homo sapiens
  sig_peptide (424)...(289): this location contains the signal peptide sequence, MCFILLLLQCVNLPKPQGERALERGAGGWTGCHLPLCPHLHKAQT, Run with SignalP
  misc_feature (22)...(451): similar to gi4240199 in the genepept database release 114, Run with FASTXY 3.3t00, default parameters
aaggaagatgagccaggtggccaggagcagctgaggaccagtgacagcccttcctaacttctgtgcccattcttgcagttgaaggagttgcttaatcaaatccggctagagagagatgaatatgctccacatataaaagaagagagggcccagtggcagcagagcagcagaggatgaggaaaatgtcgcaggaggtgagatctgacccttcaaccccccaccttagataagtcactggatctttctgggcatctgtaaaatgggaatagtacagccagaggtggtcctgggtctgggctttgtggaggtgggggcagagagggagatggcagcctgtccagccaccagcccctctctccagggctctttccccctgtggtttgggcaggttcacacattgaagaaggagaagtatgaaacacatcggggagagaagctggagaggagcttg

SEQ ID NO: 79458 - DNA, 1798 bp, Homo sapiens
  sig_peptide (1349)...(1484): this location contains the signal peptide sequence, MSTSCVCRRLQVVLVVQEMGLGPVPLDSSAQLTFMASLRLVSALF, Run with SignalP
  misc_feature (150)...(1798): similar to gi2317963 in the genepept database release 114, Run with FASTXY 3.3t00, default parameters
gcggccgcggtcagagaaggagagacaccagcagaggacgcgaagctggaccggccaggttcagagcccgcctcggttgctcccaatcagaatctgctttgtgctccacggcctccaagcactttcatgagcgttctgctcctacgtggccaggtcctaccttccctgacggctctggccaggccagctcggtttccctctaacccatgaggcctgggggggctgtgacagaggctggaagcgtggccagagcccaggggcaggcccgcctggtcacagcaggatgaggctggggtggcgcagctgccggtacacctgtagcagcctctgggcggtggcacaggagctggcctcatcctccgtgcagagccggtcgcgcagggtctgcacctcccgcagcagtgtctcgtggttggcgtggatctggcggaggtactgcacacggagatcaggagcgctggagccctgggcggcctgctctgtcaccatcgtctgcatgcgcccgacaacggcatggtgcgccctgcaaatgtcggccagagaggagctttccacttgaatctccacggcctggatgggccctgctgggcacaggtcggtcatggccacctctcggacgatgaggtgaacgttggcgccatcaggggccactccctggatggaagatagtgctcgggccctcacgacgtccacagcagcattctcagcaaggagccactgcagggtggcacagcacaggggcacgcctgagtggccgtccttcaaggcagctctgagcagctccgccgacaccttgatggaagccacagatgggggcaggtactcggcccgcagggaggcgggtcctgctggctggctgccaggctcccgacaagtttccagaaaagtggccacagggtctcgggtggggccgagtggggagggggcccgtgtgtgtggcagggccaggccagggaagcgcagacactgcagcatgtccactgtgtgcctgctcaggggcaggcaaacaccctcttgctcgggcaggacgtcggaggggcactcatccagaaaggggtcctcagagtctgagggggcaagggccccgcccaccacctccctgagactgtagaacagcgtgcaggacacggtcacgggcaggtcgagcccgccgttctcaccagggcccaggggtagcgtcacctcccgccgagcaccggggccgagctggtccacggggatggtgtaggtgatggcggagcaggccgagtccaggtcgagagcacaggagctggtgagcacctggatgcacagggtccacccctggtccaggctgaagctgctgctgttctctagcacgcaggtggccatgagcacatcctgtgtctgcaggcggctccaggtggtgctggtggtgcaggagatgggtctggggcccgtgccgcttgacagcagtgcacagctcacgttcatggcctcgttgaggcttgtcagtgccttgttccgctggtcaaccgccttctttagaaaagacactctctcagagatgttgccaattccagacagcagctcctttattttctgacctgcactctctgtggtcatcctggctgggccaggcatctcagagtccaggtccaggctgcaggtcatcaggcggcctttggcggacagggccaggagcttggtgccaccttcatgcgtcctgggagacgcggacagcgagacgacactgcagatgttcaggctggctgggcacagcatggggggcaggcctcccgggccttcttcgggctgctcagggcccagcggggtgttt

SEQ ID NO: 79459 - DNA, 711 bp, Homo sapiens
  sig_peptide (656)...(521): this location contains the signal peptide sequence, MSLLLPPLALLLLLAALVAPATAATAYRPDWNRLSGLTRARVETC, Run with SignalP
  misc_feature (24)...(668): similar to gi3875538 in the genepept database release 114, Run with FASTXY 3.3t00, default parameters
ttttttttttttcagttaaggcaggagggaatttagtcggagctggggaaggaagaaagtggggttgggagaacctccccaaccccatcccttcctggcccggggacgcgaattcggctctcagcaagagaagtattccccgggatgctgagcgcttcattctgtctccaagaactcaaggcaaggtaggtccccagtccgccgcgcccccgggacctacaggtcaagcgtggtccgaaagtttcctcttgggggttcgcgggcgcccacacgtactcggggggcacctgcgcgtcgggcgccgccttgcggtagaagccgagctcctgcactagcgcattgatctcttcgcgggtcatttcactgagtgggatgcgctctagttcctcgtagcggcggcccagcagcacgagctcagggtcggccccagggaggtgtttcatcaccaggttgtgatagaatggaatgtcctgcgtgacgaaagccttcacctcctttaggcggttcagctgtcatcccccgcaggtctctacccgggcgcgggttaggccgctcagacggttccagtccggccggtaggcagtggcggctgtggctggggccacaagcgccgcgagaagcagcagcagcgccagcggaggcaacaggaggctcatcgggacccggccgcagatgatgcgcaagctggaggcgaacctccgagtcgctgcg

SEQ ID NO: 79460 - DNA, 891 bp, Homo sapiens
  sig_peptide (221)...(356): this location contains the signal peptide sequence, MVPIFLLKCLLLHVPLCMSSNLSFHSSHHLHIFLPSFSSHLPRPL, Run with SignalP
  misc_feature (77)...(581): similar to gi2578444 in the genepept database release 114, Run with FASTXY 3.3t00, default parameters
ggaattctacatctacctgcatgtttctctgtgcatcttcaccctccatagtttggggctgtggtttactgacacccccaccccaccccatctgcatattttttcaccacccctcccttctgtatatgatgcttctgtagctctgtaacgccccctacatttaccttccttatatctcccccgtcttcctctccatagatctcctcccatttccccttccatggtccccatcttccttctgaaatgtctactccttcatgttcctttatgtatgtcttccaatctttccttccatagctctcatcaccttcatatatttcttccatctttctcctcccacctgcctcgccctctgtatatacccccactctcccccttttatatcttctccatctccccccatatctttcctctatgtccacatctgtgtattccccccaacttcccctccatatatcttttttactccccttttcctccctgtatcctctgtgttccccccatcttgctctacatcattcttcccaagatctttacgtctcccatcttgatctctccatctccactttctcctaacattttcatttccgttccttagtgtctctagagagatcattcttgatagcctcagctctttctctgtgtttttcaggtttgtattctgctctgctctacctctcctccttgccccttttctctcccaggatggctctcctttccaaatcctttttggacctgaataccttttgccccaccctgggctcttatttccatctcagaccctaacctgggatctaaagggctggcaggggccctttctttctgccgaagaacggcgcctaaaaggactcaaggcccctttggcccagcccccaacaagcctccctggag

SEQ ID NO: 79461 - DNA, 476 bp, Homo sapiens
  misc_feature (1)...(476): n = a,t,c or g
  sig_peptide (264)...(129): this location contains the signal peptide sequence, MQPLALWTGLVMAALSGLCYALLYPCLSGAFTYLVGGYAALIGFM, Run with SignalP
  misc_feature (16)...(476): similar to gi2944066 in the genepept database release 114, Run with FASTXY 3.3t00, default parameters
nttgttgaggccgatggtcagttctgagatgataaaaaagagtgcccccctgccagctcccagctctgtccagcgccagtctgcccgggccagccgcagccctgccatagctcgccagcccatgaagccgataagggccgcatagccccccaccaggtaggtgaaggcacctgagaggcatgggtagaggagggcatagcacaggcccgacagcgctgccatcaccagacctgtccaaagagccagtggctgcatgccaaaggccgaggcgtagagcatgtgggtcccagcaaacatcagcaggccatgcacgaagtatctttggtcctgccagatgaggaaggcgtctcccacagcagagaagacaagccccacaaaaaaagaaaggcactggggtgggccagcaggaatcccaggccatgggccagaaggaagagcganttccncgcnntgcnctgaggccacgcatgtcaaag

SEQ ID NO: 79462 - DNA, 676 bp, Homo sapiens
  sig_peptide (118)...(253): this location contains the signal peptide sequence, MGRLLWLPWTPGATTWGASAVRTTVSYCVQDCTGCSGAALAAAEL, Run with SignalP
  misc_feature (575)...(9): similar to gi2565065 in the genepept database release 114, Run with FASTXY 3.3t00, default parameters
tttcgtttggagttgggctgtgagaccgggttctattcgggttgtgaggacggcagtcggggaggggacatcgactgcagggtctgcacctgttggccctgcgacggcgaggacatcatggggaggctgctctggctaccatggactccgggagccaccacctggggagcctcagcggtccgcaccactgtcagctactgcgtccaggactgcaccggctgcagcggggctgcacttgcagctgctgaactacccttggagctcagacaaattgcagctgttgttgggcatacatctgtccagggaatgcttgcacttgccacaccaaaggctgggtctgtgactgactgtggcgggagctgcaatggttggttctgagcagctggaggttgccgggactatggcagctgctagtggtggtgtggttgacgtatctgctgcagctgctggggcaggacctgggagggggcaggctgcagcagacattgcattggtggctgctgtattggcactgggcctgcaaagcctgttgctgctgctcctgtagctgcagctgtgccctgtgctgcttgcgccctgggttggctggggcttttgaatggatttcaaattataaacctggggaaaacctgtttaattagggacccttttttggcaattccttttctttaagggg

SEQ ID NO: 79463 - DNA, 660 bp, Homo sapiens
  sig_peptide (176)...(311): this location contains the signal peptide sequence, MKLCLRLCVGRRPSICATSLSRLYGWGRLEQEGPPSPEWRVCICT, Run with SignalP
  misc_feature (273)...(10): similar to gi961444 in the genepept database release 114, Run with FASTXY 3.3t00, default parameters
tttcgtccgcgatatttgggagcggccccgagacgcgcctggcgcgggtgagcagtggaagggggctgggaagctgggttctcgcggcggcgcgggaggggaggttcggggagctgtgtccgcgagcgtgggtccacggctgtctgtgtgtgtccttattttcccctgtgtgcccatgaagctctgtttgcgactgtgcgtgggtaggcggccgtccatctgtgcgacctcactttcccggctgtacgggtggggccgcctggagcaggagggacccccgagccctgagtggagggtttgcatctgtacccgtccagcccgactttgtgctgctctgcgattatttgtccagtgtcgtttaatctagcttaaatgatggccgcgtcaggttctcacactgaacgcttacccgggctgcccaaagtacaaagtgtatttaaaaagttggtaaaattaaaaaaggaatgccttgggatgttggaagtacccctatgcctgtcatgaagagctcaatgctatcttgaaaattaggccctttgtctccacaggaactttcattcgcaggggaacttatattttttagcgaacgggcattccattgttgtggcatgcccaaggcttttgcagtgcaagcgggcaaccaattttcaaacctcacct

SEQ ID NO: 79464 - DNA, 879 bp, Homo sapiens
  sig_peptide (195)...(330): this location contains the signal peptide sequence, MKFQGPLACLLLALCLGSGEAGPLQSGEESTGTNIGEALGHGLGD, Run with SignalP
  misc_feature (838)...(879): similar to gi5917666 in the genepept database release 114, Run with FASTXY 3.3t00, default parameters
tttcgtgggaggtggactctgagaagcccaggcagttgaggacaggagagagaaggctgcagacccagagggagggaggacagggagtcggaaggaggaggacagaggagggcacagagacgcagagcaagggcggcaaggaggagaccctggtgggaggaagacactctggagagagagggggctgggcagagatgaagttccaggggcccctggcctgcctcctgctggccctctgcctgggcagtggggaggctggccccctgcagagcggagaggaaagcactgggacaaatattggggaggcccttggacatggcctgggagacgccctgagcgaaggggtgggaaaggccattggcaaagaggccggaggggcagctggctctaaagtcagtgatgcccttggccaagggaccagagaagcagttggcactggagtcaggcaggttccaggctttggcgcagcagatgctttgggcaacagggtcggggaagcagcccatgctctgggaaacactgggcacgagattggcagacaggcagaagatgtcattcgacacggagcagatgctgtccgcggctcctggcagggggtgcctggccacaatggtgcttgggaaacttctggaggccatggcatctttggctctcaaggtggccttggaggccagggccagggcaatcctggaggtctggggactccgtgggtccacggatacccccggaaactcagcaggcagctttggaatgaatcctcagggagctccctggggtcaaggaggcaatggagggccaccaaactttgggaccaacactcagggagctgtggcccagcctggctatggttcagtgagagccagcaaccagaatgaaggg

SEQ ID NO: 79465 - DNA, 738 bp, Homo sapiens
  sig_peptide (633)...(498): this location contains the signal peptide sequence, MHLLCFLDFPLLMQQTFLHHVKRMRPFSSQNFYLAITFHHRLTMT, Run with SignalP
  misc_feature (7)...(738): similar to gi705389 in the genepept database release 114, Run with FASTXY 3.3t00, default parameters
tttcgtcccccaccgccaccaccctagtctcctagtcgtctgccaccatcccctgagagactgcaggtccagggaaaaggagcaggaacggcagcagcccggccgccgacccggaagctctttcaccgccaaccgcgaggctgcaaagggtgtgaacccggaagcgatttcatagccacggtttttggctttcatcgctttttctacatgtttttagcctcaccagaagtctttcatctcggtggtccaactcaggatctcagcctcattattttcttacccttctggagtgcatatgtgcctttacagtttctgtttgcaaacgctgtctagcatactaagaggatgttagcaaacctgttccatggacactaaatggcagttgtacatctcccctcatcagtcatagtgacaaccagaaatgccctccatattttccagtgatcccagtcttcaatgcgtctgtctcataatttgtaaacgtttattatcttgaagtcattgttaatctgtggtgaaaagtaattgctaaatagaaattctgagaagaaaaaggcctcatccttttcacatgatgtaggaaggtctgttgcatgagcaatgggaaatccagaaaacatagaagatgcatatgttgctgttattcgtccaaagaatactgccagtctcaattctcgggaatacagagctaagtcatatgaaattttgttgcatgaagttcccattgaaggacagaaa

SEQ ID NO: 79466 - DNA, 428 bp, Homo sapiens
  misc_feature (1)...(428): n = a,t,c or g
  sig_peptide (339)...(204): this location contains the signal peptide sequence, MHMMVHFYFQINVMLIAAIQKSDQFLHIKLVSCKLAIIIIIIIMM, Run with SignalP
  misc_feature (10)...(408): similar to gi804810 in the genepept database release 114, Run with FASTXY 3.3t00, default parameters
ngtgtcttaccactgcttttcatcattgtacttgaagtactagctaattcaataagacaagaaaggcaaataaaatgtatatggattgggaatgaagaaataatactgtctctgttcgtgcatgacatgattgtctgcataggatctgaaagaactgacaaaaaaccctcctggaattaataagtaattaatgataatcatcataattataattattataattatagcaagtttacaagaaacaagtttaatatgcaaaaattgatcacttttctgtatagcagcaattaacatcacattaatttgaaaataaaaatgcaccatcatatgcattagcacgtaaaaaatgaagtacttaggtttaaagctacaaaactctgatttaagatatgaaacaagaaatatgtaaatggagagattactcatgg

SEQ ID NO: 79467 - DNA, 617 bp, Homo sapiens
  sig_peptide (175)...(310): this location contains the signal peptide sequence, MCSSPAVLLCALVVGCPVGFPHEADPGSMQRASSLGLHQASVVSA, Run with SignalP
  misc_feature (56)...(617): similar to gi1263100 in the genepept database release 114, Run with FASTXY 3.3t00, default parameters
tgtgaacccacctcgactgagtcctgctgctccttctaccctaacgagatgggtgttggtctctttctagtccacttgctccccaaatcctcgcaggcttctctgtgttcaggaagacaagcagtctctcagaaagagacacacccaccccacaaaaaaatccttggaatttgtatgtgcagctcaccagccgtgctcctgtgtgcattagtcgtggggtgtcctgttgggttccctcatgaggctgatcctggcagcatgcagagggcctcatccttagggcttcaccaggcgtcagtagtctcggcaggatggttgggacaggcgaggcacggtgctcacctgggctgctctcttctccccagtggtgtccatgggctctggagaccatcagttcaacctcgcagagatcctgtcacagaactacagtgttaggggggagtgcgaggaggcctcgaggtgcccagacaagcccaaggaggagctggagaaggacttcatcttccaggtacttggcccaggtggatcctgcccctgtggtgggtggagcccctccggggtaaagccttcatgagtttttgtgggaggttcaagaatccacattttggtaaagtggc

SEQ ID NO: 79468 - DNA, 426 bp, Homo sapiens
  sig_peptide (190)...(325): this location contains the signal peptide sequence, MMWAAGAVAAMSSITFPAVSALVSRTADADQQGELIGTSDNYLKV, Run with SignalP
  misc_feature (62)...(301): similar to gi2506078 in the genepept database release 114, Run with FASTXY 3.3t00, default parameters
aattaagttgctgtctttgtatacagggtcagattgttaagcgacttgcccatagtcacctagtaagcaagttcagttctccttttctctacagccatttcacagtaagaattacttaattatgtagtttgactttcaggtacagtggagaagaatttactgtttttgttttgctgctctccttataggatgatgtgggctgctggggcagtagcagccatgtctagcatcacctttcctgctgtcagtgcacttgtttcacgaactgctgatgctgatcaacagggtgagttgataggaactagcgataattatttaaaagtacagaatgttctaatcctgtgttctgtctcctatgtactgaaacataagtatatcttcaggggagagacttttaaaattgcttttgatataaacaggaaaagc

SEQ ID NO: 79469 - DNA, 886 bp, Homo sapiens
  sig_peptide (370)...(235): this location contains the signal peptide sequence, MSFLAGLGLAVGLALLLYCYPPDPKGLPGTRRVLGFSPVIIDRHV, Run with SignalP
  misc_feature (103)...(883): similar to gi2894106 in the genepept database release 114, Run with FASTXY 3.3t00, default parameters
ttttttttttttgagagaacctgaacatttaatatggtcagcaccttgtaaggtgaaggtgtgttttttacacaaattataaataatgaaaaatatgcatttagaaaaagaagcagcagtccccttggcgggccggctcgaggactctttggttgagtggcaggtgaggccctgggtccagggtctgtcagagcccccctaggtcatctgccaggaaggccagcaggtagcggctgacatgtctgtcgatgatgacaggcgagaaaccgaggacgcgccgggtccctggcaggcccttggggtctggcggatagcagtacaggagcagggccagtcccacagcaaggcccaggccagccaggaagctcatgggtcccctgttactcagctcgccgctctggctgcccgagtctagctctgtgcaatctgagttctgcagagcgtggcggctgggcaggcggctgtgcaggggctgggcatggatatacagggctcggtagaactcctggcagtcccgctcaccgctccgctgcaggtggctcaggaggtcacagagccgcacacgcaaggatgccttggggttccggaactcctcagcaccttttccgcctccttgttggtaaggatctgtgggtagtaacggttcagctggaggatgatcctgtccacctgctgctcactcaagcgcccatggcctgtcaggaaaggcgtgtcctgcaccaggcggtcacaataggtctgatctgtcatggcgacggacacagcgccgcccgcagtccccagcggtctgccccgccgcgcgtccgcccctcggtcagccgcccggtccaccagctccagcgaacgcccccgcgggccgtgctcgcccgccccttttggctaggcc

SEQ ID NO: 79470 - DNA, 496 bp, Homo sapiens
  misc_feature (1)...(496): n = a,t,c or g
  sig_peptide (186)...(51): this location contains the signal peptide sequence, MYTLLFCCCFPMFLLVLPQVTHYGKKVGGGRIRRGFYILLLGKRN, Run with SignalP
  misc_feature (27)...(496): similar to gi2896881 in the genepept database release 114, Run with FASTXY 3.3t00, default parameters
cggtgtggtgggaatgggggaaggatcaccaccagaaacaacctaaaaatgtttctctttccaagcagcaaaatgtaaaatccccttcttatccttcctccaccaacctttttcccatagtgtgttacctgtggcaagactaaaagaaacatggggaaacagcaacaaaaaagcaaggtatacatttgggtctagacttgagttgtcaactagtgacaaatccatccctattaacctaagagtggaatatcaagtcttctttaatagtcctccattaatactaatctgtgtggaaattaagctgttttccatttgcttctttttaagaaaacaatgacaatattatttcttatattcaccaaataattttagatagcctatgagtctgtcttagggattgcagagaggtgttgcggacgcgtgggtcggcccgggtnttccgttccggtggttcgtnctggcccaactggnntcccagtttccggggctcggcaca

SEQ ID NO: 79471 - DNA, 763 bp, Homo sapiens
  sig_peptide (39)...(174): this location contains the signal peptide sequence, MISFVLVKGLFLKCTFHFPLFNRHIMSCSFLRSDFMHGDSMCFSS, Run with SignalP
  misc_feature (118)...(763): similar to gi3879621 in the genepept database release 114, Run with FASTXY 3.3t00, default parameters
ggatttcttccatgcctggctgagttctttccaagaagatgatctcatttgtcttggtgaaaggcttatttttaaaatgcacattccattttccattatttaataggcacataatgtcttgcagcttccttcgaagtgatttcatgcatggtgattccatgtgtttctccagttcctatatgctcctcaatgaatctctatatatttctttccacactatggtaataaaaacacattgggcagtgtgtggctgtggtttcatttcagaaaaactttagtctagaacatcaatgccctgtgacttatgagcaggggctgagagggagactgtatggcagatgatcctgtactgcctcttccaaaaatagttagacaggggagactctggggtgtaagcgtgtgtagggtgggaggggcaggaatagaaaataatgttaaataaacaaaaatcatgacatttattaaagatggcgaaggaggccaggcgcgggggttcatgcctgtaatcccagcactttgggaggccgaggcgggcagatcgcaaggtgaagagatggaaaccatcctgcccaacatggtgaaaccccgtctttcctaaaaatacaaaaattagctggacatggtggcacgaacctgtaatcccagctacttgggaggctgaggcaggggaaatacttgaacctgggagggagaggttgaatgacccaaattacgccacttgcctccagctggcgacggacgagactccatctcaaaaaaaaaa

SEQ ID NO: 79472 - DNA, 382 bp, Homo sapiens
  sig_peptide (166)...(31): this location contains the signal peptide sequence, MHALQWISFCRGWLSVRLSHPCLLVDVGRTPPAGPTCRPAVLVAP, Run with SignalP
  misc_feature (85)...(382): similar to gi2341056 in the genepept database release 114, Run with FASTXY 3.3t00, default parameters
ctccctccaaacgcttgcagcctatagatgagggagcaaccagaacagctggtcggcaggtgggaccagctggaggggtgcggcccacatccaccaggaggcaggggtggctcagcctcacgctcagccatccacgacaaaagctgatccactgcagagcatgcatcacagaggaaaatactctggaaaggaatgaaggcgctgtagcacaccgttcagaagggatctatgttaaaaggcaaaaaaataatgcaagcatgggggagcctgagagggaatctaataagactctgggaaggcgaacccagtgggccacggggaggaaaatgccagcagcacccagaccccaaactctactggctgcctcccaataagggggctt

SEQ ID NO: 79473 - DNA, 405 bp, Homo sapiens
  sig_peptide (18)...(153): this location contains the signal peptide sequence, MSIPYQIYGLQFFCLSMGCLFTVLIVPFDARKFLILMKSKLFFFY, Run with SignalP
  misc_feature (406)...(0): similar to gi2072951 in the genepept database release 114, Run with FASTXY 3.3t00, default parameters
ttcttcatatattctggatgtcaatcccttatcaaatatacggtttgcagtttttttgcctgtccatgggttgccttttcactgtgttgatagtgccttttgatgcccgaaaatttttaattttgatgaaatccaagttatttttcttttattgcccatgcttttggtatcatatataagaaataccaaatcctgtgtcatgaagtttttcccctgtgttttcttctaagtattgtttaacttttactctcttacatttagatcttgtaatcattttgagttaatttttgtatgcgtaaggtaaggctccagcattattctttttcatgaggacatccaattttcccaatactatttgttgaaaagactatcctttccccattgaatggtcttggtgcccttgtc

SEQ ID NO: 79474 - DNA, 915 bp, Homo sapiens
  sig_peptide (19)...(154): this location contains the signal peptide sequence, MGSGGDSLLGGRGSLPLLLLLIMGGMAQDSPPQILVHPQDQLFQG, Run with SignalP
  misc_feature (67)...(845): similar to gi2804782 in the genepept database release 114, Run with FASTXY 3.3t00, default parameters
tttcgtctgagagtagccatgggctctggaggagacagcctcctggggggcaggggttccctgcctctgctgctcctgctcatcatgggaggcatggctcaggactccccgccccagatcctagtccacccccaggaccagctgttccagggccctggccctgccaggatgagctgccaagcctcaggccagccacctcccaccatccgctggttgctgaatgggcagcccctgagcatggtgcccccagacccacaccacctcctgcctgatgggacccttctgctgctacagccccctgcccggggacatgcccatgatggccaggccctgtccacagacctgggtgtctacacatgtgaggccagcaaccggcttggcacggcagtcagcagaggcgctcggctgtctgtggctgtcctccgggaggatttccagatccagcctcgggacatggtggctgtggtgggtgagcagtttactctggaatgtgggccgccctggggccacccagagcccacagtctcatggtggaaagatgggaaacccctggccctccagtccggaaggtacacagtgtacggggggtccctgctgatggcaagagcagagaagagtgacgaagggacctacatgtgtgtggccaccaacagcgcaggacatagggagagccgcgcaacccgggttttcatccaagaggccccagactacacgggagcctgtggagcttttggctgtgcgaattcacctggaaaatgagacactgtggaacccggatccttgagagggcccccagcctagacccggggggtgggctaaattggaagggcaatggcccttgtggtccttccccaaacttaacaacgggtttgttaagggaacaaaattctcccggtaggcagggaaaacttctgc

SEQ ID NO: 79475 - DNA, 447 bp, Homo sapiens
  sig_peptide (387)...(252): this location contains the signal peptide sequence, MERRRLLGGMALLLLQALPNPLSARAEPPQVRGRGRLGHVGSWGS, Run with SignalP
  misc_feature (63)...(446): similar to gi19929 in the genepept database release 114, Run with FASTXY 3.3t00, default parameters
atcatcagtttgggccgctatccagccacagtcaccccagcccacgtaaccatcctgccgtctcaaacgcccctcactcgcttggcatcatgcctctgccacctccttgacaccaaaactgtcacaggtgtccctcagctaaataccgacgcccctttagatcctgtccacgccaggcatagacgcccctctcgggacccctcaactcttggcaacaacactccttcagacccctccagccaggcctcgacgacccccaggacccaacatggcccagacgccccctcccccttacctgcgggggttcagccctggctgacaaggggttgggcagcgcctggaggagcaggagcgccatgccacccaggagccttctcctctccatccccctcctgctcctgatcctccgccacggcgccgccacctccctcctcctcctcccacccc

SEQ ID NO: 79476 - DNA, 428 bp, Homo sapiens
  sig_peptide (288)...(423): this location contains the signal peptide sequence, MVQRLWVSRLLRHRKAQLLLVNLLTFGLEVCLAAGITYVPPLLLE, Run with SignalP
  misc_feature (30)...(406): similar to gi3874335 in the genepept database release 114, Run with FASTXY 3.3t00, default parameters
tttcgtgaaccagcctgcacgcgctggctccgggtgacagccgcgcgcctcggccaggatctgagtgatgagacgtgtccccactgaggtgccccacagcagcaggtgttgagcatgggctgagaagctggaccggcaccaaagggctggcagaaatgggcgcctggctgattcctaggcagttggcggcagcaaggaggagaggccgcagcttctggagcagagccgagacgaagcagttctggagtgcctgaacggccccctgagccctacccgcctggcccactatggtccagaggctgtgggtgagccgcctgctgcggcaccggaaagcccagctcttgctggtcaacctgctaacctttggcctggaggtgtgtttggccgcaggcatcacctatgtgccgcctctgctgctggaagtgggg

SEQ ID NO: 79477 - DNA, 399 bp, Homo sapiens
  sig_peptide (147)...(12): this location contains the signal peptide sequence, MLMYMFYVLPFCGLAAYALTFPGCSWLPDWALVFAGGIGQAQFSH, Run with SignalP
  misc_feature (6)...(310): similar to gi6684 in the genepept database release 114, Run with FASTXY 3.3t00, default parameters
ccatgtgcgagaactgtgcctggccgatgcctccagcaaacaccaaggcccagtctggaagccaggagcaaccagggaaggtgagagcataggcagccaggccgcagaaaggcaggacataaaacatgtacatcagcatctgcaccttagggtaggccacagggtcccgcaggtatggctcatactggtagatatagacaaagcaggcatctgtggggcaatcaagcaccaccaggccccggaacagagtgaagaagccagcaaggatgagatatatgacaagggccaggtcagccggacgctgcaggagtccctttctttgttcctcttgcaccatgttggcggtgcagcgggttagcgcccggggctggctgaagaccttcatgccagcccagcatg

SEQ ID NO: 79478 - DNA, 343 bp, Homo sapiens
  sig_peptide (127)...(262): this location contains the signal peptide sequence, MQLEALNLLHTLVWARSLCRAGAVQTQERLSGSASPEQVPAGECC, Run with SignalP
  misc_feature (107)...(343): similar to gi2696873 in the genepept database release 114, Run with FASTXY 3.3t00, default parameters
ccagaaacagccttgtggggtggggttggtgtctgacctccctccccgggggccttcgcaggcttctctgctggtgcttctgtgcctgtgggtctggattcctccagggcctgatcctgggtgcagatgcagctggaagccctgaacctgctgcacacactagtctgggcacggagtctctgccgtgccggagctgtgcagacacaggagcggctgtcaggcagtgccagccctgagcaagtgccagctggtgagtgctgtgctctgcaggagtatgaggccgccgtggagcagctcaagagcgagcagatccgggcgcaggctgaggagaggaggaagaccc

SEQ ID NO: 79479 - DNA, 666 bp, Homo sapiens
  sig_peptide (187)...(322): this location contains the signal peptide sequence, MGVVLYVLVCGALPFDGPTLPILRQRVLGRKIPDSVFHVRRLRAP, Run with SignalP
  misc_feature (25)...(666): similar to gi5672676 in the genepept database release 114, Run with FASTXY 3.3t00, default parameters
accttggcacgaggcctcgtgccactgctggataacaacatgaatatcaatttagcttatttcggttttggaaatttctttaaaaggggggaactgctggcaacatggtgtggcagccccccttatgcagccccagaagtctttgaagggcagcagtatgaaggaccacagctggacatctggagtatgggagttgttctttatgtccttgtctgtggagctctgccctttgatggaccgactcttccaattttgaggcagagggttcttggaaggaagattccggattccgtatttcatgtcagaagattgcgagcaccttatccgaaggatgttggtcctagacccatccaaacggctaaccatagcccaaatcaaggagcataaatggatgctcatagaagttcctgtccagagacctgttctctatccacaagagcaagaaaatgagccatccatcggggagtttaatgagcaggttctgcgactgatgcacagccttggaatagatcagcagaaaaccattgaggtaaagtgatcagagatttcggggttctactgcacttagctacttgaaatttcatgctcacacctgtcatcctggtcttttagcacatgtatctccagcgcctaggcgtactgttcagtgttccctatagatgacat

SEQ ID NO: 79480 - DNA, 380 bp, Homo sapiens
  sig_peptide (167)...(32): this location contains the signal peptide sequence, MVRLQVLVLVFRVVGSQQMLRQGAAGARSHRVLASLHFQHGFGTF, Run with SignalP
  misc_feature (29)...(381): similar to gi3954946 in the genepept database release 114, Run with FASTXY 3.3t00, default parameters
tctcggagcccccagcccgggcaggagtgtggaaagtgccgaaaccgtgctgaaaatgcagagaggccaggacccgatggctgcgcgcacctgctgctccttgtcgcaacatctgctgactcccgaccacccggaaaaccaggaccagaacctgcaggcgaaccatatttacctatacggaggctgatgagagctcgccgacgtcatgggcataggtgaccgctgtgagaacaagataacgcctacaccactggtcacatgttccacattgattttggccgcttcctgggccgtgcccagatgtttggcaacatcaagcgggaccgtgccccctttgtcttcacctcggacatggcgtatgtcatcaacgggggtgacaa

SEQ ID NO: 79481 - DNA, 752 bp, Homo sapiens
  sig_peptide (536)...(401): this location contains the signal peptide sequence, MSLRFCFCLPVCPSLPISVFHVFLSVSDHPVSLCLTVSGHEMSVI, Run with SignalP
  misc_feature (18)...(720): similar to gi3002527 in the genepept database release 114, Run with FASTXY 3.3t00, default parameters
gtctcactccattgcccaggctggagtgttcaagtgattctcctgcctcagcctcccgagtagctggaattacaggcgcccaccatcacacctggcaaatttgtgtatttttagtagaggtggggtctcgccatgttgcccaggctggtctggaactcctgacctcaggggatcctcccgtctcagcctcccaaagtgctgggattacagacgtgagccaccgtgcccggcctgccttccttctttgtttcccacaccttcatctctgcatcctgcctcttgaagtcttcatcttcatcagagtcacattcggggaactggtagatgtggatctcctcttccttcaactgatcccggatctcaggggaaacagatatagagacagtgtgaaacgggccacaatgacagacatttcatgaccagagacagtgagacacagagatactgggtggtcagagacagagagaaagacatgaaagacagagatggggagagatggacatacaggaagacaaaaacaaaatctcagagacatagatggtgagaaacacaagattctaagatggggcagacattaagagaccaggagaagcctgggcaatatagctagatcccatctctacaacaaatatacacatatattttgaaacaaggtttcactctatcacccaggctggagtccagtggctccatcttggttcactgcagcctcaacctctcaggcccaggcgatcctcccccctcctgcctcc

SEQ ID NO: 79482 - DNA, 391 bp, Homo sapiens
  misc_feature (1)...(391): n = a,t,c or g
  sig_peptide (285)...(150): this location contains the signal peptide sequence, MLAYLFFFSGTLLLNQLLDRGPSLSCFHWPRGVQACARLQQLLEW, Run with SignalP
  misc_feature (18)...(390): similar to gi930045 in the genepept database release 114, Run with FASTXY 3.3t00, default parameters
ngtgctgggctcagtgcggggaacgcagcccgcagggctgtccagctcatctggatgagctgggccctgggtgtggccagcaggttgagggtgcaggagagcttctggaagaagtgctctccagccgccccgaagccggcgctccgcatccactccaggagctgctgcaggcgggcgcaggcctggacacctctgggccagtggaagcagctcagggaggggcccctgtcgaggagctggttgagaagcagtgtcccggagaagaagaagaggtaggcgagcatctgcgaggccacctcggggtgcacctgcagctgccgcaggaggtccagggctgcctggtacacagacaccacgcggcgcagctcctcgggcagttcgggggccgagg

SEQ ID NO: 79483 - DNA, 677 bp, Homo sapiens
  misc_feature (1)...(677): n = a,t,c or g
  sig_peptide (299)...(434): this location contains the signal peptide sequence, MPVWLGGTFAPLCLACRISDDFGECCCAPYLPGGLHSIRTGMRER, Run with SignalP
  misc_feature (22)...(81): similar to gi188864 in the genepept database release 114, Run with FASTXY 3.3t00, default parameters
cggaccttacaagagggttacgccgcgaccggcacaccacctacgtgccatacatgacactactacgctgttaaaccgcaaccccccaagcncgaccacccatttgaaactttgagaccntcgcacgnccggaannccgggncgacccacgcgngcgcacggctgcctccatcactgccatcgcgatcctgcagctatgtcctaccctgtgaccagtcagccccagtgcgccaccaccagctgctaccagacccagctcagtgactggcacacaggtctcacggactgctgcaacgacatgcctgtctggctgggcggcacttttgctcctctgtgccttgcctgccgcatctccgacgactttggcgagtgctgctgcgcgccctacctgcccggaggcctgcactccatccgcaccggcatgcgggagcgctaccacatccagggctccgtcgggcacgactgggcggccctcaccttttggctgccctgcgccctctgccagatggcgcgggaactgaagatccgagagtaaggaagttccctgtcttccccgtccttttccaccagtctcgcctctggccttctctggccactcctgggagggactgcctcaccacccctgtcccgctgccagaaatacccccccaataaaaacctgaaaaccaaaaaaaaaa

SEQ ID NO: 79484 - DNA, 427 bp, Homo sapiens
  sig_peptide (335)...(200): this location contains the signal peptide sequence, MLYVYFFLLWGVEACGHFRGPGPCGGRVGSCSWPGRSQVSRGPDL, Run with SignalP
  misc_feature (107)...(424): similar to gi2739396 in the genepept database release 114, Run with FASTXY 3.3t00, default parameters
gtgattgaagaaaatctcttctcggcagggtttgctcagcaagtcacttgatgagtcttgcagtctacagagacaggtggggactggtggggatggcggggtgagaggggaggaggagggtgagcggtccaggtgaggaggggggcagttgaaggtgaaagcagaccccgagacggtgataaggccgcagtctcttcctagatcaggaccacgcgacacctgactgcgccctggccacgagcacgatccgacccgtccgccgcagggacccggaccgcgaaaatgtccacaggcttcgacgccccatagtaaaaaaaagtacacatataacatttacaggggctcaaactgccactgcctcctctccggagcggtccggcctgccgcccgcggttccacgaaatcgtcgtcgggaattccggagcgg

SEQ ID NO: 79485 - DNA, 904 bp, Homo sapiens
  sig_peptide (269)...(404): this location contains the signal peptide sequence, MGSSRLAALLLPLLLIVIDLSDSAGIGFRHLPHWNTRCPLASHTD, Run with SignalP
  misc_feature (835)...(877): similar to gi973307 in the genepept database release 114, Run with FASTXY 3.3t00, default parameters
tttcgtgcaggagccccttgtctttcaggtggggggcagtatggtttttgggggcacaagctttcctcagtccctccacttggaggggaaggaatgtggcctggctggctggttgggatcaaggaggagctttcgggcaggacggggccagggcaggctggggcgagggctcctgctggtactgtgttcgctgctgcacagcaaggccctgccacccacattcaggccatgcagccatgttccgggagccctaattgcacagaagcccatggggagctccagactggcagccctgctcctgcctctcctcctcatagtcatcgacctctctgactctgctgggattggctttcgccacctgccccactggaacacccgctgtcctctggcctcccacacggatgacagtttcactggaagttctgcctatatcccttgccgcacctggtgggccctcttctccacaaagccttggtgtgtgcgagtctggcactgttcccgctgtttgtgccagcatctgctgtcaggtggctcaggtcttcaacggggcctcttccacctcctggtgcagaaatccaaaaagtcttccacattcaagttctataggagacacaagatgccagcacctgctcagaggaagctgctgcctcgtcgtcacctgtctgagaagagccatcacatttccatcccctccccagacatctcccacaagggacttcgctctaaaaggaccccacccttcggttcccgagacatgggaaaggcttttcccaaatgggactctccaacgccagggggggaccggccgtcctcttttgaattgctgccctgaagccccgcgcttatttcggggcacgaatatttttccggacccttgatggctctccgatcggtctctttctcc

SEQ ID NO: 79486 - DNA, 656 bp, Homo sapiens
  sig_peptide (401)...(266): this location contains the signal peptide sequence, MRASCPIGRLSLTALSVVSSSNSTWMSLLPVAVSTRKPRILRTML, Run with SignalP
  misc_feature (83)...(12): similar to gi3789964 in the genepept database release 114, Run with FASTXY 3.3t00, default parameters
taggctcctggcatctgtttcacttgttgcttttggaatatatgattcatatacttcagtcatgcctataggaggaagaggaggaggaggacatggggactgtcaaggaaatgctaccagatgacccgactctcggccagccagaccaggcacttttccattctctgaattcctcactgtcgcaggcgtgtgccagccccagcatggagccactgggggtgatgcccacacacatgggccagggccgatatcccgtgggtgtgagcaacatggtcctcaggatcctgggcttcctggtggacactgccacgggcaataagctcatccaggtgctgttggaagatgaaaccactgaaagcgcagttaaactcagccttcctatgggacaagaagccctcataaccctaaaagatggacaacaatttgtgattcagatatcagatgtaccccaaagctctgaagatatttatttcagagaaaacaatgctaatgtgtgagattatttatttgaatagagaataagaaaactgatagacttgcattcttaaaaatattaaatactaaagtttttctattgacgaaagatgatgttatgtatataatagatgtagcattgtctattttatgtttatatgtatttcaaggaggtggtttcg

SEQ ID NO: 79487 - DNA, 448 bp, Homo sapiens
  sig_peptide (154)...(289): this location contains the signal peptide sequence, MANIECFHTKIRNKIRILGLILLFTIVMKVLHGVINTHTHKRNKR, Run with SignalP
  misc_feature (2)...(451): similar to gi56522 in the genepept database release 114, Run with FASTXY 3.3t00, default parameters
aaaagaggaaaactatgtgaccattttaatagattcagaaaatgcattcaaaaagactcaatattattcataataaaaactttcagcaaccaggagtagaaagcttcatcagtttaataaaagactacagtcctacacttaacatcacaactgatggcaaatattgaatgctttcacactaagatcagaaacaagataaggattcttggattgatactgctatttaccattgttatgaaggtcctccatggtgtaataaacacacacacacacaaaagaaataaaaggagtgaagattggagacaaagaagtaaaattgtccatttctgcagatgacagggttgtcattgtagaaaattctaaggaatttacaaaacaactgctagaagtaataagtgaataagaatgaggttatgggatgcaggattaagatacaaaaaccaattgc

SEQ ID NO: 79488 - DNA, 418 bp, Homo sapiens
  misc_feature (1)...(418): n = a,t,c or g
  sig_peptide (145)...(10): this location contains the signal peptide sequence, MFLILLGVCLTRVLDVDCTLGFITQLASNNRKEIVLFFKSRPFSL, Run with SignalP
  misc_feature (12)...(418): similar to gi3875698 in the genepept database release 114, Run with FASTXY 3.3t00, default parameters
ntagaaatcaaagtgagaaaggtcttgacttgaagaacaaaacaatttccttcctattattagaagctaattgggtaataaagcccaaagtacaatcaacatctaataccctagttaggcatactccaagcaatatcaaaaacatttaaattatccctgtgttcactatgaggttgacttgcttgtaaataaatatgactattattcaattatctatatttgatgtcagcaaccttcttccttgattttatttttctacttcaataagcccactacttatacttgtgtgtatgttttctttttcctcttactctatatttaaataccacatgcttgagaaagaagataaataggtaatatttttgcatttgtagaaattcttcagaagcatacagactcctcgatgaccggacgcgtg

SEQ ID NO: 79489 - DNA, 644 bp, Homo sapiens
  sig_peptide (177)...(42): this location contains the signal peptide sequence, MPCLLRALAVLTCPSSEPSPVLFPLLLCPHLHLQEYRTNLSLKPA, Run with SignalP
  misc_feature (336)...(5): similar to gi1220368 in the genepept database release 114, Run with FASTXY 3.3t00, default parameters
aagaacagcggcgacccacgcgtccgatttatacgagagctggcttgagggacaggttggttctgtattcttgcaggtggagatgagggcacaataagagaggaaataggacaggtgaaggctccgaggagggacaagtgagaacagcaagtgctctgagaaggcaaggcatgagggaggaggaaaaaatgaaagatacggctgatgtggtgggtttggaatgatggaggatggctttgagtgcaaagctgaaaagtttgtggaagtcattggactttctagcagtgtcaccaagccctgagtttcctgggagctggcttaggcactgcaggaggaagaagtctggtgtgccagctgctcccccagttatagaggagagagtagctcctctcatattcattttatatacaaggatattgactgtcttttgaggagtgttccactttgagaaaaactaaaacccattggcatatgcgtgaaacccattaatttattcagtcagtcactcaacagatattaaatgcctactgcataccaggccctgtacaaggttgtaccgaaagaccgttggaagatttttgaaactggccaattgccctggttagccagggatgcctgggtcttttgagtttaaaaaaacctgg

SEQ ID NO: 79490 - DNA, 412 bp, Homo sapiens
  sig_peptide (333)...(198): this location contains the signal peptide sequence, MSFLLVILVSHLRNHCIIQTHEYLCLFYEFNSVSSYAYYLCPMLS, Run with SignalP
  misc_feature (146)...(403): similar to gi2197085 in the genepept database release 114, Run with FASTXY 3.3t00, default parameters
tgagctcacctaactggcagagtgctccagcagagaggccactgctgacatgcaccagcttgcacacgccctctccccactgcagcctcccccatgctgctttgcctgcaggtactcgcccacaggcacccccaacattactttaatagtgaacaaatggtgctgggacaatacattcacaacacaccatatgcagagcttaacatgggacagagataataagcataagagctaacactattaaactcgtaaaacagacataaatactcatgagtttggattatgcaatgatttcttagatgtgacaccaaaatcacaagcaaaaaagacataaattagacatcagcaaaattaaaacgttttgtccatcaaaagacatcatcaagaaagtaaaaaaaagtcgacgcggccg

SEQ ID NO: 79491 - DNA, 502 bp, Homo sapiens
  sig_peptide (46)...(181): this location contains the signal peptide sequence, MIVYWVLMSNFLFNTGKFIFNFIHHINDTDTILSTNNSNPVICPS, Run with SignalP
  misc_feature (1)...(365): similar to gi3875887 in the genepept database release 114, Run with FASTXY 3.3t00, default parameters
cagtggtcgagtctccttttctccttggtgtctctcattggagcaatgatagtttattgggtgcttatgtcaaattttctttttaatactggaaagtttatttttaattttattcatcacattaatgacacagacactatactgagtaccaataatagcaaccctgtgatttgtccaagtgccgggagtggaggccatcctgacaacagctctatgattttctatgccaatgacacaggagcccaacagtttgaaaagtggtgggataagtccaggacagtccccttttatcttgtagggctcctcctcccactgctcaatttcaagtctccttcatttttttcaaaatttaatatcctaggcatcaacaaccaggtcatccttccaggtgtcaccgaaatgccaggctattgccccttcctgctgcctgtctcaactgaatgctgtgctgtggccacatcatacacatgttttgaagagaagaatataggacaatgttgca

SEQ ID NO: 79492 - DNA, 893 bp, Homo sapiens
  sig_peptide (35)...(170): this location contains the signal peptide sequence, MITHLGRRLWSGQCWLGALSSRRIMELPAPGTVPGTGWEAGQGWI, Run with SignalP
  misc_feature (25)...(672): similar to gi2047353 in the genepept database release 114, Run with FASTXY 3.3t00, default parameters
ctacccccggccagtcgcaagagcccagccctgcatgatcacccacctggggaggaggctctggagtggccagtgctggctgggagctctttcatcaaggaggataatggagctgcctgccccaggcactgtcccagggacagggtgggaggcgggccagggatggatcagtcatctccgtcaggagtgactcaggaggttggcagaccgggagggacaaagagacccgtgtcatgaccatggcctggtgcctgggtgtcctccctcccacacgtggtggcccagccctactggcacgtgaggccatgagaccttctcaccttccttcctgcctggccaaccctcatctcagcgtctgcccccatctctctgagtcactgtgtcatgtgttctgactcttcctcggcttggcatttcccagggagggggtgccatctgccttccctgtccctgagggcctccctgggcctgaactcggccggagtagatcactcttgcgttctccactgaacctgcccctcctgctttcttcaacctcttaaggaagctgctggagtcacctttgactcttcaagtgagtctcaccacttcctcctccaaaatgggtcctgacccaacccctctccccatatccacttcctcttttttggacaatggccagggcctcccaagccctggccctggcttcactgataacctgggctcactggacacccagctgccaagggggcctctgaaacctcaagcctggcataaaacccctccgaaatcacttctccaggggagttcttaacgccgctttttgaaagacccaagccctggctgtggcacaggggttttaaactttgaaactcaagcacttttgcagggcacaagctaggacaaataattcg

SEQ ID NO: 79493 - DNA, 397 bp, Homo sapiens
  sig_peptide (192)...(327): this location contains the signal peptide sequence, MAPFALAVPRCTGPEGSGGGPWVACFCVLRMFWAVSRLGLVSLRR, Run with SignalP
  misc_feature (28)...(397): similar to gi5104510 in the genepept database release 114, Run with FASTXY 3.3t00, default parameters
tttcgtccggcttccgacgtgcagcctggcagtgcagtggtgagttggagcgcagggccgttggggattggggtcattagggccgttgacagtccaggccagagggcgagtgagcgaggttgggcccgaggctgcctgtaagcaggtccgttcagggatgctccaggccctggggcctgagggtggcttccatggctccatttgccctggctgttcctcggtgtacggggcctgaggggagtgggggaggcccgtgggtggcctgcttttgcgtcctgagaatgttctgggcagtatcgagattagggctggtttctctgcggaggagatcatttatccgtagctgggagggctgtattaaccgaagttttccagtagtgggccacgctgtcttatg

SEQ ID NO: 79494 - DNA, 936 bp, Homo sapiens
  sig_peptide (125)...(260): this location contains the signal peptide sequence, MGADRWNALALLSGSYVTLVFYTRTFSNTIEGLLFTWLLVLVSSH, Run with SignalP
  misc_feature (41)...(861): similar to gi1022357 in the genepept database release 114, Run with FASTXY 3.3t00, default parameters
tgttcggatccgcaattcccgggtcgacgatttcgtcggctatgcgctgctggaggggcctcgactcctcctcactgccctttcctttgctctggacggggccgtgtaccacctggccccgccgatgggggcggatcgctggaacgccctggccctgctgtctggttcctacgtcaccctggtcttctacacaaggaccttctccaacaccattgagggactcctcttcacgtggctgctggtgctggtatcctcccatgtaacgtggggccctacacgcaaggagccggcgccgggtccacggtggcgcagctggcttcttggaggcattgtggctgctggcttcttcaaccggcccacctttctggcctttgctgtggtccccctctacctctggggcactcgtggagccacaaaccctggtttgaagtctctgacccgggaggccctggtgctgctccctggggcagccctcacagcagcggggtttgtggccacggacagctggtatttctccagccccgctacatccaggaaccttgtcctgacacctgtcaacttcttgcactacaacctgaatccccaaaacctggcgagacatggcacgcacgcccggttcaatcacctggcaggcaacggctttcctgctttttggggggcctcatgcccaagcccttcaggctgcgtggaaaccgctgcaaaaccgccctccagcctctggacaaatgggccctcttgagggccccgggtgccccgaaccctgcttgccaacccccagggccctaattccttttacctctaactcaatccctctggcacctgatatctgcctttaagccccccggaagcttcggttcccgtaatcccccctccggacccaccccggacccggcttttatgattcccagaaacccaaccatgttccttggtaaagcc

SEQ ID NO: 79495 - DNA, 717 bp, Homo sapiens
  sig_peptide (482)...(617): this location contains the signal peptide sequence, MRCRCCLCSSCFWGLWDPCPKSVWSPWSSSSLGAFSVGSELASAA, Run with SignalP
  misc_feature (131)...(705): similar to gi3875920 in the genepept database release 114, Run with FASTXY 3.3t00, default parameters
aaccaaatatgaaaatgtgttttatttctcagtacaaagccagatactgtaaggctatgaaaaactgactagccagaggccagaaaggacaaaaagaagactatctctggcctggtgccctgtgatctggcgtggtgtcacaggaggtctggggacagcagcaaagacctggacccatctaagtacacctgggtgtcactccagaggggcaagaccaggcccagggtgcagctgggggagctggcaggggacagagggaaagccattgtcccccctgtccctcacctctttgcccctcctttcctctccctgctcgaacctgctgtcagggaaatccacgcccaggaggaccgtctcatcctggctcagaccttctccttctcgtgtagaaactaccagcaggtagcggagccggggaggccggggtgcctccagctgggctgccaggcggatgtcatcctgcggcctcagcagctgtaccatgaggtgcaggtgctgcctctgctcctcctgcttctggggactctgggatccttgcccgaagtctgtctggtccccgtggagctcctcctcactcggggccttctctgttggctcagaactggcctctgctgcatcatcattgtcccctccatcctgcagtcccaggacagccccacggagcaccgcaaagctctgccttcgctggagtcgacccgggaattgcggctgattacc

SEQ ID NO: 79496 - DNA, 405 bp, Homo sapiens
  misc_feature (1)...(405): n = a,t,c or g
  sig_peptide (355)...(220): this location contains the signal peptide sequence, MSSDVILAFIWIQKWLLHLLIEVGIDYLVVIPPQIPVLNYFWLRW, Run with SignalP
  misc_feature (2)...(380): similar to gi2981631 in the genepept database release 114, Run with FASTXY 3.3t00, default parameters
nttcaaagaacagtttattgcctcactataaaaactgttacagagaaggtaaaaaggaaaagtcattaattcattttacaaaactagtctaggcctgacagcaaaatctggaaaagaactcatctaaagagacctgtaaagctatctcatttaaaataagagattaaaaaatctgaatatgttagcaacccaaatttaattaggaatttaaacagccacccaccgcaaccaaaaatagtttaacacgggaatttgaggagggattactactaggtaatctattcctacctcaattaataggtgtaacaaccacttctgaatccaaatgaatgccaaaatgacatctgatgacattcaacacccatccttaataaaacacccaagaaaacaagacaggcaattctt

SEQ ID NO: 79497 - DNA, 1084 bp, Homo sapiens
  sig_peptide (156)...(291): this location contains the signal peptide sequence, MFLSSSFIVSGLIFKSNLFWFLYVIYTGVVSFFCNRHLVFLAAFI, Run with SignalP
  misc_feature (376)...(3): similar to gi804788 in the genepept database release 114, Run with FASTXY 3.3t00, default parameters
tgtcttttcactttgttgatggttttctttgctgtgcagaagcttttcagcttgatgtaattctatttgtcaatttttgctttcattgcctgtgcttttgaggttttactcaaaaaaaatctctgcctagaccagtgtcctgaaatgtttcccaaatgtttctttcaagtagtttcatagtttcaggtctcatatttaagtctaatctattttggtttttatatgtgatttatacaggtgtagtttcattcttctgcaatagacatctagttttcttggcagcatttattgaacaggagagtatcctttccccattgtatgttcttgatagctttaccaaaaatgggctggctgtaaatgcatggatttattgatagttttttggtttgttttttgatttgatcttggttctgcttttgactttgatttgagacaggatctcactttgttctccaggctgaaatgcagtggtgcgatgttggctctactgcagccttgacctaccaggctcaagcgatcctgccccctcgactacccaagtggctgggactccaagtgcgcacccccatgcctggctaatttttggagtttcattgaccaggggctcatgttcccagctaatctcgacctcctagctccaagatccttccgccttgccctccaaattgctgaattagagggttggccccctgcacccaacctattgaaacctctttatttatattttggctagcgcctccttccagagcgtcggacaccttttaatgcggtacccccactctcccttcgcgcactccgtagtagttctcccccaattatcggttgtcccctttctggccagcctgatgcaccaaatatttgtactcccctcgcctttccacttgactgctggcccttcttccccgtccgccgcgcagtactctgcgttctgttgcaccccgggaacatggtactactcgttaatttgccgcgcccctctccctccgtatcattcttctacatcgtctcgcgggtagcggctaacttcacctctctcacgcctgcggtgggcctttcctcccgtctctttcgacagataacttct

SEQ ID NO: 79498 - DNA, 1614 bp, Homo sapiens
  sig_peptide (179)...(314): this location contains the signal peptide sequence, MKGLFCLWPLVRSVSSLMTSSTSCPSPPTLPPWRPCLPRLRMRVL, Run with SignalP
  misc_feature (1)...(1425): similar to gi2088668 in the genepept database release 114, Run with FASTXY 3.3t00, default parameters
gattttgaagccttaactccaaacttgctggccaggactgtagaaacagtggaaggtggtgggctagtggtcatcctcctacggaccatgaactcactcaagcaattgtacacagtgactatggatgtgcattccaggtacagaactgaggcccatcaggatgtggtgggaagatttaatgaaaggtttattctgtctctggcctcttgtaagaagtgtctcgtcattgatgaccagctcaacatcctgcccatctcctcccacgttgccaccatggaggccctgcctccccagactccggatgagagtcttggtccttctgatctggagctgagggagttgaaggagagcttgcaggacacccagcctgtgggtgtgttggtggactgctgtaagactctagaccaggccaaagctgtcttgaaatttatcgagggcatctctgaaaagaccctgaggagtactgttgcactcacagctgctcgaggacggggaaaatctgcagccctgggattggcgattgctggggcggtggcatttgggtactccaatatctttgttacctccccaagccctgataacctccatactctgtttgaatttgtatttaaaggatttgatgctctgcaatatcaggaacatctggattatgagattatccagtctctaaatcctgaatttaacaaagcagtgatcagagtgaatgtatttcgagaacacaggcagactattcagtatatacatcctgcagatgctgtgaagctgggccaggctgaactagttgtgattgatgaagctgccgccatccccctccccttggtgaagagcctacttggcccctaccttgttttcatggcatccaccatcaatggctatgagggcactggccggtcactgtccctcaagctaattcagcagctccgtcaacagagcgcccagagccaggtcagcaccactgctgagaataagaccgcgaccgacagccagattggcatcagcgcggacactgcatgaggtttccctccaggagtcaatccgatacgcccctggggactgcaagtggaagaagtggctgaatgacttggctgtgcctgggaattgccttcaacaatcactccggataagttctcaaggcttgccccctttgcctgaagcttgtgaactgtactatgttaatagagataccctcttttgctaccacaaggcctctgaagttttcctccaacgggcttatggccctctacgtggcttctcactacaagaactctcccaatgatctccagatgctctccgatgcacctgctcaccatctcttctgccttctgcctcctgtgccccccacccagaatgcccttccagaagtgcttgctgttatccaggtataggagcagaggcgtccttgtggcagtgatttggggaaccactgaggcatcaggaattagtggcttaataactgcattgtgggagttttgaaactgtggagtcctggtctggaaccaaggggctgggtctgctgagacaggtgactagggtgcactggaagaggttagcgccactagacacccaaagctccactgttgacggacggggaaaagccagaaccgaccgctctct

SEQ ID NO: 79499 - DNA, 675 bp, Homo sapiens
  misc_feature (1)...(675): n = a,t,c or g
  sig_peptide (223)...(88): this location contains the signal peptide sequence, MKRSNILAVMLFLISWMSTSISPLYPSLLXWISRYTTASSCSPSL, Run with SignalP
  misc_feature (48)...(601): similar to gi4240203 in the genepept database release 114, Run with FASTXY 3.3t00, default parameters
cctcagtgtcagaggaggaggccacctttgaggtgctgctgctactgtacttgggcttcgccgaggtgtacctgcaggacctgcacccagactaggggagcaggaagatgcggtggtataccttgaaatccaanccaggagagaaggataaagaggagaaattgaggttgacatccagcttatgagaaacaacatgactgccagtatgtttgaccttttcatcaaagacaagcctcggaatccatttggaaaactttaagacaagatcaaggggaagaatatggatagtgcatcaggtgctgcctccaacatagtctccagcactacaccttcagtcaaaagtgatgattagtcttcgtccaaagacaagaaggatcaagaccttgttttccaagtctaatttgcagaaatttcctgatccatgattgccctgtagacatcaaagctaaaatgctgcctcaactgggagactttcagtcccggtgggacaatgacaacaatgagagggactcctcttcagcttcagatgtcatgtctcacaagacaacagcaagtacatatcttaagcagctaaacgaaatcaatgtcacccttcccaaaatggaaggactttcctttgagggtcttcggtctatgaacgaagaccttttccccccccactctaaatgtcctgta

SEQ ID NO: 79500 - DNA, 410 bp, Homo sapiens
  sig_peptide (236)...(101): this location contains the signal peptide sequence, MGQVPCCWAWWSLLQGRGSWCEHKELRGWRRPGPGACRRTPARGQ, Run with SignalP
  misc_feature (3)...(410): similar to gi310200 in the genepept database release 114, Run with FASTXY 3.3t00, default parameters
ggcccaaggagcctggcgctcctgtcagatcccagccggccagggagtctggcccggcctggcccctcgctggtgtccgtcggcaggctcctggcccggcctggcccctcgctggtgtccgtcggcaggctcctggccctggccttctccagccccgcagctccttgtgttcacaccagctgccccttccctgcagcagggaccaccaagcccagcagcagggcacctgtcccatcccctctggctctacactccgaaagccaggacagcgcaacccgtccacccgctgacctccagctccgcaggctccttcccagtgccctcagtccgggaagctcagacagggagctccaggaaatcctctaaaaggggcccctgggaatactggccacaaggtggaggctctgccc

SEQ ID NO: 79501 - DNA, 1622 bp, Homo sapiens
  sig_peptide (1248)...(1383): this location contains the signal peptide sequence, MPSIRLGLSHLFLTAGIYCLLLCARCCALGRGTAWAACPGGACGL, Run with SignalP
  misc_feature (1433)...(7): similar to gi161436 in the genepept database release 114, Run with FASTXY 3.3t00, default parameters
gcggccgcggtcctgccacacaagctgggcggcggaggccacgcagccgggccttcttctctctgggaccctccgccagcgcatagccgcaggccggtgtgacttctgcaccctcagttctgagggtacggtgacccctagtgggcagtttgcaaaatgtgattccttcttcccaactccccatccccccttcccttcccgtcacgtcctgtttgggggttaattcggttttttctctgttgcatcgcgcctactgtgcgtgtgcgatagcgtgtgtgggggtgagagtttgttttctggaatggtaggtgctgggaggaggagtttgatggagggcttcctggctgcttctggccctcacctcgtggaggccttcacagagaccctgtgggccctggccctgtgctggcactgtgccagtcatgaggcagctctgatcacttccccactgtggaaacaggactgacccagccttcagtgtgggctgctgaagctatcctcctcaggcctcagggatgacctcctgcctgagcctctcacaggctggctgtgggccagtttcatctgctttcctgttgggggtcccgggcctctgctgtccttgacccactggtgttctgtgcaaggcttcttcccattcaccaagtgcacaccttgcatctgccgctcggcatgcaccagttccacacaccatcccattttacagacaaggacgctgaggcctgcagcagcagtgtgacttgctcaaggtccagtgagtgacctcattccccagaaaaggctcctcccacaccagagtacagcctgggtagggggaaaatcagttctttcagctaccacccatccaacctttgggcctatgtgaaaagaaaggaactaagctgggtgtgttctgtctggacctggggaggcccctgaaggcaaagagggaaactgtcccagctgttctgtcctaggggagggggacatagccctagcaggagctcccagcccctcttggcactctgacacacaagtacacccatctggggcccgctttgccacgaagagctgggcaggcctgcagggtgtggggaaggaggacacaacctcaagaaaggaagcgtgaaccccagggaacagcgggtcccttccctcctcagacacaagccacctcagcttgtggctcttggcccccagccccaccaacccacctgttcatttattcaacagacaatgacagctgatatttattggacatttgcaccatgccaagcattcggcttggattatcccatttgtttctcacagccggtatttattgtctgctcctctgtgccaggtgctgtgctctgggcaggggcactgcatgggctgcctgccctggtggagcttgtggtctgatgggtgaggctgacccaagcccaccccattgccaacagggccagggcaagagtacacacaggggcctcataccatatgtctaaatatttaaaagttatcaatcaagctaacaactgttaaataaaatatgttctattctcctactttgaaaaaaaaaaaaaaggggcgcccgttttaaagaatccttgggggggccaaagtttacgcgggcttgcaaggtaatagttttttccttatag

SEQ ID NO: 79502 - DNA, 683 bp, Homo sapiens
  sig_peptide (380)...(515): this location contains the signal peptide sequence, MFSRLYAVCMLYMWGFVDKMCVWSVMQVCYCLVFVYVFLCMVCRV, Run with SignalP
  misc_feature (460)...(5): similar to gi1004363 in the genepept database release 114, Run with FASTXY 3.3t00, default parameters
agctgaagtggtcaggtgggtggagttgcccagggaactccttttcatgggctctgggaaggggccaaggtcagactcagctctggagtctcctgagagctgggcacagagcagggatggggagtcaggtggccagggcctccagcgggactgaaatggggtcagtgggtttggtgcttcttgtgagggttgagacctttgcctttgcagtgtgatgtcggggtgtgcggggaagggtggatcacacaggatgaggagggagtaaaggtgaaggtgctcagatatcaaggaatttgggcagtcaggttgtcattcttttgcttgtgtttgtcattattcaaattattcccctgctgactgaagggctactgtggggtgcatgtttagtcggttatatgctgtgtgcatgttgtatatgtgggggtttgtagacaagatgtgtgtgtggagtgtgatgcaggtgtgttactgtttagtatttgtgtatgtctttctgtgcatggtgtgtagagtgcgtgcacacgaccacattcagatccttgatccatacagcaggctggtgctgagtcgtctgcctaggctggaaactgggaaggattcatcaagcttgtgaatttatcttctctacttagggttacacccaacagtgtgctggtaacaactggccctccagaaaaaaagag

SEQ ID NO: 79503 - DNA, 402 bp, Homo sapiens
  sig_peptide (316)...(181): this location contains the signal peptide sequence, MLTSKSCIICLLYLYLHNAPGIELYECCEFGRGVFPFFPTWISNQ, Run with SignalP
  misc_feature (4)...(380): similar to gi2072967 in the genepept database release 114, Run with FASTXY 3.3t00, default parameters
acttatagagctataagtaagacagtgtggcattggcacaagtgtaggaaccagaccagtggaaaagaatagacagactcataaacagacccacacatatacagacacctaagttttgaaaaacctaacactacagcgcattagaaaaaaagatgtcttcccccagtaaatgtggctgagttgattggatatccatgtgggaaaaaaaggaaacacgcccctcccaaattcacagcattcatataactcaattccaggtgcattatgtagatataaatataaaagacaaatgatacaacttttagaagttaacataagagaaaatcttcatgactttgggataggcaacattgtcaaacaagacacaacaagtgccaaccatgaaggaaaagagtgataaat

SEQ ID NO: 79504 - DNA, 669 bp, Homo sapiens
  sig_peptide (129)...(264): this location contains the signal peptide sequence, MRTRVMTIFFSTVYIPSCLAQCNLHIVKCMNLKVHGLVLINVYIH, Run with SignalP
  misc_feature (590)...(0): similar to gi5103147 in the genepept database release 114, Run with FASTXY 3.3t00, default parameters
ctgaaaaaggtccctctgtttctcttttatagttgagttttgattttccttaccccaatttgtaattatatcttcaaacatgtacttaccattttaatgcctgtctcgccaactagactggtaggtccatgaggacaagagtcatgaccatctttttcagcactgtttatatacccagttgtttagcacagtgcaatttacatatagtgaaatgcatgaatcttaaggtacatggtttagttttgataaacgtatacatacatgtaacccataccccataaacatataaattatttctgtaaccctagaaggttccctcttgcccacttttagtcacttccctgccccagaggcaagcatttctctgatttgtatctccatcacactaattcttaaggatgttttataaccttggtaggaagggaaactatgcaagcttggttacattaaaatagatatgctggccggatgcggaggctatacgcctcattaaatccctggaaaacctttggtgaggcccgagtcaggtgggattactctgagggtcaaagaggtcaagaactacccctgggaaacacatggtagaatcccctgactcgtactcaaaccatcccgctcacttacccctgggccatgattgcgtttccaatccccgaaaatctcagcccc

SEQ ID NO: 79505 - DNA, 505 bp, Homo sapiens
  sig_peptide (150)...(285): this location contains the signal peptide sequence, MTFLILSIAPVLAVTGMIETAAMTGFANKDKQELKHAGKQLKLWR, Run with SignalP
  misc_feature (54)...(508): similar to gi191153 in the genepept database release 114, Run with FASTXY 3.3t00, default parameters
cagcataatatgtatcaaagtcatgcttaaacagctgtggggagtagaggagtatagaagaggcaacaggttccaggattggcgtcttaacacaaaatgcaactaacatgggactttcagttatcatttcctttatatatggatgggagatgacattcctgattctgagtattgctccagtacttgccgtgacaggaatgattgaaaccgcagcaatgactggatttgccaacaaagataagcaagaacttaagcatgctggaaagcaactgaagctttggagaatatacgtactatagtgtcattaacaagggaaaaagccttcgagcaaatgtatgaagagatgcttcagactcaacacagaaatacctcgaacaaaacacagattattggaagctgatatgcatctcggacatgcctttatatattctggctatgcaacagggtttcgatgtggagcctatgtaattccagctggacgaatgaccccagagggcatgttcat

SEQ ID NO: 79506 - DNA, 746 bp, Homo sapiens
  misc_feature (1)...(746): n = a,t,c or g
  sig_peptide (242)...(377): this location contains the signal peptide sequence, MPLICLPIVRVLLLQCLSGPPLREVSLLVFGCSFIGGIHLAHIGI, Run with SignalP
  misc_feature (382)...(70): similar to gi2065210 in the genepept database release 114, Run with FASTXY 3.3t00, default parameters
cataactgatggtcattaagtaggtcattctgccatcattattactaataacttctctggtgtggtgctgtcttgtgaatgttcacctggaacacaaacattctcatctctgggacaattcttgcttgaacttcgtccctaagcctgtgatctacctctttacaagtcactgaacctctggaaagaccatttgcaaccatctcaggcaatttctcattgtaggcaaagtgaacaatgagaaatgccacttatatgtctgcccatagtgagggttttgcttctccagtgcctctcaggaccacccctgagagaggttagtttgttagtttttggctgcagctttataggaggtatacatctggctcatattggtataccacagagaggcgtctgttgatatggttaggatggtgtgacccctgcatatctcatgtggaaaagtgacttctggccaagcgcagcggctcatgcctgcaatgtcaagtctttagcactttgtgaggccgaggcacgtggatcacttgaggtcgggagcttgagatcaatctgaccaacatggcgaagccgtgtgtttactaaacctacaaaaaggtgccaaatggggtggggggccccctgggaattcttttattttcaaaaaattgggggcagggaaaattatttgtcacccggcgccgggagaaagtaaacccttgcctnagagattattgcggtggaagtgaaaaaggttggcgcccccaaaaaaa

SEQ ID NO: 79507 - DNA, 1095 bp, Homo sapiens
  misc_feature (1)...(1095): n = a,t,c or g
  sig_peptide (35)...(170): this location contains the signal peptide sequence, MLQAHQGAFHFWMNQVFPQLFCTFLSIDLECLWNTQSVPCVNHLP, Run with SignalP
  misc_feature (1)...(1095): similar to gi3643593 in the genepept database release 114, Run with FASTXY 3.3t00, default parameters
cgcttcctgagtacaattgcccaacacttgcttcatgcttcaagcacatcagggtgctttccacttctggatgaaccaagtgtttcctcagcttttctgcaccttcctctccattgacctagagtgtctatggaacactcagagtgtcccctgtgtaaaccacctaccacaagattatcaacttcaggcaatggaccacgcaccaggattccacctctttctagcacctatcagtgttgcgcacatcataggccctcaacaaacaggcagccacgctgggggatcccacatggtaaagaactgcaggtggcctctaggagatgagggcggcctccagtcaacagccagcaagaaactgaagtgctctgtcctacaaccttgtgtaactgaattctgccaacaacctgagtgagactgaaagtggatccctctccagtcatgcctcagtgtgagagaaacctgtgacttgcttctaacccataggatatggcaaggaactagtcatatctgagagcagcctccagaaaacagtcagcaaaacactgaggttctcaatccgatagtcaatgaggaacggaatgctggaacaatgatgtgagcttggaagcagatccttcccttctgctgggcctcaggtgagactgcagctccagtcatcatcttgattgcagcccacagaaactccttgttgacacgagcaaaggtaaaagcaacaggaatacagaagactggctagagagcagttagatgggcctgtcacctactgaggaaggttggagacaggtggattccctgggttctgtaaggctgcaagaactggaaacatgctcaggttaccttagacagcagtatcttgtgaaataaatgccccttccgcagcacatcagcctttctgtcagctcataacgagttggaatttctagatcttctctggggctgttggagaggtctcggggactttcagagtccttacatgcttgaacctgccaccttcacagagtcctctggatcccgtcttggggcaggggcgatgctcattaagctgntgctgcgnggtcctcgcgacgnccctagttctcagtgggggnggcccgc

SEQ ID NO: 79508 - DNA, 723 bp, Homo sapiens
  sig_peptide (542)...(407): this location contains the signal peptide sequence, MVLWNLMLHSLSAVTYPPDLVSWNLHFKQNPDHSPLPQLTWEVLP, Run with SignalP
  misc_feature (609)...(197): similar to gi3551241 in the genepept database release 114, Run with FASTXY 3.3t00, default parameters
ataattcggcacgagcggcacgagctggcatatatgacatctgtgccttttcaatacacccagtttggacccctaacttgctgggcagccttaggcaagtcagttcacttgagtcttagctctcatctgcacacacaaaagcagaataatctatccctcccctacttcaagtctgttctgacagctcagtataaaaacatgcaggaggttcccacctctgtgcctgacacttgggtataaacacaagtgtttaagtgaaattttcaaagttggcaatatttggtcaagataacttccctactcagaaactgaaatatattccaagccctaactctggaatctccagtccctggtctgctaccataccacctttacccaggcctgagaaatgaaagatagatgttttaaggcagcacttcccaagtcaactgaggtaggggtgagtggtcaggattttgtttaaaatgcagattccaactgacaaggtcaggagggtaagttactgccgacaagctatggagcataagattccaaagaaccataatgcttctagactttgttttgagacaggaatttcgctcggtacccagactagactgcgatggcacaatcttggctcactgcaccccagcctgggcgacagagactcagaaaaaaaaaggccgtgcgcggtgtttcacccctgaaataccaccactttgagaggccaaggcggggccattc

SEQ ID NO: 79509 - DNA, 662 bp, Homo sapiens
  sig_peptide (630)...(495): this location contains the signal peptide sequence, MITTSLKSSSRLCCFRRSIFFTATCFPVCFSVAMHTMPVEPSPIL, Run with SignalP
  misc_feature (48)...(664): similar to gi4164385 in the genepept database release 114, Run with FASTXY 3.3t00, default parameters
ctcgggactccaggaaccgatgatgccatttggagcaagtgcatttaaaacccatccccaaggacactcctacaactcctacacctaccctcgcttgtccgagcccacaatgtgcattccaaaggtggattacgatcgagcacagatggtcctcagccctccactgtcagggtctgacacctaccccaggggccctgccaaactacctcaaagtcaaagcaaatcgggctattcctcaagcagtcaccagtacccgtctgggtaccacaaagccaccttgtaccatcacccctccctgcagagcagttcgcagtacatctccacggcttcctacctgagctccctcagcctctcatccagcacctacccgccgcccagctggggctcctcctccgaccagcagccctccagggtgtcccatgaacagtttcgggcggccctgcagctggtggtcagcccaggagaccccagggaatacttggccaactttatcaaaatcggggaaggctcaaccggcatcgtatgcatcgccaccgagaaacacacagggaaacaagttgcagtgaagaaaatggacctccggaagcaacagagacgagaactgcttttcaatgaggtcgtgatcatgcgggattaccaccatgacaatgtggttgacatgg

SEQ ID NO: 79510 - DNA, 398 bp, Homo sapiens
  sig_peptide (212)...(347): this location contains the signal peptide sequence, MLIIFNAVWVRCLKPKIPARPTTNDTMISKTKQHTQYTSYAPSWP, Run with SignalP
  misc_feature (34)...(75): similar to gi2981631 in the genepept database release 114, Run with FASTXY 3.3t00, default parameters
aatacatgcttttctcccacaaatcaacataagaaaaagataaacaacgcaacagaaaaatgggcacatggtctgatcgagcaattacagagaaaatagaaacagccaatatgctaatgaaaaaagatttaatctccctagtaatgagggcaatgaaaataaaaacaataatgagataccatttcccttatctgattagcaaaagtttaaaatgttaataatatttaatgctgtctgggtgaggtgtctcaagcctaaaatcccagcacgacccacaacaaatgacacaatgatatccaagacaaaacaacacacccaatatacctcgtatgcccccagctggccctggcttggaccagctgcctgccagcatggccccctcatctcacacacaccca

SEQ ID NO: 79511 - DNA, 398 bp, Homo sapiens
  sig_peptide (29)...(164): this location contains the signal peptide sequence, MHTCMYVWGCVCTCVCTLHVYMQVWVYVCVQYMHTCKCVGVCVHY, Run with SignalP
  misc_feature (188)...(398): similar to gi854065 in the genepept database release 114, Run with FASTXY 3.3t00, default parameters
aatacacgtgtgcgtgtgtgtacattacatgcatacatgcatgtacgtgtggggatgtgtgtgtacgtgtgtgtgtacattacatgtgtacatgcaagtgtgggtgtacgtgtgtgtacagtacatgcatacatgcaagtgtgtgggtgtgtgtgtacattacatgcatacatgcatgtgtgtgggtgtatgtgtgtgcgtgcgtgtacattacatgtgtacatgcacgtgtgtgggtgtgtacgtgtgtgtacgtgtgtgcgcgcacgtgcacttgtgtacatggtgttagtgcatgtgtgcatacattacatgcacacatgcacgtgtgtgtgtgtatgtattgactgaagcatgcttatttcatattatgtggatatcttatttttgtttaacag

SEQ ID NO: 79512 - DNA, 379 bp, Homo sapiens
  sig_peptide (25)...(160): this location contains the signal peptide sequence, MFFTSGCSFFFLGGGVKPLFLPNPFGPPCWGGGYQTKKKRPPPPL, Run with SignalP
  misc_feature (90)...(372): similar to gi433012 in the genepept database release 114, Run with FASTXY 3.3t00, default parameters
cactataactacaagaaattataaatgtttttcacatcaggctgttcttttttttttttgggggggggggtaaaacctttatttttgccaaacccctttggccccccctgttgggggggagggtaccaaaccaaaaaaaaaaggccccccccccccctttttaaaaaccgggccccaagggaaaaaaaccggaaaaccccattccttttcctggggaggggccccaatgccttggggggtctaaggcccaaaaactttttaaggggccgggaaaccccaaagaaataaaaaaaaacccccgggggggggggaaacggaccccccccttgacaaaaaaccccaaatttaaccaaagggggggaaaagggggggggttccc

SEQ ID NO: 79513 - DNA, 1028 bp, Homo sapiens
  sig_peptide (126)...(261): this location contains the signal peptide sequence, MTVLSFQYEYLIFLLTSLTTIYNTTLSRSGDGRRTCLVFNLREKV, Run with SignalP
  misc_feature (677)...(0): similar to gi2981631 in the genepept database release 114, Run with FASTXY 3.3t00, default parameters
atgtaattgatttttgtatattgatctcacattctgcgaacttgcaaacttatttgttaattctaataggtttttaatggtccctttggtattttttacatatagtattatgctttctgcaaataatgacagttctttctttccaatatgaatacttaatttttctccttacttcactcactacaatctataatacgacattgagtagaagtggtgatggaagacgtacttgccttgttttcaatcttagggagaaagtattctgtttttcaacattaggaatcatatagctatgggttttttgtagatatcctttattaagttaaggatatgttcttatattcttaatttgtggagcttttatcataaaaggatgttggattttttcaaatgtcttttctgcatctattgagattattatgtgattttattctctattctgtcaatatggtgcatgacattaattgattttcgtaagttaaaacaaccttgtatttctcagatgaatcccatttgatcatggtgtaaaattttttttacatggtgctggattcactttgataaaatttgtacctatgtttatgtgggaatttctgtagttctcttttattgaaaagcctttttttggcttgggggtaaaaaaataccgggctcatagaatttatcaaataaaaacagaccaagaagagaacttcccctacgggggggcggcctcttataagaaccatcactccggggcgggtggaaaacatatttttttttttgcgccccaataatatccccggggggcgttttaccccgcgaatgggaaaacggtgcttctcctatcactcactgctaacctctcccgacttgtctgtcacccacgatacccccccactcgccacatcaataccctatcatcccttcactccctctatacccccccgttcaccacaacccccatatcacgggcaccctcttaaacccactatgccagaatcgccgcacacatccaactttctatcgctcgccggccaacagccgcg

SEQ ID NO: 79514 - DNA, 405 bp, Homo sapiens
  sig_peptide (171)...(306): this location contains the signal peptide sequence, MWYSPASPSSSVLQKLTKLSRIYFCLLQLVFSACVISKHICIPWE, Run with SignalP
  misc_feature (3)...(405): similar to gi2244882 in the genepept database release 114, Run with FASTXY 3.3t00, default parameters
tgtttttcaggttcctttgtgtcatatttccctattgtttgaactcttttaaaaagtcccacataaaagtacaagcaagaacctagccattagttgtatctatcaacaaacacatcaatggtcataccaggaaacacagtagttggttctcccagacatcaaccttaaagatgtggtacagcccagcttctccaagcagttctgtccttcagaaacttactaaactttcaagaatttatttctgcctcctacagcttgttttttctgcatgcgttatttcaaaacacatctgcatcccctgggaaaagataaaagtgataccaaataaaactaaaagcaaacttcagaaagacttctcaaggaaatgctcccaaataaagagtaatttcttcactttgttctttt

SEQ ID NO: 79515 - DNA, 420 bp, Homo sapiens
  sig_peptide (29)...(164): this location contains the signal peptide sequence, MYLNLQLCLWTCLFFFYYCQLCFINFEVIKDTNLKFLYCCTELIL, Run with SignalP
  misc_feature (309)...(14): similar to gi483916 in the genepept database release 114, Run with FASTXY 3.3t00, default parameters
cacttgtttattcagattactgagaaaaatgtacttaaatcttcaactatgcttgtggacttgtcttttcttcttttattattgtcaactttgctttataaattttgaagttattaaggatacaaatttaaaatttttgtattgctgtactgaattgatccttttatcattatgaaatttgttttatatctacagtaacacttgctgacagtaatgtttactttgcccattgtacataagccatactagctttcttttggttaatgtttgcttggtgtacctttttccatcctttcactttcaatatttctcttctaaatgaactctttttctaattggatttttaatccatttatatttagtataattatttatatagttggtatcttagttgttttgggctgctgtgacacaaatgtg

SEQ ID NO: 79516 - DNA, 435 bp, Homo sapiens
  misc_feature (1)...(435): n = a,t,c or g
  sig_peptide (246)...(111): this location contains the signal peptide sequence, MRSALLIMLFMSFTSAGIFATFIFLDSERFVKISNTVFCLFILTS, Run with SignalP
  misc_feature (16)...(435): similar to gi804808 in the genepept database release 114, Run with FASTXY 3.3t00, default parameters
tagcgcgttacaatgttgaagcgtgccattcataatgaaaatgtaactattattaatactcgcgtgccaaataatatatcaacaatttttgtgaaggagaaactataggagatgtgagaataaacagacaaaacacagtattggagattttaacaaatctctcagaatccaagaaaatgaaggtagcaaatattcctgcagatgtaaaagacataaataacataatcaataaggcagatctcataggtatctatcaaattctatatggtattaagaggaaatgccttctttcaagttgcgcagtgagttttctcaaaaaaaacgtcctaggccgcaaagaaggcctcaataatccaaaaaaaagaaatatacggccagcattctctnccgcacgcgtgggtgtgcccggttaccccaaaacggtgcggtcgatac

SEQ ID NO: 79517 - DNA, 402 bp, Homo sapiens
  misc_feature (1)...(402): n = a,t,c or g
  sig_peptide (87)...(222): this location contains the signal peptide sequence, MRKRPTELSCACGLFLFRTVSVVSPKGRDHRDGRARPLSSGQAXT, Run with SignalP
  misc_feature (30)...(386): similar to gi4163933 in the genepept database release 114, Run with FASTXY 3.3t00, default parameters
gcaggtcaaaagggcccaacacaaaacatccagtacagtctataatagccaaagggtcattcacttccagaccttttcatcagcacatgaggaaaaggcccacagaactcagctgtgcatgtggcttatttttgttcagaactgtttcagttgtctcccctaaaggtagggaccacagagatggaagggcaaggccactgtcgtcaggacaggcgtanacagcctgtgcttccttcccaccactgtccctctaggctacagtctagcctattccatattcattcggcacagcctggaaaggaagtggattaacccgacatgaactctgagggttttggctcaagaaattgggagccacttctaaagatggtggctgggatctttgggctctcaagttagtag

SEQ ID NO: 79518 - DNA, 883 bp, Homo sapiens
  sig_peptide (72)...(207): this location contains the signal peptide sequence, MCVRRSLVGLTFCTCYLASYLTNKVRGRAREAAIARGRFESENLP, Run with SignalP
  misc_feature (529)...(30): similar to gi5921135 in the genepept database release 114, Run with FASTXY 3.3t00, default parameters
tatttcgtcggacggcgcccaggggatttgggcaggcaccgtggatccccgggaaggggacgagttgacagatgtgcgtgaggaggtctctggtcggcctcaccttttgtacctgctacctggcttcttacctcacgaacaaggtgagggggcgggcgcgggaggcagcgattgcacgtgggaggtttgagtcggagaatcttcccgtgacaaacggagcctcctcctgctttttacctcattcttcctggtggcgatggagatggagagcgaacctcctccgtgtgtgggatgctctttcagaaataggatttgccagcctgtactgtccccgtttcctgcactgtaaagcacggtacatctccagggaaacaggatttttgggctggccatttcccgggaacttggtttggggctgtgtggactagttttaagagaaagcaagcaattggctcctgctcccccggggaggaagagtcagaagaaatctgacacatcctgccttttttctaaacacgcccctgtcccagagcccccgtgaagttccagaagcctttaaatagaagagattaagccgtctccccctcacactgctgattcccgaatcaatttttttgtacgtctccattgtaagcacttcaagagtttttcatggaattattattttttaaaataaaacatacatttaagtttagggttaaactaatgtcatgacatcatgaaaaccttttggtgaggaagcagaaaaatcatggtgccagcctttggtgttttgttgcaaggaaagggaaacttggcttagcttggggccaccgcgggacggctgggttcattggagcccgtggccatgatggccgatatcacggccgcgcctttggcgtgg

SEQ ID NO: 79519 - DNA, 453 bp, Homo sapiens
  misc_feature (1)...(453): n = a,t,c or g
  sig_peptide (412)...(277): this location contains the signal peptide sequence, MELRKFLSIPIFPCVCVCVLIMNRGELYHMLFCLLKQYDTLFVLS, Run with SignalP
  misc_feature (2)...(453): similar to gi2197085 in the genepept database release 114, Run with FASTXY 3.3t00, default parameters
acaactcttccagaaaaatgtagaggaaggaagatttctcaactaattctatgaggccaatgctactctgataacaaaattaagaagacattacaagaaaactacagatcaatgtcttccatgaacaaaaatgcaaaaccttcatgaaatataaccaagacaacagaaatattgtatcaatagcaatatatcgcaaccaagtaaagcttattacaggaatgcaaggttaatttaatatttgagaaccattcaatgtaggttataatattaacagagacttagaacaaaaagcgtatcatattgtttcaatagacaaaaaagcatatgataaagttcacctctattcatgattagaacacacacacagacacagggaaaaataggaatagaaaggaactttcgtaattccataactcagcagagctgtacattaatggaaatgtcgaccgggan

SEQ ID NO: 79520 - DNA, 475 bp, Homo sapiens
  sig_peptide (227)...(92): this location contains the signal peptide sequence, MLTWQPVHLWLLSADTCPPASRSLSSVLFLILTLLLSLHPPELPC, Run with SignalP
  misc_feature (4)...(475): similar to gi170676 in the genepept database release 114, Run with FASTXY 3.3t00, default parameters
tggggggatggaaggaagggttcaggtaggcactgggggaaggaggtacacaaaggccctgagaacagaggccacagaggtggtgatggccacatggcagctcaggagggtggagtgagagcaagagggtgaggatgagaaagagaacggatgagagagagcgagaggctggagggcacgtgtctgccgacaggagccacaggtgcaccggctgccatgtcaacatgcacgcacatgccgtgcaagtgcacgcacgcacaacacacacccggggcatgccgtggacctaacacccatgcagccgggacagagtcccccttgccctcggacacacatactcacaaccactcacagggccaggcaccccatctactctctctcccaacacaggcgtggggcacagcctgcatgccccacacaggctggcgctgcgctcagagccctggcggccctgtcttctatgaattccagcaca

SEQ ID NO: 79521 - DNA, 764 bp, Homo sapiens
  misc_feature (1)...(764): n = a,t,c or g
  sig_peptide (99)...(234): this location contains the signal peptide sequence, MAYTMIPVLHFFCCETSSLVRTKVVWEAINMVFAKSMNGGPDRCI, Run with SignalP
  misc_feature (631)...(4): similar to gi2065210 in the genepept database release 114, Run with FASTXY 3.3t00, default parameters
gaggacccccaagctttgaggttgtctcctaaccagtgtcataactgaatctttagtaagtcattctgttgttctgccaagctagctgctcctaggtaatggcatacacgatgatcccagtgctgcacttcttttgctgtgaaacaagttccttagttagaaccaaggttgtgtgggaagccatcaatatggtattcgcaaagtccatgaatggtggtcctgacagatgcattgctgtcaggcaagtcaagttcctatttagaaaagtgtctttttcagagaagatagatcactgccccctccatgatggaaatattttattaccaggtccctgggaaatggcaccttattggggactcaatattagtctgtgtcatttgcagtttaggcactccatagtttctctagctagatgcagccttggtgaggggcagtccatgttgtggtgtccatgcttaacctccatctctgttgacatggccacattgtacattaatgcatcaagcagcctcagtagcaagggaaaaaaagctgactgaacaatggcttcttatctatgttattaagatcctttttttaaattgcttagcctttagagaatattcacttaagaaacaaatatatttagccaggtacggtggctcacgcctgtaatcccagcactttgggaggccaaggcgggtggatcgcctgagggncagagttcaagaccagcctgggccacataatgaaaccctgtctctactcaaaatacaaaaaaaaaa

SEQ ID NO: 79522 - DNA, 580 bp, Homo sapiens
  misc_feature (1)...(580): n = a,t,c or g
  sig_peptide (94)...(229): this location contains the signal peptide sequence, MPSYFKTCSLFTLLSSVFLVCIWIFKTNIKSSVSESPPDSGLGQV, Run with SignalP
  misc_feature (369)...(0): similar to gi2887441 in the genepept database release 114, Run with FASTXY 3.3t00, default parameters
cgcagaccttcctaggcccagggagttaggatttcgcctcaactctagggcgaagctgagctgtctgtgagtagaaagttagttttggtatctatgcccagttatttcaagacttgttcattgttcacattgctgagttcagtctttttagtttgcatttggatatttaagaccaatatcaagtcttcagtatcagaatctcctcctgattctgggttgggccaagtgacagctgtgtatcaggtccagtgtttgtgttgggcaaaagactgcaattatccaatttgtagctagacagattacctaaaatcacttaataaactaagtcatctaatctattttttggatctgatgatctgtcctgtttcatttatgataggtagaataatcccccccaaccccaccaagaaatctggatcctaatccctgaacctatgactgggtggggcagcatggcaaagggaaattaaggttgcagatgaaattaagttttctaatcagctgaccttagagaatggcctggctttcctggngggtccagggcattccccccgtctcctcccccgccccaccgangcag

SEQ ID NO: 79523 - DNA, 573 bp, Homo sapiens
  sig_peptide (147)...(282): this location contains the signal peptide sequence, MWRLPRVPWGRHPALWLCCSGLLSHSFWRLWVSINILSLKCGKGI, Run with SignalP
  misc_feature (139)...(573): similar to gi3880096 in the genepept database release 114, Run with FASTXY 3.3t00, default parameters
ctttctcaaatacggtctttggtgcaacataggacttccctagaggtgagggacttgaagggcacctgtactttttgcacttttctagaaaggagagggagaaagagcaggtgacttttctagaaacgtcatttcaggaaaccagcatgtggagacttcccagggtgccttggggaaggcatccagccctgtggctgtgctgctctgggcttctaagccattccttttggagactgtgggtctctataaacatactgagtctgaagtgtggtaaaggaattaccatggctccccctccctgccttcttggagtttgccccctgagttttgtagacaagccatgacagggcagtaggactgggtttagagctcatcagaattatttatttcttcctatcagtttggacagggtatgacccagactcttctctgcccagagcacccttttaaaaaatttaaaaccctgtgtgtatttcatgggaaatttcacatgcctgtttctgattcacttccaattaaaggctcaaaacactggttttgtaagagctctttgatgattcagattcttggtga

SEQ ID NO: 79524 - DNA, 552 bp, Homo sapiens
  sig_peptide (384)...(519): this location contains the signal peptide sequence, METAVIGVVVVLFVVTVAITCVLCCFSCDSRAQDPQGGPGRSFTV, Run with SignalP
  misc_feature (326)...(543): similar to gi600118 in the genepept database release 114, Run with FASTXY 3.3t00, default parameters
cgcgtccgggctgcagcacccagggaggaacgccgcggccctgtttttttatcatgccaggaggctgcagcaccagggaatctgtgctcacgtcttccaggacagtgcttcttctagaagctgacatggagctgaccacagctcttggaggcatggcctgaggcttagaaaatagacagagatcatctgagatttcagcagtggggccacgtggcagcgcccgaaggcctggagcaggagcgacccagggactcagagcagcatcttcttaggagacggaaggagagccgccggaggagcacggggcacctgcgatcgcgaagagcctcctgttctggatgggagcgaaggctccgagaggacctaaggttgctcagtgggccatggaaacggcagtgattggggtggtggtggtgctgttcgtggtgactgtggccatcacctgcgtcctctgctgcttcagctgtgactcaagggcccaggatcctcaggggggtcctggccgcagcttcacggtggccacgtttcgccaggaagcttctctcttcacgg

SEQ ID NO: 79525 - DNA, 392 bp, Homo sapiens
  sig_peptide (157)...(22): this location contains the signal peptide sequence, MLIFVFLFSYLIALAGTFSPRLNRSGESVHPFALHPVLRRKHPVI, Run with SignalP
  misc_feature (5)...(395): similar to gi1196432 in the genepept database release 114, Run with FASTXY 3.3t00, default parameters
gactaacaacatgcttaaaggtgaatgactggatgctttcttcttaagactgggtgcaaggcaaaaggatgtacactctcaccacttctatttaaccttggactaaaagttccagccagtgcaataaggtaagaaaataaaaatacaaaaatcaacatacaaccaactgcaaaggaaattttaaaaaattacattcacaaatagcataaaaagaataaaggatttagaaataaagttaatgaaagaagtacaggacagtacactgaaaattataaaacattgtcaaaggaaattaagacctaaataaatggagatatgtcccatgtttgcaaataggaaaatacagtatcatcaaggtgtcagttttcccaaaattgatccatagattcaat

SEQ ID NO: 79526 - DNA, 506 bp, Homo sapiens
  misc_feature (1)...(506): n = a,t,c or g
  sig_peptide (353)...(488): this location contains the signal peptide sequence, MCMFRRIVLYMCFCCLCVWYVHVCGCGDVWDVHVCGCAHCIXLLC, Run with SignalP
  misc_feature (22)...(506): similar to gi854065 in the genepept database release 114, Run with FASTXY 3.3t00, default parameters
tacccacgcgtccggctggcatgtacttgtggattttgcatgtgtgcatgcttgtgcttgtgttgtatgtgcattgcatgtttcccctgtgtgtccattcacatgcatacatttaggggtgtgcaagcacatgtgtgcatgtggatagatgcaggagtgtgcatctgggtgtgctcgtgtggtatgtgcatactgcacgaatatatcatgtgcatctgtgcatgtggattgtgtgtatacatgcgtgtgtacaggcatgcacacacacacatgaatgtgtttgtgtgtgcatatttgtgtgtacacgcatgtgtttatgcatacaggtgttaacatgtgcacacatgtgtacatgtgtatgtttaggcgaattgtgctttatatgtgcttttgttgcctgtgtgtgtggtatgtgcatgtgtgtggatgtggggatgtgtgggatgtgcatgtgtgtggatgtgcacattgcattgngcttctgtgttgcatttgatttacatggn

SEQ ID NO: 79527 - DNA, 768 bp, Homo sapiens
  sig_peptide (55)...(190): this location contains the signal peptide sequence, MICKYFFLILWVVFSFFFMFLDAQKFIILMKSNSSFLLLLHMLLE, Run with SignalP
  misc_feature (200)...(755): similar to gi2981631 in the genepept database release 114, Run with FASTXY 3.3t00, default parameters
tactttatgtttcaattgggttgttatcctgtatattaatctcttatcagatacatgatttgcaaatatttttttctcattctgtgggttgtcttttcattcttcttcatgttccttgatgcacaaaagtttataattttgatgaaatccaattcatcttttttgttgttgttgcatatgcttttggagtcatatctgagaaatcattgccaaatctaacatcatgaagcttttgccctgtgttttcttctaacagttttacatttaggtctttgatccactttaagttctgtatctggtataaggtaaggaggccaacaacattcttttgtatgtgggtatccagctttccaagtaccattttttgaaaagactgtccctcctccatcgaatggtcttggcacccttgttgaaacacaggaggactttaaagtcaactcagatttctcagcttattgtctgggctcttgataactgcttcctcagtaaatgacaacatatatccatgcagtagtgcctattatatgataaggcaaagactattgagctaatgaaagtaaaaagcttagaagaacacctgtggtatgtagtaaaaagctcaacaaatgttggttatttcattattaagagtgacattagagtccaacatctcccttgttttcattaaaggttttaacatattgcagagtttgttatataagtcaggccaaaaggtactatactctgatcacaactaatctttggattttcccccaagacagatcctca

SEQ ID NO: 79528 - DNA, 403 bp, Homo sapiens
  sig_peptide (167)...(302): this location contains the signal peptide sequence, MRMLLTLGGLPQMCLKFHGTPLTCPQGVPCPHDSQRIQGIPKAPT, Run with SignalP
  misc_feature (57)...(396): similar to gi206710 in the genepept database release 114, Run with FASTXY 3.3t00, default parameters
caggtgggccatggccttctccagctgcttttccttttcggccacctcgagggcggcaaagtgcgcaggctgcaccagcttgtacccagagcccagcaccacccgggtcagagcctcgtggctgctcatctcactctccaggttctgcgggggaggaggcaggaggatgcggatgttgctgacccttgggggactcccacagatgtgcttgaagtttcacgggaccccactaacttgtccccaaggagttccctgtccccatgactcccaaagaatccagggcattccaaaagcccccacaggcagagagttcctggctgggccacagagagtgccatttccttggctgagaagccctgctcatgtgcgaggccagccctccccgggtgggcccacacctggg

SEQ ID NO: 79529 - DNA, 825 bp, Homo sapiens
  sig_peptide (25)...(160): this location contains the signal peptide sequence, MYPGFNLSTSSSTLAIICLFAFSILMSMKCYLVVLICIPLMATDA, Run with SignalP
  misc_feature (750)...(1): similar to gi2981631 in the genepept database release 114, Run with FASTXY 3.3t00, default parameters
taccattttacattcccaccagcaatgtatccaggtttcaatttgtctacatcctcatcaacacttgctattatctgtctttttgcttttagcatcctaatgagtatgaaatgctatcttgtggttttgatttgcattcccctgatggcaactgatgctgagtgtcttttcctgtgcttacgggccatgcgtatttctttggagaaaggtctatccaggtcctttgcctatttttaattgagttgtcttttttttttaagttttctgttttcctaaccactagactaccagggatgagccttctttttattattgagttgggtgagctatttgtatattctagacgccagtcttttatcaggtatatgactggtaaaaatgttctccccttctgtggattgttttcagtttcttgttggtgtcctttgagacacaaaactttttaactttgatgatttccaagatacgtattttttttctattggcacttgtgcttttggtgccatatctagaaaaccattgcctaatccaaggtcaaaaagattaatgcctgggttttcttctaagaacttgtatagttttagttctcacaatggtctttgatccatttcgagtatatttttatatatgaggggatgtaggggcccacctccattgtttggctgggggatctccccttggcccccgtgtgaccatggaaaaaaatatcctttctccccggaaattgcttgtcatcctggctaaaggcctgggcaatcactgaaacctctttcttgggacacgccggcgtcggaaactaagcttgttattataccccccccgccc

SEQ ID NO: 79530 - DNA, 686 bp, Homo sapiens
  sig_peptide (260)...(395): this location contains the signal peptide sequence, MFCCVICPVSFLILIICIFLFLSLAEGMPILLIFSNTHVVHRFLP, Run with SignalP
  misc_feature (687)...(134): similar to gi1791243 in the genepept database release 114, Run with FASTXY 3.3t00, default parameters
cccagcctggtctcaaactcctggcctcaagtgatcctcctgccttagcctcccaaagcactgggatcacagacatgagccaccatgcctggccttcagttttcttaatagttataggactcatttcattatagggatcagtcaagtgatctaattcatgttgagtgagttgtggtaatatgtgtttttaaataattggttcatttcatctaagatattcaatttatgtgtttagtgtagtttgcagtgctcccttattatgttttgctgtgtgatatgccctgtttcatttctgatattgataatttgtatattcttatttctcagtcttgctgaggggatgccgattttattaatcttttcaaatacgcatgttgttcatcgatttctccctgttgtgctgttttcatttttgcgtacttgtgctcttattttctttctcttctgctttaggctgattttgctcttcttactcttgttttttgatattagacctttgattatagatttgagacttttcctcttttctagtttatacatttattgctattacttttgctgtgagcactgctgtagctgtgtcccacaaattttgatatgtggtattttcattttcattcactccaatttctttttctttcacttgagacttcctctttgactcattaattatttaggagtgtgtg

SEQ ID NO: 79531 - DNA, 420 bp, Homo sapiens
  misc_feature (1)...(420): n = a,t,c or g
  sig_peptide (271)...(406): this location contains the signal peptide sequence, MLRLGLCAAALLCVCRPGAVRADCWLIEGDKGYVWLAICNQNQPA, Run with SignalP
  misc_feature (46)...(420): similar to gi5824504 in the genepept database release 114, Run with FASTXY 3.3t00, default parameters
cttcctagcaggagacaaggagcaacgctgcggtggtgagcacgctgtggggcccccacccccagccctagccaggcctagtgcctgctgtagcaccctagaagatccccagcagttggcactagctgtacccaccttgcctggggcccccgtgctgggggtcgcccccaagatggtggcggccccagggaggactgtactgccagccccagcctctggccgctaggcaccccctgccttgccctggcccctcactccgaggccagcgccatgctgcgcctggggctgtgcgcggcggcactgctgtgcgtgtgccggccgggtgccgtgcgtgccgactgctggctcattgagggcgacaagggctacgtgtggctggccatctgcaaccaaaaccagcctgcctacgagaccatnccg

SEQ ID NO: 79532 - DNA, 628 bp, Homo sapiens
  sig_peptide (160)...(295): this location contains the signal peptide sequence, MRGWLWTWLPQPILLRLGQKPFLYFVLKETIIPSPTGRARLSMQG, Run with SignalP
  misc_feature (383)...(91): similar to gi3874102 in the genepept database release 114, Run with FASTXY 3.3t00, default parameters
tgtttggggacctgggtgtcggggcagcagcaggagtgactgggtgcacgtgtgcctttggtgtctgagcgtcgattgcagctgccgctcagggctgagaggggccatgattcctcccagccgggggtggcagtgagaactgcacttagcttgggggccatgcggggctggctgtggacctggctaccccagcccattcttctgaggctgggacaaaagccttttttgtactttgtgctcaaagagacaattatcccaagtcccactggccgagcacggctttccatgcagggctggtgcaggaagctatgggccgtccctccccagcaccgtgtatagtcttaacaggatgcagtcacggccccagtggagggggatttccttcctcgtatccgagcgagtggctaacggaatatgagccttggaggttcagcaggagcccccccgttgctggggtcccagttatcgtccccaccaagtggccagcttggggactactaagagcccttgaggaaggttagggaatagaaaggcggaggccaacacaaaaaggaaagttggacctttttgtgggaaagcttcatgcctttttgccctggggggaacccttgaacactgcttgcctttg

SEQ ID NO: 79533 - DNA, 818 bp, Homo sapiens
  sig_peptide (244)...(379): this location contains the signal peptide sequence, MGVSFCTALLVYVSILPRPYCLDDYTYAANLSIRVIPPTLLVWLF, Run with SignalP
  misc_feature (609)...(38): similar to gi2197085 in the genepept database release 114, Run with FASTXY 3.3t00, default parameters
tagtcactgtggtggaattcctgaagatttcttctgcgttatcttctaaaagctttttagttttacactgtacatttaagtctgtgatccattttgagttaatttttatataagatgtgaggtttaggttgaggttttatttgccaatggctatccagttgttctagcataatatgttaaaaagactatcctactccattgaattaattttgctcctttgtcaaaaatcagttgtctctatgcatgggggtgtctttctgcactgctctattggtttatgtgtctatccttccaagaccatactgtcttgatgactatacttacgcagcaaaccttagcatcagagtgattcctcccactttattggtatggctattctagttcctttccatataaattttggaataaatttgtctacatgtaaaaaaaatcttgctgggtctttcataggaattatgttaaacctttacattaatttttggggagactgacatctttattatgttgaatcttccaatccatgaacatgatatatttctccatttatttaaaacttctttgatttctttcattcgatttttgcagtcgtaagcaaccaagtcctgcacatggtttggtacatacttggatgctgatcccactagttccggaaaatgattggactaaggtccctcatacctgggataccgtatcggggcaatcattcccagaagtccccaacccagactgtgcctacccagcccggaccatgggctcacaacaaggcccacaatggagggccccccaaaggcgatcccactgggcaccgcccagcatcc

SEQ ID NO: 79534 - DNA, 423 bp, Homo sapiens
  sig_peptide (239)...(374): this location contains the signal peptide sequence, MLCLPMLDYFKCCLLLKFLKNDFCQHIPPLQIIKEKILKLPITVT, Run with SignalP
  misc_feature (36)...(414): similar to gi1747306 in the genepept database release 114, Run with FASTXY 3.3t00, default parameters
aagaatctccagcactttcagtgcctataacatagtttctaaaatccacagcttaactttaaagaacctcgccatagtacatgtcgaagcaggattcaaggctgcatggctttacactccctaatttgaacttaggctggtcttttcacggcgtcttgagtgagtatattagttcacaacttcaaacttaggctgttcttcttaccctcctgcccccagctcattatcaccatgaaaaatgctttgcttacctatgttggactatttcaagtgctgccttctcctaaagtttctcaaaaatgacttttgccaacatatacctccccttcagattattaaagaaaaaattttgaagctacccataactgttaccgtttcacttattttggcacctagatattgacttggtttatgggttcttag

SEQ ID NO: 79535 - DNA, 446 bp, Homo sapiens
  sig_peptide (92)...(227): this location contains the signal peptide sequence, MNMEYLSIFVCPLQFLTSVFYAFYYRDLSLLWLSLFQGFYFVCSY, Run with SignalP
  misc_feature (447)...(22): similar to gi804810 in the genepept database release 114, Run with FASTXY 3.3t00, default parameters
cttcccgggtcgacgatttcgtggattgcactgaatctatagattgctttgggtaatatagccattttaacaatactgattcttccaaaccatgaacatggaatatctttccatttttgtgtgtcctcttcaatttctcacatcagtgttttatgctttttattatagagacctttcacttctttggttaagtttattccagggattttattttgtttgtagctatcataaatggaattactttcttgatttttttttccagaccattcgctcttggcatatagaaatgctactgatttttatatgttgattttgtatcctgtagatttactgaatttgtcaattcgaattgtttttttggtggattctttaggtttatccaattttaagattatatcatctgtaaacaaggataattggacttcttcctttccaatttggatgcc

SEQ ID NO: 79536 - DNA, 444 bp, Homo sapiens
  sig_peptide (247)...(382): this location contains the signal peptide sequence, MQKLQQVIQKMKVALTLLLGTSAAGDFKLQSVLIYHSVNHRTLRI, Run with SignalP
  misc_feature (7)...(446): similar to gi2226004 in the genepept database release 114, Run with FASTXY 3.3t00, default parameters
tttcgtcgaatgataagaaaatgaaacagtcttattgcttatatgggtaaatttttatggtctggatagcaggtcaaaccagccacaaaattcccttaagccaaagcctagtgcagagcaattctctgaaggctgagagagatggggaagctgcagaagaaaagtttgaagctagtggaggttggttcttcaagtataaggagataagccatctccataacttgcaagttgaagcagcaagtgctgatgcagaagctgcaacaagttatccagaagatgaaggtggcactgactctcctcttggggaccagtgcagctggtgactttaagttacagtcagtgctcatttatcactctgtaaatcataggaccttaagaattatgctaaatttcctctcctgtgctctctaaatggaacaacaaagcctaaatggcagcacagct

SEQ ID NO: 79537 - DNA, 410 bp, Homo sapiens
  sig_peptide (97)...(232): this location contains the signal peptide sequence, MSSVSLIEFPLYMICPFALAAFKTFSLALILDILLTIFLDDIHFV, Run with SignalP
  misc_feature (412)...(12): similar to gi2072960 in the genepept database release 114, Run with FASTXY 3.3t00, default parameters
ttcgtcagaaaatgaaattgttttttggaatttattttctctgcgagtgccgaacataggccccaatctctcctggcttgtaaatcttctgctgagatgtcctctgttagcctgattgagttccctttgtacatgatctgcccttttgctctagctgcctttaagactttttctttagcattaatcttggacatcctgctgactatattccttgatgatattcattttgtatagtatctttcaagtgttctctaggttttctgtatgtgaatatttctctagcaagaacagggacagtttcttgaattattccctcgaatacgtttctcaggttatttactttttctccttcactctcaggaatgccaataattcctaggtttggtcactttacataattccatatttct

SEQ ID NO: 79538 - DNA, 853 bp, Homo sapiens
  sig_peptide (406)...(271): this location contains the signal peptide sequence, MLLLWGRLTWRKMCRKLLDMTFSSKTNTLVVRQRCGRPGGGVLLR, Run with SignalP
  misc_feature (4)...(808): similar to gi930045 in the genepept database release 114, Run with FASTXY 3.3t00, default parameters
ctgcccatggaacgctgtggtcctcaagctgtgggtgtcccggatcaagatgtagctggcattggctccctcggtcccagcgcccatgttggtggccagggcatggatggcaatccgtgcgtgcggagccacattaatgaagagccggcagccccctgcattactcgtggctggactcagcgaggggctcacgatttcaccccagggcccaaagagctgcatgtcacattctctgtagaaggtttcaggagcaagctggctcccataccgcagcagcaccccacctcctggccgcccgcagcgctgcctcaccaccagcgtgttggtcttggagctgaaagtcatgtccaacagcttcctgcacatcttcctccaggtgagccggccccaaagcagcaacatgtcccccgcactgcagttgagagaactctcaaggacgcggagggtcaccacctccccgaggggccgcccaatggccactgcacagtctgcctgccctgggcctcgcatgtcaatggttcctgttggctcaaggtgctgcctgccacaggcacctgaaaagggagcaggagacaggtaagcagtgcttccccgattcccagcagggcaggctccggggcttccaagctgaggaaggagaccaggaggtaggggtggaccctgtcctccaaggcccagctggaagccttctcaggacagggaggggggctgcataggtcagagcatcaccctcagggcacagggctgctaccagatgatccagcaagagggggcacatgcagagcagcccagaggctagggggctcacaagctgggttcctaccttcaagttacttcccctggattccaccac

SEQ ID NO: 79539 - DNA, 819 bp, Homo sapiens
  misc_feature (1)...(819): n = a,t,c or g
  sig_peptide (18)...(153): this location contains the signal peptide sequence, MFSCPLQTVPLAVFFLLAGIAVHLSHLVLKLLKSLIFYVDFDHPP, Run with SignalP
  misc_feature (31)...(585): similar to gi2065210 in the genepept database release 114, Run with FASTXY 3.3t00, default parameters
gtggaattcgatgagttatgttttcttgtcctctacagacagtccccttagcagttttctttttgttggcagggatagcagtacacctttctcatcttgtcttgaaactcctcaagtctctgattttctatgtagattttgatcatcctcccatatcacaggccattatatttgtccactacattgattatactatgttgctaggattgggagaaggagaagcagtgggtacttcagatgcatcaataagacataagtgtgcctaagaatggaagtaagtttcatgagaacataggggcctgccaaccacgtgaagttcctgggtgttcagtgatctggatccctgcaaaatgaaagacaacttgctgggctttctgcctcttactgctaataagcacaacacttcttgggcttctatgtattctggaagcaaaatatattggngngcttctctgatccttataagggtattgagcaacctataaggctgcagggttggagtggggtccacagaaaaggaaagcttccagcggggccaaaatgaaaggcaagctgctctgccacatggcacctgaaagcccacctcgttcccaagatggctcaagccgccgcggcagatgttatttttttggcccccctggccacggtctggatggagaatttccaaatggactatctcccatcttacgaaggccggccccgtccctccgtttccgggcgacgctccctgcccttcgcacgaagggagggctggtttccttcttgactaggcggttaacatcgccacccccctcccgccttcttttctttgcgccccgc

SEQ ID NO: 79540 - DNA, 666 bp, Homo sapiens
  sig_peptide (150)...(15): this location contains the signal peptide sequence, MAPGGAKGQGASALALLFILASPATGGGPRLWRAGGLGFTHCQAN, Run with SignalP
  misc_feature (33)...(610): similar to gi59500 in the genepept database release 114, Run with FASTXY 3.3t00, default parameters
ctgtggtggaattcgcctggcagtgagtgaaacccaggcctccagccctccaaagcctggggccaccccctgtagcaggcgatgctagaataaagaggagagccagagctgaggctccttgccccttggcccctccaggggccatgggatctctgtctcccacacccctgtcacggcccgcctggagcagcccagaggccgaagaggttcttactgcagcctccgggaggtgtctagggaggccatagattgcctggtctcgccgcattcaaaatgaggcttatgatcagtacttttttcagccccacattcctctccagaatggcctctgccctacagcacctggcccatgtggcaccccatgggcctgtcctctgctgttgtgaggtcgacctcacgacccagcacaggagctggaggcgaggtgcacgcgaggctctccacagcccaggaaggcagcctgtcaccctgctctccgagccaggggccaaggtgtggggggcacaggccatcctcatcctgccaggcccccgctttcaggagtggggtggtgccaatgctcccactcagaaccctggactgcggggtcccctgagcagagggaccagccagttccccatagacagattggtgctggacaggggctgcctgggccccaggcttggg

SEQ ID NO: 79541 - DNA, 446 bp, Homo sapiens
  misc_feature (1)...(446): n = a,t,c or g
  sig_peptide (115)...(250): this location contains the signal peptide sequence, MHRLPAATRATLILSLAFASLHSACSAEASSSNSSTLTAHHPDPG, Run with SignalP
  misc_feature (80)...(446): similar to gi5823355 in the genepept database release 114, Run with FASTXY 3.3t00, default parameters
ggggcttagctanagnatanagcgaagnaantctngactaanctgcagcaggcactcggcacaactccgcaggaccgtctcacctgcactcgggcactcagcacagcctccagcatgcatcgcctccccgctgccacccgggccaccctgatcctcagcctggcctttgcctccctccactcggcttgctcggcagaagcaagcagcagcaacagctcaaccttgaccgctcaccacccagaccctgggaccctggagcagtgcctcagtaagcttctcctgccaactgctctaaccccagaactggccctcagcctgggagggaaacaaaggcctccccgctttccgttgattggtgtcaagtgggcaagggcctgcctggccttcctgtgcaccagtgtggtttgtcccagaactatttgcagagcaagtctgataggctttct

SEQ ID NO: 79542 - DNA, 1398 bp, Homo sapiens
  sig_peptide (816)...(681): this location contains the signal peptide sequence, MILLLSTFFCCFREDSCFYKKYVGLVQWLMPVIPALWEAKVGGSL, Run with SignalP
  misc_feature (278)...(0): similar to gi2197085 in the genepept database release 114, Run with FASTXY 3.3t00, default parameters
ggtgtaattcaatggggttgtttggtttttctgttgtggaatatttaaatttctctatgtatcctcaatgttaagccatactagagatatgcttttcaaatattttcccccattctgtgcatcaccttttttactctgctgaaagtgctgtttgatgcaaaaaagtgtttaattttcatgaggtccaatatatctattttttcttttgttgcctgtgccttgggtgttatattcaagaaatcattgacaaatccaatgatatgctcttctacacccttaaaaattatagacaaccccaaataacttttatttagtggttttaacaatatttaccatgtctgaaatatgataaacattaaaattagtattttggaaaaatgccatattagaaactgatgatttaaaagtaacaacaatgaatccattacatgtgaacatactgtttttttgtttgtttgtttgtttgttttgagacggagtttcactcttttgcccaggctggagtgcagtggtgcgattgcagctcactgtagtcttcgcctcccaggctcaagtgattctcatgcctcagcctcctgagtagctgggattacaggtgctcaccaccacacccggctaatttttgtagagatggggtttcaccgtattggccaggctggtcttgaactccagacttcaagtgatccacccaccttggcctcccaaagtgctgggattacgggcatgagccactgcaccaggccaacatactttttataaaaacagctgtcttctctaaaacaacaaaaaaatgtagataatagtagtatcattttatagttttgcaactctctttaatgtttggcttaataaaagatagttggattctcgtatctgtttttgtattcagtctgttgtggatggtgatttgattgaagtaaatgaaggaaatccagctacatacagatttggagttggaaaaaatagtattttaataacctttttagatcatggtggatactcttcttttgtttggcctcaaaattagaacaaaggcagtttctgaaaataattgtatgtggtgaaaaattaatgaatcttatatggaccatacttttaatttagaatattggtctaaaaaaaaaaaagggggccctttaaaaacaaatttagtacgggcgtggatgttaacttttttggggccagattgttcgggcgggtgtacaggggaaggggaaaacgggtggggctaggacgtgttgaacaaatgacgtgctcgtgctggcgaccgacctcttgtacgagaggtaatgcgattgggaacgagtgatgggtgcgtcgattggtcgaggcgtgcgatgcatgcaatggggcgcttaggcgttgggtaggatgggtgggacggatcgaacgttctcg

SEQ ID NO: 79543 - DNA, 428 bp, Homo sapiens
  sig_peptide (243)...(378): this location contains the signal peptide sequence, MFLYASLITVYGFVKIQPVAFTCLLHDLYNPLGSQPATHRTFPCA, Run with SignalP
  misc_feature (18)...(428): similar to gi3513741 in the genepept database release 114, Run with FASTXY 3.3t00, default parameters
tcggaggaactctagagaaaatacctcctgccatgtcctgctatgaatacagctttgtatttctctctctagttttgtcaggtttggcttttcagattttgaagcgtggttgtgggctgaatcttgcccttatcacccatttctaggatgctttttgctccactcattctttgtcttgcttcacttgactttgaactgtatacttttttccatcgttttactttcagtatcttcatacatgtatgtttttgtacgcctctcttataacagtgtatggttttgtaaaaattcagcctgtagcttttacctgcctccttcatgacctttataatccccttggttctcagcctgccactcacaggacttttccctgtgctgcgttcccagtgccccctccccgcccccacctgtgctttttgttggattag

SEQ ID NO: 79544 - DNA, 489 bp, Homo sapiens
  sig_peptide (70)...(205): this location contains the signal peptide sequence, MVVGAFPMAKLLYLGIRQVSKPLANRIKEAARRSEFFKTYICLPP, Run with SignalP
  misc_feature (13)...(468): similar to gi482882 in the genepept database release 114, Run with FASTXY 3.3t00, default parameters
ggaggagtgaagaggttgaggcgccccgcccagtcagcaaggttgcgcgtgccctgtgagaccgccaagatggtggtgggcgcgttccctatggcgaagctgctatacttgggcatccggcaggtcagcaagccgcttgccaaccgtattaaggaggccgcccgccgaagcgagttcttcaagacctatatctgcctcccgccggctcaactgtatcactgggtggagatgcggaccaagatgcgcatcatgggcttccggggcacggtcatcaagccgctgaacgaggaggcggcagctgagctgggcgcagagctgctgggcgaagccaccatcttcatcgtgggcggcggctgcctagtgctggagtactggcgccaccaggcgcagcagcgccacaaggaggaggagcagcgtgctgcctggaacgcgctgcgggacgaggtgggccacctggcgctggcgctggaagcgctgcaagcgcaggtg

SEQ ID NO: 79545 - DNA, 385 bp, Homo sapiens
  sig_peptide (213)...(348): this location contains the signal peptide sequence, MLHFYILIIFILNCLFLPQALRTFILFLDDSVICLISFALAFLLW, Run with SignalP
  misc_feature (13)...(369): similar to gi4378772 in the genepept database release 114, Run with FASTXY 3.3t00, default parameters
aaattcctcccttttcagaactgtaataaacaatattggtttaattctgtttgtttagtttttctaagttagatttaaataaatttaagtttttacctcatctggcattggtgtgaaatgagaatctaaatgttttcttccaaattggtaattttctcaactctgttaaataatgctttatttaattttttaatttttctcatttttttgttatgcttcatttttacattttaatcatttttattttaaattgtttatttttaccccaagccttaagaacattcatattgtttttagatgattctgtgatatgtttaatatcttttgccttggctttcttattgtggaggttggttccttatttatttttaagattactgaaagg

SEQ ID NO: 79546 - DNA, 602 bp, Homo sapiens
  sig_peptide (508)...(373): this location contains the signal peptide sequence, MKALCLLLLPVLGLLVSSKTLCSMEEAINERIQEVAGSLIFRAIS, Run with SignalP
  misc_feature (120)...(493): similar to gi2384941 in the genepept database release 114, Run with FASTXY 3.3t00, default parameters
gaaaaaattgcatgcccgcgtaaacttgggcccccccaagggtcctttaaagcggcccccccttttttttttttttccatcatcatcatcatcatcatctccaggtttatttccagctcccccgcaacccctccggacctggagccgcctccgcccgcgctgtgcacgcgctgcgcgcgacctcagggctgcacacgacagcagcgcgctccggtccagtccatgcccgcgcactggcagtgacatgtggtctcggcgcgcacatcccacgagccacaggcggagccacaagtgcagccggtgacggcgaagcctcgggggcaagtagccaggtcccccctggaggtgacgctctggcactccaggccaatgctgcttattgccctaaatattagggagccggcgacctcctggatcctctcattgatggcttcttccatggagcacagggtcttgctagacaccaacagccccaggacagggaggaggaggagacagagagctttcatcctgcaggcgcctctcggtgggctcagctaaccaaatccggcacacgaattcctgcaccgcagctctttctttgaggcctccggacgcgtggg

SEQ ID NO: 79547 - DNA, 706 bp, Homo sapiens
  sig_peptide (18)...(153): this location contains the signal peptide sequence, MVPWHFLFSLIRKITPALLGWRPQVSTGGRGLDEQGVRGPGAQGP, Run with SignalP
  misc_feature (695)...(59): similar to gi264 in the genepept database release 114, Run with FASTXY 3.3t00, default parameters
attttttgttataaaaaatggtgccatggcactttttattttctttaatcagaaaaataacccctgcacttctgggatggaggccccaggtgagcaccggaggaaggggcctggatgagcagggagtgagggggcctggggcccagggcccagagcaaatgctgcaccagagcctggtcaggacccaggagggcctgagggagtggggtcctcatgagcaagtgctggggtctggaggtcagcagctgcctggcctggaagccaggaacacccacttcctgacacctgcggtcgcccagctgggcgagatcaggcctgcgcggccaggacctctggtcacaatgcaggggttcaggtggccaaagctgctctctggagggcctctggctgcagcccacccagttcccctgaggtctggagactcagagcacccccataaaacaccccctcccttttgggccagtggcatgcctcggactccagaagacttgagtggggctccctccagaccagggcctgagggggtggcaaaccctgaccacagatggggggcgtaaaaggagcgggaatgggcccagggacagctttgtagtgtgaggtctgcccgactgcatctaagtcaacagccagacaggatgctgcaggggactgtggtgaagccaggagaaggtgctgcccatcctgcaggctcccccttatctggaga

SEQ ID NO: 79548 - DNA, 423 bp, Homo sapiens
  sig_peptide (20)...(155): this location contains the signal peptide sequence, MLMCFICTASTVWNTLRAGHCVYLMSCQSWKSPAEFSAHLSNFTV, Run with SignalP
  misc_feature (125)...(366): similar to gi2397 in the genepept database release 114, Run with FASTXY 3.3t00, default parameters
tgatttaagagtatgcaaaatgttgatgtgtttcatttgtacagcatccacggtctggaataccttgcgtgcaggtcactgtgtatatttgatgagttgtcagagttggaagagtcctgcagagttttcagcacatctgtctaatttcacagtgtgagataatgggcagcagagacccaggccctgaagacagatggctcattatgtgggattagaacccagatcttctctctcagttcgctctccttccactagacttaagctgccccctctattgcgagatgaggaaattgggagatgttagaactggccacacttactattctagttgacgggacattgacgactagaacctacttctagttcacacctctttccgttaagatatatgggctcagatgcctacatttagtggtttctgat

SEQ ID NO: 79549 - DNA, 447 bp, Homo sapiens
  misc_feature (1)...(447): n = a,t,c or g
  sig_peptide (292)...(427): this location contains the signal peptide sequence, MLPLLLWPIPLLSLPSPCWAPGFSSDSKYAVILEPLSLLSHLPGT, Run with SignalP
  misc_feature (70)...(446): similar to gi1827483 in the genepept database release 114, Run with FASTXY 3.3t00, default parameters
atcgcccgacttcccggtcgaccccgcgtccgatgctttgattttacaagagcttctcactggcttctctgccctcacctgtactcctctgccccaagtctgttaagaacacagcagccaaataaccctctgaaaagtgacttgaggtctaaattacattatatcaatccttccaaagctcagataaaatcatgtcactgctcttgtcaaattctctacatggcttctcatctctctcagagtcattgcccaggtccttgcagtgacctagcagtttccagcactagggtaatgctcccactgcttctctggcccatccccttgctctctctacctagcccatgctgggctcctggcttttcttcagactccaaatatgctgtcatcttagagcctttgtccttactctcccatctgcctggcaccctcttcccccaaatgcttgcn

SEQ ID NO: 79550 - DNA, 440 bp, Homo sapiens
  sig_peptide (244)...(379): this location contains the signal peptide sequence, MQKFFLITYVLRFALDVANYIFICIFINMFIMISMPLSFKFWGII, Run with SignalP
  misc_feature (26)...(432): similar to gi1334398 in the genepept database release 114, Run with FASTXY 3.3t00, default parameters
cgggttcacccacgcgtccgaattttttttgctggtctatttgattcttgcatctttttcccacattttctctctttgtttctctctgcggctgttttatttttactttgatatgcttttacttctttcttatgttggtttctgtatctatacaggcatattctttgtggtacgtgggggattacatagaacctttaagagatacaatgtatttcagtctagttaaaaatgaacttttgttgcatgcaaaaattttttctcattacatatgttctcagatttgctcttgacgttgctaattatatttttatatgtatatttattaacatgtttataatgatttctatgcctttatctttcaaattttggggaataattaaaaatttcttctgtgccattatgataatgctaagacatgtatttttgtgtatgtgcgtatg

SEQ ID NO: 79551 - DNA, 566 bp, Homo sapiens
  sig_peptide (241)...(376): this location contains the signal peptide sequence, MFFWRLLILYSSPEITVCLHLFTSSGLKMQHLRSHCHLFRQALFL, Run with SignalP
  misc_feature (175)...(418): similar to gi1066731 in the genepept database release 114, Run with FASTXY 3.3t00, default parameters
cttacaggcttaattacttacttagttaaatatttctgaagactattccattcacagtctttttcctgaataagccactggatgggtacttacttgacctcctaggcagtttgaaagtgggaaataggaactcaggttgatgagcattattatttctgtcattagacaggtatacttctgtcttatttaccaatcttgtgtaattgcattggcttactaataaaaacttaagtctaaacaatgttcttctggcgtctactcatactgtattcttctcctgagatcactgtttgtctccatcttttcacatctagtgggctgaaaatgcagcatttgagaagtcactgccatctctttcgtcaggctctctttctttgcttcagtgacaccacagtcatgggtttcttcttatcttactggtggcaattttctgtatgaactcctcttctaggacccatccttgaaatgttggagagcctcaacatgtggtcccaggctggcgtttaagaaaacttccattcctcctgttccagtttttaccatctcagtaagggtcgacgcggccg

SEQ ID NO: 79552 - DNA, 362 bp, Homo sapiens
  sig_peptide (8)...(143): this location contains the signal peptide sequence, MVQSLWKTVLAVFYKTKCTLTIQFNSAIVLLGIYPNELKTDAYKD, Run with SignalP
  misc_feature (5)...(354): similar to gi1196431 in the genepept database release 114, Run with FASTXY 3.3t00, default parameters
atataaaatggtacagtcactttggaagacagttttggcagttttttacaaaactaaatgtactcttaccatacaattcaattcagcaattgtgctccttggtatttacccaaatgagttgaaaactgatgcctacaaagacatgcacatggatgtttatagcaaccttattcatgagtgccaaaacttggaagcaacaaagacgtcacccagtaagtaataaataaactatggtgcatcctgacaatggaatattattcagcactaaaatgaaatgagctctcaagccatgaaaagacatgaaggaccattaagtgtgtaatcctaagtgaaagaagccaatctcagaaagatataaaata

SEQ ID NO: 79553 - DNA, 711 bp, Homo sapiens
  sig_peptide (131)...(266): this location contains the signal peptide sequence, MLFAWKVSFFPFQFKLCFLREDLLISLFIKQAPGARKPLHQHSIC, Run with SignalP
  misc_feature (12)...(287): similar to gi506795 in the genepept database release 114, Run with FASTXY 3.3t00, default parameters
acctcatcccatgccgctttcttcatttctcaacatcctccagccattgtgaactcctttctttaaattttccaagcactttctttgtgcttgctgcctgaaaccctccctcttccccaaccccaatgctatgctttttgcttggaaagtttcattcttcccctttcagtttaaactgtgcttcctcagagaggacctcttgatctccctttttataaaacaggctcccggtgccaggaaacctttacatcaacactcgatttgccatttgatagtccttcatctgggaggaaaaaaaaagacggaggggagcttgaaaaactgtcataatgtccctggaatatggtacttttaagagttgagcctattccattttggaaatgatttatataagttacaacaaaagaaggggacaaaaacatgatggttctatggagtttttataactttctgtcacaagaaagcacgcttgtctacaattttggaacatttctaggaaataaaagaggcactccccgtctcaaagcaccaaataaggaaagtgtaattggatgtcattgctgtcagtcagctgggctataaaagagagagaggggttgcctcatcccctgggtatccacaggcagctgtgtccctagagcttcttttctttcattgctgcccagctgggtatattgcaaggatggattataagaggggaagggacctcct

SEQ ID NO: 79554 - DNA, 393 bp, Homo sapiens
  sig_peptide (107)...(242): this location contains the signal peptide sequence, MKSFILPSSRYLSLVCSFWPTLVGWGFSNNLIFSKVILVYFIHGL, Run with SignalP
  misc_feature (131)...(258): similar to gi5731925 in the genepept database release 114, Run with FASTXY 3.3t00, default parameters
gttaattgccttttctcattcaggttgcgattttcctggttcttggcctgacaagtagtttttcgtgttttcctagacctttggatgttataggacactggatcctatgaaatctttcattttaccaagtagccgttatttaagtttagtatgcagcttctggcctactcttgtgggctggggtttcagtaacaatttaatatttagcaaggttattctggtctacttcattcatgggctatcaggaggccactcaggaaacctgagtggaattccacactgtgtaatttacttctcaaacctttgggtgtgttaatgctcatctgtttcacatgtagattggtcagagcctgcccaggacttcctatacagctttaaagcgtgggtttccag

SEQ ID NO: 79555 - DNA, 461 bp, Homo sapiens
  sig_peptide (33)...(168): this location contains the signal peptide sequence, MDHCGALFLCLCLLTLQNATTETWEELLSYMENMQVSRGRSSVFS, Run with SignalP
  misc_feature (82)...(444): similar to gi458554 in the genepept database release 114, Run with FASTXY 3.3t00, default parameters
agccagttcttggaggagactctgcacagtgcatggatcactgtggtgcccttttcctgtgcctgtgccttctgactttgcagaatgcaacaacagagacatgggaagaactcctgagctacatggagaatatgcaggtgtccaggggccggagctcagttttttcctctcgtcaactccaccagctggagcagatgctactgaacaccagcttcccaggctacaacctgaccttgcagacacccaccatccagtctctggccttcaagctgagctgtgacttctctggcctctcgctgaccagtgccactctgaagcgggtgccccaggcaggaggtcagcatgcccggggtcagcacgccatgcagttccccgccgagctgacccgggacgcctgcaagacccgccccagggagctgcggctcatctgtatctacttctccaacacccactttttcaag

SEQ ID NO: 79556 - DNA, 827 bp, Homo sapiens
  sig_peptide (198)...(333): this location contains the signal peptide sequence, MLSFKSFIVLYFIFRSMICFELLLVKGIRSLSRFVFYMWVSICSS, Run with SignalP
  misc_feature (218)...(827): similar to gi2981631 in the genepept database release 114, Run with FASTXY 3.3t00, default parameters
ttttaacagttctttgatattttggataacattcctttatctgataaatcttttgcaaatattttctctcagtctgtagcttatcttcttctgttcttgatagtttcatttgcagatcaaaagttttacatttagtgaagtgcagtgtatcaattctttcttttttgtccaacacaagatcatctagctattctcctatgttatcttttaagagttttatagttttgtactttatatttagatctatgatctgttttgagttacttcttgtgaagggtataagatctttatctagatttgttttttacatgtgggtgtccatttgttccagcaccatttgttgaaaagactgtctttgctccatcacattgcctttgctcctttgtcaaagatgagttaactatagcctggtgtgcagaggtacacacttgtagtcccagctgctcagtagagttcaatagttttctttaggaggctgaggtagaaaaattgcttgagcctaggaatttgagtccagcctaggctacatagcgagacctcattcgtatgaacctacgtagctaagaccagttgactgtatttatgtgggcccaatcctgcaatccctatcaggcccatcttatttcccgatctttgcctaaggcataccatctaccgtctgcccctacacgccaagaaaacgcaccggtcgaccctagtgggccaactcctattgtgccccatcgctctcgactactggccttgaccgacccctacccaccatgcgccgccctcccaaccctcccgtcttcctacccctctgacgcccctccgttccgcacatcgct

SEQ ID NO: 79557 - DNA, 887 bp, Homo sapiens
  sig_peptide (138)...(273): this location contains the signal peptide sequence, MPCSGSSVQTFRPLLIFHNVTFFILPVKCFNALINVLERPFWQLL, Run with SignalP
  misc_feature (705)...(0): similar to gi4680231 in the genepept database release 114, Run with FASTXY 3.3t00, default parameters
agtacccctccgattttcggtcgacccacgcgtccgcttttctccccctgcatttcctattatttccatatttggtctcctggacttggcatccaggtctctctactttttcactcaaatcattgaaccttagctccatgccttgcagtggttcttctgttcagactttcagaccattactgatttttcataatgtgaccttcttcattttacctgttaagtgttttaatgctctgattaatgttttagaaagaccattctggcagctgttgggagagattggagaggaatacagaggaagtgaggactggttaggaggcagtttcaggtgagagatatggtggctcagacagggtgagaagatggagatgagagaacaggtaggatggaggaatgctttacatgcagtagccgtaggacttggcggtggtttggacctgggagttaagagagtgggagggggacaaggatgtctctcaggtttctggtctattaaacaactgaacagatagagatgctgtttgttgagatgaggagtagaggaggaggccatgtctagagtggatcttgggctcctctctttggaccccttaggtttgcagtaccccatgagacatccagggaaaagcagtgacatgcaaacatggcctagggtttgtttcccccctcagctctatgggaaaattgggctccatgggaatgctgtttagggatggcatttgcttgcaaatgacagtggcttaaacagatagaagttgattggcttcacacaaaagagtttgaaagttagccacttgggccggatgcagtggctcacgcctgtaatcccagcactttgggaggccaaggtgaagggggcctgcccctccacacttgtgggtatttca

SEQ ID NO: 79558 - DNA, 441 bp, Homo sapiens
  sig_peptide (362)...(227): this location contains the signal peptide sequence, MMRVIILIWFRISKGTFQHSTTKCDVCFRVFLLSNCSFLSLNYKL, Run with SignalP
  misc_feature (1)...(422): similar to gi2981631 in the genepept database release 114, Run with FASTXY 3.3t00, default parameters
gccaaaattcctaagaaaatattagcaaaccccctccatcgatatataaaaataatccaacatgataaaattgggtttattccagtaattgcaaggttggctgaccattcagaaaactaatgtactataattgccacattaaaaagtaaagtaataatgtcttaaaggattttaaaagtaaaggaaaaatatcacatagtgcctcaatagatgatgaaatctgaagtcaatttataattaagacttagaaatgaacagtttgataaaagaaaaactctaaagcaaacatcacacttagtggtggaatgctgaaatgttccctttgagattcgaaaccagattaggatgatcactctcatcatgtctatttaacattttgctgtaaatccaagatgctgtggtatgataagaaaaagacgaaatcgtcgacccgggaattcc

SEQ ID NO: 79559 - DNA, 1211 bp, Homo sapiens
  sig_peptide (146)...(281): this location contains the signal peptide sequence, MGGFKVNLFVKVKAEGSPLCWLKLACLGAWLLSLLISQKSDEQLC, Run with SignalP
  misc_feature (134)...(359): similar to gi265734 in the genepept database release 114, Run with FASTXY 3.3t00, default parameters
tttcgtaagatcttaattagcttttatttgagattctaaagttgggcaacacctcattcttagagaatgagggtttcaatgagctgagcagaggaagttggttttatagacaggggctgaggaaagcagaaacagaaaacaaaaaatgggtggtttcaaagttaatttatttgtaaaggttaaagcagagggaagtcccttatgctggctaaaactggcatgtttgggggcttggctattatctcttctaatttctcagaagtcagatgaacaactttgctttggcttgctgacatggaactttagcacaagtgactccattttggtttggtttgttgggcctagggcagggactcagtccaaaccagtggtctcctataaattttaacagatctattagtacttgaaagaaatgtcaaatttcatttagaagttaacaaaaatgaagatgtagctgttcagaccctttaaattcatccatgttcacagaccctctaaagtctatccatggaccccaggctaagaactgctggcttaggtggagcagccaggagaactgcatccccccggataggggatcgtaaaggcattagaggagggaggcacttgccttgcagtggggcaactccaaaaaaggcaaagatatctcccctaagtgtgaaattttaaaaaaatcaatagctaacaaatgaagctggaaaaaccacttgagacaatgggaaaatattaatgctgaaacgtattagatgttaaagaattattgagtttttttcccttaagaatgtggttaacataaaacgcccttaaaatgtatgaagaagtttccttgacaagccttggattaactcttaacagattgggggacgaggaaagtcggcaaatccagatgaataacaattgcttgtttggggccgtctaatagatccaacttacgacccgcgcatcccaatttatagtttttgttcgggcgcgtacagtcactcccgggccgcatttacacacccctcagcgggaactcgctggtcttcactcataacagacctccaccctgatactgcgatgcgtggtgcctcggctgacttcttcgccgaaatacgtctaccttccagctgcgcccgctacgcccgagcccgccgcactcctggcgcatcgcattggcttcagctcccgccgtgtgcgtcgccgcgtgtgcgcccggtaccatagaaccg

SEQ ID NO: 79560 - DNA, 427 bp, Homo sapiens
  sig_peptide (59)...(194): this location contains the signal peptide sequence, MSSSGQLGHPPRAPHSWRRWCWWLFMLATSLSRRRRPSTPLIHYR, Run with SignalP
  misc_feature (13)...(255): similar to gi179665 in the genepept database release 114, Run with FASTXY 3.3t00, default parameters
tccgtgcggtgaattccgttcccgagagcctgatgacctcccaaaccagggcagcaatatgtcatcatccgggcaacttgggcacccacctcgggctcctcattcatggagaagatggtgctggtggctcttcatgctggctacatctttatccagacggagaagaccatctacacccctgattcactaccgggtgttcactgtgaaccacaagatggaccctgtgaccaggacattcactctggacatcaaggtggtctttcccgatgaggggtggggggtggtggtggatcctggacactggggttacatggtgtgctgaagtcctgggggcatgagccaccagggccctcccagagggcagtcaccagccccaccccctatccccacagaacccaaagggaaacaccgtgattagccagagtct

SEQ ID NO: 79561 - DNA, 781 bp, Homo sapiens
  misc_feature (1)...(781): n = a,t,c or g
  sig_peptide (58)...(193): this location contains the signal peptide sequence, MATPSSPWWAHSGLPPLFSSGLSWRLVPLFWCLQSLTGFLGPCLP, Run with SignalP
  misc_feature (376)...(7): similar to gi841122 in the genepept database release 114, Run with FASTXY 3.3t00, default parameters
cccgtggtggaattccttctccagctggtcctgggtcctctatccttgcaggtggccatggcgaccccctcttctccatggtgggctcattctggtctcccgcctctcttctcttcaggcctctcgtggagactagttccgctgttttggtgcctgcagagcctcactggctttctagggccctgcttgccacgcaccacacgggcattcctctctctgcagtcctgggacctccctgggactcgaccaggaagccaggcacagggcttcactgcttgcaatgctgcaaacacacctggcttggcggccttgccaggctcaggcgctttctctgtgataccagtgtccttgttattgcctgtaccagaggggttgggtagaacttacctttattcgtgatgtttcagatcacattttttatccatggctatgagtcctttccattcttcgaggatcctggattctgaaattcaaaagccagggagaggccgggcgcggtggcttatgcttgtaatcgtagcactttgggaggctgaggtgggcggatcacttgagcccaggagttcaacaccagcctgagcaatatggcgaaaccctgtctctaccaaaaatacaaaaattagccagccatggcggngggcaactgtaatcccagctactcgggaggctgaggcaaaaaggtttgcttggacccaggaggcaaagttggcgtcagcccagaacatggcactgtactccagcctgggcaacanagtgagaccctttttttccaaaaaaaaaa

SEQ ID NO: 79562 - DNA, 413 bp, Homo sapiens
  sig_peptide (48)...(183): this location contains the signal peptide sequence, MKIFLSRVLPGGELAVLCLPWWPLNPEGQCCVFTPWHMGRENPGR, Run with SignalP
  misc_feature (223)...(413): similar to gi156976 in the genepept database release 114, Run with FASTXY 3.3t00, default parameters
gaagaaagtaggtaatacaagtttgctcagaataaacctatgtgttcatgaaaatatttctatctagggttctcccaggaggtgaacttgccgttctctgtcttccctggtggcctctcaaccctgaagggcagtgctgtgtcttcacaccctggcacatgggtcgggagaaccctgggaggaggtgcaggcagcttctttctggctccagtgcgagtctcgggagggaggtgctttccccctcacccgtcacctggctcagaatgggcagggctgtcctgatccccatgagaacatcaggcgcccatccacatgtggccaccctgttggcaccggctgctacctggggaggctgcctgtgtcccatctgagcacggaccacttcaccatcactaggtccctcgcccccaacc

SEQ ID NO: 79563 - DNA, 352 bp, Homo sapiens
  sig_peptide (222)...(87): this location contains the signal peptide sequence, MPALLVLKVVKVLLPMVLTGLGVEELKEMVLLLPVPCAAIIGSFK, Run with SignalP
  misc_feature (63)...(353): similar to gi3924672 in the genepept database release 114, Run with FASTXY 3.3t00, default parameters
gcgaacagacctgcttgctcagttgctgtttttaggaagaggtgatccccgtaggagatctgaccaatggccggacactataacttgaagctgccaattattgcagcacatgggactggtaacaggagcaccatttccttgagctcctccacgccaaggcctgtgagcaccatggggagcaacacctttaccaccttcaatacaagcagtgctggcattgctccaagctctaacttactaagccaagtgcccactgagagtgtatggatgccacccctggggaatcctattggtgccaacattgctttcccttcaaagcccaaagaggccaatcggaaaaaactggcagata

SEQ ID NO: 79564 - DNA, 535 bp, Homo sapiens
  sig_peptide (174)...(309): this location contains the signal peptide sequence, MTEHLAQQSEFAATLLLLWAPLKTGRLTNSFVNGPGQHGKMCCIL, Run with SignalP
  misc_feature (325)...(509): similar to gi2065210 in the genepept database release 114, Run with FASTXY 3.3t00, default parameters
aggacccagtaagaagagctatttttcaaagagagaaaagttatttgcaaaagataacatggatttgctgcaaaccgccaggggtctgcactgtgattctcctttcagggctggttgaaggctccatacagtatctctatctgccttggacacttcaggcatatgtgccatatatgacagaacatcttgcacaacagtctgaatttgctgcaacccttctcttgctctgggccccactcaaaaccggcagacttacaaattccttcgtaaatgggccagggcagcatggtaaaatgtgctgtatattacctcctaaaacccccgtctctactaaaaatgcaaaaattggccgggcgtggtggtgcacgtctgtaatcccagctacttgggaggctgacacaggagaatcccttgaacctgggaggtaaggttgcagtgagctgagatcgtgccaccgcactccagcctgggtgacagagtgagacttcgtttcaaaaaataaaatttttaaaatgcagagggccatcctgggcag

SEQ ID NO: 79565 - DNA, 372 bp, Homo sapiens
  sig_peptide (102)...(237): this location contains the signal peptide sequence, MQYWNGHKTGRSLYTKMATMGLIGAGLPAAFLLVVTYEAQATTCA, Run with SignalP
  misc_feature (59)...(368): similar to gi259302 in the genepept database release 114, Run with FASTXY 3.3t00, default parameters
aggtagccgaatactgtcatggaggtttccattcctttcttcttgatacatgtagtattcagcacacataacattgccagagaaggcagaaaggctcttaaatgcagtattggaatggacacaaaacaggcaggtctttgtatacaaagatggctactatgggcctcataggagctgggctcccagctgctttcctgctggtggtgacctatgaggcccaggccaccacgtgtgctcccagagccacagccaccgggagtgtggaggtagcacaggcttcatgagtcatcattgaagacccagttctcagtcccaatgttatctcagcaacgaaagcaacccagtggtgggggtttctcccccacttctgac

SEQ ID NO: 79566 - DNA, 396 bp, Homo sapiens
  sig_peptide (91)...(226): this location contains the signal peptide sequence, MRSNLSGLWLYENVLLTVALLTTGVYVHIIFNTAPKLFHLNVEWP, Run with SignalP
  misc_feature (163)...(397): similar to gi2197085 in the genepept database release 114, Run with FASTXY 3.3t00, default parameters
acgatcgcagcgtagatccgaaacactctgtctggcatagcagcttagtcggcgtgcacttctacatccggacgttgctacttatcacagatgcgctccaacctgtctgggctgtggctttacgaaaacgtactgctcactgttgcccttctgaccacgggtgtctatgttcacataattttcaacacggcgccgaaactattccatttgaatgttgaatggcctcttcaacaggtgctgctggcacaacaggggctgctggcacaacttcattcttccatgtgcagaagaatgaagttggacccctgcctcacaccacatacaaaattatctcaaatgaattaaaacataaatgtaaaagctaaaactataaacaccttaaacgaaattataggg

SEQ ID NO: 79567 - DNA, 339 bp, Homo sapiens
  misc_feature (1)...(339): n = a,t,c or g
  sig_peptide (99)...(234): this location contains the signal peptide sequence, MKMLSQTYLLLQLLLSLSQTEFLKELCIITFFPFLHFPLTLFQPP, Run with SignalP
  misc_feature (51)...(235): similar to gi2773221 in the genepept database release 114, Run with FASTXY 3.3t00, default parameters
gcagcccaacgactgcngctgtgttgctcaactgggtcctttcccatcattattggaacatttttcagggcttttctaaaattaagaacagacagacaatgaaaatgctttctcagacctacttgctcctgcagctgctgctctctctttcacagacagagttcttgaaagagttgtgtataatcacattttttccatttcttcactttccactaaccctattccaacctcccttccactcatatcacatcactaaccaaaatagctctaagccaccagtgacctctgtgtcaccaaatccacaggacattatcagctttcaagttacctgacctctcc

SEQ ID NO: 79568 - DNA, 402 bp, Homo sapiens
  misc_feature (1)...(402): n = a,t,c or g
  sig_peptide (92)...(227): this location contains the signal peptide sequence, MVGFGTNRRAGRLPSLVLVVLLVVIVVLAFNYWSISSRHVLLEEE, Run with SignalP
  misc_feature (402)...(2): similar to gi5104682 in the genepept database release 114, Run with FASTXY 3.3t00, default parameters
tttcgtccgccgggcaactccagccgaggcctgggcttctgcctgcaggtgtctgcggcgaggcccctagggtacagcccgatttggccccatggtgggtttcgggaccaaccggcgggctggccgcctgccctctctcgtgctggtggtgctgctggtggtgatcgtcgtcctcgccttcaactactggagcatctcctcccgccacgtgctgcttgaggaggaggtggccgagctgcagggccgtgtccagcgcgccgaagtggccctctggcgggtgggagggcgcaattgcgacctcttgctggtggtcgggacgcgcagtagacggatcgaggagaggggagccgactacagccggctcagcaggcggctgcagnccaaagagggcctcgtgaatag

SEQ ID NO: 79569 - DNA, 1311 bp, Homo sapiens; identical to SEQ ID NO: 68614
  sig_peptide (699)...(834): this location contains the signal peptide sequence, MCTRNLALLFAPSVFQTDGRGEHEVRVLQELIDGYISVFDIDSDQ, Run with SignalP
  misc_feature (543)...(1311): similar to gi3043684 in the genepept database release 114, Run with FASTXY 3.3t00, default parameters

SEQ ID NO: 79570 - DNA, 366 bp, Homo sapiens
  misc_feature (1)...(366): n = a,t,c or g
  sig_peptide (148)...(283): this location contains the signal peptide sequence, MTIILQIETVIFLLYLAPDTVRPLTIITGMAGIVKQQIDSHITDP, Run with SignalP
  misc_feature (11)...(366): similar to gi3882223 in the genepept database release 114, Run with FASTXY 3.3t00, default parameters
gacgacgtggatggggaaaaagagtttttactctttgtgccccgtgcctccacaaagggggggggaaaaacagtttcttcttgtttccccgactatgaccggacattataatacaatttagccgaatggtcagacatcgtggcatggatgaccattattctccagatagagacagtcattttcttactctacctcgctccagatacagtcagaccattgaccatcatcacagggatggcagggattgtgaagcagcagatagacagccatatcacagatccagatcaacagaacaacggcctctccttgagcggaccaccacccgctccagatccacttgacggncttgtaccaaccttatggggt

SEQ ID NO: 79571 - DNA, 517 bp, Homo sapiens
  sig_peptide (181)...(316): this location contains the signal peptide sequence, MLHPETSPGRGHLLAVLLALLGTAWAEVWPPQLQEQAPMAGALNR, Run with SignalP
  misc_feature (16)...(364): similar to gi1235974 in the genepept database release 114, Run with FASTXY 3.3t00, default parameters
tgcttggcacgaggcaggaggctgtctggacacactgattactcactcaccagcctccctcttttgtccaccagcccagcctgactcctggagattgtgaatagctccatccagcctgagaaacaagccgggtggctgagccaggctgtgcacggagcgcctgacgggcccaacaggcccatgctgcatccagagacctcccctggccgggggcatctcctggctgtgctcctggccctccttggcaccgcctgggcagaggtgtggccaccccagctgcaggagcaggctccgatggccggagccctgaacaggaaggagagtttcttgctcctctccctgcacaaccgcctgcgcagctgggtccagccccctgcggctgacatgcggaggctggactggagtgacagcctggcccagctggctcaagccagggcagccctctgtggaatcccaaccccgagcctggcgtccggcctgtggcgcaccctgcaagtgggctggaacatgcagctgc

SEQ ID NO: 79572 - DNA, 423 bp, Homo sapiens
  misc_feature (1)...(423): n = a,t,c or g
  sig_peptide (28)...(163): this location contains the signal peptide sequence, MRIISLTLMLLELFDSEDPRQREYLKNILHRLYGRMLGLRPYIHK, Run with SignalP
  misc_feature (3)...(423): similar to gi1022880 in the genepept database release 114, Run with FASTXY 3.3t00, default parameters
acttacagccctccgtggccaaaaaatatgcggatcataagtttgacactgatgctcctggagctattcgatagtgaagacccccggcagcgagagtaccttaagaacatcctgcaccggctttatggcaggatgctgggactccggccctacattcacaaacagagcaagcacattttcctccggatgatctatgaattctagcacttcaatgggggggctgaactgctggagaacctaggaagcatcatcaatggctttgcgctgcccctgaagacggagcacaagcagttcctgggtcgcgtgctgatccccctgcactctgtcaaggcgctgtctgtcttccatgcccagctggcatactgtgtggtgcaattcctggagaaggatgccactctgacagagcacgtgatccgggggctn

SEQ ID NO: 79573 - DNA, 430 bp, Homo sapiens
  misc_feature (1)...(430): n = a,t,c or g
  sig_peptide (239)...(104): this location contains the signal peptide sequence, MFAYTGSGGSSTCAGKARLCLLVTLAIMSTILAPLNCRDRALGRF, Run with SignalP
  misc_feature (430)...(3): similar to gi2429362 in the genepept database release 114, Run with FASTXY 3.3t00, default parameters
ccaattagcganagaccaccgccggctcccgggtgtcgcaacttcttgtttccttgttgccctgtgccagcactggggtagtgcccctgacgtctacccccaaaaccttcccagggctctgtcccggcagttcagaggggccaggatggtggacataatcgccaaagtgaccaggaggcagagtcgagccttgccggcacaggtggacgacccaccggagcccgtgtacgcgaacatagagagcagccccggccacttcaccgggcgccgctgagccccccttcccagcccggtgtgggagacgcacacggacgcgggcaccgggcgcccctactactacaacccagacacgggagttaccacctgggagtcgccctttgaggctgccgagggtgccgccagcccagccacctcccctgcctcggtggag

SEQ ID NO: 79574 - DNA, 408 bp, Homo sapiens
  sig_peptide (77)...(212): this location contains the signal peptide sequence, MRLAVSCITSFLMLSLLLFMAHRLRQRRRERIESLIGANLHHFNL, Run with SignalP
  misc_feature (4)...(378): similar to gi1136388 in the genepept database release 114, Run with FASTXY 3.3t00, default parameters
taccccacagagtgcagcaagttcatgtgtttgtatcccacatggcaacagcctgtttgactagatgggcagcgagatgcgcctggccgtcagctgcatcacctccttcctaatgctgtcactgctgctcttcatggcccaccggctgcgccagcgacgccgggagcgcatcgagtccctgattggagcaaacttgcaccacttcaacctcggccgcaggatccctggctttgattacggcccagacgggtttggcacgggcctcacgccgcttgcatttttctgacgactgatagggcggcacctttccatttccaccacccctcaaccttcctacaaggctgtaccatcacccgcctattcccgctagcccaaagaggctcgtgctgcgctttcaaggtcttcccg

SEQ ID NO: 79575 - DNA, 345 bp, Homo sapiens
  sig_peptide (8)...(143): this location contains the signal peptide sequence, MKVLWAGVLGTFLAGCQAKVEQAVETEPEPELCQQTEWKSGQRWE, Run with SignalP
  misc_feature (5)...(345): similar to gi3716294 in the genepept database release 114, Run with FASTXY 3.3t00, default parameters
ctgtaagatgaaggttctgtgggctggggtgctggggacattcctggcaggatgccaggccaaggtggagcaagcggtggagacagagccggagcccgagctgtgccagcagaccgagtggaagagcggccagcgctgggaactggaactgggtcgcttttgggattacctgcgctgggagcagacactgtctgagcaggtgcaggaggagctggtcagctcccaggtcacccaggaactgaaggcgctgatggacgagaccatgaaggagatgaaggcctacaaatcggatctggaggaacaactgaccccggtggcggggagacgctggcacgggtgtacaag

SEQ ID NO: 79576 - DNA, 354 bp, Homo sapiens
  sig_peptide (11)...(146): this location contains the signal peptide sequence, MVPCSQVFSIAFGFLVFGIFMVVITVGSFKGIILWYIFYFLLIPW, Run with SignalP
  misc_feature (29)...(252): similar to gi1334398 in the genepept database release 114, Run with FASTXY 3.3t00, default parameters
gttgtttaatatggtgccttgcagccaggtgtttagtattgcatttggtttcttggtatttggaatttttatggtcgtcattacagtaggaagtttcaagggaatcattttatggtatatattttacttcttactcattccttggcttccaactctacaagactcacttacctttacctttgtgaattacgtgcaaatattttcaaacccttctttgtgttctaattgtttttggcttccatatgctacagcagagccaagcagaatagaaaagtaagttttaaataaaaatcagaaactattggatttgccaaacgctttctccttcatttatttgggaaatagtcttgtatt

SEQ ID NO: 79577 - DNA, 392 bp, Homo sapiens
  sig_peptide (134)...(269): this location contains the signal peptide sequence, MKAEFCIFYLFFSPLNSWLFLCSHPKPEGLAAAKKLCENLLQTVS, Run with SignalP
  misc_feature (183)...(268): similar to gi4240303 in the genepept database release 114, Run with FASTXY 3.3t00, default parameters
aaaatatttgtggtaatgatagtggttatatcttaaaagacttatgttttgtgtttctgttttgtgattttcagaggcctagatttgagctacagtgaatgtattaatgtagatatgtaaaatagcatggaaaatgaaagcagaattctgcatcttttatttatttttctctcctttgaattcctggttatttctttgcagtcaccccaaaccagaaggcctggctgctgccaagaagctttgtgagaatcttttgcaaacagtgagttgtatttgtctgatactcattcagaagagcaattgccattttggagtatgtcttagctgtttctttcacctgtttagtttcctagtactgctataacaagttatggcagttgggtggcttaaat

SEQ ID NO: 79578 - DNA, 332 bp, Homo sapiens
  sig_peptide (129)...(264): this location contains the signal peptide sequence, MVHLLLVFWSGPHNLGRFQPMKLFAICLNQSGYIIAFFVLYTNRM, Run with SignalP
  misc_feature (75)...(229): similar to gi2257546 in the genepept database release 114, Run with FASTXY 3.3t00, default parameters
aaatttcctctcttaaagccttctccaaaattggcatctcttataggtaagatttattcatagcttgagtgtaccaaagttatagaattatcccatttgctaacatatttacaattgtattttcacagatggttcatctcctgttagtattttggtctggaccacacaaccttggacgattccagccaatgaagctgtttgctatatgcctgaatcaaagtgggtatattattgcattttttgttttatacacaaatagaatgtattccattattaacattattttgaatttattttatcctgtttattattgtaaaatttaatgaattata

SEQ ID NO: 79579 - DNA, 385 bp, Homo sapiens
  sig_peptide (122)...(257): this location contains the signal peptide sequence, MPSPSGLWRILLLVLGSVLSGSARAAAPLRVLRQTALCCATEALV, Run with SignalP
  misc_feature (3)...(381): similar to gi156544 in the genepept database release 114, Run with FASTXY 3.3t00, default parameters
tgcgctgttcaggggctggagcctggtcgggccggctggagagacatgcgattgggaccgaccgacggaccgaagcgcgcccgaatgcagtgagcagagatgctggcgggggcgtgaggacatgcccagcccctctggcctgtggcgcatcctcctgctggtgctgggctcagtgctgtcaggctcggcacgggctgccgccccgctgcgagtgctccgccagaccgcgctgtgctgtgccaccgaagcgcttgtggcagtccccgagggcatccccaccgagacgcgcctgtgacctaggcagaaccgcatcaaacgctcaccaggacgagttcgcagcttcccgacctggggagctgagctaacgagacatcggagcgccggc

SEQ ID NO: 79580 - DNA, 279 bp, Homo sapiens
  sig_peptide (110)...(245): this location contains the signal peptide sequence, MLLALPLAAPSCPMLCTCYSSPPTVSCQANNFSSVPLSLPPSTQR, Run with SignalP
  misc_feature (10)...(281): similar to gi1145773 in the genepept database release 114, Run with FASTXY 3.3t00, default parameters
tgacaggaagggaagtgccctggctgggcatcaagagacttttctggccctttccctgccaacactttgctgtgtgaccttggctcccgcctcggcctgcctcctgctgatgctcctggccctgcccctggcggcccccagctgccccatgctctgcacctgctactcatccccgcccaccgtgagctgccaggccaacaacttctcctctgtgccgctgtccctgccacccagcactcagcgactcttcctgcagaacaacctcatccgcacgctgcg

SEQ ID NO: 79581 - DNA, 326 bp, Homo sapiens
  sig_peptide (93)...(228): this location contains the signal peptide sequence, MAFLYHVAYVLVCMLGLFCHEFFYSFLLFESVYRHQTLLNDIPCV, Run with SignalP
  misc_feature (9)...(318): similar to gi512566 in the genepept database release 114, Run with FASTXY 3.3t00, default parameters
ggcacgagctttgtaatacaattgatcttctggtgagttttgttgggaatcgtggcacgttcacccgtgggtaccgagcagtcatcctggatatggcctttctctatcacgtggcgtatgtcctggtttgcatgctgggccttttttgccatgaattcttctatagcttcctgcttttcgaatcggtgtacaggcatcaaactttgctgaatgacataccatgtgttaaactaatgtgaccgctctattattctaacatgcatcttgaatattatcctgatattgtcttttcgcattatttctatccttagtttgatagttaatcg

SEQ ID NO: 79582 - DNA, 342 bp, Homo sapiens
  sig_peptide (173)...(38): this location contains the signal peptide sequence, MWDVLYFCSMVVCELGLGGCLGWRISSFCIGYLGLVLGVLSWGLL, Run with SignalP
  misc_feature (17)...(342): similar to gi433816 in the genepept database release 114, Run with FASTXY 3.3t00, default parameters
agtgaacctcgaaaatccgaaaaatttacctacacaaataataacccccacgacaacacacccaaaaccaaccccaaatatccaatacaaaatgacgaaatcctccaccctaaacaccccccaagtccaagctcacacaccaccatactacaaaaatagagcacatcccacatcgccaatactcaattgaaaccccaccactacccaatccaaaacatagattagcctgtacttaatctgcagagaaacgaactctttgtactaatatttagcactgtgtgccgtaaaactaaaggcaatttattagatgcattctgtttgcctataaaattccctcgtgcc

SEQ ID NO: 79583 - DNA, 359 bp, Homo sapiens
  misc_feature (1)...(359): n = a,t,c or g
  sig_peptide (130)...(265): this location contains the signal peptide sequence, MHXISALCLHPSLYISSCLFLYITFSILSLLDLLSSYYSLSLLLL, Run with SignalP
  misc_feature (359)...(11): similar to gi862343 in the genepept database release 114, Run with FASTXY 3.3t00, default parameters
ggcacgagataacacagaatatccaaaacttcacccagagcctgtgaaacaggaaatttgcagggtttacaagggggctctcaggatcatgtaaatcatgcctgttgtgtctgntncatctancacagaatgcatcanatttctgccctttgtttgcatccctcactttatatttcttcctgccttttcctctatattactttctctatcctctctttacttgaccttctctcctcttattactcattatcgctcttactccttctctctacttatgtgttctacgattctcttctagacttcattcttctcttctttctcgccctctataattttctttctatgtcctctctcatccc

SEQ ID NO: 79584 - DNA, 322 bp, Homo sapiens
  sig_peptide (52)...(187): this location contains the signal peptide sequence, MRKAGCLLELCCPLYTVLITSQGCFLPHLRPLPPHHFHIHPSYLP, Run with SignalP
  misc_feature (126)...(322): similar to gi186396 in the genepept database release 114, Run with FASTXY 3.3t00, default parameters
ggcacgagctcggcgtgctgtgtgctcttctgaatcacacctcactgcaggatgaggaaagcaggatgcctcttggagctctgctgtcccctctacactgtgctgatcacctctcagggttgtttcctgccacatctacgacctctccctcctcaccacttccatatccatccctcatacctcccatcctcatcctcccttctcttatccttctctcctcaccgtatctcaacctcctccatccttttcctccaccccccttctccttcctccttcatcccctaccctcgttcacccctccaccctttacacccttcatctg

SEQ ID NO: 79585 - DNA, 409 bp, Homo sapiens
  sig_peptide (302)...(167): this location contains the signal peptide sequence, MAWKPLGRQAVLRETPLATLCIDRRQVSSSLVQEGFHSKSCHCLG, Run with SignalP
  misc_feature (94)...(318): similar to gi1055254 in the genepept database release 114, Run with FASTXY 3.3t00, default parameters
cggccgcgtcgaccgtctctgctgatctgagcctgtcctgcagcatggacctgcaactttcctgaagcatctccagggctggatgccatgatattgagacccagagacctgattctcagccagctggtcttagccaacaacctggttcttttctctaaacgaatcccccagacaatggcagcttttggaatgaaatccttcctggacgaggctggatgaaacttgtcttctatctatacacagagtggccagaggggtttccctcagcaccgcctgtctccccagtggcttccaggccatgaagcttcaacctcagtatctctaggaggatggaactccgaattaggtccacaaagtgcattgttttctgctgccccctctgctggatcttgcaaattgtggcatatac

SEQ ID NO: 79586 - DNA, 336 bp, Homo sapiens
  misc_feature (1)...(336): n = a,t,c or g
  sig_peptide (271)...(136): this location contains the signal peptide sequence, MXXXXXXXFLSTTGFLPAAAAFSSDLACSAAXXTXPLYCRSLRFL, Run with SignalP
  misc_feature (1)...(336): similar to gi560476 in the genepept database release 114, Run with FASTXY 3.3t00, default parameters
aaagcccttggagcttcccaaaaaaaaatccatcccagaggcataaagaagacccctctgaacaacatgagcctccccgtaaaaggggcccccaaagccaaaggccaagccccggggcaccattcttcgccaggccaggaatctcaagctccggcagtataaggganctgttnnngcagcggcactacaagccaaatcagatgagaaggcggcggctgcaggcaaaaagcctgtggtagataagaaacnaannaggnnnnnngnngccatgattctatttaagtaacaatcgttaaataacaatgatagagctggagaacatattggtgaagccaa

SEQ ID NO: 79587 - DNA, 365 bp, Homo sapiens
  misc_feature (1)...(365): n = a,t,c or g
  sig_peptide (93)...(228): this location contains the signal peptide sequence, MVPFSYFWFYVAFLLISPWAASVITRKMLSPSYGFQASTLLLTGV, Run with SignalP
  misc_feature (2)...(365): similar to gi4240130 in the genepept database release 114, Run with FASTXY 3.3t00, default parameters
gctacttcaaatgtttaatcacacacaacatattcgaattgagtcaagcccatttcctcttagccacataggactctggactgggttgccggatggttcctttttcttatttttggttctatgtagcatttctccttatatcaccatgggcagcatcagtgattacaagaaaaatgctaagtcccagctatggatttcaggcctctacacttctgcttactggtgtgggcaggcactagtggacgtcagcttcttcattttaattctccttttaatgtatttaattttctacatagaaaacatgcagtaccttcttattacaagccaaattgtgtttgctttggttatagttactcctggntatg

SEQ ID NO: 79588 - DNA, 684 bp, Homo sapiens
  misc_feature (1)...(684): n = a,t,c or g
  sig_peptide (4)...(139): this location contains the signal peptide sequence, MLYFQLVIMAGTVLLAYYFECTDTFQVHIQGFFCQDGDLMKPYPG, Run with SignalP
  misc_feature (13)...(609): similar to gi3879526 in the genepept database release 114, Run with FASTXY 3.3t00, default parameters
gccatgctgtattttcagcttgtcatcatggctgggacagtgctgcttgcctactacttcgaatgcactgacacttttcaggtgcatatccaaggattcttctgtcaggacggagacttaatgaagccttacccagggacagaggaagaaagcttcatcacccctctggtgctctattgtgtgctggctgccaccccaactgctattatttttattggtgagatatccatgtatttcataaaatcaacaagagaatccctgattgctcaggagaaaacaattctgaccggagaatgctgttacctgaaccccttacttcgaaggatcataagattcacaggggtgtttgcatttggactttttgctactgacatttttgtaaacgccggacaagtggtcactgggcacttaacgccatacttcctgactgtgtgcaagccaaactacaccagtgcagactgccaagcgcaccaccagtttataaacaatgggaacatttgtactggggacctgggaagtgatagaaaaggctcggagatcctttccctccaaacacggtgctctgagcatttactccgccttatatggccacgatgtatatttacaaggcacaatcaaggacgaggaggcagttcgatgggcccaagccggtggctgtgcctcggaacttttttgcacagnctt

SEQ ID NO: 79589 - DNA, 618 bp, Homo sapiens
  sig_peptide (122)...(257): this location contains the signal peptide sequence, MLWELVLLGEPLVVMAPSPSESSETVLALVNCISPLKYFSDFRPY, Run with SignalP
  misc_feature (113)...(618): similar to gi2854158 in the genepept database release 114, Run with FASTXY 3.3t00, default parameters
ggcacgagctcagatagtgcagttaactcagcaggtggacacaaatatatctgttattttacctactgttcatgagggggatattttcaggtgtttctgcccagttttccttcatagtcagatgctctgggagctggtgctgttgggggagccccttgtggttatggcgccatcaccatcggaatcatcagagactgtattggcacttgttaactgtatttctccattaaagtacttcagtgatttccgaccttatttcactattcatgatagtgaattcaaagaatatactacccgtacccaagctccgccctcagttatattaggagtaaccaaccctttttttgctaagacactccagcactggccacacattattcgaataggagaccttaaacctacaggtgaaattcctaagcaggttaaagtgaaaaaactgaagaatctaaagactctggattccaaacctggagtttatacttcatataagccatattctaactagagatgaagagatcatacaacagctacagaggggcgtaccacacaaaacgcgcttttgaggctcaacagtggtattcttcgacgctattttttggaactgacacaaagtttcag

SEQ ID NO: 79590 - DNA, 343 bp, Homo sapiens
  sig_peptide (315)...(180): this location contains the signal peptide sequence, MERTTARLATCMLLAWQGCRSRTHDCMLSLSMLHGSDIFSIVFYE, Run with SignalP
  misc_feature (46)...(270): similar to gi536079 in the genepept database release 114, Run with FASTXY 3.3t00, default parameters
attcactttgggcaaagagcagtatcattagataaaataaaaacatcacaccaggcagaaattaggttgatatttctaatttctcaaaatatgcgtttccagttattctgcagtgaattttgtgcattcctgttcccagcaacgtcaacagcggtcctgaaatatattggtcttcagagttcgtagaaaactatgctaaagatgtcagagccatgcagcatactcagcgaaagcatgcagtcatgggtcctcgaccgacagccttgccatgcaagtagcatgcaagttgcaagccttgctgtggtacgctccattttcccactgtggcttaagcataattcca

SEQ ID NO: 79591 - DNA, 803 bp, Homo sapiens
  misc_feature (1)...(803): n = a,t,c or g
  sig_peptide (395)...(260): this location contains the signal peptide sequence, MWLFSLVSVCMSAHEIQHFVDVLPHTLHRCSPTSRYRGYHLLAQD, Run with SignalP
  misc_feature (5)...(803): similar to gi3875427 in the genepept database release 114, Run with FASTXY 3.3t00, default parameters
gggtttgttggaaccattttcaaaactgctcagctttgtaattcagaatgccgtcttcactctggcctacctggtggagctgtgtggcttatgttaccgagctttcactaaggaacgagataaattctacttgtctcgtagtgttgttctagaacttctgcaggccctaaagctcaaatctcctttaccagatacaaaccttcttctgcttgttcagtttatttgtgcagatgctggaaccaaactagctgagtcaacaatcctgagcaagcagatgatagcctctgtacctggatgtgggactgcagcgatggagtgtgtgaggcagtacatcaacgaagtgctggatttcatgggcagacatgcacacgctgaccaaactgaagagccacatgaagacatgttcccaggcctctgcatgaagatacctttgggggacatctcaaagtggggctggcccagattgcagccatggacatctcacggggcaaccacagagataacaaagctgtgatccgctatctgccttggcttttattcatcccccctctggcaatgcaggcaagggaccttaaagaatttcatttgagtgtgtcttcccattatccgactgttgtcctgggctgctgctggggtttccctcacttcacaatggcagtgttgccccaaatggcctccttttccctggcctgcccattctctggatgcaggcttccacgttgcagaccatcttattgtatcctgattgntttccagagcaataaagncctcgtgctgacatgtgttcctcttcacgggttaat

SEQ ID NO: 79592 - DNA, 374 bp, Homo sapiens
  sig_peptide (19)...(154): this location contains the signal peptide sequence, MLVLFVATWSDLGLCKKRPKPGGWNTGGCRYPGLACPLGRPPGQW, Run with SignalP
  misc_feature (1)...(246): similar to gi475582 in the genepept database release 114, Run with FASTXY 3.3t00, default parameters
gcgaaccttggctgctggatgctggttctctttgtggccacatggagtgacctgggcctctgcaagaagcgcccgaagcctggaggatggaacactgggggctgccgatacccagggctggcctgcccactcggccgaccacccggacagtggggggcaacggtatgacccgtggtccttattgggacaggcatttccaacgacgggtggggcagaggacatgtccatggtgagctacacccaccctgccgttcagcggaggccatgctctggtgaggccctgcataatccggagcctgcatgagccaaggcctgttggccctccatacattgcgccttgggatgatcctgtccttggctgtccttgacgactg

SEQ ID NO: 79593 - DNA, 396 bp, Homo sapiens
  sig_peptide (27)...(162): this location contains the signal peptide sequence, MKWVTFISLLFLFSSAYSRGPKAEFAEVSKLVTDLTKVHTECCHG, Run with SignalP
  misc_feature (58)...(399): similar to gi6013427 in the genepept database release 114, Run with FASTXY 3.3t00, default parameters
tgtcaaccccacacgcctttggcacaatgaagtgggtaacctttatttcccttctttttctctttagctcggcttattccaggggtcccaaagctgagtttgcagaagtttccaagttagtgacagatcttaccaaagtccacacggaatgctgccatggagatctgcttgaatgtgctgatgacagggcggaccttgccaagtatatctgtgaaaatcaagattcgatctccagtaaactgaaggaatgctgtgaaaaacctctgttggaaaaatcccactgcattgccgaagtggaaaatgatgagatgcctgctgacttgccttcattagctgctgattttgttgaaagtaaggatgtttgcaaaaactatgctgaggcaaaggatgtcttcc

SEQ ID NO: 79594 - DNA, 497 bp, Homo sapiens
  misc_feature (1)...(497): n = a,t,c or g
  sig_peptide (84)...(219): this location contains the signal peptide sequence, MRRRALKHWVALCLTWTAGESTGPWPSPEPSVRAKEADPSGRRSL, Run with SignalP
  misc_feature (80)...(297): similar to gi5478793 in the genepept database release 114, Run with FASTXY 3.3t00, default parameters
agggagggggccggnnnattgagacctcgatacctacggaagngcggggaantcgcccccaactctggctgtgtttctgcaggatgagaaggcgcgcattgaagcattgggtggctttgtgtctcacatggactgctggagagtcaacgggaccctggccgtctccagagccatcggtgagagccaaagaggccgacccaagtgggagaaggtctctcggaagcccaggcctcgagtgtggcccgcggctcaccaggggttcagggaggcagtgtgatgggccgagggggatttgtcatgcactggggtgataccctcgtagtgtgaagggaacagggcagattcagagactgcagcaccagtgtctgagtgtaagatacactgtatgttattatctcacctaaaacagctcctacaaatctcatagaaacctgtggctcaccaccctatgggctggaagtagagctttcaatattccggagatgaggtttatcctg

SEQ ID NO: 79595 - DNA, 777 bp, Homo sapiens
  sig_peptide (677)...(542): this location contains the signal peptide sequence, MAASPARPAVLALTGLALLLLLCWGPGGISGNKLKLMLQKREAPV, Run with SignalP
  misc_feature (633)...(777): similar to gi330134 in the genepept database release 114, Run with FASTXY 3.3t00, default parameters
attttttttttaacaaaatgctttatttctatttttaaatgagaggcattcccatgaaatatcaaaaggcatttacatgtgttgttttaactcttcttttttgatcacacaaagtaggtagaaaagatctgctgaaatagagcaaatcagaaaccaagtagtgtaaggcattaggagatacatgaagagaatcgctatttgcttcttgtacagcgtgtggcaagtcatggttagtagtcatcgtagttgacgctggctccatgcctaaagccgtaggggctccggggaccaattgcagagtcttcatcatagtgacgttggtagtaatcgccatagtattcatgtccatttcgatctctgttaagccaataggtgatgtcatcttcaaatttcgcttcgtcaaagcccatgtagagaaactgctggtaccactgctgcacctcgggccgagtccggtcccacagctgccgcttctggcgcttcaggctgccaaggaattctttggctttattctcatcaacggccactttagtcttagttggaacaggtgcttctcgtttttgaagcatcagcttgagtttatttccacttatgccacctgggccccagcacaggagcaggagcagcgccagcccggtcagggccaggacagcaggccgcgcgggggaggcagccatggcggcggggcgcgagcaggagggcgaggggcgcacttcgaggtgctgcgagggagaaccgggcgcgggagaggggtgcgagcgtggcaggcgcggccgc

SEQ ID NO: 79596 - DNA, 608 bp, Homo sapiens
  sig_peptide (426)...(561): this location contains the signal peptide sequence, MHPSLHPWALSLLVSVALAAASCHPKLQHEGCISCAILNRLGNYL, Run with SignalP
  misc_feature (281)...(608): similar to gi1165006 in the genepept database release 114, Run with FASTXY 3.3t00, default parameters
tccccctagtacattcttctttctacatatcactgctgtgacctccaaggtgaaatcctaggaattcagagtacaacataaggactggtgacctcccatggcatttttaggctttaaaaccagaaatgactaaaaatattcctgtaaatcaggcaaggcaaaaaaatagtctcacccacacaccacttgcagctccagaatctgtaggcagcttttacacagaatctatttccatttaaactctactctttctcaggactgggttgtaggggagaagagatcagtgaagaaatgttgtgacctggctcacccaaccttgtgcatcggacaggacaagaggcagaaagatcactcaccctctctgcagctccacatgagacattgagcccagctggcccaagtaagcagatgacagggtgctccccatgcaccccagcctccatccctgggccctgtccctgctggtgtctgtagcccttgctgctgcttcttgtcatcccaagctccagcacgaaggctgtatttcttgtgccatcttgaatagattgggcaattatttgtgaagagttgtcttaaataggattcttggaattccaccgcactggcta

SEQ ID NO: 79597 - DNA, 392 bp, Homo sapiens
  sig_peptide (101)...(236): this location contains the signal peptide sequence, MIIQICTISRIEFICLCVCVFFRVIWLPVEFYLETKILKVVFVIV, Run with SignalP
  misc_feature (166)...(392): similar to gi897827 in the genepept database release 114, Run with FASTXY 3.3t00, default parameters
aattgatttagtttatttgcaagatgcatagttctatatttaaaaattagtaatatgttttttggttaatctcgccctcagactttaagattgcttatatatgattatccagatttgtaccatctctagaattgaatttatttgtttgtgtgtttgtgtttttttcagggtgatttggttacctgtggaattttatctggaaacaaaaattttgaaggtcgtctttgtgattgtgttcgtgccaattatcttgcctctccacccttagtggtagcttatgccatagcaggcacagtgaatatagatttccagacagaacctttaggtatcttttcctttatgtatatgtatacctacacatacttttcccaatggaagtcgttatatttttg

SEQ ID NO: 79598 - DNA, 422 bp, Homo sapiens
  sig_peptide (39)...(174): this location contains the signal peptide sequence, MTLCSAAQLALICHSSSGTLVHSQPKHLNHLQLLPEGSGAQEPQA, Run with SignalP
  misc_feature (47)...(422): similar to gi3882099 in the genepept database release 114, Run with FASTXY 3.3t00, default parameters
ggtggaattctccagccctccggtcgcagagctgtgggatgaccctgtgttcagcagcccagctcgcactcatctgtcacagcagctccgggacgctggtgcacagccagcccaagcatctcaaccacctccagctcctcccagaaggcagcggtgcccaggagccacaggctgctccctgcggctccccgcggctcccctctcaaccctcgcttctgggcctggaggcccggacagagcagagcaggacgccccttctcaggagcaaggtcgccatcccttcatggccagcttgcccagccccagaatggtggcctggccgaggaggggccgtctcatcagtgctgcaggaagcttgtgctgttgtggtggcggagactgtaccgcacccagggtgaccttcccatgacaaaagtggcgct

SEQ ID NO: 79599 - DNA, 412 bp, Homo sapiens
  sig_peptide (345)...(210): this location contains the signal peptide sequence, MFLTIGRILLACYSQAVQTDPAKGISLESNLKRRAWEEEGWEEEG, Run with SignalP
  misc_feature (77)...(246): similar to gi1869859 in the genepept database release 114, Run with FASTXY 3.3t00, default parameters
cggaatgaacagctgggaacaggcggctgaaactagggaattattgggaatctatgtgaagggctggaggtgcttccaggacatgtccaccctgcttccttcgagggacggtctcagggccaggttccggccatccccctcagtcagcaggcattgaggccacaccctcctcttcccatctccccctcttcccaacccttctcttcccagccctcctcttcccagccctcctcttcccacgccctcctcttcaaattactctccaaacttatgccttttgcaggatctgtctggactgcctgtgaataacatgctagtaaaattctgccaatggtaaggaacatgcgtcaactttggcacgagacccagggaatgtgccttccctgcaactgttctatgacctcctgcctcc

SEQ ID NO: 79600 - DNA, 473 bp, Homo sapiens
  misc_feature (1)...(473): n = a,t,c or g
  sig_peptide (336)...(201): this location contains the signal peptide sequence, MLSWVFPGSVFGLCLSVWVFWHQASLGRASGCAPALRVGLIPGCR, Run with SignalP
  misc_feature (119)...(473): similar to gi559721 in the genepept database release 114, Run with FASTXY 3.3t00, default parameters
tcccagggcagagacactaaatcaactgaaggcgatgccaggggtcatgccaagtgcctgaactctggcttctccatcatctgtgaggccccaacaccatgccctgcgtaatataaggtcgtggccagcgcctcctcctcctcccagccctgaggaaccatccttgtcctcaaggtggaagagctcggccctcagtcccctgcagcctgggatgagccccaccctcagggctggtgcacaaccagaggctcttcccaaggaagcctggtgccagaaaacccacacactgaggcacaggccaaacacagagcctgggaacacccaggagagcatgtcccccagggtcccagccccaaccgaagatgggagagcccaaaacctcccgccacccagtcctccttnngccccacgaaatcgtcgncccggggnttccggnganggngtccaatcgaacggcttcaatggagccacac

SEQ ID NO: 79601 - DNA, 376 bp, Homo sapiens
  sig_peptide (80)...(215): this location contains the signal peptide sequence, MKPVWVATLLWMLLLVPRLGAARKGSPEEASFYYGTFPLGGHHSA, Run with SignalP
  misc_feature (13)...(379): similar to gi3168996 in the genepept database release 114, Run with FASTXY 3.3t00, default parameters
agggctctgactgccagcgactgctctgggggtgtctgcgatcaaggacgatcctgggtatgggggagggccaggcaccatgaagccagtgtgggtcgccacccttctgtggatgctactgctggtgcccaggctgggggccgcccggaaggggtccccagaagaggcctccttctactatggaaccttccctcttggaggacatcattctgctgagggaactgcacgtcaaccactaccgattctccctgtcttggccccggctcctgcccacaggcatccgagccgagcaggtgaacaagaagggaatcgaattctacagtgatcttatcgatgcccttctgagcagcaacatcactcccatcgtgaccttgca

SEQ ID NO: 79602 - DNA, 906 bp, Homo sapiens
  sig_peptide (711)...(576): this location contains the signal peptide sequence, MGAVLLVCLQTSIAARDDLKDAVDSGLLLANSLSHFVPLVVRNYL, Run with SignalP
  misc_feature (104)...(622): similar to gi2957270 in the genepept database release 114, Run with FASTXY 3.3t00, default parameters
tacctttgcttcttaacacgggacttgggcactcctgaatgccagacctccttgccctgcctcaaagcatccatctcagcgtcgattcttaccactcagaatggagagcacaatgcccttgaagatctggtgatgaggtttaatgaggtgagctcctgggtgacatggctgatcctcacggcaggctccatggaggagaagcgagaagtcttttcatatttggtgcatgtggccaaatgctgctggaacatgggcaactacaacgctgtcatggagttcttggctggcctcaggtcaagaaaagttttaaaaatgtggcagttcatggaccagtctgatattgagaccatgaggagcctgaaggatgctatggcccagcatgagtcctcttgtgagtacagaaaggtggtgacacgtgccctgcacatccctggctgtaaggtggttccattctgtggggtgtttctgaaggagctctgtgaagtgcttgacggcgcctccggtctcatgaagctttgcccgcggtacaattcccaagaagaaactttagagtttgtagcagattacagtggacaagataatttcttacaacgagtgggacaaaatggcttaaagaattcgcgagaaggagtccactgtcaacagcatctttcaggtcatcccgagctgcaatcgaagtctggagacagacgaggaggaccgcccccattgatggaaacagttttcaggaaaagcctccttgaaggataaaagccggagggcagcttatatattgcaatttgttcggattcccccccgcactcctttggacactccagagaatcctcacttttctggtttgcaatgacctcacaaagggcccttcccccctgggcccgggtcgctcatcccctgaaccctcgcttc

SEQ ID NO: 79603 - DNA, 1616 bp, Homo sapiens
  sig_peptide (182)...(317): this location contains the signal peptide sequence, MVFLLPILVMAPKIEADMSWSARSPSTLPSGSLWRKVRDPRTINM, Run with SignalP
  misc_feature (221)...(1616): similar to gi507744 in the genepept database release 114, Run with FASTXY 3.3t00, default parameters
ggactgcttctcgttggtggattaaccaaggccttggattccagaatgtttcatggtaagcactgtggagaacctacatgtcaggttctggagttggccctgagctctatccaccaagccagcaccccaccatccctttgcaggggagtcaaagggccagaactccttgggggaccagaacatggttttccttctgcctatcttagtcatggctcctaaaattgaagctgatatgagctggagtgcaaggagtccttccaccctgccttcaggttctctctggagaaaggttagagaccccaggacaatcaacatgtgcaccgttcccctcctcggcttgagtcctgcactaccaaaatggcctggccatttgatggcggagctccaggggccttggctttctctggctcattgtccttctccatctgggccaattgtccttccctgcccattcagagttcaatttgagcctccactgcagttcctggtgtgggccagctggtgttgggtggccccagggagtcacacagtctgtacccggccccgagatcctctgctgtaactgcagggtcacaggcatcccgggagaatgggcctccaccctcagccagccctcactgctgacaggcacccctctgtcacctcctgccacctgtcagatacccagcctgcccgccatcagccacccgagtggttccgacctccattcacctcaagccccaacaggcccctgtcattccacttcatggaagagacggagccttctgaaatgagatctaccctgaaaatctcttctccttcccctttctgagaaacgtcatccccaccagttaacgtttcctgtacaccctcaccctctctcgtccatctctgttgcctctgcacatcagcacacactgactccacctgggctggctcctgccgcctcttccctacctcctccactagccgcaggaagggcctccagcacccacaactgcccttcctcttgatgcccctcggcttccccccagcctggcagcagcgtcccagcgcctccacattgcccctctcacctcccagctctccacgccacttggctctgcagcgacccctcctagacgctccctggcccctcggcacccagaatgccacattcttgtgtttttttcctccttctttcccaatccctctcaaccatgtatttatttatatatgtatgtatttttttatttattatttatttattgaaacccctactttgattgacaaaggaatcaaggtagatctgaccagtattcccctctcttctccttgtcccaccacatggacatgccttacactggcgtcctctcctgagtccctccgcactctccatcagcaacctcacacctgccttcagacccggctgcaacttcctaagctgcccctgccccagctcctctctgcaacccagccctctcctgagctctaggctgggattacacccgctggagggacactcaccccatctgctcccacggcagcaccatcaactcaacaagtcagaagccaagtggatcatctgtgtccccttcccccacaatccctcctttttctagtaaaagacccgtgatcccgtcagccacccagtctga

SEQ ID NO: 79604 - DNA, 437 bp, Homo sapiens
  sig_peptide (257)...(392): this location contains the signal peptide sequence, MGLIAVTVIAATAGVALRQSIQTVHFVDKWQKNSTRMWNSQVLIK, Run with SignalP
  misc_feature (20)...(438): similar to gi5931706 in the genepept database release 114, Run with FASTXY 3.3t00, default parameters
gtaagcgcggtggaattctattacttcaaaaaccaacataattacctgtgttaattgttacttgtatacttgtattgactcatcctttaatcaatatcatagtattttaatagtcagagccagacaagatatttggctccctgtagccttacataggccttgggaatcttccccctttatccatgttattaacaatattctacagaaaattcttaaaaggagtaaacaatttatttttacattaattgcaataataatgggcttgattgctgttactgtgattgctgctactgctggagttgcattacgtcaatctattcaaactgttcattttgtggataaatggcaaaaaaattctactcggatgtggaattctcaggtattgatcaaaaattggctaatcaaattaatgatctaagacaaactgttatatggat

SEQ ID NO: 79605 - DNA, 356 bp, Homo sapiens
  sig_peptide (43)...(178): this location contains the signal peptide sequence, MIIWFLLFTLLLFNKYDVMSFFLFEYVKTSLHPWDKSQLIIVNYL, Run with SignalP
  misc_feature (356)...(1): similar to gi2197085 in the genepept database release 114, Run with FASTXY 3.3t00, default parameters
aaatgttgaattttatcaaatgcttttcctgcatttattgagatgattatatggtttttgctattcactctgttgctcttcaataaatatgatgtgatgtcattttttttatttgaatatgtcaaaacatccttgcatccctgggataaatctcaattgatcatagtaaattatctttgtagtgtgctggtggatttgatttcctagtatgtcattgagaattattgcacttctattcatcagcgatattgggctgctgttttcatttcttcttgtgtcccattctggttttggtataagggtaatgctgccttcatagaatgaattaagaagaactctcttttctttgatttttt

SEQ ID NO: 79606 - DNA, 1743 bp, Homo sapiens; identical to SEQ ID NO: 69847
  misc_feature (1)...(1743): n = a,t,c or g
  sig_peptide (193)...(58): this location contains the signal peptide sequence, MFIGIWVSLYQVLWLKELLWGHYIFWVSRKMFVYGGVGGKTANIC, Run with SignalP
  misc_feature (1744)...(0): similar to gi4803931 in the genepept database release 114, Run with FASTXY 3.3t00, default parameters

SEQ ID NO: 79607 - DNA, 397 bp, Homo sapiens
  sig_peptide (191)...(56): this location contains the signal peptide sequence, MLLKFLCECMPSLLLSEFLDSPRSGIDGSNGNSMFNFVKNCHFPT, Run with SignalP
  misc_feature (3)...(129): similar to gi1196431 in the genepept database release 114, Run with FASTXY 3.3t00, default parameters
gagaagggggactcctcatactctgctggtgggagtgggaaaaggtgcagctgctgtgggaaagtggcagttcttcacaaagttaaacatagagttaccattggacccatcaatgccactcctaggtgaatccaggaattcactcaggagaagtgaaggcatacattcacacaaaaacttgagcagcataattcatgttctgttttcctacaaatccagtctttgacttcaaggttataagccacagaaaatactctgtgagtgatgacgtggggaatgtgtttggataggatcactagggatgcaggcaacaaaggacaatgacacatgctttggggtttctgtgtttgttttttttccagcgatgagctactcctgggtcatgagaaggcccctg

SEQ ID NO: 79608 - DNA, 740 bp, Homo sapiens
  misc_feature (1)...(740): n = a,t,c or g
  sig_peptide (223)...(358): this location contains the signal peptide sequence, MFGLLFRGQGFWSWMPMLFLCIFQPSLADLRTQYLGVACRSRQGV, Run with SignalP
  misc_feature (145)...(740): similar to gi2613139 in the genepept database release 114, Run with FASTXY 3.3t00, default parameters
acagactaagaacaatgacttaccttgtacaatgtcaccagctaaaaagtagcaaaagcaggatttgaacctaaatctgtatgatccattctaccaagctgcttctatgtatttgccttctcaattcttttcttcctttgtaaatgtaatgttttgaatcaaaataaagtccaggaaagtttggctgtatccttttggctaggaagatttatttctatgaatatgtttggcctcctatttagaggccagggcttttggtcctggatgcctatgctttttctgtgcatctttcaaccttctctagcagatctcaggactcaatatttaggcgttgcttgcagatccagacaaggtgttaacatctgctctatcaccgtcatctaataaatgggttgtctggtcagtggagagtttggattggttagatcggcttcattactgagaaatcttgaatatctctcataggggaaaaatcctttaagcgggagaatgcttaataaagggcccgacaattgcttgaactagtgaagacacagctgtggcgaacttcagatggcaccattggtctgtagcctgggggaacacaatgagacttcgttgcccaatctggaggtcacggggggtatctggggcgccccaaaacttgttttcatttggagggggaaaattgtgggtgcagaattgggcccgcggtttcccaaagggaangtgcgggggccaaaaacggcgggggggaaaac

SEQ ID NO: 79609 - DNA, 554 bp, Homo sapiens
  sig_peptide (334)...(199): this location contains the signal peptide sequence, MFLLLFCLMFDFTKVFFILLLHIFCLSTCLFLGLHICASFHARAL, Run with SignalP
  misc_feature (87)...(554): similar to gi164523 in the genepept database release 114, Run with FASTXY 3.3t00, default parameters
aagagttgaaaggcactgcaaaaaaacttggggagaagctggctgttgccaaagacagaatgatgctgcaggagtgtcgtgggacacagcagacagatgccatgaagactgagttagtttcagagaacaaagtcctgcgggaagagaatgacttggaagccggcaatcttcatcctcagcaggatcaaagctgtctcaaggagtgcccttgcatgaaaggaggcacagatatgcagaccaagaaagaggcaagtgctgagacagaatatatgaagcaacaatatgaagaagaccttcgtaaaatcaaacatcagacagaagaggagaagaaacatctcaaagaccagctagtgaagcgactagaagacttggtaaagaagcacaccgtggaaatcaaatccgttcgctcgtccgtggaggctgaaagaaagaaactgcagagggaagtagaagcacagttggaggaagtgaggaagaaatcagaaaaggagataaagcagctggaagaagagaaagcagccctcaatgtgaagcttcagaattctctgcttgag

SEQ ID NO: 79610 - DNA, 859 bp, Homo sapiens; identical to SEQ ID NO: 68004
  misc_feature (1)...(859): n = a,t,c or g
  sig_peptide (103)...(238): this location contains the signal peptide sequence, MHMMKLSIKVLLQSALSLGRSLDADHAPLQQFFVVMEHCLKHGLK, Run with SignalP
  misc_feature (31)...(858): similar to gi4240231 in the genepept database release 114, Run with FASTXY 3.3t00, default parameters

SEQ ID NO: 79611 - DNA, 408 bp, Homo sapiens
  sig_peptide (48)...(183): this location contains the signal peptide sequence, MLWPWGPRLLVVGAPSALLQLRQVEELSGVGRGLGGIRMGWGGLP, Run with SignalP
  misc_feature (264)...(47): similar to gi442524 in the genepept database release 114, Run with FASTXY 3.3t00, default parameters
taattagtcctttcccctgaccctgaattcctgccccggccagaagcatgctgtggccctggggcccgcggctcctggtggtcggtgccccttctgctctcctgcagctgcggcaggtggaagagctgtcgggggtgggaagggggcttggagggataaggatgggctggggagggctcccaaggcagtggacactgtgggctctggggactgcatggctgtggagggggcatgtgctgttgggctcccagcctcttggggtcctctctgtgccaagatagagcctgttaccctccctgagcaggggtgagcagacacctgtcccctgccctgcatgggaagtgaacgatccactaagtggggaggtcaaggtcaaaaccccggcctttccatgccggaagactggtc

SEQ ID NO: 79612 - DNA, 399 bp, Homo sapiens
  sig_peptide (143)...(278): this location contains the signal peptide sequence, MTIAMIFYLLEIFFCAWCTAFKFVPGGVYARERSDVLLGTMMLII, Run with SignalP
  misc_feature (40)...(399): similar to gi504522 in the genepept database release 114, Run with FASTXY 3.3t00, default parameters
aacagcttcagctgcggggctcctttacctgcacacatgggcagctgctgtgtctggctgtgtcttcgccatctttactgcatccatgtggccccaaacacttggacaccttattaactcagggacaaaccctgggaaaaccatgaccattgccatgatattttatcttctagaaatatttttctgtgcctggtgcacagcttttaagtttgtcccaggaggtgtctacgctagagaaagatcagatgtgcttttggggacaatgatgttaattatcgggctgaatatgctatttggtcctaagaaaaaccttgacttgcttcttcaaacaaaaaacagttctaaagtgcttttcagaaagagtgaaaaatacatgaaactttttctgtggctgcttgg

SEQ ID NO: 79613 - DNA, 423 bp, Homo sapiens
  sig_peptide (196)...(331): this location contains the signal peptide sequence, MCISKCVCWGLCVFLCWCLHTVFRCGLWVSIVQVKSASYCRGCWA, Run with SignalP
  misc_feature (61)...(423): similar to gi1333929 in the genepept database release 114, Run with FASTXY 3.3t00, default parameters
tcttgatgtgcggacacaagtgacggaatgggtggccatctgtagctttgcccaaggggtacctctgtgccactgtgtgtggatatcagtgttgggggatgtggggtgagctggtctgctggggagtgtgtccaagtgtgtgcctaggtgttggggtaatggctattagttggggtatgtgtccaggcattgaggatgtgcatatcaaagtgtgtgtgctggggcctgtgtgtatttttgtgttggtgcctgcacacagtgttcaggtgtggtctttgggtcagtatcgtacaggtaaagtctgcgtcttattgtaggggctgctgggcccgcaactcactttgatttctctctggctccaagagagatggtaactggtggcaatcgagttaggacctcaaagtgtgttctgcccgtgagtcc

SEQ ID NO: 79614 - DNA, 1143 bp, Homo sapiens
  sig_peptide (86)...(221): this location contains the signal peptide sequence, MACYLLVANILLVNLLIAVFNNTFFEVKSISNQVWKFQRYQLIMT, Run with SignalP
  misc_feature (498)...(695): similar to gi3243075 in the genepept database release 114, Run with FASTXY 3.3t00, default parameters
gtacccactgtggtggaattcacaggatggtaaaataatccagctgcctccctgcaagacaggagcttggatcgtgccggccatcatggcctgctacctcttagtggcaaacatcttgctggtcaacctcctcattgctgtctttaacaatacattttttgaagtaaaatcgatatccaaccaagtctggaagtttcagaggtatcagctcatcatgactttccatgaaaggccagttctgcccccaccactgatcatcttcagccacatgaccatgatattccagcacctgtgctgccgatggaggaaacacgagagcgacccggatgaaagggactacggcctgaaactcttcataaccgatgatgagctcaagaaagtacatgactttgaagagcaatgcatagaagaatacttcagagaaaaggatgatcggttcaactcatctaatgatgagaggatacgggtgacttcagaaagggtggagaacatgtctatgcggctggaggaagtcaacgagagagagcactccatgaaggcttcactccagaccgtggacatccggctggcgcagctggaagaccttatcgggcgcatggccacggccctggagcgcctgacaggtctggagcgggccgagtccaacaaaatccgctcgaggacctcgtcagactgcacggacgcccgcctacattggcccgtcagagcagctttaacaagccaggaaagggaacacctttcagctcccaagagaggattagaaccctggcagaacatcctctttattcagtataagccggcagcaagcagttctacctaacgtcccacatccttctcatgccaacacttctgtaattgatcattataaagaaaaaacaaggtaacagtcatagttcacctgtctcttatctattcacttctggtgccacaactgtttatccttttttgaagaaaataagggaacagaaatgccctttttgtattgcaatcgaaatgaaaggaagaagtgatgttaaaaaacaaaagtcaagtgatttattatatacagggggccgtcaggtctagtcgagcaggctcaggagaaagtaattaaaataattttatatttttttatttattttggatctcacctgggctggatga

SEQ ID NO: 79615 - DNA, 1922 bp, Homo sapiens
  misc_feature (1)...(1922): n = a,t,c or g
  sig_peptide (361)...(496): this location contains the signal peptide sequence, MDILLLLLFFMIIFAILGFYLFSPNPSDPYFSTLENSIVSLFVLL, Run with SignalP
  misc_feature (325)...(1923): similar to gi4586963 in the genepept database release 114, Run with FASTXY 3.3t00, default parameters
cccacgcgtccgctgacctttgcacccatggtcatgcccttgtgccttctgctgctctgttccctgcttgcatggcactcacctccttggggcctcaccaggtggaggtggctgtgtgctacgcctgccctagttcttccctgccatccgctgagtgggggtctcaagccactttaggaaaaaatgaagcatgatgtcacaccagagtgcgtcagggtttagtatttcgagtcagaagcactaggcctccatctcaacaaggaggagtcccaggcagcccgccccagctggtgcctcccctgagctggcccatctctccccagcaacctgcggcagatcttccagtccctgccgcccttcatggacatcctcctgctgctgctgttcttcatgatcatctttgccatcctcggtttctacttgttctcccctaacccttcagacccctacttcagcaccctggagaacagcatcgtcagtctgtttgtccttctgaccacagccaatttcccagatgtgatgatgccctcctactcccggaacccctggtcctgcgtcttcttcatcgtgtacctctccatcgagctgtatttcatcatgaacctgcttctggctgtggtgttcgacaccttcaatgacattgagaaacgcaagttcaagtctttgctactgcacaagcgaaccgctatccagcatgcctaccgcctgctcatcagccagaggaggcctgccggcatctcctacaggcagtttgaaggcctcatgcgcttctacaagccccggatgagtgccagggagcgctatcttaccttcaaggccctgaatcagaacaacacacccctgctcagcctaaaggacttttacgatatctacgaagttgctgctttgaagtggaaggccacgaaaaacagagagcactgggttgatgagcttcccaggacggcgctcctcatcttcaaaggtattaatatccttgtgaaggccaaggccttccagtatttcatgtacttggtggtggcagtcaacggggtctggatcctcgtggagacatttatgctgaaaggtgggaacttcttctccaagcacgtgccctggagttacctcgtctttctaactatctatggggtggagctgttcctgaaggttgccggcctgggccctgtggagtacttgtcttccggatggaacttgtttgacttctccgtgacagtgttcgccttcctgggactgctggcgctggccctcaacatggagcccttctatttcatcgtggtcctgcgccccctccagctgctgaggttgtttaagttgaaggagcgctaccgcaacgtgctggacaccatgttcgagctgctgccccggatggccagcctgggcctcaccctgctcatcttttactactccttcgccatcgtgggcatggagttcttctgcgggatcgtcttccccaactgctgcaacacgagtacagtggcagatgcctaccgctggcgcaaccacaccgtgggcaacaggaccgtggtggaggaaggctactattatctcaataattttgacaacatcctcaacagctttgtgaccctgtttgagctcacagttgtcaacaactggtacatcatcatggaaggcgtcacctctcagacctcccactggagccgcctctacttcatgaccttttacattgcgaccatggtggtgatgacgatcattgtcgcctttatcctcgaggccttcgtcttccgaatgaactacagccgcaagaaccaggactcggaagttgatggtggcatcacccttgagaaggaaatctccaaagaagagctggttgccgtcctggagctctaccgggaggcacggngggcctcctcggatgtcaccaggctgctggagaccctctcccagatggagagataccagcaaca

SEQ ID NO: 79616 - DNA, 1909 bp, Homo sapiens
  sig_peptide (150)...(285): this location contains the signal peptide sequence, MSPQHLLLTLPLPLRSPILFSHTAQLLVLTRIAFRACELFFFVMV, Run with SignalP
  misc_feature (298)...(1912): similar to gi5630077 in the genepept database release 114, Run with FASTXY 3.3t00, default parameters
tttcgtggggattgtcccagaaagtgtaagagcagaatattctccagaattatggctttgtggaaaaggcctcgaaaggacgcggaacagctgccatcacccgctctctatccctgtgcaccttagagcatggtcagcttctgcggtgcatgagcccccagcacttactgctgactctccctctgcccctcaggtcacccatcctcttcagtcatactgctcagcttcttgtcttaacaagaattgctttccgggcttgtgaattatttttctttgtcatggtttctttatgttgcccaggaatccattccttcattgccacaatcacctatgagagaaacgccttccaaagcatttcatcagtacagcaacaacatctccactttggatgtgcactgtctcccccagctcccagagaaagcttctccccctgcctcaccacccatcgccttccctcctgcttttgaagcagcccaagtcgaggccaagccagatgagctgaaggtgacagtcaagctgaagcctcggctaagagctgtccatggtgggtttgaagattgcaggccgctcaataaaaaatggagaggaatgaaatggaagaaagggaagatttatattggaacccctaacgggacacttaaaacacctttgggaggatgaaatagatgattctctaaagaaattgggcacttcccttaaacctgatcctgtgcccaaagactatcggaaatgttgcttttgtcatgaagaaggtgatggattgacagatggaccagcaaggctactcaaccttgacttggatctgtgggtccacttgaactgcgctctgtggtccacggaggtctatgagactcaggctggtgccttaataaatgtggagctagctctgaggagaggcctacaaatgaaatgtgtcttctgtcacaagacgggtgccactagtggatgccacagatttcgatgcaccaacatttatcacttcacttgcgccattaaagcacaatgcatgttttttaaggacaaaactatgctttgccccatgcacaaaccaaagggaattcatgagcaagaattaagttactttgcagtcttcaggagggtctatgttcagcgtgatgaggtgcgacagattgctagcatcgtgcaacgaggagaacgggaccatacctttcgcgtgggtagcctcatcttccacacaattggtcagctgcttccacagcagatgcaagcattccattctcctaaagcactcttccctgtgggctatgaagccagccggctgtactggagcactcgctatgccaataggcgctgccgctacctgtgctccattgaggagaaggatgggcgcccagtgtttgtcatcaggattgtggaacaaggccatgaagacctggttctaagtgacatctcacctaaaggtgtctgggataagattttggagcctgtggcatgtgtgagaaaaaagtctgaaatgctccagcttttcccagcgtatttaaaaggagaggatctgtttggcctgaccgtctctgcagtggcacgcatagcggaatcacttcctggggttgaggcatgtgaaaattataccttccgatacggccgaaatcctctcatggaacctcctcttgccgttaaccccacaggttgtgcccgttctgaacctaaaatgagtgcccatgtcaagaggtttgtgttaaggcctcacaccttaaacagcaccagcacctcaaagtcatttcagagcacagtcactggagaactgaacgcaccttatagtaaacagtttgttcactccaagtcatcgcagtaccggaagatgaaaactgaatggaaatccaatgtgtatctggcacggtctcggattcaggggctgggcctgtatgcttgctcgagacattgagaaaca

SEQ ID NO: 79617 - DNA, 471 bp, Homo sapiens
  sig_peptide (207)...(342): this location contains the signal peptide sequence, MPVFHLTPCLLPPTAVPIFFPTEKREINKNRGQRKFRREMGVTRP, Run with SignalP
  misc_feature (37)...(324): similar to gi332612 in the genepept database release 114, Run with FASTXY 3.3t00, default parameters
ccgaaccggccggaataccagggtcgacgatttcgcggccaagacctggtccacaagaattaatcactcaagtattagataacctccagttgccagaagaaatagctgttgtccatgtcccaggacatcaaagagatatctcttttgaaagctgggggaacaaccttgcagatcaaatagccaaacaagctgccatttcctctgaaatgcctgtttttcacttaaccccttgccttcttcccccaactgcagttcccatcttctttcccactgaaaaaagagaaattaataaaaataggggccaaagaaaattcagaagagaaatgggtgttaccagaccaaagaaaaatgttatccaattcccttatgagagacctctctcatctgcatcaagagactcattggggacctcaagctatgtgtgatgcagtcctttgggtttatggatgtgtagcaatttacactttgaca

SEQ ID NO: 79618 - DNA, 948 bp, Homo sapiens
  sig_peptide (338)...(473): this location contains the signal peptide sequence, MESWWGLPCLAFLCFLMHARGQRDFDLADALDDPEPTKKPNSDIY, Run with SignalP
  misc_feature (398)...(814): similar to gi2047353 in the genepept database release 114, Run with FASTXY 3.3t00, default parameters
tcgacgatttcgtgcccattggtgcttgggaaccaccccagtttccccatcgtctgtgctgctgcagattggttggggcagcccggggaggctggctccgacacacgactgagtgtgcctacactggtcccacaggttttcagctgtggagtttgggatctgagcttggagcccatttgtttctggcagttccgctcatattttccacttgaagacatcgcctcccttccttccaagctgggagaccagaagtcaacaacaggagggtggagaggccgggtctcacaatccgcttggctggggagtccactgaggttcttgcatcctgaagcaaaccatggagagctggtggggacttccctgtcttgcgttcctgtgttttctaatgcacgcccgaggtcaaagagactttgatttggcagatgcccttgatgaccctgaacccaccaagaagccaaactcagatatctacccaaagccaaaaccaccttactacccacagcccgagaatcccgacagcggtggaaatatctacccaaggccaaagccacgccctcaaccccagcctggcaattccggcaacagtggaggtagttacttcaatgatgtggaccgtgatgacggacgctacccgcccaggcccaggccacggccgcctgcaggaggtggcggcggtggctactccagttatggcaactccgacaacacgcacggtggagatcaccattcaacgtatggcaatccagaaggcaatatggtagcaaaaatcgtgtctcccatcgtatccgtggtggtggtgacactgctgggagcagcagcccagttatttcaaactaaacaataggagaaattgtttcaggacccatgaaccagaaaatgtctgaagatgttaagatcccctgattactttgagaaaaacaactaaaacaagaaccgtgtttaaaaaaa

SEQ ID NO: 79619 - DNA, 531 bp, Homo sapiens
  sig_peptide (234)...(99): this location contains the signal peptide sequence, MWIVLLGGFVGPLYLTPAPSPCTHTLGVRAVPLVTGLTSQLWLNA, Run with SignalP
  misc_feature (442)...(531): similar to gi3002527 in the genepept database release 114, Run with FASTXY 3.3t00, default parameters
tttcgtgcagggtcgggagcatgtacatttcggagagctctggttgctccgtcatagaagccatgctccacatcctgtaagtgagagactccccagcagcgttcagccatagctgcgatgtcaggcctgtcactagtgggactgcccggacccccaaggtatgggtacacggcgagggtgctggtgttaaatacaggggacccacaaaaccacctagcagaacaatccacatgaccctgtcgtgtgacccagaacatttcagggatggaacacggaccagctgaccttagcgtggtcgctggcttgctctggaaggtgccgtttccaagacgcccttacctgggttcctgagcacgtctgacagagcagctctgactccgggtttctggagtcagaccccttgccacttgtccttccttgacctttagctttgggttccccttctcagtttgtttgtttgtttgtttattctcactctgtcactcaggctggagtgcagtgttacaatctcggctcactgcaaccggatcc

SEQ ID NO: 79620 - DNA, 850 bp, Homo sapiens
  sig_peptide (125)...(260): this location contains the signal peptide sequence, MVTGVLWTMEVLLWIPLPSQIIYQAVTVLSFHRGGRKAVLEVTEV, Run with SignalP
  misc_feature (84)...(264): similar to gi3881278 in the genepept database release 114, Run with FASTXY 3.3t00, default parameters
tttcgtctgtgatgccgattggtgaggaggggtttctgtttcctgtatttgacgtgtgtggcgctgggggtttacactgatctcagcctttattgaacttcttaacgactctggagggaacgtcatggttactggggtgctttggaccatggaggtgctgctctggattccattaccctctcagattatttaccaggcagtaacagttctttccttccataggggagggaggaaagctgtgttagaagtcactgaagttgtctgagccttaacattctgaagaggaagagggattgggcttggatttgaggagccatgcccctgcacccgcttgttaaaacttgggaggaaggagtgcttgggggaacacctcttccccccagggatgctctctgagagcatattgctcttgggaacgggaggacctattcctatcatttgcagacctgttgaggctcagccagacacctgggatggagaaactagaccctacaatgggctgcttttgaacttcatccactcgtaccttcccaaagaaacggccacagttgactcgagggctgaactgaataggaagtacgagctgacggcccacgaaccatcaccaacgacgatgagcgcctccgttgtggtgacgaactcttgaggcttccttatggacatggaggccccaggcatgcccaaactaccttcaaagacatcatgaattggaccgcgacctcccgtgacctgttccccacatatactggtctcgagccaacataatcctggcttggccccgggatcaaacgtaaccctgcctcggccccacatgtgagaaaaatcttgtccccggacccagactacgggc

SEQ ID NO: 79621 - DNA, 512 bp, Homo sapiens
  sig_peptide (53)...(188): this location contains the signal peptide sequence, MGVMAPRTLLLLLLGALALTETWAGECGVGRERASAGRSEWPARP, Run with SignalP
  misc_feature (514)...(15): similar to gi4104615 in the genepept database release 114, Run with FASTXY 3.3t00, default parameters
tttcgtgtcccggcgcaaccacccgcactcagattctccccaaacgccaaggatgggggtcatggctccccgaaccctcctcctgctgctcttgggggccctggccctgaccgagacctgggccggtgagtgcggggtcgggagggaaagggcctctgcggggagaagcgagtggcccgcccggcccggggagccgcgccgggaggagggtcgggcgggtctcagcctctcctcgcctccaggctcccactccttgaggtatttcagcaccgcagtgtcccagcccggccgcggggagccccggttcatcgccgtgggctacgtggacgacacagagttcgtgcggttcgacagcgactccgtgagtccgaggatggagcggcgggcgccgtgggtggagcaggaggggctggagtattgggaccaggagacacggaacgccaagggccacgcgcagatttaccgagtgaacctgcggaccctgctccgctattacaaccagagcgaggccg

SEQ ID NO: 79622 - DNA, 1281 bp, Homo sapiens
  sig_peptide (457)...(592): this location contains the signal peptide sequence, MPVPLAYFQSSIVLFPLIFSLVTCVSLDGEPKSVVGVISISAYYR, Run with SignalP
  misc_feature (28)...(1281): similar to gi144146 in the genepept database release 114, Run with FASTXY 3.3t00, default parameters
tagccactgtggtggaattcgaggttttactacagaaggaattcatctttaaaaccttttagttgcaaatgtttagaaccatgttctgtttggagatttgttagtcttaagagatttgacttaacaagctgcatcctgtcagtaaagttgggtaatttccattgttggcccattctgggaatggagagacaaaacacacctgctctgcatgacttaaagcaaatataaggaagttagcatgaaatctggatgagaaagatatgattcattctgtaagaatggccagctggcaagatttcttcctgagtttgagaactggagcaacactgtagctgtgatagttattggcaacttaatatgaggtaaagtaacttcttatcaataattagaaactgattttcatggctttgaataagcataggcatacttagtctttgccaaaagtaattcatttttatgccagtacctttggcatattttcagtcttctattgttctcttcccacttattttttcacttgtcacttgtgtttctttagatggtgagccaaagtctgtggtaggggtgatttccatttctgcatattacagagcaattagcatattgttaatattcagcaaaagtttttgctgtgcttccttagctggtgttttggttatctgatagtaattggagaaaattgttctccaattttctccaattaggagaataaggagagtgtcatattaagaagtacctgctttaaacatcatagaaaaactgtatacattataatagcaattgcttttccagtgtcttcattccatgatcctgagccaattcaacaacacggttttagtttttgagagcctgaggcactaaccttggttgatataacattttctttcctctacatgttcaggcggttgcttatgaggaaccaaaacactggagctctattgcctactatgagctcaacaatcgagtgggtgaagcgttccatgcctcctccacacgtgtgtcggcgcaccgttaccctgcacccttcccctagtaacacccgagtctgacccgggcagccctccaattgctacccgaacctcccctattgaattccccgggccgcctactggcagacctagctatctccttttctctcccaggcggccttatcacccctccctaacccaccccaccctcgtgtccccccaataccccttatccatccccaaaccacccccaccctcccccccctctcctcctagtcccccacaccctctcacccctccccattcaagttcc

SEQ ID NO: 79623 - DNA, 656 bp, Homo sapiens
  sig_peptide (382)...(247): this location contains the signal peptide sequence, MLAEQVELWWSQQPRRSALCFVVAVGLVAGCGAGGVALLSTTSSR, Run with SignalP
  misc_feature (5)...(542): similar to gi3641655 in the genepept database release 114, Run with FASTXY 3.3t00, default parameters
cagcggccgagcaggggcaggggcggcgccagccggccagggtcaggccggtgaccagcagcacgaggccactgagcagcaccacgagggcgtcggcccctccaccactgcgcagcagggccacatggtgggcctggcggatgcagttcatgtcctgcacagccgagctcatcagctgtttcaccagaaccagcagagccagcaaacagagcacagtgcccgttgctagccgccattcacctgagcggctgctggtggttgacagcagtgccacgccgcccgcgccacagcctgccacgaggcccacggccacgacgaagcagagcgccgagcgccgcggctgctgggaccaccacagctccacctgctctgccagcatgtccgggggcagcccccggccccctggggcttgagcctcctgttcagacatggcttggtcaggcaggggtcagggtaggaggtcaatgtcaggggtcagagggtgcagatcacagcctggagcacctgccacctgcttggcagctacaggcccagagtcccattcctctcacagtccaggatatggtcaccctcacctctctgcctctggctctctcagtcgctggtcccatcccggctggctgagggagctggtgccacggtggacgatgagaaat

SEQ ID NO: 79624 - DNA, 410 bp, Homo sapiens
  misc_feature (1)...(410): n = a,t,c or g
  sig_peptide (358)...(223): this location contains the signal peptide sequence, MVFGWVSGGLQAGWMVLDWVSGALQAGWMVFGWVSGGGARLGSFW, Run with SignalP
  misc_feature (141)...(410): similar to gi3876650 in the genepept database release 114, Run with FASTXY 3.3t00, default parameters
ntgcaaaggcaagaactcagaataaacaaaaatcttttgcaagcccattttcatgccagcactttcccacctgagagtgcaggaagctggtgaacagggcctgagtgggcctgacctgcggaccaaatgctagacacgggttagagcccgagagcagagcacagcagagccgagcctgtgacaacatgaaggggctcccagcctggagcccaccactcacccagccaaaaactacccagcctggcgcccccaccactcacccagccaaagaccatccacccagcctggagtgcaccacttacccagtcaaggaccatccacccagcctggagcccaccactcacccagccaaagaccatccactcaacctggagcccccgccacacacccagccaaagaccatccaccta

SEQ ID NO: 79625 - DNA, 2033 bp, Homo sapiens
  sig_peptide (1814)...(1679): this location contains the signal peptide sequence, MPALRPALLWALLALWLCCATPAHALQCRDGYEPCVNEGMCVTYH, Run with SignalP
  misc_feature (1893)...(1064): similar to gi1336628 in the genepept database release 114, Run with FASTXY 3.3t00, default parameters
agagaaactaaaagtaatataattaaatagcttgttcttgtgacttaaataatataaaattttcatttcaattatgtgacaatgctttgtatagctgtattccaaatacatttcttggtgcgggggacatagcaggcagtcaatacatttttaccaaatgaaatgaataaattaccagttgattttatactgaggaccaaactatgacctttaatccctccaaaataaaacacacaatcccattatatgtgaaccatatccacaataccagaatctaagattcccactctgaaagagtaactagaacaacttctttttgaggcaattctgcttacttagcacattactcccccctacagttttccttcttttgtttttgtactaaggatatttgtataaaaacaggatctttgttgcttagtaattcatctgctccagctgcttgtattctgttcccaatcaaaattcttggttttcagcctcctcatcatttttataaggagttgaatgaattggccaggcttgttcctttctccctctccatggaacaccaggccccaagctccccgacactgctcctctttttatttctatctttgggttgcgtgtacactctagaacacttgtatcagtgaagagtgtaacaaagtattgtgccacgcatagtctctcatatatcatctatcagctcatcaaaaagtgctcactgattaacagaggatcccctcctcagtttcagaattctctagctttaagttaggggagggttaccccaaagtcagagagggcacatgggagagggttgtgaaggccagtagcccagagaaaatcaagggcagctgggtgcatttaggtggataagaaaacaatgaattactcccatcaaaagcaaaagcacaagcacataggaaagttgatcaccccactgttaatgtcaattcagtttaaagcactttattaaccacacatacatattttccagtgtctaattctcatcgtgttcttttccattccagacttccctgtctctttcccagagctctgttcctcttctcactgtttctggaaggcagttgcactcaaaagtgaagtcaccagtctgccgacaggtgcctccattgacacaaggcgagggtgcacagggcacatacaggctgtcacagtactggcctgtgaagccctgaaggcactggcactggtaggaaccaggcaggttgaggcagatgccaccatgctggcagtgtcctggaatgtcacactcattgacatcagtctcacacttctgccctgtgaagcctgtgaggcatttgcaggagaactggttggccacagtggtacaggtacttccatttgcacagggatgagacaggcaggcatcggtccattggcactccttacctgtaaacccgacctgacaggtgcactcataggtatcccggctgagcatatggcatgtgccgccattcaggcaaggtcgagacacaaagcatggatgagatgtcgagtactggcagtcctctcctgtaaaccctgaggcacatcggcacgtggctttccccagcatggcctgggccacacaagtcccaccattctggcagcggttcttctcacaggggtctcgatgttgacaatattcccccaagaagccttctggacatttgcagtatcctgtgccattgtggtaggtaacacacattccttcatttacacagggttcatagccatctcgacactgcaatgcatgcgcgggggtcgcgcagcacagccagagcgccagcagcgcccacagcagagcggggcgcagggcgggcatcttctcggtcgcctcctccgccgccgccgcctgggcagatccacatggggagggggtcccgatagaggagccccactctctcctcccctcctcctgcttcaaaggctcaggccctggcgctacgctccgaagcccaggcgcaaatgcctcgactccccgcgcccggagtccgccgctcctcggccgccgcctcagccgcccgaagtttggctgaaacttt

SEQ ID NO: 79626 - DNA, 465 bp, Homo sapiens
  misc_feature (1)...(465): n = a,t,c or g
  sig_peptide (157)...(292): this location contains the signal peptide sequence, MLLGLFTLQFPHLLKGDGILVARPPAWCGFPLLSFFTEIEELDSS, Run with SignalP
  misc_feature (151)...(465): similar to gi530912 in the genepept database release 114, Run with FASTXY 3.3t00, default parameters
catcgacgtttctattttttaanatgcctggcttacatgatctttggggaatagagttgcacttaatcaagaagtggtggaacacaaactctacagtcatatgacagagatctgaatcccagctctgccccttaaagaggctttatgaccttggacatgttactcggactctttacactgcagtttcctcatttgttaaagggagatggcatcctagttgctaggccccctgcctggtgtggcttccctctcctttccttcttcacagagatagaggagttagattcctctcatttctgtatgtacttcaatggttctcctgcactttcataaagcaatcaaactcccagcgatggcatacaaggcctctcaggactatgcagcaccttccttaccattcatttctccacttgctgctttgacaccagcaggactaaacgccttggagctaaacttccaggggag

SEQ ID NO: 79627 - DNA, 408 bp, Homo sapiens
  sig_peptide (223)...(358): this location contains the signal peptide sequence, MAGSPLMAICWMFRLGMAGDGLDSIPEQAGPASQPAGQSGTHRSF, Run with SignalP
  misc_feature (361)...(41): similar to gi3168602 in the genepept database release 114, Run with FASTXY 3.3t00, default parameters
acaagtagaatggagatgatgtcatctctgaagtcacggaggggatggggaggctgacatttcacctggcccgggcctttctgcatcgttgctgatttttgtttgagagactcctgtgggactgcaaggagagatgggacaaagaccataaaaggacaaagagaactgagagggctcagtggtggtgatcctggctctctgcatttgaagaaatctttccagatggctggttctccattgatggcaatttgttggatgttcagattgggaatggcaggggatgggctggatagcattcctgagcaggcagggccagcatcgcagccagcagggcagtctggaacccacaggagcttcagagtgtcaagtccagagggaaatgtgaggcagctagaattgaacctcaag

SEQ ID NO: 79628 - DNA, 878 bp, Homo sapiens
  sig_peptide (208)...(343): this location contains the signal peptide sequence, MKFALFTSGVALTLSFVFMYAKCENEPFAGVSESYNGTGELGNLI, Run with SignalP
  misc_feature (46)...(757): similar to gi5006265 in the genepept database release 114, Run with FASTXY 3.3t00, default parameters
gacaaaccgcgccgaccaacttcttcagaagccttaattactactggatttgctacatttttacctaaatttatagaaaatcaattcggattgacatccagcttcgcagctactcttggaggggctgttttaattcctggagctgctctcggtcaaattttaggtggcttccttgtttcaaaattcagaatgacatgtaaaaacacaatgaagtttgcactgttcacatctggagttgcacttacgctgagttttgtatttatgtatgccaaatgtgaaaatgagccatttgctggtgtatctgaatcatataatgggactggagaattgggaaacttgatagccccttgtaatgccaattgtaactgttcgcgatcatattattatcctgtctgtggagatggagtccaatatttttctccctgctttgcaggctgttcaaacccagttgcacacaggaagccaaaggtatattacaactgttcctgtattgaaaggaaaacagaaataacatccactgcagaaacttttgggtttgaagctaacgctggaaaatgtgaaactcattgtgcgaaactggccatattcctttgcattgtttttattggaaatatttttacctttatggcccggtctcctataactggggctattcctagggggggtaatcacagacaacggccccctaccttgggaatacaatttatggcccttcggacactctggaccactccttggcccagtaaaactgggtgtcccatacaccagcccggttctctttgggagaaacttggatggcggccccttaagaccctgcggcgtccgaaaccttcttggaatgcgcttctcgcattagcccatccgcgctctttccaagc

SEQ ID NO: 79629 - DNA, 765 bp, Homo sapiens
  misc_feature (1)...(765): n = a,t,c or g
  sig_peptide (566)...(701): this location contains the signal peptide sequence, MENCVGERNHPLFVVYLALQLVVLLWGLYLACPGVCGCGPAGSCS, Run with SignalP
  misc_feature (765)...(38): similar to gi2773183 in the genepept database release 114, Run with FASTXY 3.3t00, default parameters
tttcgtcgaggcgatggcgccctgggcgctcctcagccctggggttctggtgcggaccgggcacaccgtgctgacctggggaatcacgctggtgctcttcctgcacgataccgataaaagtgcagatgaactgctggccacacacagccactcatggaaccaacatctccaggcctttgctcagccaggaacacacttccccacctccaactgcaccccaaccccacccactcctgttctacccggcccagcctcactgtgctctccggcctctccagagctgcggcaatgggaggagcagggggagnnnnnnnnnnnnnnnnnnnnnnnnnnnnnngtgctgggctccctgctgctctacctcgctgtgtcactcatggaccctggctacgtgaatgtgcagccccagcctcaggaggagctcaaagaggagcagacagccatggttcctccagccatccctcttcggcgctgcagatactgcctggtgctgcagcccctgagggctcggcactgccgtgagtgccgccgttgcgtccgccgctacgaccaccactgcccctggatggagaactgtgtgggagagcgcaaccacccactctttgtggtctacctggcgctgcagctggtggtgcttctgtggggcctgtacctggcatgccctggggtctgtggttgcggtccagcgggctcctgttcgccaccttcctgctgctggccctcttctcgtggggggcagcctggctctcgtctcgcacctctacg

SEQ ID NO: 79630 - DNA, 403 bp, Homo sapiens
  sig_peptide (251)...(386): this location contains the signal peptide sequence, MILQVLYEWIFLHVAAPSSSHVCGSSPLHCIADVYEGKRKIHPVC, Run with SignalP
  misc_feature (22)...(403): similar to gi951370 in the genepept database release 114, Run with FASTXY 3.3t00, default parameters
tttcgtttttagtcccaaaagaataatttaagggatttaaaacaaatgttactcttgtatttaattcatacaaaaaacaaactgataaaatcctaaaaatagctaaggtcaaattaggaaaagctgaagcaagttaatttcctagatattatcttctgaacttattcatgctatatattctgatgattcataccaatggaatatgtaattggtaatgatcacaggtattcatataacatcttttgtccagatgatcctccaagtactttatgaatggattttccttcatgtggcagctcctagttcatcccatgtgtgtggaagttcaccacttcattgcattgcagatgtgtatgaagggaaaagaaagatccatcctgtttgtcttttcgtgtatctgacg

SEQ ID NO: 79631 - DNA, 620 bp, Homo sapiens
  sig_peptide (334)...(199): this location contains the signal peptide sequence, MLEILLKLVRLLTTQPYLTLFQAVRNLALNLSTSSGSLGPAPGEP, Run with SignalP
  misc_feature (14)...(551): similar to gi5824904 in the genepept database release 114, Run with FASTXY 3.3t00, default parameters
gcggccgcagccccccacctgggccctcggtccgccctcccggcgcgtccatgaactcagtgtcgccggccgccgcgcagtaccggagcagcagcccggaggacgcgcgccgccggcccgaggcccgcaggccgcggggtcccagaggcccagaccccaacggcctggggccttccggagccagcggccccgctcttggctctcccggggctggcccgagtgagccggacgaagtggacaagttcaaggccaagttcctgacagcctggaacaacgtcaagtacggttgggtggttaaaagccggaccagctttagcaagatctccagcatccacctctgtggccgccgctaccgtttcgagggcgagggtgacatacagcgtttccagcgggactttgtgtcccgcctgtggctcacataccgccgggacttcccgccccttcctgggggctgcctgacctcggactgtggctgggggtgcatgttacgcagcggccagatgatgctggcacagggccttctgctgcatttcctgcccagagactggacatgggccgagggcatgggcctgggcccccctgagctgtcagggtcagcctctcccagccggtaccatggg

SEQ ID NO: 79632 - DNA, 458 bp, Homo sapiens
  misc_feature (1)...(458): n = a,t,c or g
  sig_peptide (88)...(223): this location contains the signal peptide sequence, MMHFLTGGWKVLFACVPPTEYCHGWACFGVSILVIGLLTALIGDL, Run with SignalP
  misc_feature (34)...(460): similar to gi1552526 in the genepept database release 114, Run with FASTXY 3.3t00, default parameters
aagcggcagaccacatnnnngtacgaggacgaggaggaggaggaggacgggtcccgggaggagcggctgcttttcttttttgactacatgatgcacttcctgacggggggctggaaggtgctcttcgcctgtgtgccccccaccgagtactgccacggctgggcctgctttggtgtctccatcctggtcatcggcctgctcaccgccctcattggggacctcgcctcccacttcggctgcaccgttggcctcaaggactctgtcaatgctgttgtcttcgttgccctgggcacctccatccctggtaacaccctgggagactttggtggggtaggatctcagatgagccaggcaggggcaacacaggatcctgccgaaatgagacacgttcgccagcaaggtggcggcgctgcaggaccagtgcgccgacgcgtccatcgggaacgtgacccgctccc

SEQ ID NO: 79633 - DNA, 369 bp, Homo sapiens
  sig_peptide (291)...(156): this location contains the signal peptide sequence, MSFTTFVALLLSLCLWVTSTNYPTRSLRISSFNKEESDVASYSPQ, Run with SignalP
  misc_feature (15)...(369): similar to gi2613022 in the genepept database release 114, Run with FASTXY 3.3t00, default parameters
tccagaggcgatgccctgcttacacccttgctgaggggagttataggctattaaacacggatgggcagtgacatggcctagaagggagggggacaggaggggaaatacctatgaggtagcctggaaagaaagttctgcttgacaggagttggggtgagtagctggccacgtcagactcctccttgttgaaagaagaaattctgagagatctagtcgggtagttagtggaggttacccagagacacagagagagtagcagagccacaaaagtggtaaagctcatgaagtcataacggtaaacagcgtcatccccgttgtccctcatcctgaaagaaatggctattcccatggcatgtgttgtctcgaact

SEQ ID NO: 79634 - DNA, 402 bp, Homo sapiens
  misc_feature (1)...(402): n = a,t,c or g
  sig_peptide (35)...(170): this location contains the signal peptide sequence, MNIIFCWXLTLKLSLIRLPGFPLLSYLSASLPLFSLPTSSDSWIS, Run with SignalP
  misc_feature (124)...(380): similar to gi5106561 in the genepept database release 114, Run with FASTXY 3.3t00, default parameters
gagctagcaccatgagcttcaatctgggtacataatgaatattatattttgttggnttcttactctaaaattatctctcatccggctgcctggatttccccttctctcctacctttcggcctcccttcccttattctctcttcccacttcctcggactcatggatttctggactcgtaaaccccagcgaatctgagacaccgtccagtctgtgcaccaactctctttcatccaacacaaatgacctaacagccaccgtgtgctgccttactcctttccaggccctgcagcagcctccgcctcctgaaccagccaagccaagcaagctttcctctaaatggctgctgactaagtcacggctgctgactagttcacggccaccctgggtaactatgcaatgacn

SEQ ID NO: 79635 - DNA, 365 bp, Homo sapiens
  sig_peptide (79)...(214): this location contains the signal peptide sequence, MPWVLGCTPFIALAYFFLWFLPPFTSLRGLWYTTFYCLFQALATV, Run with SignalP
  misc_feature (1)...(365): similar to gi1653342 in the genepept database release 114, Run with FASTXY 3.3t00, default parameters
aaagtgtctggggcggctgctgaccctgtggctgggttcttcatcaacaggagccagaggacagggtctggacggctcatgccttgggtgctgggctgcacccccttcatcgccctggcctacttcttcctgtggttcctgccccccttcaccagcctgcgaggcctctggtacacgactttctactgcctgttccaggccctggccacggtgccctacacagcgctcaccatgctgctgactccctgcccaagggagcgggactcggccaccgcctaccggatgactgtggagatggcgggaacactgatgggggccactgtccacgggctcatcgtgtccggcgcccacagaccccacaggcc

SEQ ID NO: 79636 - DNA, 794 bp, Homo sapiens
  sig_peptide (341)...(206): this location contains the signal peptide sequence, MRSSCWLTRVTVFFATIWTASAPGPVTLLDVWRLTGVFCTSVLST, Run with SignalP
  misc_feature (7)...(323): similar to gi2664245 in the genepept database release 114, Run with FASTXY 3.3t00, default parameters
tttcgtaccaccaccaccacgcccagcagtcagctgcagcctctcccaacctgactgcttcacagaagactgtaactacaacttctatgattaccacaaagacactacctctcgtcttgaaagcagcaactgcgaccatgcctgcctctgtggtgggccagagacctaccattgctatggtgaccgccatcaacagtcagaaggctgtgctcagcactgatgtgcagaacacaccagtcaacctccagacgtctagtaaggtcactgggcctggggcagaggctgtccaaattgtggcaaaaaacacagtcactctggtaagccagcagctgctcctcatgtgtgatcacatgagaaggttaggatacgcatttgtatagtatatcccttctaggctcctgctggatttctcagtttccatcattcttctagcataccaaattcccctttggggctgacaagggaatatggcatttctgctatctgctcaaatcactacagaagcgtcctgacaccaaggactaaattcagtgcattatctgaggtcaaagtatgacttgattttagggggaaggtctccttcacagaggcatacacactgtttcatttatgtctccctctcccttcactctctctacagagttttcctgtgaaacttgagagtttaaacttctttggctggattactggccttggggaaaaaatcccgggggaaaattctttttaagttaaaaaaacccttttaaatttgtttggcccccaaaaaaaaaagtggattttttgggggccccttt

SEQ ID NO: 79637 - DNA, 377 bp, Homo sapiens
  misc_feature (1)...(377): n = a,t,c or g
  sig_peptide (298)...(163): this location contains the signal peptide sequence, MGSSVLSIWILSPSIYPILSPLAMPCLSRTDLIRVRRIQGAWPSE, Run with SignalP
  misc_feature (31)...(377): similar to gi2687423 in the genepept database release 114, Run with FASTXY 3.3t00, default parameters
nggcccctttatgagaacctttacgttcgtcctgaccacacccttgtcacccccaggcccgggtgctgcgcagcccccgggatgcagtacaatgcctccagcgccttgccggatgacatcctcaactttgtcaagacccaccctctgatggacgaggcggtgccctcgctgggccatgcgccctggatcctgcggaccctgatgaggtcggtcctggagaggcagggcatggcgaggggagacaggatggggtagatggagggtgagaggatccagatgctcaacacagatgagcccatggcttccggcgctgcccagagagctggagacacagagagacagagagggaaagatggagagacaccaggaattgtatt

SEQ ID NO: 79638 - DNA, 1074 bp, Homo sapiens
  misc_feature (1)...(1074): n = a,t,c or g
  sig_peptide (496)...(631): this location contains the signal peptide sequence, MNTWLLFLPLFPVQVQTLIVVIIGMLVLLLDFLGLVHLGQLLIFH, Run with SignalP
  misc_feature (95)...(766): similar to gi3859602 in the genepept database release 114, Run with FASTXY 3.3t00, default parameters
cctggatcgcattaccggtccgacgattncgcctcctcctgctctgngcgtacctctgccctttgctgccctgtttctcctcctccccacaggccgcaacaccctggcccagcctcccattccctgctggacgccctctccccaggccgcacagggctggttcctccgaggcacctggcttccagtgatggacctctggccctgccccaacctgcgcacttggggcctgacaggcgttccccgattcatccctccaggaacaagaaaaccaaacactgcatttcctgcaataagtgtgtgtccggcttcgaccaccactgcaaatggatcaacaactgcgtgggaagccggaattattggttcttcttcagcactgtggcctcggccacagctggcatgctctgcctgatcgccatcctgctgtatgtcctcgtccagtacctcgtgaaccccggggtgctccgcacggaccccatgtatgaagatgtcaagaatatgaacacgtggctgctgttcctccccctgttcccagtgcaggtgcagactctgatagtcgtgatcatcgggatgctcgtgctcctgctggactttcttggcttggtgcacctgggccagctgctcatcttccacatctacctgaaggccaagaagatgaccacctttgagtatctcattaatacccgcaaagaagagagttcaaaacatcaagcagtgaggaaagatccatacgtgcaaatggacaaaggagttctccagcaaggagatggcgccctgggctcatctgcacagggagtcaaggccaagagctccctgctgatttacaaatgcccatgtcacttctgcacttcagtaaaccaggacggggattcgaaggcacagggccgcctcaccgcacttccccaggatttcagggaacaggctcctgtgacttggaaatgaaaatggatcacccaacctggaggaacagtgaggctggtgtccaagacttgccccttgcctgcacttccagcaaagatttggagacactcagtggaaaccaatcgagcccccagcccacccccgcccaagtgtatt

SEQ ID NO: 79639 - DNA, 411 bp, Homo sapiens
  sig_peptide (9)...(144): this location contains the signal peptide sequence, MTTTFPPRKMVAQFLLVAGNVANITTVSLWEEFSSSDLADLRFLD, Run with SignalP
  misc_feature (26)...(402): similar to gi439296 in the genepept database release 114, Run with FASTXY 3.3t00, default parameters
ccgggaacatgactaccacttttcccccaaggaaaatggtggcccagttcctcctcgtggcgggcaacgtggccaacatcaccaccgtcagcctctgggaagaattctcctccagcgacctcgcagatctccgcttcctggacatgagccagaaccagttccagtacctgccagacggcttcctgaggaaaatgccttccctctcccacctgaacctccaccagaattgcctgatgacgcttcacattcgggagcacgagccccccggagcgctcaccgagctggacctgagccacaaccagctgtcggagctgcacctggctccggggctggccagctgcctgggcagcctgcgcttgttcaacctgagctccaaccagctcctgggcgtcccccctggccctctgtatt

SEQ ID NO: 79640 - DNA, 477 bp, Homo sapiens
  sig_peptide (203)...(338): this location contains the signal peptide sequence, MENCVGERTHPLFVVYLALQLVVLLWGLYLAWSGLRFFQPWGLWL, Run with SignalP
  misc_feature (8)...(477): similar to gi4959442 in the genepept database release 114, Run with FASTXY 3.3t00, default parameters
cgatagaagtgacgataacaaccctggacggccaaagaacaaccgaagtacaagaagaagacaatccgaccaaaagcgcatgtcaccaataggcaaccgtcatcggcactcaaaatactgcatggtgctacagcaccagagggctcggcactgccatgagtcccgccgttgcgtcctccgctacggccaccactgcccctggatggaaaactgtgtgggagagcgcacccacccactctttgtggtctacctggcgctgcagctggtggtgcttctgtggggcctgtacctggcatggtcaggcctccggttcttccagccctggggtctgtggttgcggtccagcgggctcctgttcgccaccttccagctgctgtccctcttctcgttggtggccagcctgctcctcgtctcgcacctctacctggtggccagcaacaccaccacctgggaattcatctcctcacaccatgtatt

SEQ ID NO: 79641 - DNA, 466 bp, Homo sapiens
  sig_peptide (435)...(300): this location contains the signal peptide sequence, MPIWKPFMAWMAAWALAVLSKLTKPIHLLWMVARSINTLEEMILP, Run with SignalP
  misc_feature (26)...(455): similar to gi2565067 in the genepept database release 114, Run with FASTXY 3.3t00, default parameters
gctgggcctcgtggctcccatcaccaatggcttggcaggtgtcgtgccctttcaaggtgggcaccctgccctggaaactcgtctatgccaatggccttgtgccatacccagctcagagcccgactgtggccgagacactgcatcctgccttctccggagtccagcagtacacagccatgtgccccaccgcggccatcacgcccatcgcgcacagcgtcctccagccgccgcccctcttgcagcagcagcagcgagaaggagtttggagacacggagctgacgcagatgttcgtgcccttcggcaatatcatttcctccaaggtgtttatggatcgagctaccatccagagcaagtgtatcggcttcgtgagctttgataacacggccagcgcccaggcagccatccaggccatgaacggcttccagatcggcatgaagaggctcaaagtccagcacgaatggcgaa

SEQ ID NO: 79642 - DNA, 373 bp, Homo sapiens
  sig_peptide (55)...(190): this location contains the signal peptide sequence, MYGCLGAVAWCHVTTVTRLTFSSAYQGNSLMYHDSPCSNGYVYIP, Run with SignalP
  misc_feature (4)...(369): similar to gi3881524 in the genepept database release 114, Run with FASTXY 3.3t00, default parameters
cccaagtccctctgccgtgagtcccactggaagtgcctcctgctctcgctgctcatgtacggctgcctgggggcagtggcctggtgccacgtcaccacagtgacgcgcctcaccttcagcagcgcctaccagggcaacagcctcatgtaccatgacagcccctgctccaacggctatgtctacatccccctggccttcctgctcatgttgtacgccgtctacctggtggagtgttggcactgccaagcccgccatgagctgcagcaccgtgttgatgtgagcagtgtgcgggaacgtgtgggccgcatgcagcaagccacgccctgcatctggtggaaggaacatcagctaccactatgtccgccgatgtatt

SEQ ID NO: 79643 - DNA, 392 bp, Homo sapiens
  sig_peptide (247)...(382): this location contains the signal peptide sequence, MINLGFYCLGLIPMTFLVVRIKPGMAFNSAGIINKTSDHSEILDN, Run with SignalP
  misc_feature (3)...(381): similar to gi3287188 in the genepept database release 114, Run with FASTXY 3.3t00, default parameters
acataagtgatacgaggcttctgaataaaggggaccttcatggaatgactcctctccatctggcagcaaagaatggacatgataaagtagttcagcttcttctgaaaaaaggtgcattgtttctcagatgggatgaatgtcttaaggttgttagtcattattctccaaacaataaatgtccaattttggaaatgatcgaatacctccctgaatgcatgaaggttggcttacggatttatagcccatatgataaatctaggattttactgtcttggtctcataccaatgacctttcttgttgtcagaataaaaccaggaatggctttcaactctgctggaatcatcaataaaactagtgatcattcagaaatactagataacatggctgtatt

SEQ ID NO: 79644 - DNA, 598 bp, Homo sapiens
  sig_peptide (29)...(164): this location contains the signal peptide sequence, MWLLGPLCLLLSSAAESQLLPGNNFTNECNIPGNFVCSNGRCIPG, Run with SignalP
  misc_feature (128)...(598): similar to gi561853 in the genepept database release 114, Run with FASTXY 3.3t00, default parameters
gccgggcagcgggagcggcggccgcgccatgtggctgctggggccgctgtgcctgctgctgagcagcgccgcggagagccagctgctccccgggaacaacttcaccaatgagtgcaacataccaggcaacttcgtgtgcagcaatggacggtgcatcccgggcgcctggcagtgtgacgggctgcctgactgcttcgacaagagtgatgagaaggagtgccccaaggctaagtcgaaatgtggcccgaccttcttcccctgtgccagcggcatccattgcatcattggtcgcttccggtgcaatgggtttgaggactgtcccgatggcagcgatgaagagaactgcacagcaaaccctctgctttgctccaccgcccgctaccactgcaagaacggcctctgtattgacaagagcttcatctgcgatggacagaataactgtcaagacaacagtgatgaggaaagctgtgaaagttctcaagtcttcaggccccaggtcagtgagtggcaagccaggcccagagatctctgcgcccgttggaacatcccctttctcgggaggcttgaaaggccatggtcattcacctcttcccagcag

SEQ ID NO: 79645 - DNA, 458 bp, Homo sapiens
  misc_feature (1)...(458): n = a,t,c or g
  sig_peptide (204)...(339): this location contains the signal peptide sequence, MTGSRCEEHVFSQQQPGHIASILIPLLLLLLLVLAAGVVFWYKRR, Run with SignalP
  misc_feature (458)...(): similar to gi34339 in the genepept database release 114, Run with FASTXY 3.3t00, default parameters
aatatcctgtggcnggacttntgaaaagngcagccgctgtcttaaggggcctgtgtggtcacaagcagagtggggatgtcacctgcaactgcacggatggccggatggtccccagctgtctgacctgcgtcggccactgcagcaatggcggctcctgtaccatgaacagcaaaatgatgcctgagtgccagtgcccaccccacatgacagggtcccggtgtgaggagcacgtcttcagccagcagcagccaggacatatagcctccatcctaatccctctgctgttgctgctgctgctggttctggcggccggagtggtattctggtataagcggcgagtacaaggtgctaaaggcttccatcaccaacggatgaccaacggggccatgaacgtggagattggaaaccccacctacaagatgtacgaaggcggagagcctgatgatgtgggaggccta

SEQ ID NO: 79646 - DNA, 964 bp, Homo sapiens
  sig_peptide (247)...(382): this location contains the signal peptide sequence, MVGFGANRRAGRLPSLVLGVLLVVIVVLAFNYWSISSRHVLLQEE, Run with SignalP
  misc_feature (373)...(939): similar to gi2246532 in the genepept database release 114, Run with FASTXY 3.3t00, default parameters
ccggtcgacgatttcgtggacgctggcagctgggttctcccgtttcccttgggcaggagcagggtcgggttcaaagcctccggaacgcgttgtggccccttctccggctcgcagccgaccggaaagcccgcctcctccctcggccggccctggggccgtgtccgccgggcaactccagccgaggcctgggcttctgcctgcaggtgtctgcggcgaggcccctagggtacagcccgatttggccccatggtgggtttcggggccaaccggcgggctggccgcctgccctctctcgtgctgggggtgctgctggtggtgatcgtcgtcctcgccttcaactactggagcatctcctcccgccacgtcctgcttcaggaggaggtggccgagctgcagggccaggtccagcgcaccgaagtggcccgcgggcggctggaaaagcgcaattctgacctctttgctgttgttggacacgcacaagaaacagatcgaccagaaggaggccgactacggccgcctcagcagccggctgcaggccagagagggcctcgggaagagatgcgaggatgacaaggttaaactacagaacaacatatcgtatcagatggcagacatacatcatttaaaggagcaacttgctgagcttcgtcaggaatttcttcgacaagaagaccagcttcaggactataggaagaacaatacttaccttgtgaagaggttagaatatgaaagttttcagtgtggacagcagatgaaggaattgagagcacagcatgaagaaaatattaaaaagttagcagaccagtttttagaggaacaaaagcaagagacccaaaagattcaatcaaatgatggaaaggaattggatataaacaatcaagtagtacctaaaaatattccaaaagtagctgagaatgttgcagataagaatgaagaaccctcaagcaatcatattccacatggg

SEQ ID NO: 79647 - DNA, 681 bp, Homo sapiens
  sig_peptide (184)...(319): this location contains the signal peptide sequence, MVARVWSLMRFLIKGSVAGGAVYLVYDQELLGPSDKSQAALQKAG, Run with SignalP
  misc_feature (174)...(651): similar to gi242005 in the genepept database release 114, Run with FASTXY 3.3t00, default parameters
ggctgttgaattcggcacgaggagaccgcagcccttctctggagtctcagagccgcaagacaccacgactcccagaggaccttgcgtcgggcaagaaagactacaccttccagaggcctctgcggcgccgcgacaggaagcggcgggcgagccgagtgtccttgcgcgtggatccgagcgaccatggtggcccgggtgtggtcgctgatgaggttcctcatcaagggaagtgtggctgggggcgccgtctacctggtgtacgaccaggagctgctggggcccagcgacaagagccaggcagccctacagaaggctggggaggtggtcccccccgccatgtaccagttcagccagtacgtgtgtcagcagacaggcctgcagataccccagctcccagcccctccaaagatttactttcccatccgtgactcctggaatgcaggcatcatgacggtgatgtcagctctgtcggtggccccctccaaggcccgcgagtactccaaggagggctgggagtatgtgaaggcgcgcaccaagtagcgagtcagcaggggccgcctgccccggccagaacgggcagggctgccactgacctgaagactccggactgggaccccactccgagggcagctcccggccttgccggcccaataaaggacttcagaagtgaaaaaaaaaaaa

SEQ ID NO: 79648 - DNA, 420 bp, Homo sapiens
  sig_peptide (53)...(188): this location contains the signal peptide sequence, MRNRRTERTCTPPLASPYNLVPHLQNLLAVLLMILVLTPMVLNPH, Run with SignalP
  misc_feature (7)...(421): similar to gi3152938 in the genepept database release 114, Run with FASTXY 3.3t00, default parameters
cgaacggccgaacgggaacctcctatgctggtggacacgaagctcaccgactatgaggaacagacggacggaaaggacctgcacaccaccactggcttcaccctataacctggtccctcatctccagaacctgctagctgtcctgcttatgatattagtgctgactccaatggtccttaacccacacaagctgtatcagatgatgacgcagaatatcttattgcagaagccacagaaaaattttatttggacagccctgaaagggaacctatcctatcctcggaaccttctcctgcagtcacacctgtcactcctactacactcattgctcctagaattgaatcaaagagtatgtctgctcccgcgatctttgatagatccagggaagagattgaagaaaaagccaatggagacattttt

SEQ ID NO: 79649 - DNA, 422 bp, Homo sapiens
  sig_peptide (349)...(214): this location contains the signal peptide sequence, MVVVLPCFAVLKLLFGQSKLGPMQPSQSGLDPVGAGMSASIADGS, Run with SignalP
  misc_feature (71)...(349): similar to gi158896 in the genepept database release 114, Run with FASTXY 3.3t00, default parameters
atctacagcgttggataggtgttaccggaacggcggcgacaagggggtacccgaactagagtggggcatacataatctttttgctatgcttcgaagctggagtctgaatcaacctaagttgtaaacacaaagtgaacctctgagatagaaaatcaagtatattctaaaagaagggatgtgggatcaaggaggacagccttgtcagcagtggcccttgaaccatcagcaatggatgcactcattccagcaccaacaggatccaagccagattgactgggctgcattggcccaagcttggattgcccaaagagaagcttcaggacagcaaagcatggtagaacaaccaccatgaatgatgccaaatggacaagatatgtctacaatggaatcttgtcccaacaatcattggaaatttccagggg

SEQ ID NO: 79650 - DNA, 343 bp, Homo sapiens
  misc_feature (1)...(343): n = a,t,c or g
  sig_peptide (193)...(58): this location contains the signal peptide sequence, MTMLPCDIFFPAVFTLGLNSVWFWQYNKNSPENLLDESAFTKSPN, Run with SignalP
  misc_feature (30)...(217): similar to gi1743482 in the genepept database release 114, Run with FASTXY 3.3t00, default parameters
ggctgcattttacactctcagtgccttcaaatgataagttcttaataaatatttcctgattgggtgatttggtgaatgcactttcatccaagagattttctggagagtttttattatactgccaaaaccaaacactattcaatcccagggtaaacactgcaggaaaaaaaatgtcacagggcaacatagtcataagtgggttctccccatgctcacacgcccttcattctaagctgggggaggctgctgtagtaacacagatgcataatataaactttgactaaatggcttcatgttccagatgattggatgcctcgttaaagcacccaaagatgaagctacn

SEQ ID NO: 79651 - DNA, 348 bp, Homo sapiens
  sig_peptide (324)...(189): this location contains the signal peptide sequence, MTPIQSLLYWWTFRIFIHFCYCMECTHVPIRVGQGGQFHVIPIFA, Run with SignalP
  misc_feature (68)...(185): similar to gi3047114 in the genepept database release 114, Run with FASTXY 3.3t00, default parameters
agacccagcattaggaccaactacatttgggtcttaaaaacctcaaaactgattgaagccaagagatattaaaacaaattatttgaaatagctgtataaaaatccatcataaagaattgagtgctttattttaaaacataaaagctcatggcttatcaaatattgttcccaaattataaaaacatgaagcaaatataggaataacatgaaactgccctccctgccctacccttatgggtacatgggtacattccatgcagtagcaaaaatgtataaatatcctaaatgtccaccaatagagaagtgattgaataggtgtcatgtataatcataataagagcccaaaac

SEQ ID NO: 79652 - DNA, 522 bp, Homo sapiens
  sig_peptide (341)...(476): this location contains the signal peptide sequence, MLPQVFLGFTKVRLLRLRNPWGCVEWTGAWSDRWDGSGVGVGLDP, Run with SignalP
  misc_feature (251)...(446): similar to gi4704754 in the genepept database release 114, Run with FASTXY 3.3t00, default parameters
ccatctccttttgtctcgtttccatctcccttcctctccttttctctttcgccttcagtcactaaccctgacatggtctctgagctgcgtgccattcagttcagtgctctggttggctcctgccttggtggcaggaggttgggggcagggaggagcagctgccctcctgtcccctaccttggcctcaccatcccatcccctgcccagagtgatcggggtgagtaccgcacagaagagggcctggtaaagggacacgcgtattccatcacgggcacacacaaggtaagtgtcccccatgggtggggtggcaggccatgtccaggcatcacccccactgacgatgctgccccaggtgttcctgggcttcaccaaggtgcggctgctgcggctgcggaacccatggggctgcgtggagtggacgggggcctggagcgacaggtgggatgggtctggggtgggtgtggggctggaccccacctgcccgcccctcacaccacagtctctccagctgcccacgctggg

SEQ ID NO: 79653 - DNA, 363 bp, Homo sapiens
  sig_peptide (159)...(294): this location contains the signal peptide sequence, MTLLADLLLQTKSAMSLSCGCYFSVKPDLSWLPSRAVSFTWQPSW, Run with SignalP
  misc_feature (190)...(358): similar to gi2289028 in the genepept database release 114, Run with FASTXY 3.3t00, default parameters
gaattgtcggtttacaactgaaggcatctccttccagagggaaagctggcctccctcatcaaagacttgcaacgtatgtgaaagagcaagtgacagacgtaagaatgggggtagagggcattgagatgtggtccgtgggattgcaggtgtaaaggaaaatgacactcttagccgacttgctccttcaaacaaagtcagctatgagtctgtcctgcggatgttacttttcagtaaagccagacttgtcctggctcccctccagagccgtttccttcacctggcagccatcctgggcttctgagtaggcggatgggaggcaaggaaaggccgcctggcacggtggggatagagccagggccccga

SEQ ID NO: 79654 - DNA, 346 bp, Homo sapiens
  sig_peptide (59)...(194): this location contains the signal peptide sequence, MDLGRVFITLILNLLRETIFKRDQSPEPKVPEQSVKEDRKLCERP, Run with SignalP
  misc_feature (2)...(348): similar to gi3719441 in the genepept database release 114, Run with FASTXY 3.3t00, default parameters
cgataaaacttgccttaacgctggtaccattattcccgaccaagagcaatcatattagatggaccttgggcgtgttttcattactttgatcctgaacttacttagggagaccattttcaagcgtgaccagagccctgaacccaaggtgccggaacagtcagttaaggaagataggaagttgtgtgaaagaccgttggcgtcttctccccccaggctatatgaggatgatgagacccctggagccctttctgggctgaccaatatggctgtcatccagatagatggccacatgagtgggcagatggtaaaacatctgatgaactcaatgatgaagctgtgtgtcatg

SEQ ID NO: 79655 - DNA, 345 bp, Homo sapiens
  sig_peptide (6)...(141): this location contains the signal peptide sequence, MRSLWKANRADLLIWLVTFTATILLNLDLGLEDAVIFSLLLEEVR, Run with SignalP
  misc_feature (3)...(288): similar to gi5802227 in the genepept database release 114, Run with FASTXY 3.3t00, default parameters
gcgacatgcgctccctctggaaggccaatcgggcggatctgcttatctggctggtgaccttcacggccaccatcttgctgaacctggaccttggcttggaggatgcggtcatcttctccctgctgctcgaggaggtccggacacagatgtgagtccgccatgttggtcccctcattccagctagtgagagagtaccacagggctccccgcagctttccccacatctctggggacttcaggctccttcggacccctctgttatcccctttttctgccccctcttcgtgcattctctctctccttcacaggccccactactctgtcctggggcaggtgccagacaca

SEQ ID NO: 79656 - DNA, 354 bp, Homo sapiens
  sig_peptide (126)...(261): this location contains the signal peptide sequence, MLKKIFLIKLSSILSITLKLCLILESMLLSLAGTKLPELKKNFKI, Run with SignalP
  misc_feature (9)...(300): similar to gi1334576 in the genepept database release 114, Run with FASTXY 3.3t00, default parameters
ctactggcttcatttgttggtcttcaattaagttagtttgacctcatgtattcagccctatcccaatgttatctagcaccaagaacatgaaatagcaccattaattctactcaagactagaagaaatgctaaagaaaatcttcctaataaaactgtcttctattttatctattactttgaaactttgcttgatactcgaaagcatgttgctctcattagcaggaactaaacttccagagttaaaaaaaaattttaaaatacatattcggaatagtgttattttcttgtgggtggagaacatgaaaagttactcataaaatatgtatttattaggaatagtattattaatttgac

SEQ ID NO: 79657 - DNA, 384 bp, Homo sapiens
  sig_peptide (354)...(219): this location contains the signal peptide sequence, MFIIFLAFIALKRSKSVIGAFLYLASIFLAHGVAAHIVFMSAFYQ, Run with SignalP
  misc_feature (12)...(387): similar to gi3126984 in the genepept database release 114, Run with FASTXY 3.3t00, default parameters
atctcttgtgtgacattggccggttgtcatatgttaacttcggaccttatgcctggaaacagcttgagattgaatatgtcacagatcatagcaaccctttggtcaatggaccttgcactcaagtgaggagacaggccatgcctttcaagagcatgcagctcactgatttcattctcaagttttcgcacagtgcccaccataagtatgtccgacaagcctggtaaaaggcagacatgaatacaatatgggcagccacaccatgggccaagaagattgaagccagataaaggaaagcccctatgacagattttgatcgttttaaagctatgaaggccaagaaaatgatgaacataataatcaagaatgaagttattaagcttcaag

SEQ ID NO: 79658 - DNA, 382 bp, Homo sapiens
  sig_peptide (149)...(284): this location contains the signal peptide sequence, MYFSGPFLIQKMISLKLIQATYFFSFFWCLTFGHFSHYYYEREIK, Run with SignalP
  misc_feature (11)...(243): similar to gi3873637 in the genepept database release 114, Run with FASTXY 3.3t00, default parameters
ttaatgaatttttaagaagagagaaaaggaggaatgaaggttttgatgaaatggaaagccatattggtcacggttccagaaaaagagtcatttgaattacatgtcctcctgctgtttggccctttctcagaggtgaacaatgaatcagatgtatttctctggaccctttcttattcagaagatgattagtttgaaactcatccaagcaacttatttcttctctttcttttggtgcctgacttttggccatttttctcattactactatgagagggagattaaaaaagacaaagaagtcagttttgattattaaaagcagttacaacatggtttattgagtttagaagtgaaaatattacataaaacaaaatatctctattcg

SEQ ID NO: 79659 - DNA, 293 bp, Homo sapiens
  sig_peptide (287)...(152): this location contains the signal peptide sequence, MLTEALTLLLLHSALEALILSELIHRGLYYFGWVFVLHCSVFGQI, Run with SignalP
  misc_feature (10)...(285): similar to gi5823327 in the genepept database release 114, Run with FASTXY 3.3t00, default parameters
ccatagatctggaattcgcggccgcgtagacggatgggctataaatatcaccataatcatgattatcatagtgcatgcagccttaacatagatccttattcaaatgtttagtaagcaactactttgagccaaaaagcatcgccagggcagatatctgcccaaaaacggagcaatgcaaaacaaagacccaaccaaaataatacaaacccctatgtattaattcagaaagaattagggcttccagagcactgtgcaataaaagcaatgttaaggcctccgtcagcataatctgg

SEQ ID NO: 79660 - DNA, 542 bp, Homo sapiens
  sig_peptide (6)...(141): this location contains the signal peptide sequence, MRNPGFPLFVCTLFSLPLPCLALDFIFSLPFLSISLLFFAFHPNF, Run with SignalP
  misc_feature (345)...(19): similar to gi3874243 in the genepept database release 114, Run with FASTXY 3.3t00, default parameters
ccaggatgagaaatccaggctttcctctttttgtctgtactcttttctctttaccgctcccttgtttagccttggattttattttctcccttccttttctctccatttctctcttgttctttgccttccatcctaattttctctatttgtgtttcccttgctctttctcttttttgcttttcccttttgatcctctcctcccagtgcttttctcttccatttctctttcctctttaatttttctttaatatttatttgtcctccttttcttccccatgtcacttctaatagatacacatattccttctctgtccctaaagcctttgggataatttctgaggacgtgggttctaagtgatggctcttacaacaggaccattcccagagtgagcagggtcagttgagaggggaagtgggagcgggagtcaggggtagcacatgggaaaatgagagatgagaaatatcaatatttggtatcattagggaaagtttcgtgggtgcattagagttcaagtttgttggctcattggtcgacgcggccg

SEQ ID NO: 79661 - DNA, 328 bp, Homo sapiens; identical to SEQ ID NO: 39595
  sig_peptide (22)...(157): this location contains the signal peptide sequence, MQRGRNEWIGKIRPWVVHRNCLLSLTCLLPLVNFGCIFVSKCHIR, Run with SignalP
  misc_feature (322)...(34): similar to gi1256519 in the genepept database release 114, Run with FASTXY 3.3t00, default parameters

SEQ ID NO: 79662 - DNA, 310 bp, Homo sapiens
  sig_peptide (33)...(168): this location contains the signal peptide sequence, MCIELCIIFPVVMSSPSFFILVSENNNNDLFLILMVLLLVSLGLT, Run with SignalP
  misc_feature (89)...(213): similar to gi2116576 in the genepept database release 114, Run with FASTXY 3.3t00, default parameters
gattggtccatttcatcaaagttggggaatttatgtgcatagagttatgcataatattccccgtagtgatgtcttctccttcattcttcatattagtgtctgaaaacaataacaatgatttatttctcattctgatggttcttctcctggtctctcttgggcttactctggctgtattggtagattggctacagctggaggatctaaaaatggcctcacccatatgtttggggccttgatggggatgactggagtagctgagacttgtctctccctggattcattgggaaccaaaatgatctgccatgtg

SEQ ID NO: 79663 - DNA, 319 bp, Homo sapiens; identical to SEQ ID NO: 40867
  sig_peptide (148)...(283): this location contains the signal peptide sequence, MFIINMHILEGCTKFCFDCFFWLVCWGMWSNKFGELSLLISHNLA, Run with SignalP
  misc_feature (4)...(272): similar to gi5669804 in the genepept database release 114, Run with FASTXY 3.3t00, default parameters

SEQ ID NO: 79664 - DNA, 419 bp, Homo sapiens
  sig_peptide (79)...(214): this location contains the signal peptide sequence, MLLLSRVFLSTFQSPHSHLPGLEPLPLGLHNSDRVSLTLSYSGIF, Run with SignalP
  misc_feature (8)...(247): similar to gi4680231 in the genepept database release 114, Run with FASTXY 3.3t00, default parameters
cccacgcccacctcgcccacctgtgcctccactgccatatcacactgacaggcgacacagtgatgaactttcccaggcatgctgctgctcagccgggtgttcctctccacctttcaaagtcctcacagccatctcccaggcctcgagccacttcccctaggcctgcacaatagtgacagggtttccctcaccctgtcttactcaggaattttcaactgtaaacccccaaaagccttctgcacctctattccccacatagcttagaatcatttctcaaaccagagcatatactcaaaatatgtttgttaaacagaacaaatgtgttttacatgcaagtgagtgtgatcaagtacaaaaagataagttatagctaaaaaaatgggttggtattctgtggaagcaatgtgtcgacgcggccg

SEQ ID NO: 79665 - DNA, 391 bp, Homo sapiens
  sig_peptide (172)...(37): this location contains the signal peptide sequence, MEVEGGGLVLIGCVTFAVFCIARLEGLVIFHVVGCCSLFGVFRWE, Run with SignalP
  misc_feature (15)...(388): similar to gi1335276 in the genepept database release 114, Run with FASTXY 3.3t00, default parameters
caaccgcccataccaaggagcgggaatacacatctacctcccatctaaagacaccgaaaagcgagcaacatcctacgacatgaaaaatgacaaggccctccagcctagcaatacaaaacacagcaaacgtaacacatccaataagaactagtccccctccctccacctccatctgcctggtaaacactcagtgaaaagagctacatccaccaagcacatctctcaaatccaggcacgtggaagcgcacagcgaacgttactgaagtgaactaacaaacagccccgtgatgtatctttcaccaccccatttttcaaatgatcaaatggaggctctgagaaggtgaggctctgccgctgttcatctccagttcaggcctcctcgcctcgtgcc

SEQ ID NO: 79666 - DNA, 418 bp, Homo sapiens
  sig_peptide (360)...(225): this location contains the signal peptide sequence, MWFAAPWALVRGPGFCLLDCYPRGGSGGGITVLLAFGLLGEDAEG, Run with SignalP
  misc_feature (211)...(329): similar to gi1703594 in the genepept database release 114, Run with FASTXY 3.3t00, default parameters
ttgagagaaaacactgagtgaggcccaggccccacgccccatccccagacacagaatcagtgtggggtatggcccgggcttcagcatctttcaaattaagagactttatttgggaccagttttaggtttaaggaaagtaccatacagacagacagtcagtcatcactattctttaaaagtttcatagaagactgacacggggcctgggtgagcacccctgggctaccctccgcatcctccccaaggaggccaaaagcaagaagaacagtgatccctcccccagatcccccacgcggatagcaatcgagaaggcagaacccaggccccctgaccaatgcccagggggcagcaaaccacatgtgccacagaatcgggctcaacacctgtttaggtacagcccatgaactcagctcgtgcc

SEQ ID NO: 79667 - DNA, 648 bp, Homo sapiens
  misc_feature (1)...(648): n = a,t,c or g
  sig_peptide (21)...(156): this location contains the signal peptide sequence, MMGVSGCMVLLAPLLARRSQSSLWKQFEKCSAGPKLMLSKFLPWG, Run with SignalP
  misc_feature (43)...(490): similar to gi4884880 in the genepept database release 114, Run with FASTXY 3.3t00, default parameters
ggcacgagggactgaaaggcatgatgggggtgagtggctgtatggttcttctagctcccctgctggctaggaggagccagtcttctctttggaagcaatttgagaagtgctctgctggacctaaattgatgctgtccaaatttctgccttggggcaagttggctatgccttctcggatgagtaatttcagcccctaaagagtatagcaaatccatataaccaagagttggcaagaaaaggctctttatgacatttgagtgtttcatgttcctctgactttctttcttttttttttttttggacccggagggtttttgccccgggttgnnnnnnnannnancnagcgggnaggcgaggaggaacggcccaggggacgccctcggcctcgaggcggggggggccccggaccgcccccccacggcgaccaccggcaagcccaccggagcaacggcccccccccccccggagccaccaccctacacccgcgccacgcacgagacgccccgccggcggaacgaccccgccccgccaccctgccaacgaatgcccggcggccgcatgacccccgccccagaggctgctcgttcttttgaacaaggcacgcgccctattaattctccctgtccgggggaccggtccgatcgaacc

SEQ ID NO: 79668 - DNA, 714 bp, Homo sapiens
  sig_peptide (146)...(281): this location contains the signal peptide sequence, MLFSAVKLYCCQFWHLILNRVPSPSLLYSCGLSTNVLNTTVCYVR, Run with SignalP
  misc_feature (6)...(117): similar to gi1890647 in the genepept database release 114, Run with FASTXY 3.3t00, default parameters
ggcacgaggggtttcaccgtgttagccaggatggtctcgatctcctgaacttgtgatccgcccacctcggcctcccaaagtgctgggattacaggcgtgagccaccgcgcccggccgcaaaatttctactctttccgaggggctaatgctgttctcagctgtgaaactttattgttgtcaattctggcatttaattctgaatagggtgccatcaccttcactactctattcatgtggtctttcaacaaatgtattgaatactactgtatgctatgttagggataagaagtgacccagactgctataagggaaagataaaacagtagtatgagagtgtataatattctaacgtagtatggaggccaaggaaggcttttatggtgacgtttaagctgaaatccaaaagaattaactagtcgaaatggtgaggcaaagagtgttttgatccaaggaaataacatgtgcaccctatctactagaagggatgaattatttgcttgctgtcctgaaggtaggccattgtggcttgaaagagtgtgagagagagcatgtagggcaagatgaggctggaagagtaagtaaagatcagaaatttcaggcattgtaggccatgttaaggttttgaacgttatttttagagcagttgctaatgaagtatatgaagcaggggttataggagcagatttccattgttaaaagatagctatgcttcag

SEQ ID NO: 79669 - DNA, 323 bp, Homo sapiens
  misc_feature (1)...(323): n = a,t,c or g
  sig_peptide (30)...(165): this location contains the signal peptide sequence, MLMMDTLWPILLQTLKVISQVGHAGPLANMIHDNPCIIAYRITLR, Run with SignalP
  misc_feature (9)...(317): similar to gi307178 in the genepept database release 114, Run with FASTXY 3.3t00, default parameters
ggcacgagggggtgactggtgcactgactatgcttatgatggacacactctggcccattctactgcagacgctgaaggtcatttcacaggtcggccatgctgggccattggccaacatgatacatgacaatccctgcatcattgcataccggattacactcagactcgtaggcccttagaggtttgtagcgacctgagctctatctgtagcatactttgcaatggcaaagtttttgaacatggcatgacggtattcacttctttgccagaacccggagatgatcggtgccactgtaagggctcttatgatgcactgagtcaan

SEQ ID NO: 79670 - DNA, 360 bp, Homo sapiens
  misc_feature (1)...(360): n = a,t,c or g
  sig_peptide (72)...(207): this location contains the signal peptide sequence, MICSTTFLILKCFSVLKEILKPILTNVHCRSGVEAQAFFLQQFTS, Run with SignalP
  misc_feature (44)...(242): similar to gi4415912 in the genepept database release 114, Run with FASTXY 3.3t00, default parameters
ggcacgaggtcatgagatttttcaataattatataaataacaagtaagtcgtggaagtaaaaggtgttctgatgatttgctctacaacatttttaatcttaaaatgcttcagtgttctcaaagagattttaaagcctattcttacaaatgtacattgccggtcgggagtagaagctcaagccttttttttacaacagtttacttccccatctgctattagggctccatgcttgtctcctttaatttttgcaatgccctatgcatgaccatcctcattgcctttaattttgtgcgccctctacattccttgggcatttccttcttttaaataatctctttcaaattcctttgtcgcatgcn

SEQ ID NO: 79671 - DNA, 379 bp, Homo sapiens
  sig_peptide (190)...(325): this location contains the signal peptide sequence, MIDIVRFAGLPSLLLHALCLISLTYPSSFRHSSYLISPCASFWIL, Run with SignalP
  misc_feature (121)...(299): similar to gi984125 in the genepept database release 114, Run with FASTXY 3.3t00, default parameters
ggcacgaggtgtgtgatcctgtttctcagcgtggggagtgtgtgaccctgtttctcagcgtggggagtgtgtgaccctgtttctcagcgtggggagtgtgtgatcctgtttcttgtctggttttcagatgttattctggcaactattttggctaccaagtctgaaatgtgtggccaataatttgaactgatgattgatattgtgcgatttgctgggctcccttctctgcttcttcatgctttgtgtctgatttccctaacatatccttcctcctttagacattcatcttacttgatttctccttgtgcgtcgttctggatcctttatctttttcgtcctgtgtgatctctttcattttcatgctgcactctctcctacc

SEQ ID NO: 79672 - DNA, 372 bp, Homo sapiens
  sig_peptide (46)...(181): this location contains the signal peptide sequence, MPIVVACARISSILFARLFADPPNSHLLLPTPNVTGCSSVPVYER, Run with SignalP
  misc_feature (94)...(346): similar to gi1932805 in the genepept database release 114, Run with FASTXY 3.3t00, default parameters
ggcacgagtttgtctttttgtgattagtttatttcatttatcctaatgcctattgttgtagcatgtgccagaatttcctccattttgtttgctcgattgtttgctgaccctcctaactcacacctacttctgcccactcccaacgtaaccggctgttccagcgttcctgtttatgaacgatagactgccataactgctctattgcagttcatgtccctgagtcgtcactcaagccccacggaggatcgagatgaaccagcatatccaagacgagattcaagaggctccccatgaagaagttgggaacttcagaccctaatcaaccctagtatactttctgcttcacactatgaccttttactcttattgccc

SEQ ID NO: 79673 - DNA, 343 bp, Homo sapiens
  misc_feature (1)...(343): n = a,t,c or g
  sig_peptide (61)...(196): this location contains the signal peptide sequence, MGATDSLRRCRQGPWRPSPWMFLLGRLFELGSGAWLVEGPWPTGP, Run with SignalP
  misc_feature (5)...(246): similar to gi1151260 in the genepept database release 114, Run with FASTXY 3.3t00, default parameters
ggcacgagggggtcccagcagaggatctggtagagccttgagctttccagggaaagggctatgggagcaacggactccctgaggaggtgccgccaaggcccctggcgtccgagtccctggatgttcctcctggggcgtctctttgagctcggcagcggtgcctggctggttgagggaccctggcccacagggcctcaactgtccccgaactgcgccctcctttatcatcatggactttgcctttgagatgaccccacctgcgtccctgcagaaacacttccgctagctaagctagactagatgaaacctattctactccccgatgctggcataagaatttcan

SEQ ID NO: 79674 - DNA, 336 bp, Homo sapiens
  sig_peptide (261)...(126): this location contains the signal peptide sequence, MGWHRLWALLSPFACFRICGSFESQNNGSASLPSTPPVGGWPRGC, Run with SignalP
  misc_feature (65)...(293): similar to gi1372971 in the genepept database release 114, Run with FASTXY 3.3t00, default parameters
ttcatctccctgcagcaagtaggcagtgagctattgtcgccccgatttttgcagggggtgaatgccagtgatcggggatctcccgtcgaggcagagaccaggcctccaagaccgccccagcgaggcatccacgtggccacccacctaccggaggggtgctgggtaaggaagccgatccattgttctggctttcaaaggaaccacagatccgaaaacaggcaaagggggaaaggagggcccagagacgatgccaccccataagcccccatcccagcgcctgccagggcccgcgagtgcctagcgtgggtgatcagtcttcgtttcttccctcgtgcc

SEQ ID NO: 79675 - DNA, 1070 bp, Homo sapiens
  sig_peptide (615)...(750): this location contains the signal peptide sequence, MIALTQLLTFILSCNSSLLHIFPFCEQVLVENGTKAGHSLLMDAR, Run with SignalP
  misc_feature (160)...(450): similar to gi3876580 in the genepept database release 114, Run with FASTXY 3.3t00, default parameters
ggcacgagaacactattagttattttattactaactatacaactactttaacataacactctcttttcccaggggtggggttgggtgtaaatgggcctcttgtagagatgactcttggtcatgggaattggtgatttataataattttgccatcttagggctgctcacagtatttggggccagagcctacgtgaatatatgtgtgtggacagatcagctgccatgttggttttggcagaaaaactactgaaaggtggttcagaatctggggagccttatattccaggtgtctttttcagacagtttctacctgtatcacccaaggtgcagtttgatgtagtagtgtcagctttttccttaagtgaactgcccagcaaggctgaccgcactgaggtagttcaaaccttatggcgtaagacaggtcatttcctggtgagttaaaattccttgttctccttaagtcttgaagcagcttcatggatttcatgcctttgctcctctcattgtctttattcttcaccatttttctccttcatgggtttctttatccctctttgagggtctccatcctgattatgtaatgcctatttctttttaggactccttctccctctatgattgctcttacacagctactgacatttatactttcgtgtaattcaagtcttctgcatattttccccttttgtgaacaggtactggtggagaatggaacaaaagctgggcacagccttctcatggatgccagggatctggtccttaagggaaaagagaagtcacctttggaccctcgacctggttttgtctttgccccggtgagtattacttctgcctgtcccaccacacggatctgaacttaggcgtggccgggaaatgtaagatggtaaagctaagccactctccactactttgtgttcctatccagttcctacctaatgattcccctggctcttcctacccactgctcctgtcctcccttctccctggccccttttgactctattattctcagtttttaagttttgtgattgatggctcttttgtcttacctcatttttttatgtgttcac

SEQ ID NO: 79676 - DNA, 382 bp, Homo sapiens
  sig_peptide (175)...(310): this location contains the signal peptide sequence, MIFSPSPRLCLFLVPCAHSCSLQSQPGLGIVNSFSFFSYCFLYSP, Run with SignalP
  misc_feature (34)...(323): similar to gi1334398 in the genepept database release 114, Run with FASTXY 3.3t00, default parameters
ggcacgagttgttacctaaataatgagtaggatcttgttttgttttatcaccagcacacagattgctataaactgttactttgtgaattacatttttatagaagatattttcagtgtctttacctgagggtatgtctttagctatgttttagggccatacatttactctatcaaatgatcttttctccatcccccaggctgtgcttatttctagtgccttgtgctcactcctgctctctacagagccagcctggcctgggcattgtaaacagcttttcctttttctcttactgttttctctacagtcctttatatttcataccatctctgccttataagtggtttagtgctcagttggctctagtaaccagaggacacagag

SEQ ID NO: 79677 - DNA, 242 bp, Homo sapiens
  sig_peptide (231)...(96): this location contains the signal peptide sequence, MTHTNISLLLFMFAYFDCTCTLDLVGSLAKQVYFLKYTREVGVHS, Run with SignalP
  misc_feature (126)...(242): similar to gi1086656 in the genepept database release 114, Run with FASTXY 3.3t00, default parameters
catttttactaagcactcaggagatccacagtccacatctgacagattccagctggaaggacagcagaagcatggctcgacccaagggaaaacactgtgcacacccacttctctggtgtatttcagaaaatacacttgctttgccagtgaccccactaagtccaaggtacatgtgcaatcaaaatacgcaaacatgaagagaagaagagaaatgtttgtatgagtcattaggtcagagtgag

SEQ ID NO: 79678 - DNA, 363 bp, Homo sapiens
  sig_peptide (49)...(184): this location contains the signal peptide sequence, MVLSWLTLIEALADVMTTDGNMLQLFCVERTNLLVNQIRMTLYAQ, Run with SignalP
  misc_feature (1)...(364): similar to gi950113 in the genepept database release 114, Run with FASTXY 3.3t00, default parameters
ctgactcacttacatggcatggactatacccgtgactacacgagatgcatggtcctatcatggctgaccttgatcgaagctctcgctgatgtcatgactaccgatggcaacatgcttcaactgttctgtgttgagcgtactaacctactcgtcaatcagatacggatgaccttgtatgctcaataccgacacgtccgacccttccgcacaatcatgaagcccatcttgacccgagaggtgcagacaaaggactagtcggacccggccaatctggtgactccccaccgccttggactacacgtcttaaaggcttgccaatctatttatcctctccatgatgtcttcgttagaaaagtagacatg

SEQ ID NO: 79679 - DNA, 371 bp, Homo sapiens
  sig_peptide (178)...(313): this location contains the signal peptide sequence, MLSCFSSCRRLFLALWGASQTAWMDSLVFMPSSTLAPANSYLSLG, Run with SignalP
  misc_feature (295)...(104): similar to gi50585 in the genepept database release 114, Run with FASTXY 3.3t00, default parameters
tatacttgaaggcacatatatggtatgtgggatatagcaagctaacaaactgggaaatatgttctgtcctcctatgttgacaaatagaccttgatcacaacctggaaggatgagctcttgaactctctgagttcctgcagaagtgtagaggcctttggagagttgcctctgactgacatgctttcctgcttctcttcttgccgccggctctttctggccttgtggggagcctcacagacagcctggatggactctctggtcttcatgcccagttccactcttgcccctgcaaacagctatctatcccttggccaccattcaggtcaagacttgatccactgatggcacaacctccctcaggaggatggatc

SEQ ID NO: 79680 - DNA, 424 bp, Homo sapiens
  sig_peptide (274)...(139): this location contains the signal peptide sequence, MCVWLAVLRGILLKGPQIGGHSSWPLTPGCEPSPAVLVARAPGAW, Run with SignalP
  misc_feature (57)...(403): similar to gi217340 in the genepept database release 114, Run with FASTXY 3.3t00, default parameters
ctgggagacctgtggcttttctacagaaatctcagccactaaccctagctgatgcagagacccgcagggtccccactgtggtgcaggggactcccaccagctcgtgttgctctctgggagcaggcacagctgcagcgccccacgcacctggagccctggccaccaatactgcaggcgagggctcacagcctggtgtcagaggccaggagctgtggcccccgatctgaggccctttaaggaggatccctcttagcacagctagccacacacacatagctaccgtgagcctgtgccctatttggtggtggtggctacagtctgcaggcagcaggggatcagactctgcacctcgccttcccactgggccctcagcaggacacgtgaccgtgcccagaacgaggggcacatacactgtgtctcaccc

SEQ ID NO: 79681 - DNA, 380 bp, Homo sapiens
  sig_peptide (153)...(18): this location contains the signal peptide sequence, MVIGSLHTFTLLAASSLVDTPKQIQLLMQNLMNDPRKEVKILAIQ, Run with SignalP
  misc_feature (251)...(370): similar to gi4887681 in the genepept database release 114, Run with FASTXY 3.3t00, default parameters
gcaagtaatttcagatcctgaatagcaagtatctttacttccttcctgggatcattcatcaaattctgcatcaaaagttgaatctgcttaggtgtatcaaccaaagatgacgctgcaagcagagtgaaagtgtgcaaagacccaatcaccattttggtggacggataggatgtgaccagctgttgtaaaagctgacgagcactggaagccaagattgcatcatggtgcatgtgctgtagaatgggtatcaattttagcttcaagtctactggtgtcgataaaccttgaatcatttcactgattttgttacagattcctacagcaaaatcctttgactgtgcagagaagtttgcagcagcaaaatcagcagaatcaacttc

SEQ ID NO: 79682 - DNA, 575 bp, Homo sapiens
  sig_peptide (415)...(280): this location contains the signal peptide sequence, MWVSLVGKCLCGLFTVQKAAQQCNGLTALDRESEAWVLVVALAPP, Run with SignalP
  misc_feature (359)...(577): similar to gi188874 in the genepept database release 114, Run with FASTXY 3.3t00, default parameters
cagacaaacacgtaatcccaaacagagccacatgtgctcagacatacacagtcctgataggaactgccccttcgcctttctacagagacacacaactccgccccaccccaacctttaggtatactgagacacacagagattgccccctccccaccacagaaatttctatgaagaaactctttcaggtataaaaggatcttcaacataatttcagctgctgttcattttctagttgaggaaactgaagacgagagaaagcaagtggcttgttgaagatcacagggaggggccagagctacaaccagaacccaggcttctgactcccggtccaaggctgtcagcccattgcactgctgagccgccttctgcactgtaaacagaccacacaggcacttccctaccagggacacccacatctatgacaggaatagactgaggagagacaggtccaacagagacacacacccacccaccccctgacagcctcagagatacacacacattctgctaagcactccctaccacatccaaacaaccacatccatagagccactgcagcccactggattcaccaa

SEQ ID NO: 79683 - DNA, 1002 bp, Homo sapiens
  sig_peptide (441)...(576): this location contains the signal peptide sequence, MSTPHFFCPFLILPCWSDWKWGCSSLDTGEKEGPWGCHFLCPFGW, Run with SignalP
  misc_feature (255)...(3): similar to gi2323287 in the genepept database release 114, Run with FASTXY 3.3t00, default parameters
agagatcctttccttgtattattttgatagcctctgacactaagatggccaccgccacaactacccttaaagagtgaggccagcctttcgctactacatcaatttccttacttaggtatgccactggttgtggggttgccccatgagtctgagtaaggactccaagagccatccttgctctctctgtgatgcataaagaaaagtttcatcctgtgggaaggcttaaggctggagcttgagtttgttccttccaatgcccagacttcagggttgattccctcctcaagtaggggacaacaaatgggtaactcgttccccatattcatgtagataataactccagctttggctactcctactggatctagtggagtcagcgtgatccgcttctcccactcacctagtccccacacgccctgagagctagtccctgtggtctgatgtccacccctcacttcttctgccctttccttatacttccctgctggagtgactggaagtggggatgctcttccctggacacaggggagaaggagggcccctggggttgtcacttcctctgcccttttgggtggggcaggaagggcacatttgatgttagcaattcagcgtaaaagtgaaaactaatttggcctcaagatttaagagtcatccaaacaacagttacagggctaatatctttaatctttacacatttgacaatatccaataaaaagaacaccaaactacatcaagacaaaggagcaacagacatgggcctgcagaggacaaaagagaaaacaggagcactcaataaccaggaactcagggactttgggaggccaaggtgggtggatcacatgagttcaggagtttgaggctagcctggccaacatggtgaaaccccatctctacaaaaaatataaaaattagccagtcgtggtgacacacacctataaatcccagctactcaggaggctggggcaggagaatcgcttgaacccaggaggtggaggctgcagt

SEQ ID NO: 79684 - DNA, 404 bp, Homo sapiens
  misc_feature (1)...(404): n = a,t,c or g
  sig_peptide (297)...(162): this location contains the signal peptide sequence, MKCFHCASALAFFLCLTLFSVSPTCHLSQVALNRNLSFYVCFNSP, Run with SignalP
  misc_feature (20)...(316): similar to gi466548 in the genepept database release 114, Run with FASTXY 3.3t00, default parameters
ncaggattagattttctttcttttccatcaacattagcagaagcaaaaccagcaacagcatcaacaaacattcactaaaaatctgtcatgtgaaggcctctatgaggtttaccagagatacaaagaaataaaaaggactgcctctgcacataatccagttggagagttaaaacacacataaaaggatagattacgattcagggcaacttgtgaaaggtggcaagtaggtgagacagagaacagagtgagacaaaggaagaaggcaagggcagaagcacagtgaaagcacttcatggaggaggcaggacctcaactatggtagagaagagaaagttctgcagtcaaatgcacagtggcagagatgataactgtagggcaaagatgagatcagtttaacagaggag

SEQ ID NO: 79685 - DNA, 408 bp, Homo sapiens
  sig_peptide (111)...(246): this location contains the signal peptide sequence, MIWDVHWSKKAIYELTLALLWPVVATVFISEPEIYTDCILTEKKT, Run with SignalP
  misc_feature (42)...(273): similar to gi2916732 in the genepept database release 114, Run with FASTXY 3.3t00, default parameters
cggacgcgtgggctgaaaactgtcaagagctgaagcttgggttttttttaattttccccaaaacatattttaaagcaaaagactaaagcatttatttttcctttgtgagaatgatttgggatgttcattggagcaaaaaggccatttatgaactgactttggctttgctttggcctgtcgtagccactgtgtttatttcagaacctgagatttacactgactgcatattaacagagaagaaaacctggagtcattggcattggaattttccagtacaattttccattatctgctcaacttaaattgtttcttttctagaaaaaaaatgtatttttagctttttcacttatgttcctccatagaagggctactactattttaaagacatattaccttgctcacaaactg

SEQ ID NO: 79686 - DNA, 219 bp, Homo sapiens
  sig_peptide (207)...(72): this location contains the signal peptide sequence, MKIALLLLILARCFTMESEVSVQVSEFSNHIGTSIFKLLVFWFNT, Run with SignalP
  misc_feature (9)...(216): similar to gi3845294 in the genepept database release 114, Run with FASTXY 3.3t00, default parameters
cggccgcgtcgacctcctgtcattttattggttattttaggagaataaagagaaacaatttcttagttgctgtgttgaaccagaagactaataacttaaaaattgatgtgccaatgtgattagaaaactcagatacttgcactgaaacttcactttccattgtgaaacatcttgccagaattaatagtaataatgctattttcatgaaacacaaatcag

SEQ ID NO: 79687 - DNA, 592 bp, Homo sapiens
  sig_peptide (50)...(185): this location contains the signal peptide sequence, MWTVLWHRFSMVLRLPEEASAQEGELSLSSPPSPEPDWTLISPQG, Run with SignalP
  misc_feature (331)...(48): similar to gi3789962 in the genepept database release 114, Run with FASTXY 3.3t00, default parameters
cactgagcaggggaaggctagcctaatcagggatatgtccagttcaaaaatgtggaccgttttgtggcaccgcttctccatggtcctgaggctccccgaggaggcatctgcacaggaaggggagctttcgctatccagtccaccaagccctgagccagactggacactgatttctccccagggcatggcagccctgctgagcctggccatggccacctttacccaggagccccagttatgcctgagctgcctgtcccagcatggaagtatcctcatgtccatcctgaagcatctgctttgccccagcttcctgaatcaactgcgccaggcgtgagtttgagctagaagagagccacagagtccgcaacggggagggagaaagatgaaggcaggaaatgaagttgctgacagattgagctgtacagcaagagagatgagatcagggttacgctggatacctaagtaatggctgcgactgtcgaaggggatttgagctgaggaatcgttggacggagggaggattgatttcggtactttgagcgcctacaagcctatttgacaagcctctcctaatgtctgatgtgtggagact

SEQ ID NO: 79688 - DNA, 408 bp, Homo sapiens
  sig_peptide (226)...(361): this location contains the signal peptide sequence, MILMLLLLIVDLVQLAGNAVISSGSWDSACTGTPSPSTPSTWPGP, Run with SignalP
  misc_feature (295)...(394): similar to gi4884480 in the genepept database release 114, Run with FASTXY 3.3t00, default parameters
cctaaatgacacaacacagaatagtgctctgaagtcacggaatcccagaaaggctctacccctttagcaaggggcagctctttatctttggacttgaagaaggaggaaaggggcaccagactagggtttctgtgcatggatccaaccatcccagccttgggtacagaactgacatcaatcaataggaccgaggagacccatcttcaacattgtggcatggagatcatgatcctcatgttgctgctcctcatcgttgacctggtccagctggcaggaaatgcagtcatttcctctggctcctgggattccgcatgcacaggaacaccttctccctctacaccctcaacctggccggggccgacttcttcctctgctcccagattttagaaattgtgaatttctaccatg

SEQ ID NO: 79689 - DNA, 327 bp, Homo sapiens
  sig_peptide (35)...(170): this location contains the signal peptide sequence, MLLIFTFDPSTSLCVLSFPIINSTGICFSGQELNVSPMPSNKVSD, Run with SignalP
  misc_feature (80)...(296): similar to gi1736413 in the genepept database release 114, Run with FASTXY 3.3t00, default parameters
gatttttatgcttagcaacctttgatttgtatatatgttgttaatattcactttcgatccttctacttctttatgtgttttgtctttccccatcattaattcaactggaatttgctttagtgggcaggaactaaatgtatctcctatgccttcaaataaagtatcagatggccagttagtactttatgcacaatcctttcttgcttttccattgatagggcatgtttctttatcatctattgacaaagacatatgatactttagatttttatactgtactctgtggggtgtttagtctaatttgtgctggctctgaattttctgagg

SEQ ID NO: 79690 - DNA, 339 bp, Homo sapiens
  misc_feature (1)...(339): n = a,t,c or g
  sig_peptide (9)...(144): this location contains the signal peptide sequence, MDHKSLWAGVEVLLLLQGGSAYKLVCYFTNWSQDRQEPGKFTPEN, Run with SignalP
  misc_feature (3)...(342): similar to gi1439566 in the genepept database release 114, Run with FASTXY 3.3t00, default parameters
caaccaccatggaccacaagtctctctgggcaggtgtagaggtcttgctgcttctccagggaggatctgcctacaaactggtttgctactttaccaactggtcccaggaccggcaggaaccaggaaaattcacccctgagaatatagaccccttcctatgctctcatctcatctattcattcgccagcatcgaaaacaacaaggttatcataaggactccagngttttttcctctaccactcggacaccgtctccaaaccataaatcccagactgtaaatactgttgtgcattggcggcgaccagaaagtgtccaaagagttccaaattaaggtggatt

SEQ ID NO: 79691 - DNA, 324 bp, Homo sapiens
  sig_peptide (116)...(251): this location contains the signal peptide sequence, MQCAICILLYLLNKKTVWRCSRIHHNNTVVLTRESSPFLTTCTLS, Run with SignalP
  misc_feature (1)...(325): similar to gi4490937 in the genepept database release 114, Run with FASTXY 3.3t00, default parameters
ctttttcctttctctaccactgatagtgcctatgaatggacaatgcccaaccaatactgcttacgtaatatgccattcttatcagattttgacgattttgactacttcttttgccatgcaatgtgctatttgcattctactttacttgttgaataagaaaactgtgtggcgttgttctagaatccatcataataatactgtggtgttgacacgggaaagcagtccatttcttacgacttgcacactgagcagtgtattgctgacaaaagcatagcggactgtgtggaagccctgctgggctgctatttaaccagctgtggggag

SEQ ID NO: 79692 - DNA, 372 bp, Homo sapiens
  misc_feature (1)...(372): n = a,t,c or g
  sig_peptide (173)...(308): this location contains the signal peptide sequence, MKRAQGIFLEPLFLTFLYIMDVHMPATFSHLTELPQYRDGTPASS, Run with SignalP
  misc_feature (42)...(330): similar to gi3695023 in the genepept database release 114, Run with FASTXY 3.3t00, default parameters
ggctcgagtgggagttgcctaggagtcatccaagaggggctgttgaggaggtggttggcctccacatctggagtgtgggagggagatctgggccaaggctctgcagtatctcaaaagttattaaccgatgccctgggagaggatgggatcatccagggaatgtgtacagactatgaagagggcccagggcatatttcttgagcccctctttctcacattcctttatatcatggacgtccacatgcctgccacattctcccatcttactgagctcccccagtacagggatggcacccctgcctccagcatcgggtggtggaaggccaccacagacaagtagtgcttgtcgagtgcttacacaaagcgctgttn

SEQ ID NO: 79693 - DNA, 354 bp, Homo sapiens
  sig_peptide (142)...(277): this location contains the signal peptide sequence, MIFYVILSSPSSRTFFKITLIMSLGLISKLLITSCTFDTVTFMML, Run with SignalP
  misc_feature (14)...(119): similar to gi1871540 in the genepept database release 114, Run with FASTXY 3.3t00, default parameters
ggcacgagctaggccgggcatggtggctcacacctgtaatcccagcacttagggaggccgaggtgggcggatcacgaggtcaggagatcgagaccatcctggccaacacggggtttcgccaggttgccgaggctgatgcccatgattttctatgtgatactgtcttctccgtcatcaagaacattttttaagattactcttattatgtctctgggattaatctccaagctgctgattacatcgtgcacgtttgatactgtcactttcatgatgttaaccaatatcacgaaaatgaaaatttcatcaggaaaagcaactcagtcccaagagtttttcagtgagctcattctttat

SEQ ID NO: 79694 - DNA, 434 bp, Homo sapiens
  sig_peptide (293)...(428): this location contains the signal peptide sequence, MLITELFITWFIYLLFDFKHLLLVDLHMLGLGNFNIQVGIPVAIV, Run with SignalP
  misc_feature (122)...(427): similar to gi1171579 in the genepept database release 114, Run with FASTXY 3.3t00, default parameters
acccgaaacattaatggcagggtcgcaccacgcgtccgtttgataattttcctagcagtgaatcaactatactcatttgaatctaaattaaattaaatttgagtaaattcagccatttctaaattcagtccatataaattcactttgggtaaaagaagacaaaattcctgaaaacagtagattaaaaaaataacattttaagagcaggtatgatctcaatgaatatagtgtggtaatttctgcctaatacctacccttttggaggaaggaaaggtaatcctgtttgtgtttaatgttaattactgaactctttataacttggtttatttatttattgtttgattttaagcatctgcttctggtggacttacatatgttgggtttgggaaatttcaacatacaggttggcattccagtggctatagttgtttctt

SEQ ID NO: 79695 - DNA, 380 bp, Homo sapiens
  sig_peptide (146)...(11): this location contains the signal peptide sequence, MSPFSKLFFWLYPGSLIPEALRVVMLVDTLRDPYPATSAGDIMGL, Run with SignalP
  misc_feature (37)...(363): similar to gi1263289 in the genepept database release 114, Run with FASTXY 3.3t00, default parameters
ctcagagccccattatgtccccagctgaggttgcagggtaggggtccctcagcgtgtccaccagcatcaccacacggagggcctcaggaataaggctcccaggatagagccaaaaaaacagcttagagaaagggctcatgagtggggacagggttggggagaaggtcatgtaggggtggcagtaggggtggtcattgtgcaggaagagttgagacaagtggttgtccatgttctcctcagacagaaaaggcttgcgcagaggctgcctggagttcaggccccaagtcacccccaagagggcccggggcaggccctgggcccctccctgggggccttgctgcaaggtcttttgcagtatcattggtttttggggtcgtgcg

SEQ ID NO: 79696 - DNA, 332 bp, Homo sapiens
  sig_peptide (40)...(175): this location contains the signal peptide sequence, MLLCTCHVPNFSLVVLIPYTAIEMNFHFFSCGRLSFTIVFMLPKV, Run with SignalP
  misc_feature (173)...(334): similar to gi4049758 in the genepept database release 114, Run with FASTXY 3.3t00, default parameters
gcacagagtgcctgtgatcccattaggaatccaagtccaatgctactgtgcacctgtcatgtgcccaacttttcattggtagtgcttattccttacacagctatagaaatgaatttccattttttttcctgtggcaggctctctttcacaattgtattcatgctacccaaggttatatgaactaacacgtgagtttaagatcctaaatgtgaataattgcaacaaactatgatttgcttttgaacagcaaaagttgaaaaatcacgaaccccagatgactaaccaaaacaatatgctgggcaggatgagacatcactgtctgcctcagacag

SEQ ID NO: 79697 - DNA, 331 bp, Homo sapiens
  sig_peptide (100)...(235): this location contains the signal peptide sequence, MPAKAWPIWILKAASFLIKLYIFARFSTIPSFLKKNLYASFTPSL, Run with SignalP
  misc_feature (130)...(269): similar to gi3258226 in the genepept database release 114, Run with FASTXY 3.3t00, default parameters
ccctcttcgacccacagctttaactggctggccaacaactcgaagtgacagacgagataagtctcttattccagagttcccaaaaactatcaaaacagcatgcctgctaaagcctggcctatatggattttaaaagcagcaagttttctcattaaattatacatttttgccaggttttcaacaatcccttcttttttaaaaaaaaatctctatgcttcattcaccccaagcctataacctcaggtcatcatcccctagctgtcaccaacactggtcctctgtgcccctcaatgaatcataatttgctgaactgtaccatgaagcttataat

SEQ ID NO: 79698 - DNA, 336 bp, Homo sapiens
  sig_peptide (297)...(162): this location contains the signal peptide sequence, MIELAWKFIMHINALLSFGTTSLKIKFAHVFSFLQLCIMNKITLI, Run with SignalP
  misc_feature (110)...(338): similar to gi5689465 in the genepept database release 114, Run with FASTXY 3.3t00, default parameters
agggcctaatgtgttttcagtatcggatgactttcaagagtataataagccagggaaaaaatggaaggttatgactcagatttttattaatcagctcacagtggttcacaaaggaccccagttctgtaaattcttcctggaagggaggtgtattaagggagatcagtgtaattttgttcatgatgcagagttgtagaaaagaaaagacatgtgcaaattttattttcaaggatgttgtgccaaaggaaagaagtgcatttatatgcataatgaatttccatgcaagttctatcatagtgcagcaaaatgttaccagggaggcttctgtgaattttc

SEQ ID NO: 79699 - DNA, 372 bp, Homo sapiens
  misc_feature (1)...(372): n = a,t,c or g
  sig_peptide (317)...(182): this location contains the signal peptide sequence, MYALLGVFCLAILVFLINCATFALKYRHKQVPLEGQASMTHSHDW, Run with SignalP
  misc_feature (20)...(368): similar to gi3924913 in the genepept database release 114, Run with FASTXY 3.3t00, default parameters
ncggagtcggctgacctgtgaatctggctctgcacgtgcttgtgggagccaccattgagcaggagatggttgctctcctcgcaggcccccggtccgcggtctatgatggtggtgtgctcgtcctggggcggcggcgcatcccccatgctctccaggagttcggcctcattgccaagccacacccagtcgtgagagtgggtcatggaggcctgaccttccaggggcacttgcttgtgcctgtacttcagggcaaaggtggcgcagttgatcaggaagacgaggatggccaggcagaacacccccaggagggcgtacatccctatctccagatcactcaggccccgcggagtctgcaccaggtcgttttcctcc

SEQ ID NO: 79700 - DNA, 384 bp, Homo sapiens
  misc_feature (1)...(384): n = a,t,c or g
  sig_peptide (97)...(232): this location contains the signal peptide sequence, MGMGTLIIMNVWVLFIPTRLRIDQQPVHIKPSMRVLDKWVSAFVH, Run with SignalP
  misc_feature (6)...(387): similar to gi4887229 in the genepept database release 114, Run with FASTXY 3.3t00, default parameters
ggaaaacacggccggagttaatcgatggccttttagcatcctagttccccaccaccaaggtagagatgactggtgcggctgacattttccaccgagatggggatgggcacattgattattatgaatgtgtgggtgctcttcatcccaacaaggctgcgtatcgaccaacaacccgtgcacattaaaccgagcatgagggtcctagacaagtgggtcagtgcctttgtgcacaaaggtttcacgtggggcacatcggagagaataaataccggttcttcctcggacatcactttggggattcttaacaaatgcggctgggccgtattctgcgcagcaccgtgatggttaccgttggtggcagacggatggccttgggacgatttn

SEQ ID NO: 79701 - DNA, 237 bp, Homo sapiens
  sig_peptide (70)...(205): this location contains the signal peptide sequence, MIIFYGFGVCVFMRVQPALYALWNIRITIFIVDFILFSHLCTYYW, Run with SignalP
  misc_feature (11)...(131): similar to gi2826432 in the genepept database release 114, Run with FASTXY 3.3t00, default parameters
gtcgacgcggccgcggttaaatttaggcattataatatcacaatctttgtttgaatttaattgttgcagatgattatattttatgggtttggtgtatgtgtttttatgagggtccagccagctttgtatgccctgtggaatatcaggataacaatatttattgtggattttattctgttctctcatttatgcacatattattggttagcgcatttaacagctgtgtcgacgctgccg

SEQ ID NO: 79702 - DNA, 358 bp, Homo sapiens
  sig_peptide (175)...(40): this location contains the signal peptide sequence, MELETFVRFLVVLLLKPKNKGKWQHIEMKKPQVCNTLKGRGPKFV, Run with SignalP
  misc_feature (57)...(346): similar to gi609646 in the genepept database release 114, Run with FASTXY 3.3t00, default parameters
tttctctcagacctttgattaaaattcaatttaggctcaaaacgaacttggggcctcttcctttcaatgtgttgcaaacttggggcttcttcatttcaatgtgttgccacttgcccttgtttttaggctttaacaataacaccacaaggaaacgcacaaatgtttccagctccatttctggaaaatttcagtgagtgtctaagatgccttctgtgtctgtgagcttacagaactttaaagaactctctaaagtattctgtggagacatatatatatatatatatatctctttagagagagacatatatgtaatatagatatggatctttatatatatctctctctccacagaaatagg

SEQ ID NO: 79703 - DNA, 637 bp, Homo sapiens
  sig_peptide (187)...(322): this location contains the signal peptide sequence, MWHYAFSLAFYFFGACLAFSHSGIIKDLIAHLHPFVSLSQISSHD, Run with SignalP
  misc_feature (135)...(337): similar to gi1574543 in the genepept database release 114, Run with FASTXY 3.3t00, default parameters
gaaacccgcggcgacccacgcgtgcgctgattgcaagctccatagtagagagcctttctctcatctctgtgtctttgtgcctagtcagtacctgacacaatacaggtaagcagtgaataaacatttaagtgaataatgaggaaaagaacctgagcgtctccattttaggggttgaaagattgtgcaatgtggcactacgctttctctctggctttctatttctttggagcatgtttagctttttcacattcaggaataatcaaggaccttattgctcatttgcatccctttgtatcactgtcccaaatatcttcacatgattattctttgccttctgtcatgatatcgtctttcaaagaaactcagctgtctcttaagtcctgtggcaatgaaagcagccccactgtatgcccccagccatctcttcactgttccaagctaatccccagcgttgcctagctactccaggcagcttagatactgcattgatgggcactgtgggaattatatatttatttcccacagaattattgagctcctgctgcgggtaaagttgtttatgttttcatgagaaatatagaaatgagtgtcacaaccactaaagaacttattcatttaactaaacaccacccattcc

SEQ ID NO: 79704 - DNA, 232 bp, Homo sapiens
  misc_feature (1)...(232): n = a,t,c or g
  sig_peptide (55)...(190): this location contains the signal peptide sequence, MNILIWGRLIPWFSVPAWLSVIPYDVLVSPRVHSPRVVLKLGTNP, Run with SignalP
  misc_feature (10)...(143): similar to gi2843079 in the genepept database release 114, Run with FASTXY 3.3t00, default parameters
ttcttctacacatggctttttgccatcagcatcagtgaagagtaagtaattttaatgaacattttgatttggggcagactgataccctggttttctgtcccagcctggctttctgtcataccttatgatgtgctggtctctcccagggttcatagtccacgtgtagtcctgaaacttggaaccaaccctgagctttgttcactttgggttggtggtggctcatgccataccn

SEQ ID NO: 79705 - DNA, 489 bp, Homo sapiens
  misc_feature (1)...(489): n = a,t,c or g
  sig_peptide (401)...(266): this location contains the signal peptide sequence, MSNFFLQRAILWSILPDTQCIPRFFHSDLWSHVPFLALGDLQELF, Run with SignalP
  misc_feature (53)...(374): similar to gi1574115 in the genepept database release 114, Run with FASTXY 3.3t00, default parameters
ctaacctgttgcgatattttaagaaaaattaacactaaggaaacagagttgagaatgtgtagatgccaaggctatcagaattcatggatcagagaataccagagaggagaaggctgcatggtgaagggctagttgcactgagaggagaggaatacactgagagagaactccagagatctgcagggttttccttttgagtcttcaacaaaggactcctccacacatgcatgtgagggaacaacccgtggtcagaaaaagaacaggtagaataattcctgaagatcacccaaggctagaaatggtacatgtgaccacaagtcagagtggaaaaaccttggaatacactgagtatcaggtagaatactccaaagtattgctctctgtaggaaaaaattagacatgaactaaaggctgttctggtcctaagcaagaaaggttaaaagaaagactcaaggcgaattgcnccgcnctggcgtagtgctatcgatg

SEQ ID NO: 79706 - DNA, 711 bp, Homo sapiens
  sig_peptide (65)...(200): this location contains the signal peptide sequence, MPHIQTLLRTLFASHLLVSLWQSEPMAKPRMRKYNTSSEYLSELD, Run with SignalP
  misc_feature (94)...(292): similar to gi4662644 in the genepept database release 114, Run with FASTXY 3.3t00, default parameters
atagtagagcgtgggggaattcgttctctcactgcccagtgagctagcccaggcaaggaaggacatgccccatatacaaacacttcttaggactctgtttgcatcacatttgctagtgtccctttggcaaagtgagcccatggctaagcccagaatgaggaagtacaatacatcctctgagtatctcagtgagctggatactgaggcttccagagtctcatagacacagaaagtcatgattccctgggggccataattgcaaagtttattaatatattatcctatatgtattaatcctgtaggtcctaaggaaataattcaaatttggggaagggaacaaagctctatgcataagattttcatcagtagcaaaatatgcaaaccactaagatgtccatccattggagaatggacacatggaagacggtgcatccatagaattggtggatgaagagccattgaaaatgatgtttgggggccaagcatggtggctcatgcctgtaattccagtgactcaggaagctgaggtgggaggattgcttgaggccaggagtttgagcctgggcaacacagtcagaccccatctctgcaaaaaaaaaatttcaaaattagctaggtggtgcgggcctatgcctgtagtcccatctacttgggaggctgaggagagaattgcttgaactcaggagctccaagttataggggccctgcgac

SEQ ID NO: 79707 - DNA, 751 bp, Homo sapiens
  sig_peptide (387)...(252): this location contains the signal peptide sequence, MGRNPVFTLLFMISQGFLGYNYIQLQVMVESTIREYFYKEKMAKL, Run with SignalP
  misc_feature (7)...(158): similar to gi5732618 in the genepept database release 114, Run with FASTXY 3.3t00, default parameters
aattttagaattccacataatcgcatttcaaaaagagaacactttaggccaactcagtcttacagccacaattctgatgacctttccagagagggaaatgctaggcccattttcttcactccaaaggacaatatgagtattcccctgtaagtgaaatgtttatttatgtataaatgggaaacttcttggagtatttttattaaggtgccttgttctgctccaactatttgtgtaaagtggctgctcaacttggccattttctctttgtaaaaatattccctaattgttgactctaccatcacctgaagttggatgtagttatatcctaggaatccttgactaatcatgaatagcagagtaaatactgggttcctccccattaagtgagaagcatttgtgaagggcagtacagtgcctataaacatagtaggcattcaccgaatactggttgctttacagctgtgaagtttactagttgaaggttgcttgccccaggctttaaagaagttaatttgtgctgggtaccgctgggggccctatttatggggcatcaattacccttcattaatacttcctttggcagccgcataaaccacccaaccactgggactgtccccatactttaccccacttcttaaaaaacattatcgggcgccggcttctgtgtaaaccgggcggctgtgcccgggctcgggcccagaaacatccctccacacccccttcttttgctgcccttggcgccaggataacg

SEQ ID NO: 79708 - DNA, 450 bp, Homo sapiens
  sig_peptide (414)...(279): this location contains the signal peptide sequence, MVCTLPVLLLKVWCLNKTPTTLDMPRAGITQYTWLRPDENLPRSG, Run with SignalP
  misc_feature (4)...(208): similar to gi4185890 in the genepept database release 114, Run with FASTXY 3.3t00, default parameters
caggaaagaaactaggataggggaggcaagagcccttctccactctgcccgggtcaggccaccctgggagcactatgtgctgtacctggcctggcagagctgagcactggtgatcacagcccaggaggcagggtcccagatgtgagcaaggcacctgccccagggatgccagagtcttctggcaaagccagaaatctgagaaatctgaaatcggagggccatggggagccagtaagcacagcaggttgtcaagtgttggggttgggggccttatccagccactcctgggaaggttttcatctggacggagccatgtgtactgggtgatgcctgctctgggcatgtcaagagtggtgggtgttttgttcaggcaccacaccttaagaaggagcacaggcaaagtgcagaccattcagcggggaattccaccacacggatagtggttcgata

SEQ ID NO: 79709 - DNA, 779 bp, Homo sapiens
  sig_peptide (58)...(193): this location contains the signal peptide sequence, MKWKTGVAIFVVVVVYLVTGGLVFRALEQPFESSQKNTIALEKAE, Run with SignalP
  misc_feature (55)...(762): similar to gi4584799 in the genepept database release 114, Run with FASTXY 3.3t00, default parameters
ggaattccagtggtagccaggatggaaggcacctcccaagggggcttgcagaccgtcatgaagtggaagacgggggttgccatctttgtggttgtggtggtctaccttgtcactggcggtcttgtcttccgggcattggagcagccctttgagagcagccagaagaataccatcgccttggagaaggcggaattcctgcgggatcatgtctgtgtgagcccccaggagctggagacgttgatccagcatgctcttgatgctgacaatgcgggagtcagtccaataggaaactcttccaacaacagcagccactgggacctcggcagtgcctttttctttgctggaactgtcattacgaccatagggtatgggaatattgctccgagcactgaaggaggcaaaatcttttgtattttatatgccatctttggatttccactctttggtttcttattggctggaattgaagaccaacttggaaccatctttgggaaaagcattgcaagagtggagaaggtcttttgaaaaaagcaagtgagtcagaccaagattcgggtcatctcaaccatcctgttcatcttggccggctgcattgtgtttgtgacgatccctgctgtcatctataagtacttcgagggctggacggctttggagtccatttactttgtggtggtcactccgcccacggtgggctttggtgattttgtggcagggaaaaccgctggcatcaattatcgagaggtgtattcgcccgctgtggggtctccctaattccagac

SEQ ID NO: 79710 - DNA, 404 bp, Homo sapiens
  sig_peptide (66)...(201): this location contains the signal peptide sequence, MSYVVAGFHFFLTTAFCYYRYSTGIFYLVLINITNQISIIWKILL, Run with SignalP
  misc_feature (60)...(254): similar to gi1123105 in the genepept database release 114, Run with FASTXY 3.3t00, default parameters
ccctttgagaatctgcaggactcttcaaccttgtacaatataagcccagactactctgtatcaaaatgagctatgtcgtcgctggcttccatttctttcttactactgccttctgctactacagatattcaacaggtattttttatttggtgcttattaatataacaaatcagatctccataatttggaagatactgcttagtcattaatttcaatagtttctcatgctaaactgtgttagattgagttttaactgcatttctcttaaattggaagagataggactaggattgcccaaaaaccaacttcgatgtgatacttgggcttcttactcataatcctctctttcattagctaacatggcaagtgatgatgtatggaaactcaattacagaagtcacatc

SEQ ID NO: 79711 - DNA, 736 bp, Homo sapiens
  sig_peptide (266)...(401): this location contains the signal peptide sequence, MEFSYFCLIFFQALCCIRGFFAFCINSVCSHGDLTFLNPPLQFLW, Run with SignalP
  misc_feature (196)...(90): similar to gi1799542 in the genepept database release 114, Run with FASTXY 3.3t00, default parameters
cgtcgtggaattcttggattcctctccagtagagagaatgagtagttatttttgacatatctacagtagcatttagaacttattcataaaaacacatttttagtgaagcctcatttaactgaaatcactttatcaaagacacactgatgtgccctgtagacatcattaaatggactagctcttctcagctttgcaaagtcaggaggttgaaacccctctagaaatcttaattctcctcctttaaataatttaaagaacctcctaaatggaattctcttatttttgcttgattttttttcaagctttatgttgcataagagggttttttgcattttgcataaattctgtgtgcagtcatggggatctcacatttttaaaccctcccctgcagtttctgtggctcagctcttctggccaattgcctaacctgctggagttctaggggaggagaaaagattgagagaagtggtgtctcctcctggtgcctccctctcgcccctgaaattcagtccagccaattcagtgatggggcttcccagggcagaagagtggagatccctactctgttaaaagaaatgtggcaagaaccctaaatagtcaacctgtgtttgaatatatacttcattgtttaaggacaacatacaagtattttgctcttccacacaaaattacaaaatccagccttctaaagcctctgaatgcaattacatgtatttcagaacattctaaagaagca

SEQ ID NO: 79712 - DNA, 372 bp, Homo sapiens
  sig_peptide (35)...(170): this location contains the signal peptide sequence, MALALAAYVCGWVVDRETWPVPMPCNKGGRACNLEMGMEWLNLHC, Run with SignalP
  misc_feature (152)...(14): similar to gi4033606 in the genepept database release 114, Run with FASTXY 3.3t00, default parameters
cgacgctaggaactgggcattggagatcagaggcatggcactggctttggctgcctatgtatgtggctgggtggtggacagggaaacatggcctgtgccgatgccctgtaataaaggaggtagggcttgtaacctggagatgggcatggagtggctgaatctccactgcgaggtcagtaaatggcagcagcctcccagtggggctctttgctgctctcttgctcccctgcaatccattttcttcccagcagccaaagtaatgtttaaaaatggcagttggactgtgctactcccatgctcagaattccccattggcttcccgtcacacttggaataaattcccaactacttaccttgcttcctccccatcat

SEQ ID NO: 79713 - DNA, 567 bp, Homo sapiens
  sig_peptide (31)...(166): this location contains the signal peptide sequence, MRILSLSSFTDYNVVKNRLHVCILTSFCCGLLALFLVLAVQGYLA, Run with SignalP
  misc_feature (141)...(426): similar to gi5923869 in the genepept database release 114, Run with FASTXY 3.3t00, default parameters
ttagttttgtttcagccagtaagtaccctaatgagaatattgtcgttatcttcatttactgattacaatgtagttaagaatcgcttgcatgtgtgtattcttaccagtttctgttgcggcctccttgcactattcttagttcttgctgtgcaaggatacctggcacccctttgtgaagtcatggacattaaatatgttgggccccacaggaaccaatttgctcagagcacaatggctgcctgtgcaacagaccccacagtgcaggcctcaacaagaccatgtctgggtctggtctggctgcacgaaattcacttctataggcagctgtgaccgtgactctggcccctggaaccagaccagccactcaagaatgcaaaagtccttgtgtagacatggagtctgcattctctcaagaaagtgcagataatgatcctggacacaaggtcagactggtgactctttcccaagatggggtgtgtaccaccaaaagctggcagcaggaccaggctgtcatcaccaagcaccctttctcccctgctctgcccctccttgcttacgccctactat

SEQ ID NO: 79714 - DNA, 432 bp, Homo sapiens
  sig_peptide (424)...(289): this location contains the signal peptide sequence, MVFLLATSGFCASGCRYLSDAVDTEAVATSDREGCFPTQSQTCQW, Run with SignalP
  misc_feature (34)...(247): similar to gi2961284 in the genepept database release 114, Run with FASTXY 3.3t00, default parameters
ctgtggtggaattcatataatacgcttcaactttcatgccaaattggagacaagcactctttcaaccagaagtactgttcccattgctggaatggataccacactgcttacactaattatggaggttacaacaatagctttgttatggatgaagctgaaattaccttattggcacataggctccttattctgattcctccctttctcctactgatctagttatttgaaggactaggtccttttggatccttctgtagttagcccttcccttcagactgcttctggtatccattgacaagtctgactctgggtaggaaagcacccttctctgtcactggtagctacagcctcagtatcaacagcatctgacaagtatctacaaccagaagcacagaaacctgatgtggcaaggagaaaaaccattggactttt

SEQ ID NO: 79715 - DNA, 687 bp, Homo sapiens
  sig_peptide (472)...(337): this location contains the signal peptide sequence, MIIAIGGVIVASGLVFIVLLMIRYKVYGDGDSRRVKGSRALPRVR, Run with SignalP
  misc_feature (59)...(650): similar to gi310200 in the genepept database release 114, Run with FASTXY 3.3t00, default parameters
ccaggaactacagctatagtagggggcgcctaggttggtggctccagggcgccggatcggctcctttgagggcccaccgcggcccgagactcctccccggaagtttcctcggatggcagcaggcacagcgaggtggccgagccgcccagagaacgtccaaggcccacctccggctccgcggatgccgtctcggcctccatggccttggcctcgacggcgcgggcgggggcagcctgggactccacctcgcgcagcgcctagtagtggtcctgggccggcagggccggggcctgttccgcgcctgtgcctgcgccgttggtctgcgagcacacgtgcctgacccgcgggagcgccctggagcccttgacgcggcggctgtccccgtcgccatacaccttatagcggatcatgagcagaacgatgaagacgaggcccgaggcgacgatgacgcccccgatggcgatgatcatggtgccgcccaagaaatgggccctcagcgggcggcagggcgccggatccccagcggtggtgaactgtacacagcccaccactcgcgttgccggcagcgctgtggccccgtcgtcgtagaccgccagcacgcacaagtcgtaggcacggcccgccgccaggtcattcaccagaaaggtctgactggtggacgggatcatcctgtagacgagggagtct

SEQ ID NO: 79716 - DNA, 394 bp, Homo sapiens
  sig_peptide (16)...(151): this location contains the signal peptide sequence, MILCPPCSFKQFIVFIICLILERIHIYYRKLLNVVKKKKKPAEIP, Run with SignalP
  misc_feature (154)...(383): similar to gi5545321 in the genepept database release 114, Run with FASTXY 3.3t00, default parameters
aaacatatatagtacatgattttatgtcccccatgttcatttaaacaatttatagtgtttattatttgtctgattttggaaagaatacatatttactatagaaaacttttaaatgtagtaaaaaagaagaaaaagcctgctgaaattccctcactcggaagtacttattgtaaacagtctcttttgtgtatgtttgtttgtgtgtattactaaattgtatgtattttgtatatttaattttatatcctcttttattcactcaaaattatacctttagaattttctcatataattaaataacttttaatttataaacttgtgaaaaaatagctttataattttttattttggaaaaataattatttattgtccaagtattaccataaaaatactt

SEQ ID NO: 79717 - DNA, 1302 bp, Homo sapiens
  sig_peptide (182)...(317): this location contains the signal peptide sequence, MCVVIAVLTFAISASTVFIALKVCVAWAAAASRCLGGSLLNLSAV, Run with SignalP
  misc_feature (8)...(1184): similar to gi3882331 in the genepept database release 114, Run with FASTXY 3.3t00, default parameters
tttcgtctaccacctgagccggcagagcagcgaccccaccgtgctctggtctctgatccggagcaagctgttccctgagctggaggagcgcagcttggagacagcccgggccgagcccccggaccccttgccggacaagatgcgccagtcggtgcgtgaggtcttgcactccgacctggtgatgtgtgtggtgatcgccgtgctcaccttcgccatcagcgccagcaccgtctttattgccctgaaggtttgtgtggcatgggccgctgctgcctctcgctgtcttggcgggagcctgctcaatctgagtgccgtgggcagcccctccccggcctgtgccaggtggccctctgtggtcccttggcctgctcccatcagctgagtctctggcctctccctcctgcagtcggtgctgggtttcgtgttgtacgcactggctggggccgtgggcttcttcacacattacctgctgccacaactccgcaaacagctgccctggttctgcctgtcacagcccgtgctgaagccgctggagtacagccagtatgaagtgcgcggtgccgcccaggtgatgtggtttgagaagctgtatgctggcctgcagtgcgtagagaagtacctcatctaccccgccgtggtgctcaacgccctcacggtggacgcccacacagtcgtcagccacccggacaagtactgcttctactgccgggcgctgctgatgaccgtggctgggctgaagctgctgcgctcagccttctgctgccccccacagcagtacctgacgttggccttcaccgtcctgctcttccactttgactacccgcgcctctcccagggctttctgcttgactacttcctcatgtccctgctttgcagcaagctgtgggacttgctgtacaagctgcgtttcgtgctgacctacatcgcgccctggcagatcacctggggctcggctttccacgcttttgcccagccgtttgccgtgccacactcggccatgctgttcgtccaggccctgctctcggggctcttctccacgcctctcaacccactgctaggcagtgccgtcttcatcatgtcctacgctcggcccctcaagttctgggagcgcgactacaacactaaacgtgtggatcattccaacacccgcctggtcacacagctggacaggaaccctggcgctgatgacaacaacctcaactccatcttctatgagcacttgacacgttcgctgcagcacacactgtgtggggacctggtgctgggccgctggggcaactatggccctggtgactgcttcgt

SEQ ID NO: 79718 - DNA, 410 bp, Homo sapiens
  sig_peptide (33)...(168): this location contains the signal peptide sequence, MSLPPSLACVGRACCLLPLGRQRPGGCGALARVTRSGCGRQGGCD, Run with SignalP
  misc_feature (26)...(397): similar to gi170743 in the genepept database release 114, Run with FASTXY 3.3t00, default parameters
tttcgtctccccagggacagagggagggcagcatgagcctacctcccagcctggcgtgcgtgggacgggcctgctgcctactgcctctggggaggcagaggcctggtgggtgtggagccctggccagggtcaccaggagtgggtgtgggcgacagggaggctgtgatgaaagcagacctggagaggcggcaggccgggtcccaaatgccaggctgggcaacagtgggggcctgaaggggctgggagccagggcgagggtaggacagacatgcacagccctgggagggaaagtagcggtgatagtatgcagccacccaaggcagtacctgtgacagatggcgctgttcccaccgtccctcaatgcatctgcattccacctgcctgggttccacccgtgtgctcctcactgt

SEQ ID NO: 79719 - DNA, 430 bp, Homo sapiens
  sig_peptide (280)...(415): this location contains the signal peptide sequence, MHLIGSATLARSTINLPSTLIIVTMLILLTILEIAGDLIQAYVFT, Run with SignalP
  misc_feature (1)...(431): similar to gi1262582 in the genepept database release 114, Run with FASTXY 3.3t00, default parameters
tttattgccacaactaacctactaggactcctgcctaagtcatttacaccaaccacccaactatatataaacctagccatgggcatccacttatgagcgggcgcagcgattataggctttcgctctaagactaaaaatgccctagcccacttcttaccacaaggcacacctacaccccttatccccatactagttattatggaaactatcagcctactcattcaaccaataggcgtgggcgtacgcctaaccgataacattactgcaggccacctactcatgcacctaattggaagcgccaccctagcaagatcaaccattaaccttccctctacacttatcatcgtcacaatgctaattctactgactatcctagaaatcgctggcgacttaatccaagcctacgttttcacacttgtaggaagcctct

SEQ ID NO: 79720 - DNA, 390 bp, Homo sapiens
  misc_feature (1)...(390): n = a,t,c or g
  sig_peptide (275)...(140): this location contains the signal peptide sequence, MLSSVFLDLPVLLLGGFQDVITVAPLAGLVPGPHQSTLCCDPTSG, Run with SignalP
  misc_feature (134)...(296): similar to gi9451 in the genepept database release 114, Run with FASTXY 3.3t00, default parameters
tggaacactcatttcccttactggaaaacaggctagatggggactgctgccccagggcttggctggtggtcggcgacctagagcacgcagtaggcactccatcagcgtgtgttctctggcatgccgcctgtttcctggaggccagaggtcgggtcgcagcacagggtgctctggtgaggcccgggcaccaggcctgccagtggggccacagtgatgacatcctggaagcctccaaggaggagcactggcaggtccagaaaaactgagctcagcatttaggcccaaaccaccaggtggggggtgggggtctgcagccgnggggtccctctccgtttctggctctggccctgggaaagtcacaacctctcaggggctcagtcagccccgttg

SEQ ID NO: 79721 - DNA, 409 bp, Homo sapiens
  sig_peptide (321)...(186): this location contains the signal peptide sequence, MSSTAAFYLLSTLGGYLGTSFLLLKYPTLLHQRKKQRFLSKHISH, Run with SignalP
  misc_feature (5)...(285): similar to gi5911953 in the genepept database release 114, Run with FASTXY 3.3t00, default parameters
ccctcccctcaggagactttcccttcacacagccttcacctccggaagagccctcaattcacacaaccccattcttcctcaaactctcagggattggcacccggctgccttttgcggagccgcaaaggaccctcagcctcccccacctccgtcatcgggttctggggacccctctcacctccgcggtgagagatgtgtttactgaggaatcgctgcttctttctctggtgcagcaaggtcgggtatttaagcaacaagaatgaggtccccaagtatcctcctagcgtagagagaaggtaaaaagccgcagtggacgacatctcagtcaccgtgtgggaagtctcccacctccgggccctctgaactccgctgcggcagtagcaacgacggcggcggcggcggcacgaaa

SEQ ID NO: 79722 - DNA, 953 bp, Homo sapiens
  sig_peptide (477)...(612): this location contains the signal peptide sequence, MFLHSVNLWNLAFYVFMVFLATLGLWDVFFGFEENKCSMSYMFEY, Run with SignalP
  misc_feature (595)...(356): similar to gi52878 in the genepept database release 114, Run with FASTXY 3.3t00, default parameters
ttcgttctattggctccattgcacttagaaaagcagaggacattgacttcaagtaccactttgacttctttagtgtgaacttcaatgaagaactggtggctttgtatggtggaagtcttcagaagcagaccaagtttgtacatgaatgtattaaaacaattctcaaactctataagcccagcccaccctgctttctccctctttctctttcccgtagatccgcgctcgctgcaacacctactcctccctcggctctgggagtcgccaggccagaggcgccgcggacctggtgcgcgcagcgcactgcgcggctggcgaacgggcaggccgggcatcagcgcaggcgcgcgcggctggggctcggctccgggggtggcggtcggacagtgtctagcacgctcagtccgggcttggggccccgcggcggagaaggaggtagagggggcggcggcggcggcggcggtggtggcggcaccatgtttcttcactcagttaatctctggaacctggcgttttatgtcttcatggtctttctggcaaccctggggctgtgggatgtcttcttcggcttcgaggagaataagtgcagtatgagctacatgtttgagtacccggagtatcagaaaatagaacttccaaagaaactggcaaaacgctatcccgcatatgagttgtatctttatggagagggatcctatgctgaagaacacaaaattctccctttgacgggtattccagttctctttcttccaggtaatgctggaagttataagcaagttcgttctattggctccattgcacttagaaaagcagaggacattgacttcaagtaccactttgacttctttagtgtgaacttcaatgaagaactggtggctttgtatggtggaagtcttcagaagcagaccaagtttgtacatgaatgtattaaaacaattctcaaactctataag

SEQ ID NO: 79723 - DNA, 407 bp, Homo sapiens
  sig_peptide (316)...(181): this location contains the signal peptide sequence, MWRRFLSFFQCLVKNYNVCKCSVMLRFSWLDSTCQTKLPLGCNEF, Run with SignalP
  misc_feature (95)...(307): similar to gi841208 in the genepept database release 114, Run with FASTXY 3.3t00, default parameters
caagagaaaacattagcgcaaacactatgggatgagctcaagcccctgagatctagattagaggactggttaatagcctgggagataacactcagtcaacaaacaataatgtagtcattcctcttcttggctatctcccttcccttcacctacctgtagtttaataggtgatcgggggcccaaaactcattacatccaagaggaagctttgtttggcaggtgctatctagccaagaaaatctcagcatcactgaacatttacatacattgtaatttttcactaagcattggaaaaaagaaagaaaccgtctccacatgggggtcgccctttcattcaaggcgtttttactcaggctcaaaacaggtctgtcttgtagataacaaaagcttttactgttttagagaca

SEQ ID NO: 79724 - DNA, 396 bp, Homo sapiens
  sig_peptide (125)...(260): this location contains the signal peptide sequence, MRQWGQHVWWTFGWREFGALWRTQQGVVCLGHRAGGEGQTHHPTL, Run with SignalP
  misc_feature (10)...(247): similar to gi4205998 in the genepept database release 114, Run with FASTXY 3.3t00, default parameters
cagcttgctaatcagataatcacagttacgtacacgtcactccaaactgagagatgtttcccaaaggaagggaacacaatctgaagtcagagaaccgttcctgtggaagtgacgtgtttacagcatgagacagtggggacagcatgtgtggtggacctttggctggagggaatttggagcactttggagaactcagcaaggagttgtgtgtcttgggcacagagctggaggggagggacagacgcaccatccaaccttgcagcctttgttagatgttactgtctttattctgagaaaagtgtggaagagggggtggtacaacatttgaccatggaacctcataatcacattgccttttgggatcatactctgcccagtgaagaatagactcacggg

SEQ ID NO: 79725 - DNA, 396 bp, Homo sapiens
  sig_peptide (30)...(165): this location contains the signal peptide sequence, MNKPFINSASIYCLYILSAITLELWALVLVSSVVASLGPFYGFSW, Run with SignalP
  misc_feature (232)...(328): similar to gi4128133 in the genepept database release 114, Run with FASTXY 3.3t00, default parameters
ctcaggaatgcatttctcagtttattcccatgaacaagccatttattaattcagcaagcatttactgcttatatatactatctgctattactcttgaactgtgggctttagtccttgtctccagtgttgttgccagtctaggccctttttatggcttttcttggatttttaaattagaagataaaccaagtgctcctggactaccccagtaatggccatgaagtcctaccaccggtgattctccagaagcattctagacatagcttcccttaccaaattcatactgcctttctctaaacaagtttgtgattgttcaaatgctcactgggcctccttttactttatactccgcggacttaactgattgctgagggatgtaacaggacttggatggtt

SEQ ID NO: 79726 - DNA, 689 bp, Homo sapiens
  sig_peptide (313)...(448): this location contains the signal peptide sequence, MKLYKWSFSLLILLSLLLINFSYLDLLIIQHFQSDSMGLFGLPQG, Run with SignalP
  misc_feature (187)...(444): similar to gi4378940 in the genepept database release 114, Run with FASTXY 3.3t00, default parameters
gtgtggtggaattcgtgatatggatgcttcatcaaaatgtaattatatggaaatagctcaaccatgtgatcttagaagaaataacacccctgggtgggagttgtggtgagggtaaattattatcctggagtcacctcgtgattgcacagtaatttactctgtctaccatagcccattcctactggattcagtttctgtagtggttggttcccagtaagcagttagggatgtgattttagaattctgttggcctctattgcagtgcaccttacaattagaggtgtcatgcttagttcgtatggaaaccagaccatgaaattatataagtggagtttctctctccttattttactttccctccttctgattaattttagttatttagatctacttataatacagcattttcaatctgattccatgggtctgtttggtcttccccaaggaaatcatatggtaggtcacctaggcttaccatggcccgggccagcaggattcaatcaggtttactggatgttccccttcatccagcagcttaatctcctgagaacgcagttttttcagacaccccgctttaagaacaccctagcccctggaaagtttacctccgaaggccctagcccgagggaacggaccgccccatctactggccctaggcccgctcacactcccaacgtcacaatgggccg

SEQ ID NO: 79727 - DNA, 285 bp, Homo sapiens
  sig_peptide (34)...(169): this location contains the signal peptide sequence, MYFFLFFLFAEMGLYCNHPSFFYFLHTIPSYGYTVIYLVSSLCFR, Run with SignalP
  misc_feature (35)...(215): similar to gi2781421 in the genepept database release 114, Run with FASTXY 3.3t00, default parameters
attttttgcgcgtattaacaagtaaatgttcacatgtatttcttcctattttttctttttgctgaaatgggactttattgtaatcacccttcctttttttattttctgcacactattccatcgtatggatataccgtaatctacctagtcagttctttatgttttagggcatttgaccaatgcagttttaggtgtgtaggtaaaatggtggaggggagcacagaatgctgtgggaacctgcaggagaacccttccagcctgtgaaggttgaggaaggtttcttga

SEQ ID NO: 79728 - DNA, 390 bp, Homo sapiens
  misc_feature (1)...(390): n = a,t,c or g
  sig_peptide (269)...(134): this location contains the signal peptide sequence, MFSFSMFMMLFFKTFNSLVQVEFILIVVGIEPFPQIVKQSQSLIL, Run with SignalP
  misc_feature (196)...(385): similar to gi2197085 in the genepept database release 114, Run with FASTXY 3.3t00, default parameters
cagtcgtgggaacagtatggagccagcagcagaagccactcacgaacccaatggaggagaacaactcagaanacagacccaagtcaatctaaggtttaactggagaaatgttaaacatttagggaaaatgtttttaaaatcagtgattgggactgcttaacaatttgagggaaaggttcaattcctaccacaatcaaaataaattccacctggactaaagaattaaatgttttaaaaaataacatcataaacatactgaaagaaaacataagtatatattgacataattttgggataggagactattgccagacataatactaaaagcagaagccataggggaaaaaaatcgataaacacgacttcataaaacttaaatatttctgaaag

SEQ ID NO: 79729 - DNA, 925 bp, Homo sapiens
  sig_peptide (42)...(177): this location contains the signal peptide sequence, MGCDGRVSGLLRRNLQPTLTYWSVFFSFGLCIAFLGPTLLDLRCQ, Run with SignalP
  misc_feature (4)...(680): similar to gi5420389 in the genepept database release 114, Run with FASTXY 3.3t00, default parameters
ggctcgccgggaccagatccgcgagcccgtcagcctgcgccatgggctgcgacggccgcgtgtcggggctgctccgccgcaacctgcagcccacgctcacctactggagcgtcttcttcagcttcggcctgtgcatcgccttcctggggcccacgctgctggacctgcgctgtcagacgcacagctcgctgccccagatctcctgggtcttcttctcgcagcagctctgcctcctgctgggcagcgccctcgggggcgtcttcaaaaggaccctggcccagtcactatgggccctgttcacctcctctctggccatctccctggtgtttgccgtcatccccttctgccgcgacgtgaaggtgctggcctcagtcatggcgctggcgggcttggccatgggctgcatcgacaccgtggccaacatgcagctggtaaggatgtaccagaaggactcggccgtcttcctccaggtgctccatttcttcgtgggctttggtgctctgctgagcccccttattgctgaccctttcctgtctgaggccaactgcttgcctgccaatagcacgggccaacaccacctcccgagggccacctgttccatgtctccagggtgctggggccagcaccacgtagatgcccaggccttggtccaaccagacgttcccaaggctgactcccaaggaccgggcagggaacccgaggggcctatgccttctggataatggcccttattaatctttccaaggcccatggctgggcttgaagctgctggccccagggaacggcttgttggaactgctcgtcccccacagggggccccccgcttcctggactgggaaagaaacttgcctttgaaaacaccagccctcttggaagaagaagacaaacctccctcaaaaggcctatagtttatactaacgcctac

SEQ ID NO: 79730 - DNA, 833 bp, Homo sapiens
  sig_peptide (384)...(519): this location contains the signal peptide sequence, MVSKFLLSHLVLAVPLRVLLVLWALCVGLSRVMIGRHHVTDVLSG, Run with SignalP
  misc_feature (465)...(151): similar to gi2246475 in the genepept database release 114, Run with FASTXY 3.3t00, default parameters
aaacagcgtggtcagggaaggcttctccgctaaaggaagtagctacaggaaggcaggatgtgccgggcaggggagacagcaaaggcaacagcctgagaggggaccctgcctgggggtcagtgtggctgagtggcctgagtgaggagcagaaaggggaggcgaggtggaaatgtggggggccagggcctgggcctggctggtggccctgatggcccaggggcctctgtctccccccaacagccctgctcctggacatcatgacggtggccggcgtgcagaagctcatcaagcggcgcggcccgtacgagatgagccccagcctcctggactacctcaccatggacatctacgccttcccggccgggcacgccagccgggccgtcatggtgtccaagttcttactcagccacctggtgctggcggtgcccctgcgcgtgctgctggtgctctgggccctctgcgtgggcctgtcccgcgtgatgatcggccgccaccacgtcacggacgtcctctccggctttgtcatcggctacctccagttccgtatgatggagaaggtcagcatgcagtacaaaacttgccgaatgcttatttttgtctggcgaagagcgcgtcggcccacacatacctttgagggcaggctggtctctaaaaaggggcaagacctggccaggtggctcagcctgtaatccaaacctttcagaggcccagtgggagcataatttaacctccaatttgatacaagcttggaacatggcgtcctcttttttcagacttttgaaagacacgttatctgcctttgctgcctctctatgagtttctcagggccgccc

SEQ ID NO: 79731 - DNA, 642 bp, Homo sapiens
  sig_peptide (37)...(172): this location contains the signal peptide sequence, MMALFTGKLLQVVSKVLWLYQTNFSLHTHYSFNRGQIFKRKTVQN, Run with SignalP
  misc_feature (6)...(86): similar to gi1657835 in the genepept database release 114, Run with FASTXY 3.3t00, default parameters
cggacgcgtgggtgagtgaagaaaggactctgttatatgatggccttgtttactggaaaactgctacaggtcgtttcaaaggtactgtggctctaccagaccaatttctcccttcatacacattattcatttaacagaggacagattttcaaaagaaaaacagttcagaattgcaggcacacatgcgcaaaccctgggtcagttgaaagattgatttgggaatttcaataggcaaatttggccaatgatacaaatctttggtgggagtttgctgcccaagctaaaacctttatacatgttttatgaatttgcaagtttgtgatgtctgaaatcaaatgaactgagagttctgctaattgttgacacagaaaaattattctgggaactggggtgtgctgaaagcaaggcagtacacctacacacctagggtctgtcgcatgtcaacaccggccagggctgccagaccccgccggcgcgaaataaaaagaactctgaacgtcatctttggtactgactaatagaatatatccacacacctggtgacgtggtttaagcttttccttaagggtactgattggtaactggcatgaacttgactctgctcaggaggctaaaacccacacccccatcttttacgggcct

SEQ ID NO: 79732 - DNA, 1148 bp, Homo sapiens
  sig_peptide (274)...(409): this location contains the signal peptide sequence, MMLVLPRLPEWWLVSVACMRTGTVMIPGVTQLTEKDLKYRLQASR, Run with SignalP
  misc_feature (118)...(585): similar to gi663209 in the genepept database release 114, Run with FASTXY 3.3t00, default parameters
aagttccctgagggaggctgttttctgagggagttgagtgtttacagccactcagccctgctctgctcagctgaagcagaaaacagagaccttttgcattactttggatcaagagcaagacaggaggctggacaccgccccccaaatcctgccttctggtgggtcaatggcacaggagcagagatcaagtggagctttgaggagctggggaagcagtccaggaaggcagccaatgtgctggggggtgcatgcggcctgcagcctggggacagaatgatgctggtactcccacggctcccggagtggtggctggtcagtgtggcttgcatgcggacagggactgtgatgattccgggtgtgactcagctgacagagaaggacctcaagtaccggctgcaggcgtccagggccaagtccattatcaccagtgactccctagctccaagggtggatgccatcagtgccgaatgcccctccctccagaccaagctgctggtgtcagacagcagtcggccaggctggttgaacttcagggaactcctccggtgaattggggctctccagaacagcagaaaaatgaagtcatttcccctttaagcaacaaaagatgaaatgcattgctgattccacacatagagagcgaatcagagaggagcactcccattggcagccaggctgacctgagcataatcctggtccctaccttaatgttcaaggtccctcattcagtcagtgctggatttgtcagcagcttttctgtgcttcatttgcttctataatgcggcggtagttattagagctaccattcagagtacatgaaataaccaatatggtgcatttagcacatagcaggtggtcagttaataataaactagtggccatgtattgggtacttagtgtatcgctagatactgggctatgtaagccttcaccttcattcattcatgcagcgaagatttaatgaacatctatttcacgacaagcattgtgtttggtgttcagaacaccataatggatcaaacatcaccttatttaatccctgaacaggacattgtgatgggccctttaacccagttttacagatgaggaaactgagacttggaaaactaaagtgacttgcccaaggtgcttaaaaggtatcaagtcag

SEQ ID NO: 79733 - DNA, 412 bp, Homo sapiens
  misc_feature (1)...(412): n = a,t,c or g
  sig_peptide (87)...(222): this location contains the signal peptide sequence, MLTFKSDNGKTXXXILLCLLLLLFISFLDDPRASIFSSPIPNCVS, Run with SignalP
  misc_feature (412)...(39): similar to gi3257686 in the genepept database release 114, Run with FASTXY 3.3t00, default parameters
agatattatggatataaaatcttcagactggctgaatagtctggttagtatatcattcaactggagaactaaaacttcctgaaaaaatgttaacattcaaatctgataatgggaagacctcnntnnntatcctcctgtgcctgcttcttcttcttttcatctccttcttggacgacccccgggcttccatcttttcttcccccatccctaattgtgtctcttatgttccccccagctttataattgtttgcatctacccaccctttttcttgatacaccccctctcgccggaattttcttttgtttcctctagataacccagaggtagttctcacgacgtaacaattctttttctggctgggcgccctccccttaatggcgggccctcctttaaaaactcttgctctccttc

SEQ ID NO: 79734 - DNA, 399 bp, Homo sapiens
  misc_feature (1)...(399): n = a,t,c or g
  sig_peptide (295)...(160): this location contains the signal peptide sequence, MLGFRKPCQCLRLRWVCLHLLRRDFSILGLSFPICETKGPEERKL, Run with SignalP
  misc_feature (189)...(321): similar to gi3309125 in the genepept database release 114, Run with FASTXY 3.3t00, default parameters
cacgcggggctgcctancttaccttaaggaagtacatgccagggagctccagtaagccagcaaaccgcaggtattatcctcagaatcaactgaggctggacccagggatcttgactcttgctttgagactctttccagtaagccatggtgcctagtctgaagttttcgttcctccggcccctttgtttcacagatggggaagctgaggcccagaatggagaagtccctccgtagcaggtgcaggcagacccagcgcagtctcaagcactggcagggcttcctgaatcccagcatcccacaggagagctcctagcaggcttcagtgtggaagtgagggcactggatcttcactgacagaggaatgtgagcaaactccagcattaacaaaggccccacaaa

SEQ ID NO: 79735 - DNA, 405 bp, Homo sapiens
  sig_peptide (209)...(344): this location contains the signal peptide sequence, MNHCLSFHLLFYGWAYTLQASLPSLLTIHNISKTQFFLFPSECHI, Run with SignalP
  misc_feature (175)...(361): similar to gi198884 in the genepept database release 114, Run with FASTXY 3.3t00, default parameters
cggccgcgtcgacctttctttttatgtttccaacaacccattcctttttttctaacgatttccaatgggagtgactcacaatttcagctacaagcattggaaccaaaattcctactgttactaaaaagggattccaaagtaagttggcaaaagcttgaaatgttccttcaggtaactcctgattggagaagctttatgtctaagttaaatgaatcattgcctctcctttcatctgcttttctatggatgggcttataccttacaggcatccctcccctccctcctcactatccataatatatcaaagactcagttttttctcttcccctccgagtgccacatcactggttgagcaataagctctctcttctaacccatcttcctttcatcaatccatccggcacg

SEQ ID NO: 79736 - DNA, 897 bp, Homo sapiens
  sig_peptide (262)...(397): this location contains the signal peptide sequence, MSFVKILIWELFIACFPQGPLVHSGKMLKHGLDWHRTLLQKHPCI, Run with SignalP
  misc_feature (9)...(312): similar to gi6015581 in the genepept database release 114, Run with FASTXY 3.3t00, default parameters
gggttattttccggttgaccccagaattcgttagatttttttaaaaaacaatttcaaaatagttgctgttttaaattagttgcatccagttcatatcaatgtctgcatgctttctagtctttgttatttattgaaaacctttggtacctaaacttaagtttgattgtttcagtgtgtacttggtaaatatgtcagtggccttttaactaaacatcaaaatgtactttaaccagttagtctgtttttcagttttctttccttatgtcctttgttaaaatcttgatctgggagctatttattgcgtgtttccctcaaggccctctggtccattctggaaaaatgttgaaacatgggctggattggcatagaacgctcctccaaaagcacccgtgtattcttttcttttcttttttgaaatggaatcttgctctgtcgccttggatggagggcagtggtgcaatctcggctcactgcaacctctgcctcctgggatcaagagatgctcctgcctcagtctcctgagtagctggaattacaggcacccaccagcatgcctggctaatttttggatttttaacaaagacaggggttcatcacgtttgtcaggctgggctcaaaccctgacctttgtgacccaccccgacttggccctccccaaggtgaagacaattcccggggggtgaagccccttggtccccaacccccgcggtttttttttgcacatccccctttccgccccgctgggcggggcccgccctcataagctcgtcgcgcgctcgcctcttctctcgccttacccccgccgttccaccagacagactctgtgatcgtgctcgtccgcccccgcaaacacctccttgtcgcggaaccgtccccctgcgccgcttcatcaccccg

SEQ ID NO: 79737 - DNA, 397 bp, Homo sapiens
  sig_peptide (206)...(71): this location contains the signal peptide sequence, MCTVTAWWPLVTTAGCWPSRPAGMSPGSWCPSCGSTASQALCSAL, Run with SignalP
  misc_feature (1)...(389): similar to gi1280073 in the genepept database release 114, Run with FASTXY 3.3t00, default parameters
cccgagacagatcccccacacagaggtcagaaggggtgctgtggtacacgcggccacccccgccacaggcagcgcagagcacagggcctgggaggcagtactcccgcagctcgggcaccagcttcccggactcatcccagctggccttgatggccagcatccggccgtggtgaccaaaggccaccaggcagtcacagtgcacatcctcgtcaggcagaaaattctctgcagcttctgcagcctgtggctctgtcttcaaggcccctatgaagatgacgggctcctccaggtgatggaggatcttgacaagggcatttgggtcaccaggggctgacctggaggtgaccagggccttcaggatcacacagcagagctggccatcagggagaccaccgag

SEQ ID NO: 79738 - DNA, 380 bp, Homo sapiens
  sig_peptide (368)...(233): this location contains the signal peptide sequence, MPTFFAWLLPAGPGATTACSLHSQAAQRRRAPLSCAAEPVAAGSG, Run with SignalP
  misc_feature (24)...(383): similar to gi4008532 in the genepept database release 114, Run with FASTXY 3.3t00, default parameters
cttggtctcgcacattctgaaccccagcaattcccccctcaacggggagctctccttttcgaccacagggtcgaagccggcctccgccagccgccatcttacagctccgccgaggcggttcacaacatggcggcgcccgaccgtaccgcgtcaggcggcgccgcttcctcagcggagggcagaagctccaagagggcggccggcctagcaaacaccgtaactccccccgcaggccggatccggcggcgacaggctcggccgcgcaggaaagaggggcgcgccgcctctgtgcagcctgggagtgaagggagcaggcagtcgtcgcgccggggccggcgggcagcaaccaagcaaaaaaagtgggcataaccaggcgcccg

SEQ ID NO: 79739 - DNA, 385 bp, Homo sapiens
  sig_peptide (370)...(235): this location contains the signal peptide sequence, MLDLIFNFWLLLPPAVLIPKPWLLLRPAVLIPKPWLLLRPAVLIP, Run with SignalP
  misc_feature (32)...(354): similar to gi260517 in the genepept database release 114, Run with FASTXY 3.3t00, default parameters
gggaatgaggacagcaggtcacaggaggagccagggtatgggtatgagacaagcaggtcgcaggaggagccagggttttgggtatgaggacagcaggtcgcaggaggagccagggttggggtataaggacagcatgtcgcaggaggagccagggtttgggaatgaggcagcatggtcgcaggaggagccagggtttgggaatgaggacagcgtgtcgcagggggaaccaggatttggggatgaggacagcaggtcgcaggaggagccagggtttggggataaggacagcaggtcgcagtaggagccagggtttggggatgaggacagcaggtggcaggaggagccagaaattaaagatgaggtcaagcatgtcgcaggacccgga

SEQ ID NO: 79740 - DNA, 418 bp, Homo sapiens
  sig_peptide (119)...(254): this location contains the signal peptide sequence, MDLPFFHLSLSTTALGFSWAVCLFKIFLSALNPARNLGHVFLEST, Run with SignalP
  misc_feature (18)...(196): similar to gi4582022 in the genepept database release 114, Run with FASTXY 3.3t00, default parameters
ggagttgtattttttcaagacaaacaatttcattcaaattcttttactgctaacattctaggggttgggtcatcttttattcttctattatacaggatcttcttgactgttaatacctatggatttacctttctttcatctcagtctctctaccactgctttgggatttagctgggcagtctgtttattcaagatttttttgtctgcccttaatccagccaggaatttaggtcatgtattcttggaatctaccttctattttagtgtgtgtgttggatggggaggggagatagatctccatgcttgggctcaacatagttaatggtgattattttgggtagggaatctaggttaactgcctagaatttaaccacttcagattcttctagggctgccctacttgagagagtgccttgcg

SEQ ID NO: 79741 - DNA, 1071 bp, Homo sapiens
  sig_peptide (581)...(716): this location contains the signal peptide sequence, MPVQAGSGTPLLLFSISLISALNIISVLLFSVLFCCPFSNFLKRD, Run with SignalP
  misc_feature (811)...(610): similar to gi2981631 in the genepept database release 114, Run with FASTXY 3.3t00, default parameters
aagaatggaatgatttcaaagtttgtaggaacttactggtggagccacgtacctgggatttgtgtgtatgaagattcttcactactcattcaaattatgtaatagtttctctacttttgagttgtttttcttgaagtttgtacagtcatctaaatcttatttgcactaaattgtttacaagattatctaacttttttgatgtctatagtatttctagtttccattcttgataaagattgttgacatccctccttttatagctattagatgtttgccaattttaatttttcttttccaaaaaaaatcaactttttttttttttcaacctattctatgctgtggtgtgctagtgagttagctccaaacataaaatcctggcttgttgatttccatagtgtaaacagtcccatcatggttgacttcaagctacttatttgaattggctccaaacataaaacataatcctggcttgtttgttgagttccatagtgtaaacagtcccatcgtgggtgacttcaagctacttatttgatgttattgatcatggagttgccaagaggtgtgcacaattggctctcctatgccagtacaggctggctctggtacaccactgcttttattttccatttcgttaatttctgctcttaacattatttctgtccttctattttctgtcttattttgctgtcctttttctaacttcttgaaaagggattttcagctcaagacttttcagactcttctaatacacttacttatggctataaatgtccctgtaagtgctgcttcagtttcatcccacaggtgttgctattgttattttatggttcagttcaaaatattttctcaataccattgactctgtctctgtgttattcaggcttgtttttacagttctttattgatttctatcttaaatgcactgtagtaaaaaatgaacaattattttcaaattttttcacaaaaaatttctgtgaagtttgctataactaaagtatggtggttgactgtgggtgatgggtcctgcttttcaaaaaaactgtaacatttctggaattttggtcggggtca

SEQ ID NO: 79742 - DNA, 279 bp, Homo sapiens
  sig_peptide (86)...(221): this location contains the signal peptide sequence, MSVRFIHVAVRSIVCACSLLKTSIVWLYRSSQIHFTVSQACPMHA, Run with SignalP
  misc_feature (6)...(186): similar to gi4972105 in the genepept database release 114, Run with FASTXY 3.3t00, default parameters
cggccgcgtcgacctgtttctgtgctttatccccttgaatcatacagatgcaaattctggcagctggcttctttggctcgttattatgtctgtgagatttattcatgttgctgtgcgtagtatagtttgtgcatgttcattgctaaaaacttccattgtttggctgtatcgtagttcacagattcatttcactgtcagtcaagcttgtccaatgcatgcagcccaggatgcctttgaatgtggcccaacaatggaagtttttagcaatgaacatgcaca

SEQ ID NO: 79743 - DNA, 656 bp, Homo sapiens
  sig_peptide (128)...(263): this location contains the signal peptide sequence, MNQKNPEKLFPAGLFLLLMPFLSLCVPPHLCHQFKMTLKVLLHPS, Run with SignalP
  misc_feature (146)...(18): similar to gi3881791 in the genepept database release 114, Run with FASTXY 3.3t00, default parameters
cattgaggcatgtttttctgaatctctagtggcaaaaagaaatgaatgcattttgaattcaggcttcaggattaaggcaatgttgtttgcttatgcagtgccctttgaaaaatgtgtaatgtagcatatgaaccaaaagaatcctgagaaactttttccagccggtctttttctattacttatgccttttttatccctctgtgttcctccccacctctgtcatcagttcaagatgactcttaaagtcctcttgcatccatccaaatgacccattggcctctttaggtgcctggagaaagtaccagcaaaggtatttgttggagtctatcaaaggtaacaatacatagagtgggtttcaaaatcagacaggctgggttctattgttggctctcccatttagatgctgtgtgaccttatgtacattaaacaaccagtgtgagcctgttttctcatctgtaacatgtggagaacaatgtttacctcatagagttgttgagagaattaaatgaaatcaagcccttgatacagactgaaacatgggaagtgattgatgaaatataactgacgtcttatcttggccatggtcattattatcactgtcatcattagatagtgatgggactaagctaggtaggttgacatgagctgacttatct

SEQ ID NO: 79744 - DNA, 857 bp, Homo sapiens
  sig_peptide (620)...(485): this location contains the signal peptide sequence, MCCWIQFASILLRICTSMFIKDTGLKFSFSVVSLPGFGIKMMLAS, Run with SignalP
  misc_feature (195)...(64): similar to gi1322844 in the genepept database release 114, Run with FASTXY 3.3t00, default parameters
tctaggatcttgtaacatattgcacaatgaagtttcctgttgaatgactgtctggctaaaagtacttcttgtccttaaaaatcatattgtacattcattccttcttaagtttcagaaaatttatctaggatatcatcatctgaagattcataacctgagatttcactactacctgcctctttacattcaccatctaataactgtgaaatatctttctttgtcagttttcttctctttgccattatgggtagaaaatgaaatattctgaattttcaaccgtgtttactgaaaccctcaaaaatacaaagataggatttccagccttcttttcaaaagatgagacaataccaccaaccaaaaaaagcctgggacctgatggattcacagccagattctaccagatgtacaaacaagagctggcaccattcctacagaaactattccaaaaaactgaagagaaaggactcctccacaacttattctatgaggccagcatcatcttgataccaaaacctggcagagacacaacagagaaagaaaacttcaggccagtatccttgatgaacattgatgtacaaatcctcaacagaatacttgcaaactgaatccaacagcacataaaaaaggtaatccaccatgatcaagtaggcttcatccctgggatgcaaggatggttcaacatacacaaatcagtaattgtgattcatcacataaacagaactaaagaccaaaaactacatgattatctcaatagatgcagaaaagacttttaataaaattcaacatcccttaatgtaaaaaactctcaataaaactaggggattgaaggaacatacctcaaaataataaggagccat

SEQ ID NO: 79745 - DNA, 319 bp, Homo sapiens
  misc_feature (1)...(319): n = a,t,c or g
  sig_peptide (319)...(184): this location contains the signal peptide sequence, MFLLEPCLLVTCLCTGXAALILCQHLRLEHKCVAVPSGIQQEREL, Run with SignalP
  misc_feature (150)...(319): similar to gi436237 in the genepept database release 114, Run with FASTXY 3.3t00, default parameters
gaaacagaatctttatggcatgtggtcatgaaatctcctcaaagactggatatctcaaccaatctactcctttgagatgtggcaaggccacatcccaggctatcagtgagatcaggattaaaaaataaatctgtctcgcacagctgttgctcagtacacaaatagcaacagttgctacggtgcttagttctctctcttgctggattccactgggtacagccacgcatttatgttccaacctcaaatgctgacagagtattaatgcggctcnccctgtacataaacatgtgacaaggagacatggttctagaaggaacat

SEQ ID NO: 79746 - DNA, 411 bp, Homo sapiens
  sig_peptide (255)...(120): this location contains the signal peptide sequence, MIKSLYLFFDIIFISMTTLPSSKHRNILLYKWKRHRAYRELHNNV, Run with SignalP
  misc_feature (81)...(354): similar to gi2465173 in the genepept database release 114, Run with FASTXY 3.3t00, default parameters
ccctacaaagcttagatacaaaaaaaagattcctgattgaaaaagttggagactcattgctttagttatgcaaaagattaaaatacacacaaacagccttacccctttaaacaattttgacattgttatgtaattctctgtaggccctatgcctcttccatttatagagcaagatgtttctgtgtttggaacttggaagtgttgtcatggaaatgaatatgatgtcaaaaaacaaatacagtgattttatcataggaacaatgacctcccatgttctttttaaacacaactattaaaccagtaatacactaaaacatgattttagaaatatgctctacctcaaagggaagttgtgggaatgatttttagacatgattagatatcaaatattctgactttctggggcaaaag

SEQ ID NO: 79747 - DNA, 1456 bp, Homo sapiens
  sig_peptide (174)...(309): this location contains the signal peptide sequence, MIVCLLFMMILLAKEVQLVDQTDSPLLSLLGQTSSLSWHLVDIVS, Run with SignalP
  misc_feature (587)...(939): similar to gi2981221 in the genepept database release 114, Run with FASTXY 3.3t00, default parameters
ggcacgagagatagcacaaggcaacagaatgattttaattcattttcttttagggggaacgaggaagccccaagagctgtttcttatttttggggtctgtactctgtgaagtcaactgggttagtgtgctctctgatgcctggaattccagtccccacccagaaacccgcagcatgattgtctgcctccttttcatgatgattttattggcaaaggaagttcaactggtagaccaaacagattcacctttacttagtctccttggacagacaagctcactttcatggcatcttgtggatattgtgtcgtaccagagtgtgctaagttatttcagcagccattacccgccgtccatcatcctggcaaaagaatcttatgctgaattaatcatgaagctcctaaaagtgtctgcgggcctttctattcctactgacagccagaagcatcttgatgcagttccaaaatgccaagcttttactcatcagatggttcaattcctcagcaccctggaacaaaatggaaaaatcaccttagcagtcctagaacaggaaatgtctaagctcttagacgatatcattgtctttaacccgcccgacatggacagccagacccgccacatggccctcagcagcctctttatggaagtcctgatgatgatgaacaacgcgactattccaacagcagagttccttcggggcagtatccggacctggattggccaaaaaatgcatgggctggtggtgctgccccttttaacagcagcctgccagagcctggcgtccgtccgccacatggctgagactacagaagcctgcatcactgcctacttcaaagaaagccctctcaatcagaattcaggatggggacccattctggtatcccttcaggttcccgagctcaccatggaagagttcctgcaggagtgcctcaccttgggcagttacttgactctttacgtctacttgcttcagtgtttaaacagcgaacagactttaaggaatgaaatgaaagtgctgctcatcttaagcaagtggctggaacaggtgtacccaagctccgtggaggaagaggcaaagctgtttttgtggtggcaccaagtccttcagctctccctcattcagacagagcagaatgactccgtcctgacagaatctgtcattcgaattctgctcttggttcagagcaggcagaacctcgtggctgaggagagactcagctctgggatcctgggggcaattgggtttggccggaagtcgcctttgtctaacaggttccgagtggttgcccgaagcatggctgccttcctttcagttcaggttcctatggaagatcagatccgtttgaggcctggctctgaattacatctgacccccaaagctcagcaggctctgaatgctcttgaatccatggcatcaagtaagcagtatgttgaataccaggatcaaatattgcaagc

SEQ ID NO: 79748 - DNA, 420 bp, Homo sapiens
  sig_peptide (14)...(149): this location contains the signal peptide sequence, MKMLPSCKAALSLLHIWLQSGGHHRPVPCLAPAQTVKCAWCMPMV, Run with SignalP
  misc_feature (226)...(328): similar to gi5052342 in the genepept database release 114, Run with FASTXY 3.3t00, default parameters
cttcccaccaggaatgaagatgctaccatcttgcaaggcagcattatcactgctgcacatatggcttcagagtggcggacatcataggcctgtcccctgccttgcacctgcccagaccgtcaaatgtgcctggtgcatgccaatggtattactgtttcatgcaagctacgtaccaatgcaccaaaatgggacaaacaaaggggctgactcggctctgggatcaccacctctgaaagctttgagccatggagtatgaggccaggatgaaagagtgattccttgaggtggtctgtaatcactcgtggaggtgggtaccatgcgggcaaatgctaacatgcatctgttccccactgattctggaagcagaggcccaccctacagtaaaccagggttgacagaggtcactgtggatgtctatgg

SEQ ID NO: 79749 - DNA, 580 bp, Homo sapiens
  sig_peptide (402)...(537): this location contains the signal peptide sequence, MPTYWLANLRPGLQPFLLHFLLEWLAVFCCKIMVLAAAGLLPTLH, Run with SignalP
  misc_feature (201)...(583): similar to gi4558665 in the genepept database release 114, Run with FASTXY 3.3t00, default parameters
agcatacaaatgaaagtaaattaccgagtcttagctgttcctatcctagcaggatttatatttgacagcagaacacgagctacagacttgcaaaacctgaagagcctcatcaaacatctaaattgggatggctttactgtgcctatttaaaaaaaaaaatgagagacttgggcaatatgataactactttgaattgtattaagagagtctccaaaacagaagcactgtagatttattctacttcttcattctcttttcctttcccttactttttaggttactcagagagggcaatgctttactatgaactggaagacgggctgtacaccactggtccatatttctttgccaagatcctcggcgagcttccggagcactgtgcctacatcatcatctacgggatgcccacctactggctggccaacctgaggccaggcctccagcccttcctgctgcacttcctgctggagtggctggcggtcttctgttgcaagattatggtcctggccgccgcgggcctgctccccaccttacacatggcctccttcttcagcaatgccctctacaactgcttctacct

SEQ ID NO: 79750 - DNA, 400 bp, Homo sapiens
  sig_peptide (141)...(276): this location contains the signal peptide sequence, MSLLSDFFILAIVFSTSRISIQFFFIIAIPTDTLCLGKYISYTFS, Run with SignalP
  misc_feature (3)...(388): similar to gi5306171 in the genepept database release 114, Run with FASTXY 3.3t00, default parameters
ctcttatccatatacttgatggtgttctatagtacaggtctggccttttttctgcatttttgtttttgttcctcaaactaaataattacaatcagcctaccttcaagtttatggattcttctgccaacccaaatctgctcatgagtctcttaagcgattttttcattttggctattgttttttccacatccagaatttctattcagttcttttttataattgctatcccaactgatactctctgtttggggaaatacatttcttatacttttagctcattagacatggtttctgttctttgaatatatttaaaatagccgagcttcttctgccacagtctctaccaactgttctttttcctgtgtgtgaaccatactttaatatctttctgcatggcttg

SEQ ID NO: 79751 - DNA, 874 bp, Homo sapiens
  sig_peptide (423)...(558): this location contains the signal peptide sequence, MLIVSHLHYFLFIPFAGFGGSRKLIKFLSKMEKSLFAYFLLTSLV, Run with SignalP
  misc_feature (63)...(196): similar to gi3002588 in the genepept database release 114, Run with FASTXY 3.3t00, default parameters
tgaaaaggaaaattaaatgacaagcttaatggtacagcttaatgatcaggtagattaatgatttgctgtttcttcaggatgatgttctgactgtgatccgaagagtggatgaaaactgggctgaaggaatgctggcagacaaaataggaatatttccaatttcatatgttgaggtaaattaatctgtagaaacttgaactgtgttaatattcagcttactaaataaatcttaattatgcaatttgagtattaagaagtcctcacaacaaaaagcaccaggaatgccctgttacagatcactggacagatcaggaagaattcctccatcctatccaacaattattgaagacagtgagatacttgaaactctttactttttctccctgctaaaagcattcctgtgtcttgttaaatgtcactgtatgcttattgtcagtcacctacactatttcctgtttattccatttgctggctttggtgggagtagaaagttgataaagttcttaagtaagatggagaaaagtttatttgcttattttttacttacttctttggttacttgctgcatcagcagaaccagaatagtgatatgcaaagtagggcttcaataaatatttgttaaataagtcaatgaatcttcctccatcccatcccagcaactacttagccccctttccctttttaaatcagctgtgcttgcaaagcttgtggccaagcttgacatagtaaaagctttttatagaggatgggaggcacatcagtgcattactttagagataatacaggctggacattaaggggttccactcataggaaattttcttacatcatattcataaactaagggcctttggaataaaaattttgtcgaaac

SEQ ID NO: 79752 - DNA, 373 bp, Homo sapiens
  sig_peptide (186)...(51): this location contains the signal peptide sequence, MAIWLSYPSRWVALIYAEVNLANLICLIAPKAFRGRPKKILIYNP, Run with SignalP
  misc_feature (213)...(376): similar to gi1109902 in the genepept database release 114, Run with FASTXY 3.3t00, default parameters
cataaaaaagcattccgattaccttcgcccctcaagcccttctcagaagggttatatattaggatttttttaggccttcccctaaatgcttttggagcaatgagacagatgaggtttgcaagatttacttcagcataaattaatgctacccatctggatggataagataaccaaatagccataaaatcttggcaacctccaatgtaagaaaaattgcttgggagctgagaggaggaacaaaatccatgcagagtttgttggaggaatgccaaagtgatcatagagtttactaagattttgacttactcttgcactttaatcataatatatttgcagcatgggggattaaaggcagtctttggagggaaaaccc

SEQ ID NO: 79753 - DNA, 382 bp, Homo sapiens
  sig_peptide (59)...(194): this location contains the signal peptide sequence, MSWLANGVCLYEYLFFRCGFLILQPCSFDASLTDEESRKNWEEFG, Run with SignalP
  misc_feature (146)...(306): similar to gi5327054 in the genepept database release 114, Run with FASTXY 3.3t00, default parameters
ctttttcctgatttcagagaaacttttcttgattcatggaatcagtatcttctaagaaatgagttggttggctaatggagtttgtctatatgagtacttgtttttcagatgtggctttctaattttgcaaccttgttcttttgatgctagtttaacggatgaagagtcccggaaaaattgggaagaatttggaaatccagatgggcctcaaggtgtggtaaatgatgattttaaaatattggcgatatggtatatattataaaaatgttaaccagattaaaggaataatattattttcttactaaacttatactcacatggagtttaacatagataaattgagctctcattaatttttgctttatttttctttctaaagacg

SEQ ID NO: 79754 - DNA, 784 bp, Homo sapiens
  sig_peptide (318)...(453): this location contains the signal peptide sequence, MCVALLVLGLTVQSDRCFPELPGGRSLLFCALRRSERPLPQASRG, Run with SignalP
  misc_feature (773)...(241): similar to gi5821145 in the genepept database release 114, Run with FASTXY 3.3t00, default parameters
gctagaaacacaggtctggatgcaggcaggagacacacgcgtccacactagcatgcgtgtgtacacacatctacatgtgcttatcccccgcgttcatgttaaaaaccatgggatcataccggtgtttcagattcacatccaccccagcagggtttctcgcctcccccattgcttataaccttagcaggtgttgagaaccctggcgctcactgtccacagtgagtttgcttattcgttgaaacctatcgtgcctgtagagtgtggagagttgccggcccgcacccctgcgagacacagactttctgaccgcagccctcatgtgtgtggctcttcttgtccttggccttacagtgcagtcggatcgctgctttccagagttgcctgggggtaggtccctcctcttctgtgctctgcggcgcagtgagcggcctttgcctcaggcctcccgcggcttccttaagcctctggcctgcccggtccctggcgccaggtctgttttccctgctcccttctctctgatcctgctttggtctgagccgtgcctctgggccccagcattgctgggccgcattgtcgttttatttctcttgcgtcgctgcgtctagtgtaagacattcagcggatcatctcggatgggccttagtggcccccagcccaacctgggtccgtgccgccgcgacactacatcccctgaagcccctgtctcctgccctcccctcaaactcgctcgctcccgccttcccccccgccctcctcggcggtaacccctcctgccctctcgccc

SEQ ID NO: 79755 - DNA, 364 bp, Homo sapiens
  sig_peptide (222)...(357): this location contains the signal peptide sequence, MQVLHHCWGALKAQWRLVGFCERKLHLCHHVRKKDLLLARFLLTT, Run with SignalP
  misc_feature (47)...(240): similar to gi41110 in the genepept database release 114, Run with FASTXY 3.3t00, default parameters
ggatttttcagcatattccacagtcagaactaaactgcaggcacgcctgaagatgtgttgctactctgacatcccgagtttctgtccacacattgcatgcacagcgccccacacattgcagggtgtctccatggagcccaggctcggctcacacaaggatttaccatggctgggaggcgtaaaatggctctgtattttaataacgcagagcctttgaaaccatgcaggttctccatcactgctggggagcgctgaaagcgcagtggaggttagtcggattctgtgaaagaaaattgcatttgtgtcaccacgtcagaaaaaaggacttacttcttgccaggtttctattaaccacaacctgtga

SEQ ID NO: 79756 - DNA, 377 bp, Homo sapiens
  sig_peptide (110)...(245): this location contains the signal peptide sequence, MRSLVWVLIQQLTPLYKGETWTQTCTEDHVTMKAEIRVMLLEARE, Run with SignalP
  misc_feature (127)...(366): similar to gi5105960 in the genepept database release 114, Run with FASTXY 3.3t00, default parameters
ggaccccatgtcaaaaatacaaaagatatgttgaagtcccaactcctgataactcaaatgtgactgtgttgggaacatctggagtccttacagagataatcaagttaaaatgaggtcattagtgtgggtcctaatccaacaactgacgcccttatacaaaggagaaacctggacacagacatgcacagaagaccatgtgaccatgaaggcagagatcagagtgatgcttctagaagccagggaagattgccagttaatgaccaaaagaagccaggagacaggcctgcaacggattctgcctgaaggctcccagaaggaaccaaccctgacaacaccttgatcttggacttccaacctccagagctgggaggcgacac

SEQ ID NO: 79757 - DNA, 380 bp, Homo sapiens
  sig_peptide (167)...(302): this location contains the signal peptide sequence, MNSNPLLVIKLSSLFLCHSSQNLFSVLMHKNVFKIVCLFSLKKHA, Run with SignalP
  misc_feature (2)...(370): similar to gi220579 in the genepept database release 114, Run with FASTXY 3.3t00, default parameters
cgtttccccatatactaataaagttcattatcttctcatatatttattgaccatttggctttttcttctataaattcacatttatattctttgcccatttctttgttgggttgctcatctctctcctctctttaaaatatatatatatttatatcatattcctattatgaattctaatcctttgttggttattaaacttagctctctatttctctgtcactcatcacaaaatttattctctgtgctcatgcacaagaacgtctttaaaattgtttgtctcttttctctgaaaaagcatgcctcaaagtatcacttccatgtgacagaatatttaaatttcacacatctccacccaaagcttgtttattaataactggcat

SEQ ID NO: 79758 - DNA, 524 bp, Homo sapiens
  sig_peptide (18)...(153): this location contains the signal peptide sequence, MYVPGRILKCKMTLLFSPWGLTLDKLKNKSILYSVFSIYCDIFDQ, Run with SignalP
  misc_feature (84)...(293): similar to gi4756646 in the genepept database release 114, Run with FASTXY 3.3t00, default parameters
aaaaaagttctgacactatgtatgtgcctggacgtatattaaaatgtaagatgacgttgttattttccccatggggtctgaccttggacaaactgaaaaataaatcaattttatattcagttttctctatttactgtgacatctttgatcaggtctttaatacttttgtactgcctaagacccatttgtcattttgtttttcaaaaaagatttaccagaatttaaaccatcatcatcaaaataaagagtaacgcagtttgaaaacagttatcattttggaatgttattcatgacttaacgggcagttcttttgtctaaaggaggacctgagaatttgcacttgggaagctctgtggcaggctgcctagcaacagaacccctgtgcagcctgaacaataccagggttaaaaattcaaaaagattgctatttgaggtttcaagttgtttttcaccatctataagcaacattactccgtccactggaacagtaattgaatcctcactactttcttttacgacacagg

SEQ ID NO: 79759 - DNA, 396 bp, Homo sapiens
  misc_feature (1)...(396): n = a,t,c or g
  sig_peptide (162)...(297): this location contains the signal peptide sequence, MLLFLYTLXVVFFYKXEYFHAQINFFHMLQKVQEFILVRKTRESN, Run with SignalP
  misc_feature (396)...(37): similar to gi5817200 in the genepept database release 114, Run with FASTXY 3.3t00, default parameters
aaagttccaaatcttagtgaatacagttcttgccacatgaaacattgtgaaattggtctcctggtctgagtcatcactataaacgctttctgcttcttctgatattttatttttattcttttataggnttttgaatactgacatttggccgtgattgacacatgctcctctttttatacactctggnagttgtatttttttataagtgngaatatttccatgcacagatcaatttctttcacatgttgcagaaggtgcaggaatttatacttgtcaggaaaacaagagaatcaaactcaaaagtctgcaaaggttctggcagaaatccagactgcattcttattcccaaggcctgaagatgccctgtaatctctaatatttgaaataacctttcta

SEQ ID NO: 79760 - DNA, 709 bp, Homo sapiens
  sig_peptide (96)...(231): this location contains the signal peptide sequence, MADSVLTLVFTSCLLSELSLVCSDFRPTPISYQSRYGSGDGWIRC, Run with SignalP
  misc_feature (65)...(234): similar to gi2632701 in the genepept database release 114, Run with FASTXY 3.3t00, default parameters
tttcatgtgtctctggattccaggctgccattggccctccactatgtgtcccagtgctggcattctgccctattctgacgtaggccatctatcagatggctgactcagtcttaactttggtgttcaccagctgcctgctttcagagctgtctctggtttgctctgattttaggccaacccccatctcataccagagcaggtacggctctggggatggctggatcaggtgcaagtctgaagtgagagaaacccagtgaaggtcaacattgtctacagtgacttagaatgcaacttacaataccatcaccaataacatcctcttgcattcagtactttgcaatttacaaagcacatttatgctcactatctcatttgctcctccaacaattttggaaggtagacttaagtagctctgtttaggctgggcacaagggctcacacctgtaatcccagcactgtgggaggctgaggcaagcggatcacgagatcaaaagatcgagaccatccttgctaacacggtgaaaccccatctctactaaaaatacaaaaaattaaccaagcgtgctggcgggcgcctgtagtcccagctacttcggaagccgagcaagaaaatgacgtgaacccgggaagtggagcttgcagtgagccctaatcgcaccactgcacttcagcctgggcgacagagggagactccatttcaaaaaaaaaa

SEQ ID NO: 79761 - DNA, 446 bp, Homo sapiens
  misc_feature (1)...(446): n = a,t,c or g
  sig_peptide (165)...(30): this location contains the signal peptide sequence, MLSSQRLGHLPRLPSWGLLSWTPRVSAVIFIDKKESCFLDKNLHS, Run with SignalP
  misc_feature (327)...(422): similar to gi1871540 in the genepept database release 114, Run with FASTXY 3.3t00, default parameters
naagtgggatttcgaggtagcatctcttgagtgcagattcttgtcaagaaagcaagattctttcttgtcaataaagatcacagcagatacacggggtgtccaggacagcaaaccccagctcggcagacggggcaggtgtcccagcctctgagatgacagcattgcggggtgttctgaggcagcgcctgctcacccttgcagccatagttctattacttagacttgagatcccatgataagtgcactccagtccatggataaggagagtttaacccatggggaacgctagatctcaacaattttcaacaacgaagcaacagaggctaggtgtggtggctcatccctgtaatcccagtaatttgggaggctaaggtgggcgaatcaaatagccaggagttcgagaccagcctgggcaacacagacgaaatcgtcgacccgggaattcc

SEQ ID NO: 79762 - DNA, 423 bp, Homo sapiens
  sig_peptide (248)...(383): this location contains the signal peptide sequence, MLLFGLCWGPYVATLLLSVLAYEQRPPLGPGTLLSLLSLGSAKAA, Run with SignalP
  misc_feature (31)...(409): similar to gi3090887 in the genepept database release 114, Run with FASTXY 3.3t00, default parameters
ccactggacccctggtgccaactgcagctcccaggctatcttcccagccccctacctgtacctcgaagtctatgggctcctgctgcccgccgtgggtgctgctgccttcctctctgtccgcgtgctggccactgcccaccgccagctgcaggacatctgccggctggagcgggcagtgtgccgcgatgagccctccgccctggcccgggcccttacctggaggcaggcaagggcacaggctggagccatgctgctcttcgggctgtgctgggggccctacgtggccacactgctcctctcagtcctggcctatgagcagcgcccgccactggggcctgggacactgttgtccctcctctccctaggaagtgccaaggcagcggcagtgcccgtagccatggggctgggcgatcagcgctacac

SEQ ID NO: 79763 - DNA, 571 bp, Homo sapiens
  sig_peptide (177)...(312): this location contains the signal peptide sequence, MANYSLCQCIMVISFLCHGTFISYFLKVIIVSFRIEKPKLYYLVT, Run with SignalP
  misc_feature (55)...(206): similar to gi6015581 in the genepept database release 114, Run with FASTXY 3.3t00, default parameters
tatttatagaagatatgaaaaaaagttacttataatctcaatccaaacacaacttttggaatattaacttacagtgtctcatatatgttttacataattacataccattttgtattttgcttttctttttattacacatagttcttcatatatattgagtctttattgctctttttatggctaattattcattgtgtcaatgtataatggttatttcattcctctgtcatgggacatttatttcctattttttaaaggttattatagtttcttttaggatagagaagccaaaactttattatttagtgactctccatatcctatttgattatttctgtgctttttgttattgataacagaaagtaagctttgacagaattttgcaaatgaaagggggtgaaaatgaaattgtaacccatactcttgcgtcattgaagaactatatgatttattgattgtttaatattctccatgtgttaagtaagtaaaaggtaataaaatgtgttggtttgaccctgcttccccacattgtttcttttggcagatattgattttgtttttggtcttactg

SEQ ID NO: 79764 - DNA, 728 bp, Homo sapiens
  sig_peptide (204)...(69): this location contains the signal peptide sequence, MVRASHRSLLAFFFACWTSLIRLIRTSTRGSRLPTFCSFCTISIK, Run with SignalP
  misc_feature (43)...(546): similar to gi3309533 in the genepept database release 114, Run with FASTXY 3.3t00, default parameters
ggcggaattcgtgaccggctcggcatctacagctactggcaggacacgtcctcacagaaaattgaagacttgatggaaatggtgcaaaagctgcagaaagtgggaagcctagagccccgagttgaggtcctgattaaccggattaatgaggtccagcaagcaaaaaagaaagccaataaagacctatgagaggcccggaccatctgtgaggccctgcagaaggaactggactcgctgcatggagagaaagtacacctgaaggagatcttgagcaaaaaacaagagaccctgaggatcctccggctgcattgccaggaaaaggaaagtgaggcacacaggaagcacaccatgttgcaggagtgcaaggagagaatttctgccctgaacttgcagattgaagaagagaagaacaaacagagacagctgaggttggcattcgaggaacagctggaagatctgatgggccagcacaaggacctctgggacttccacatgccagagcggctggcaaaggagatttgtgccctggacagcagcaaggagcagctgctcaaggaagagaagctggtcaaggcgacactggaagacgtgaagcatcagctgtgctccctgtgtggggctgagggcccctccacccttgatgagggactctttctccgcagccaggaggctgcagccacagtgcagctgtttcatgaagagcacaggaaggctgaggagctcctagc

SEQ ID NO: 79765 - DNA, 475 bp, Homo sapiens
  sig_peptide (24)...(159): this location contains the signal peptide sequence, MKVLLAVALIARTVFFLLLAGPSAADDKKKGPKVTVKVYFDLRIG, Run with SignalP
  misc_feature (6)...(478): similar to gi337999 in the genepept database release 114, Run with FASTXY 3.3t00, default parameters
cttgccggaattctgaacgcaacatgaaggtgctgcttgccgtcgccctcatagcgaggacagtcttcttcctgttgctggcgggaccttctgcggccgatgacaaaaagaaggggcccaaagtcaccgtcaaggtgtattttgacctacgaattggagatgaagatgtacgccgggagatctttggtctcttcggaaagactgctccaaaaacagaggataattttgtggccttagctaccggacagaaaggatttggctacaaaaacagctgattccatcgtgtaatcaaggacttcatgatccagggcggagactttaccaggggagatggcacaggaggaaagagcatgtacggcgagcgcttcccctatgagaacttctgactgaaacactactggcctggctgggtgagcatggcctacgcaggctaagacaccaacggctcccagttcttcatcacgacagtcaagag

SEQ ID NO: 79766 - DNA, 386 bp, Homo sapiens
  sig_peptide (167)...(32): this location contains the signal peptide sequence, MLPYYATSLFFFVIGKSEIRFSNAYSVMPSAYANLVKSKNLSEGA, Run with SignalP
  misc_feature (12)...(206): similar to gi3360222 in the genepept database release 114, Run with FASTXY 3.3t00, default parameters
tgcacacttagatgagcacggccttgccaacagctccttctgatagatttttagactttactaagtttgcgtaagccgaaggcatcacactgtatgcattactgaatctaatttcacttttgccaataacaaaaaaaaacaagctagtggcataatatggcagcatgcatcatatgcttaccataatctcaaaatttaactctttgtaaagaactgagccaattatttctgtctttttgagcatgaaacctaatttaaagcatttttctagatgataaaataaatactcctttactcagaaacttaacagatccagaatagaatacagaactcagtagctagattcagaatattggtcgtactatttgcttggaatcacatcaata

SEQ ID NO: 79767 - DNA, 616 bp, Homo sapiens
  sig_peptide (234)...(369): this location contains the signal peptide sequence, MLLSFLFPQTMALPSRMLVCGTDPFIHSFVHSFICKHSSNSHHMP, Run with SignalP
  misc_feature (238)...(27): similar to gi4376860 in the genepept database release 114, Run with FASTXY 3.3t00, default parameters
tcgcggacgcgtgggcaggcggaaaatatgtatagaatcagaatgagatttggataaattcactggggacaaagccaatgcaggatcttaagggaaaccacaccaaagacctgagtggcaccgaggaagctcgctgtgaggagagacagcttactggtctgggctttagctgctgaaaagagcaaatgaaagaatgctcagaggatacctggcacatagaagttgctcaataaatgttgctttcctttctcttcccacagaccatggctttgccttccagaatgctggtctgtggaactgacccattcattcattcatttgttcattcattcatttgcaaacattcatccaattcccaccacatgccaggaattatgatgaatactggggatgtagaaatgagattttttgggtttatggtgatgaagttacagaaaatcaatggcacagccctggtctcagctctgccgtcactcaacttgtatcttgagcaagttcctccccatctcagggctcagttttcctcatcgcatagaggggttggtttttccttaacggggtttctttattgtgccctcagagagtggcttggaggttacaatataggggaggggct

SEQ ID NO: 79768 - DNA, 404 bp, Homo sapiens
  sig_peptide (144)...(9): this location contains the signal peptide sequence, MAAADDTILGFRAALLILVAAAAALSPKVACRVGTVRRRETPQPS, Run with SignalP
  misc_feature (61)...(303): similar to gi3309614 in the genepept database release 114, Run with FASTXY 3.3t00, default parameters
cgccgatggctgcggggtctcgcgccgtcgcaccgtccccacgcggcaagcgaccttcgggctcagggcggcggcggctgcaacgaggattaggagggcggcgcggaagccaagaatagtgtcgtcagcagcagccatttggtcccaggaggaaaagaggctgtggcagcgacgccgacgtcctgcgcgtaccccctctccgcggcacccaccgggccccctcctcctcctcttcggcggcggcagcgtccaccatcttcctcttgctgccagtggtagcgctcgtctggcggagctggttgttggtcttgacgatattatggatgaaggagttgttaaagaaagtggcaatgataccattgatgaagaagaactgattttacctaacaggaacttaagggacg

SEQ ID NO: 79769 - DNA, 611 bp, Homo sapiens
  sig_peptide (158)...(293): this location contains the signal peptide sequence, MKFFVLSAILCIKLRHFTTGKKIWPQELFTRITTQLRVLNIHFQK, Run with SignalP
  misc_feature (221)...(63): similar to gi4049828 in the genepept database release 114, Run with FASTXY 3.3t00, default parameters
gcgttccttaataaaattcatgtattaggctaatcactaaaatatatgcaactaactatagttcaaattaaatttaaggtaacaaaagttattgagatcagagattaaaaaattcaagttattgtattgtttctgtcaaatatatattagattacatatgaaattttttgtgttgagtgctattttgtgtatcaagttgagacattttaccacagggaaaaaaatatggccccaagagttatttacaagaataacaactcagttaagagtcctaaacattcactttcagaaacagtcttctttcattaatgcaccatctgtgtatactgaattctccagaacaacccacactaaggagactactcagtagacaggccattcacaaaagagttcacactttcagtagagaagtgcttatttctctggtaaccacaatgctttggaaaatagctgggagccaaaaataaacacaaaggtgtcggcagccaaaacagaggtctcaaagtccactctggttaagctccttataagtagaacagtttgccaggttctcactcgcaaactatttacttttatttaaacccccattttaaatttgcctgccccttttt

SEQ ID NO: 79770 - DNA, 401 bp, Homo sapiens
  sig_peptide (245)...(380): this location contains the signal peptide sequence, MKMINTMGLFLLNLEMRIGTRIHFIALQLGREKCYWGKNKTDTLC, Run with SignalP
  misc_feature (13)...(246): similar to gi4249705 in the genepept database release 114, Run with FASTXY 3.3t00, default parameters
cggacgcgtgggcgagttggagccacatttacaggtactagtatagctccacatgaacatgtccagcctccactgatgtttgtctatgatgggaaaagggatcggaggaatggctacaattcataacaacacatgtgaattgttgaagagtatgcccaagttgatttggcaaaacgaacattgtaagcccatacactccaagaggaattatcctcttgaaaattaggggaacaagctgtaagtaatgaaaatgatcaatacaatgggtttatttcttttaaacctagaaatgagaattggaacaagaattcattttatagctcttcagttaggaagagagaaatgctattgggggaaaaataaaactgatactttgtgtacagttcatagtaatataaatg

SEQ ID NO: 79771 - DNA, 344 bp, Homo sapiens
  sig_peptide (271)...(136): this location contains the signal peptide sequence, MIIYLTFPVAMFWVSNQAEWFEDDVIQRKRELWPPEKLQEIEEFK, Run with SignalP
  misc_feature (73)...(342): similar to gi3157993 in the genepept database release 114, Run with FASTXY 3.3t00, default parameters
ttttttttttaacaaggaactgagtatatgtatatttcatcaggggaggggctaggactcccacttggaggcctcaggagttctgctgggcgtcgcgaaggagcttctcctcccgccgcttccgtaacctctctttgaattcctctatctcttgaagcttctcaggtggccacagctccctcttgcgctgtatgacatcgtcctcaaaccactcggcctgattggaaacccagaacatagccacagggaaagtgaggtagattatcatccgaaatatctccagcttcacccccatctcgtttctcccggtcaacaaagccagttccgcccaaagccgaccctcc

SEQ ID NO: 79772 - DNA, 729 bp, Homo sapiens
  sig_peptide (72)...(207): this location contains the signal peptide sequence, MEIPVFSHICFLFSSLLCVRNPLSTMLHFPAWSLPDTSPLPHHTQ, Run with SignalP
  misc_feature (605)...(506): similar to gi4240257 in the genepept database release 114, Run with FASTXY 3.3t00, default parameters
aatgcttataaaatgaataccgtaaggatgtagttttgcattagtatggcatttcaagaagaacaccccaaatggagattccggtcttttctcacatatgcttcctcttctctagcctcttatgtgttcgaaatccactctccaccatgctgcactttcctgcatggagcctgccagacacttcaccacttccccaccacactcagcctcctgtgattgggagttcatctttggcttttagtggttccctcaagacttgcctgagtgaatttagacacctgcgctgcccgctgtctctctcagagagcagggaacaagagatgttaaatgggacattcccaaattcagtctccttgggggatggggatggggcataaggatggtgcaggaaagggtatacattccacacattggatattctaatcccatttgatatgtgaacatatcaaatattactccactatatatgcagtcttctcaaatagtactattgtctgtggatcagtgactgacatttgaaccaatcaaacaaactgcaagttaattcaagcccttggaacgcataaatgtcttgattggtcaaacagagttgatatttcatgatggctatcagaactaagttactaaattgtatctatgtttcatgcctaataataaaatgaaacttcatactcatgttaggaatattatgagtataagggagacaacaccacaaagggctgtgcactt

SEQ ID NO: 79773 - DNA, 418 bp, Homo sapiens
  misc_feature (1)...(418): n = a,t,c or g
  sig_peptide (153)...(288): this location contains the signal peptide sequence, MVHRALHLMAPHLTKLTFFTCSCSRALRSECICSCHLEYSPQTSP, Run with SignalP
  misc_feature (136)...(356): similar to gi4033606 in the genepept database release 114, Run with FASTXY 3.3t00, default parameters
nggcactggaaggactttggactttattcttggtgccatggaaaactctggatagtttatagttggtttctgagacaggtctgtatcatttaattttcacaaatcaaagtagtaagtctgtaatagattaaatgacactcacattccttaacatggtccacagagccctgcatctcatggccccccacctcaccaaacttaccttcttcacctgctcctgctccagggctctgaggtctgaatgtatctgttcctgccatttagaatattctccccagacctccccaccctgacacatacaaataccccaatactaactctctctccccaatgccctctcacctgttcctttctgtttaaatgtcatcttcccagaactctttcctggtcccttggtctaaagtcacccacgcgtccg

SEQ ID NO: 79774 - DNA, 432 bp, Homo sapiens
  misc_feature (1)...(432): n = a,t,c or g
  sig_peptide (24)...(159): this location contains the signal peptide sequence, MFCFLVSVLYSKAKLASACGGIIYFLSYVPYMYVAIREEVAHDKI, Run with SignalP
  misc_feature (3)...(408): similar to gi4128033 in the genepept database release 114, Run with FASTXY 3.3t00, default parameters
cagtctacgcggtggccaccatcatgttctgcttcctggtgtctgtgctgtactccaaggccaagctggcctcggcctgcggtggcatcatctacttcctgagctacgtgccctacatgtacgtggcgatccgagaggaggtggcgcatgataagatcacggccttcgagaagtgcatcgcgtccctcatgtccacgacggcctttggtctgggctctaagtacttcgcgctgtatgaggtgcccggcgtgggcatccagtggcacaccttcagccagtccccggtggagggggaagatttaaacttgcccccccccccccccatgatgccggcccccggngtggtatatggcatcctcacgaagtaaaatgaggctgtgcacccaggcatgcccgggctgcccggcgcgcgcgcgggaattccgaacgggt

SEQ ID NO: 79775 - DNA, 1086 bp, Homo sapiens
  misc_feature (1)...(1086): n = a,t,c or g
  sig_peptide (702)...(837): this location contains the signal peptide sequence, MLSQWAMLSLTSAFTYTVLYPKCFSFPLSVQQTCLLSTVMXPFQA, Run with SignalP
  misc_feature (72)...(516): similar to gi2384732 in the genepept database release 114, Run with FASTXY 3.3t00, default parameters
cagtgttactaagcctcctgccccttcataggaaggatacctcctcttctagtttccaataacatctacctcacttttctattctccttgtagccttatgaaataccatgagactttttaaaaacagcttcttaactaaactatccttaagagccatggtctgtttccaaagccaatccaacattgcagtgttctgttatagcagtgaggactcccagtatcaacatgtattacttatctattactatgtaactaattaccataaatgtagcagtttaaaacaacaaacatttgtaatcttacagtttatgaggatcaggaatccaggggcaacatctgttgggtggttctgacctgtgtctgcataaaagctgttcaggattgcagtcagctgcagccctgcttccagtcttgctcacattgttggctggaggcttctgtcccagttctctctactacctgtgtgtcttcacagaacaaatgactcgagagagtgtgtaccaagtggtaagacagcacgcaagtcttttatcacccaatcttagaagtgacgtactatcacttctgccatgtgctgttggtcacacagaccaacccttgttcactgtgggaggggactacccaagggtatgaacaccagtcatcctgcaggctggctaccacaagccctctgctcagtgaactgaactatactgtgcttcatgctctctcagtgggccatgctgtctcttacttctgcctttacttatactgtcctttaccccaaatgcttttcctttcctctatctgttcaacaaacctgtttgctgtcaactgttatgaancctttccaagccctaacacagcacttttggaaaacagattcatttatgactgtttggtttggaagaaaacctttgaaagcaaaaactattttatcttagaggcgtactattgcactagcacaagtggtttttgaattagggttttatagttttggaaaaggtaaggtattattgttattgttgatggcaagggccccccattactccagccaaggattttgaagtggccttgaggctggagaggtcgtccgccctccaccct

SEQ ID NO: 79776 - DNA, 411 bp, Homo sapiens
  sig_peptide (40)...(175): this location contains the signal peptide sequence, MGRWLRELVVNLSCFHVHCVLELDHHEETSKISSFIVIGRRQGGP, Run with SignalP
  misc_feature (88)...(310): similar to gi1591177 in the genepept database release 114, Run with FASTXY 3.3t00, default parameters
tttcgtagaaagagtcccaaagagcaccgggtagaaaccatgggccggtggcttagagagttagtggtaaacctttcctgtttccatgtgcattgtgttttggagctagatcatcatgaagaaacctcaaaaatctcaagtttcattgtaataggaaggaggcagggtggccctgggggtggctatgggaaactttgagtggattttctggtgcttctgggtgaggctatgtcagtgtgtaaaagtaacttgagagcagggctcttttgtcctagctggttctgtgtcattgggagcccccggagtttaaatgcttatgtggactttggtgggtggtcccctcatcccagattcccagagtggcagctattcttgggattttagaaattggaacctggaggacctttgcct

SEQ ID NO: 79777 - DNA, 412 bp, Homo sapiens
  sig_peptide (159)...(294): this location contains the signal peptide sequence, MSLLKSYCKLRANCNLLFLFVARGLHRSLNICFPCHPAFRGWPAI, Run with SignalP
  misc_feature (262)...(75): similar to gi1171117 in the genepept database release 114, Run with FASTXY 3.3t00, default parameters
tttcgtctcatttctaactcgtgaccgagtgacttgctttaactttctcgaaatcctacagagttgccaagtctgccctccctcctcagtcatgttaaactctggcctatagcatcatgggacctgtagcctagggtgggaccccctaaagcctctgaatgtcgctgcttaaaagctactgcaaactgagggcaaattgcaatcttctattcctttttgttgcaaggggtcttcacaggtctcttaacatctgctttccctgccaccctgcctttaggggctggccagctatccacacccctaacccaccctgtgtttctgacagctggccacacgtcaacttctgtacttgccttttccttggtggggtagaggccaaccccttctcctctgaggcctcagggttctggtt

SEQ ID NO: 79778 - DNA, 483 bp, Homo sapiens
  sig_peptide (51)...(186): this location contains the signal peptide sequence, MVLGLLVQIWALQEASSLSVQQGPNLLQVRQGSQATLVCQVDQAT, Run with SignalP
  misc_feature (323)...(446): similar to gi3875920 in the genepept database release 114, Run with FASTXY 3.3t00, default parameters
ctctcgccccggaattaccgggtcgacgatttcgtatggggtccccgggcatggtgctgggcctcctggtgcagatctgggccctgcaagaagcctcaagcctgagcgtgcagcaggggcccaacttgctgcaggtgaggcagggcagtcaggcgaccctggtctgccaggtggaccaggccacagcctgggaacggctccgggttaagtggacaaaggatggggccatcctgtgtcaaccgtacatcaccaacggcagcctcagcctgggggtctgcgggccccagggacggctctcctggcaggcacccagccatctcaccctgcagctggaccctgtgagcctcaaccacagcggggcgtacgtgtgctgggcggccgtagagattcctgagttggaggaggctgagggcaacataacaaggctctttgtggacccagatgaccccacacagaacagaaaccggatcgcaagcttcccag

SEQ ID NO: 79779 - DNA, 437 bp, Homo sapiens
  sig_peptide (176)...(41): this location contains the signal peptide sequence, MALRHLALLAGLLVGVASKSMENTDTDVPAPEVLTRSTAGVRGAC, Run with SignalP
  misc_feature (36)...(299): similar to gi4008533 in the genepept database release 114, Run with FASTXY 3.3t00, default parameters
ctgggcccagcaggcagcggagggctcccctctgcgaggcacaggcccctctgacaccagcagtggacctggtcagcacctctggggctgggacatcagtgtccgtgttctccatggacttgctggcgactcccacgagaaggccagccaggagggcgaggtgccgcagcgccatgccaggagcagatgcgcagagcctgcccctccaggatggggactaccgacatcagccctttgcccgcctgggtgttcaggggttagctctgggagctcatgggctcagctgagccctgcagaccccggcccagtcctagaagtgaaatgcgtgccgacaagagcacggaatataactggagtccgctcgctgaggttctgtgaagtacatttaatctccagaggaaccacccggcacgaaatcgtcgacccgggaactccgc

SEQ ID NO: 79780 - DNA, 768 bp, Homo sapiens
  sig_peptide (422)...(557): this location contains the signal peptide sequence, MQADRGGVLFLVALPGLWETVLRHPGASPEPVSLHTGLAAEPLLG, Run with SignalP
  misc_feature (180)...(330): similar to gi56463 in the genepept database release 114, Run with FASTXY 3.3t00, default parameters
cccgtatttttcgggtcgacgatttcgtggtgggtggagtggggcctccaggtaagtggtgtggggcctgcaggtgggtggtgtggggcctgcaagtgggtggagtggggcttctcgtgtggatgctgagggcccctgtgctgagggtggtggtccccatcctcctccaccctgctgcccctgaggcctgagtgctcaggctccctctgcctgttttagggttcactgttcaccctggtgacaggtgggtgctggagaccggccgcctgtatgaaatcaccatcgaagtttttgacaagttcagcaacaaggtctatgtatctgacgtgagtgcctgttcaggtcctggctggggggatgaggtggggtcgttgtctgacgcggctgctgaagagcagcccccaaagcaacaggagcccccatgcaggctgaccgaggaggggtcctgtttctagtggcgctcccgggtctgtgggaaacagtgctgaggcatcccggggcatctccagagcctgtgagcctgcacaccggcctagctgcagagcccctgttgggctggagggcagaggttgccacagcggcagggctccaggataggaggatagggaggaggtctctgcccgccactctcccgcccccttttccccaagctggggacctcagagaatccattctcctcctgccctgcagagagtcacggagcacgtcctggctttctccgtactgggttccagaaatacctggaaccctgcatgacagaggccgagg

SEQ ID NO: 79781 - DNA, 435 bp, Homo sapiens
  misc_feature (1)...(435): n = a,t,c or g
  sig_peptide (325)...(190): this location contains the signal peptide sequence, MWVFTLTLAASWGMGNGYRKGWRQHGVVIGCIRWLEMQGFSSLAH, Run with SignalP
  misc_feature (71)...(404): similar to gi2435593 in the genepept database release 114, Run with FASTXY 3.3t00, default parameters
ttccccccttccataagaaagaaggggaacatcaggaggcccctctagctttggggattggaccccttaaaacttggtgtggaggaagctggccatggcaagcaagagcgaattgtcatgcagaattacttagcagtggccaggcttgcatcagcctgtggtaccatttcatttgcataaaggggtggggtgggctagagaggaaaatccctgcatttccaaccacctgatgcaaccaatgacaacgccatgctgtctccagcccttcctatagccattccccattccccagctggcagcaagagtaagggtgaacacccacatctcctcaagcccaggctcacctcaagcctcatccccgccagaattccctctcagctgataaaagctgctgcctccattccagggaggctcaggcagtaagatcnaggatcg

SEQ ID NO: 79782 - DNA, 473 bp, Homo sapiens
  sig_peptide (102)...(237): this location contains the signal peptide sequence, MPWLLSAPKLVPAVANVRGLSGCMLCSQRRYSLQPVPERRIPNRY, Run with SignalP
  misc_feature (214)...(14): similar to gi1928880 in the genepept database release 114, Run with FASTXY 3.3t00, default parameters
tttcgtgcggctggcccggtttcctggcgacgcggccctgcaggcggttgcgttccccgtcgttaccctctttctcttcccgacgcgtgagttaggccgtaatgccttggctgctctcagcccccaagctggttcccgctgtagcaaacgtccgcggcctctcaggatgtatgttgtgttcacagcgaaggtactcccttcagcctgtcccagaaaggaggattccaaaccgatacttaggccagcccagcccctttacacacccacacctcctcagaccagactcgaattcctgctgggaagtcggctgaaactaaggaaatgcagctcaccactgaaacccacaagaaatcagagtttttcaaagctgtaaggggaggtaactccaggactatctcaggtggaatatgcacttcgcagacacaaactaatgtctctgatccagaaggaagctcaagggcagagtgggacat

SEQ ID NO: 79783 - DNA, 464 bp, Homo sapiens
  misc_feature (1)...(464): n = a,t,c or g
  sig_peptide (149)...(284): this location contains the signal peptide sequence, MVDLVLRLSFSALAAPLFGSSLFTWSSQMAQIRSLRANPCQVGHI, Run with SignalP
  misc_feature (54)...(275): similar to gi6002189 in the genepept database release 114, Run with FASTXY 3.3t00, default parameters
tttcgtgtctgctacctttcggctctcctagtcatttctgtgttgtccaaagaaggcaggggcaactgggctggaccaaggaacctcactgtggttctgtggctctgcactgggtttgcctcctgggtgttgccggccagcccagcagatggtggaccttgttctgaggctgagcttctcagcactggcagcccccctttttggatcaagccttttcacgtggagcagtcagatggctcagatcaggagtcttcgagcaaatccatgccaggtgggacacatttgtcctgagtcacctgtccagaacagggtggtgaatattgtgtcctactcacggcatctcaactatcggagcctgggatctgactcaaaggccggcctccgtctgagaactgagcgtccatttctcaatccttgccggctctgacccangcctgggccacaggcttgccgggaataagtgg

SEQ ID NO: 79784 - DNA, 456 bp, Homo sapiens
  sig_peptide (184)...(319): this location contains the signal peptide sequence, MTPSFVSWLGVGKSQTWGPHSFLFFLPTLFLCMLLFTQYLPQKSK, Run with SignalP
  misc_feature (91)...(319): similar to gi3860934 in the genepept database release 114, Run with FASTXY 3.3t00, default parameters
gtctggtggaattcccagcaggaggtggtagaaaggatcaatcaggtctttgtcaggagtacaggcaagtgacatggtatagtgaggatgggagaagtggatggagtcaaaagatatttcaaggtgaaactgacataacatggccatgaattgggtgtgggggtcaggtgggccccttcaagaatgacacccagctttgtctcttggcttggagtgggtaaatcacaaacttggggcccccattctttcctatttttccttcccaccttattcctctgtatgctgctttttactcaataccttccccagaagtcaaagcacaattatgatttcatagattctgagataacacaaggactctaccttgagaggctgcaaagattaaacacataaataggttcaggatcagttaaatacttgcccatatttttgtaataagactgcctttgcccttct

SEQ ID NO: 79785 - DNA, 997 bp, Homo sapiens
  sig_peptide (43)...(178): this location contains the signal peptide sequence, MSWFRYTFSPMPTYLLHLLQQCCSLRNEVHNENSGTPQYHKLLRK, Run with SignalP
  misc_feature (40)...(230): similar to gi3877390 in the genepept database release 114, Run with FASTXY 3.3t00, default parameters
cccacgcgtccggtttaaaaaattaaaagcaagccaaacaaaatgtcctggtttaggtacacatttagcccaatgcctacgtatcttctacatttgcttcagcaatgctgttctttgagaaatgaggttcacaatgaaaactcaggcacaccacagtaccataaattattaaggaagaaaacattaccttttatacaataacattttagaaagcttctcaaccacaagaattggaagaaaatattttctgcttaaatttcagttcgctagaacattaaccccaacatcacctttcccctttgtccctcatctgtaccctggcccaacacacagtctgttagttgtgataacggaattgctatccatttggggagggttggtggagacatcaatgaccaattcaaggatatgagttgctaaatgatattttctatgttctttgcatcttagttcttcattcaaagccagttaggtagggacacctatgtaggtggttacatgctccagtgatgggttagtaatgctgttgttctaatgattgttatgcataaatcttcagcagatttttcccttgtgctgtattaggttgtaggcatactctgtctaaaactttattctcttcattatccccacgcttctctgaaaaaatagatatgtttatctataaatgacatttgtgatcttacctgttgggtgtcaagattcattaatgtgagactgcatgttgagatggccagttttatattcattcctgaaaactgaagattacttttgccaaggactgttgataggaacttaactggaggctttaaaaattaaagaagaaaaacaaaacactgttaggaattttgttacagaataaatgttaatgttttttaaatgttaaaaaatgagtcaaagtccaaactcttcctctctattttactttatgtaaatcaaatgaaagggaatggtttttattaaataaacttttttttaaattagaaaaaaaaaaaaa

SEQ ID NO: 79786 - DNA, 446 bp, Homo sapiens
  sig_peptide (387)...(252): this location contains the signal peptide sequence, MMYLGQDLFVLMLFRVCWDSWMSFSSSMFLPIISSNSFSILPQPW, Run with SignalP
  misc_feature (320)...(445): similar to gi339776 in the genepept database release 114, Run with FASTXY 3.3t00, default parameters
gcggtaccagttgagaacagtgagactgtatcgcatttggcctggagctattcctatgccctctcccatctgtttggtaaagaggttctgtccagccactgtcagctttgaggaccaacagcttcgctgtgtgggtgaaaaggaggactgttcattttagagtggtagcaaccctgcctgtggtcttgtagatgagagtgacagtcttggagatgggcaagtggggagacacagcggctctgttttagcccaaggttggggcaagatagaaaaactatttgaagaaataatgggcaaaaacatacttgaggagaaactcatccaggaatcccaacaaaccctaaatagcataagtacaaagagatcttgacctagatacatcatagtcaaactgtagaaagccaaagaaaagaagaaaatcttgaaagtagcaaaagaaaaacaac

SEQ ID NO: 79787 - DNA, 408 bp, Homo sapiens
  sig_peptide (169)...(304): this location contains the signal peptide sequence, MRKLPLRGSWSCSCHYVRAELVLEWLLVQCFFSLCSSSYVSPRRR, Run with SignalP
  misc_feature (45)...(309): similar to gi3941371 in the genepept database release 114, Run with FASTXY 3.3t00, default parameters
ttgtcattctggtggaattcggggcgtggggttagtttggaacagctggcttagtagatgggctagtattaactgtcataccttagatgtgtctcctacacgaagcagttttattcctcacaaacacaagataggtagggcagttgctgtttttgtctcttttgacagatgagaaaactgccactcagaggttcttggagttgctcatgccactatgtaagagcagagctagtgctagaatggcttctagtccagtgctttttttccctttgttcctcctcttatgtgtcaccacgaaggaggatgtccagggctaaagtgagagtgtgtgaggaactcctaccaccaccagcaagctggcatttagtcctaggtctcaccttggagaattcacctttattctttcct

SEQ ID NO: 79788 - DNA, 378 bp, Homo sapiens
  sig_peptide (255)...(120): this location contains the signal peptide sequence, MGSTWGSPGWVRLALCLTGLMLSLYTLHVKAARARNRDYRALCDV, Run with SignalP
  misc_feature (19)...(379): similar to gi3880428 in the genepept database release 114, Run with FASTXY 3.3t00, default parameters
ggccaggtagacagaaccatcgagagactccagggagctcagcagcatcaggacagaggtccagcgtgtctgcaggcagcttggagtagaagacgcgcgtacagctgatgacggtgcccacgtcgcagagcgcgcggtaatcccggttccgggcgcgcgccgccttcacgtgcagcgtgtagagcgagagcattaagcccgtcaggcaaagagcgagccgcacccatccagggctcccccaggtgctgcccattatctccaggttccgcgcgaggcgcccgcggagactaccagccacggagcaggggccggccgtctgaatgtccgcgcccctcctggccctctgattcggcgactgttcgtccgtgctcgcattcc

SEQ ID NO: 79789 - DNA, 854 bp, Homo sapiens
  sig_peptide (342)...(477): this location contains the signal peptide sequence, MALDFVNVLLCQLAEVTLGVLREEGASLLVALGSALFPSAAAVGK, Run with SignalP
  misc_feature (338)...(141): similar to gi3169067 in the genepept database release 114, Run with FASTXY 3.3t00, default parameters
gactggtggaattctaacgttacaatttagtcttcagggaacagaatattcagcagcgctgtgatggaatctgaggagtcactcagagccccgcccccccaccaccccatacacagtgactgagggactgtgcctcattgtgggcaaggggtgagaaaaccccttcgtgatctgaagtgtggctgtatcttgggaggtggaaacacaaggctgcttgcttgttctgaatttcacatgtgcgtggaaggtgcatgtggaagctgagtgtcatatggtagctgggttagagcctttttgtctctcagctccaaagccactgttcaccgccttgctctgtgatcatggcattggactttgtcaatgttctcctctgccagttagcagaggtgacactgggggtgctacgggaagaaggggcatccctcctggttgcactgggcagcgctctcttcccatctgcagctgccgtgggcaagcagggttccatgggggtgacttcccacatgcaatgccctgtctgccagcacccgagggacgtcctgcttgccagtcctgtctcacattcccatgcctgccagccccagcctgctggctgcagcaactgccatctggggcatctgacacggtctccgccattccaagggctgcttccactcctccagtgagagcgagcctcgggaccagaggaacggcccaaacaaccaagcagcagccgccaggtctttatcacaggcctgctctgggctgagcggtgagatggggtctcttgaaaagtgggcactgaactgaatgcactgagctaagaggcatctcaggggatacctggcctccagcagcaccaaaacggggtccat

SEQ ID NO: 79790 - DNA, 482 bp, Homo sapiens
  sig_peptide (118)...(253): this location contains the signal peptide sequence, MPLALSLPAKILFCALGYNHLGLVDEFGRIFMQGNNRYGQLGTGD, Run with SignalP
  misc_feature (81)...(485): similar to gi156250 in the genepept database release 114, Run with FASTXY 3.3t00, default parameters
agaattcgcaccctctacgtcacagaccaggggggagtgtattttgaggtgcataccccaggggtgtatcgcgatctctttgggacccttcaagcctttgaccccctggaccagcagatgccgcttgctctctcactgcctgccaagatcctattctgtgctcttggctacaaccaccttggcctggtggatgaatttggccgaatcttcatgcaaggaaataacagatacgggcagctaggaacaggggacaaaatggaccgaggggaacccacacaggtccctctgtgtgcctgtgccctctgtgccaccagggagtgcctatacatcctgtccagccacgacattgagcagcacgccccctatcgccacctgccagccagcagggtggtggggactcctgagcccagcctgggggccagagcaccccaggaccccggggggatggcccaggcctgcgaggagtacctcagccagatcca

SEQ ID NO: 79791 - DNA, 421 bp, Homo sapiens
  sig_peptide (298)...(163): this location contains the signal peptide sequence, MPRVALVCLPTSWVLSLAHAIPNGCEGVWLFCPCPHLATLLVLPQ, Run with SignalP
  misc_feature (39)...(163): similar to gi1171184 in the genepept database release 114, Run with FASTXY 3.3t00, default parameters
tacattggtagtaagggattttatggagttcaggaggtaaaagaatattccatggcttccaagacaatatcacaagagacaaggactaatctcaagaccccccagtcgtgatcacattaaagaagaaagtagtgatggtcatggaagccagtgaagggtagcactgaggcaacactagaagtgtggccagatggggacagggacagaagagccacacaccttcacaaccattgggtatagcatgtgctaaggagaggacccaagaagttggaagacaaacgagggcaactctaggcatttttaactgtaggttggactccacacctagtcttctcttaaccttttgaagtgtatctatcagtgttctggatttatcctactctcttcccagtgaggtactactggcatgatccgaattccg

SEQ ID NO: 79792 - DNA, 414 bp, Homo sapiens
  sig_peptide (305)...(170): this location contains the signal peptide sequence, MCISVPLTPLLLFLNAGTMVSKDTGKCILTTSESEVEPAACLALE, Run with SignalP
  misc_feature (29)...(215): similar to gi1655830 in the genepept database release 114, Run with FASTXY 3.3t00, default parameters
taggctgctctgcaggacacgggcttggcctcccgcttctcccccagctggcccgaggacagctgtgtgtccctctgctcattctgtgcctcgcagatatccttaaaccgcacctgcagggctttgttccgttttttaatctgccggttggggtccagggcgtatttcatctccagggccaggcaggcggcgggttccacttcactctccgatgttgtgagtatgcatttgccggtgtccttactgaccatggttcctgcattcagaaacagcaacagaggtgtcagtgggacagaaatacacattcgagcaccggccgcacaaacttttagccaccacgacgactgcctgtttcctaattatatttaagcaggtgaggtcggcctttatgttaaggaaaatcacacgggctga

SEQ ID NO: 79793 - DNA, 624 bp, Homo sapiens
  sig_peptide (85)...(220): this location contains the signal peptide sequence, MILINFREICLKVLHTPLCVSGGCVLLYILALTCCYTNSLLISHL, Run with SignalP
  misc_feature (13)...(103): similar to gi3874401 in the genepept database release 114, Run with FASTXY 3.3t00, default parameters
ggagttaaaggtctactttgctctttgtgcttaagttagatcaccgttcataatgtcatagttttcttttttacaatctgtttcatgatactcataaattttagagaaatctgtctgaaggttctgcatacacctctgtgtgtttctggggggtgtgtacttttatacatcttagctctgacttgctgttatacaaactcactcttaatatcgcatctccctcccctttctctccccacagaaacacaaacacacttatttatgtatagagtcctgaaagtcagaaaggacattaaaaaccatgtattccacccaacttacttggtagccaaggaaacagaaacctatggagaggagctgattcccctacccccttgtagggagcaccaggactaggccctgggtgtcctgcttcaggttcacagcttgggatgcagagcttgtccccagagcaggagctgcagggcctgctctccaagctgcctgcactttctcagatggatgtcaggtgccttccaatctggagtacctggaaatgggtaacaatagttgaacaagtgagtacagttggcgaaaagctgagtctttctaaacagctttggaatgattacagaggggacttgc

SEQ ID NO: 79794 - DNA, 605 bp, Homo sapiens
  sig_peptide (321)...(456): this location contains the signal peptide sequence, MGVVLYVMLCASLPFDDTDIPKMLWQQQKGVSFPTHLSISADCQD, Run with SignalP
  misc_feature (15)...(593): similar to gi2738898 in the genepept database release 114, Run with FASTXY 3.3t00, default parameters
agctcgctgagggaggggatgtctttgactgcgtgctgaatggggggccactgcctgaaagccgggccaaggccctcttccgtcagatggttgaggccatccgctactgccatggctgtggtgtggcccaccgggacctcaaatgtgagaacgccttgttgcagggcttcaacctgaagctgactgactttggctttgccaaggtgttgcccaagtcacaccgggagctgagccagaccttctgcggcagtacagcctatgctgcccccgaggtgctgcagggcattccccacgatagcaaaaaaggtgatgtctggagcatgggtgtggtcctgtatgtcatgctctgtgccagcctaccttttgacgacacagacatccccaagatgctgtggcagcagcagaagggggtgtccttccccactcatctgagcatctcggccgattgccaggacctgctcaagaggctcctggaacccgatatgatcctccggccttcaattgaagaagttagttggcatccatggctagcaagcacttgataaaagcaatggcaagtgctctccaataaagtagggggagaaagcaaacccaaaaaaaaaaaa

SEQ ID NO: 79795 - DNA, 357 bp, Homo sapiens
  sig_peptide (59)...(194): this location contains the signal peptide sequence, MHCITGWPNVWLMAGQFLCNTPSCHRWATTQQEYWAGICPKPRLH, Run with SignalP
  misc_feature (151)...(292): similar to gi217346 in the genepept database release 114, Run with FASTXY 3.3t00, default parameters
taataatcaaggaggacaagacttgggcccgcatcattagataattctgcacaaaacaatgcattgtatcacaggttggccaaatgtatggctcatggcaggacagtttctctgtaacaccccaagctgccacagatgggccacaacacaacaagaatattgggcagggatctgccccaaaccaaggttgcacccggcagtcagaatggaccatgagtggagagggtcgatgagggtgcaggcctggtccaggagaaactcacacccttaaccctacccatagctgctgctttccacttcttgagctttgcttttctgtaacccttgatgccacacctgatcatctgcacatgctgg

SEQ ID NO: 79796 - DNA, 418 bp, Homo sapiens
  sig_peptide (172)...(37): this location contains the signal peptide sequence, MASPPPKVCLLAALWGQIFGLSLPCGLSEDHLQLTRNSHCKIWET, Run with SignalP
  misc_feature (63)...(382): similar to gi2746786 in the genepept database release 114, Run with FASTXY 3.3t00, default parameters
ctcaaggccaatagaccccaccatttgtccagaaccacgtttcccaaattttacagtggctatttcttgtaagctgtaaatgatcttctgataagccacagggtaaactcagcccgaaaatctggccccaaagtgccgccaacagacagacctttggcggtggggaagccatggtcggcaagccaggccccgcgggcgactgttcattccctccggcctggggcgtatgggcgggggtcaggggagcccttcccccttcactttcggcgcgggtgaggtgatcggggctgccagcgcaggtctggcctagggcggcacccggaccgcggggcacgggaccggcagccgctccccgagcgccctcctcgcggaggccattatttccagcagtgccaaaagttatgagcctctcgaaaca

SEQ ID NO: 79797 - DNA, 382 bp, Homo sapiens
  sig_peptide (231)...(366): this location contains the signal peptide sequence, MSCIIPPEAWWGALALLFCALRQRTTSLPLGNEWKPNFFPLPLKV, Run with SignalP
  misc_feature (219)...(89): similar to gi2648319 in the genepept database release 114, Run with FASTXY 3.3t00, default parameters
aattcacaagtgtcattttatctaggttttaggcatagcttctcacctgattggcgaacgtataccctgtttattattaggtaaaaataagtgcttgatgccagattcactttttttctgatttatttcttagtatttttcatactttgcctttaatactaagtgtggggaagagtattaaaaatatattttaaaaaaagggtttgtgatttttaagaacgtagaggtgcatgagctgtattattccaccagaagcatggtggggggcactggcattgttattctgtgccctcagacagcgaaccacttctcttcctctggggaatgaatggaaacccaactttttccctcttccattgaaggtatcttttggtatactttt

SEQ ID NO: 79798 - DNA, 398 bp, Homo sapiens
  misc_feature (1)...(398): n = a,t,c or g
  sig_peptide (45)...(180): this location contains the signal peptide sequence, MGERAPCFLIPLLHFTITYALEINYVCCVCMVEGTCLRNSTTEIS, Run with SignalP
  misc_feature (59)...(358): similar to gi220579 in the genepept database release 114, Run with FASTXY 3.3t00, default parameters
taattttattttatttttattaatgttataaatatgtaaaaataatgggtgagagggctccttgctttctaattcctttactacatttcactattacctatgctcttgagattaattatgtctgttgtgtctgtatggtggaaggtacgtgtcttcgcaactctaccacagaaatcagcaaaagctaaaaatctggatcttctcctctgcagatctgattgctaaacatttaccagcacaacactgatnnnnnnnnnnnnnnnnnnnnnnnnnnnnnnnnnnnnnccctttaatatatattcactaatgcctaatgttgctgagtatctttttatgtacataccatctgaatattatcttttttgggtatgcggccctttacatcntttgcgtaattg

SEQ ID NO: 79799 - DNA, 910 bp, Homo sapiens
  sig_peptide (736)...(871): this location contains the signal peptide sequence, MSLSCTGFALEKRCAGWVWWLTPVIPALLGGQGRQIMIMVRSLRP, Run with SignalP
  misc_feature (482)...(603): similar to gi5051396 in the genepept database release 114, Run with FASTXY 3.3t00, default parameters
aattacaagaacccatcaaagactagaggaaaaaaaatgatgtattccatttttttaaacccctcccctcatttcttttcaaactagaccaagtattcatgagtcagatgagaactataggattttgaaagacaaaacagtctgaaagggcatcttcttattccttttaaaatgaaaagattagtttccagagagatttgctgacttgcttaggccacacaaccagaagcctgctggtgttctgtctggggattttttcccattcaaatctcataagtgaagctccttctccaaagaataatgtttctaaaatctagggtatgggcatctggggtatgtcctatatgcaggcaaatgccataaatagcattcattcagaggctcaattacatcaaaacagaaggatttaaagagtccctgatgttctctttcactcttgcttttgtctcctttgccttgctccacatgttccttccctcagggccatgtggtgtttgatgccagcggctctcggatggcatggacgcttatcgagcagcttcagggttagtacaggggcaggaggggaccggacatgggggctaggctggggctgggctgggatgccccctggggaagaatgccagagacatcacaagattgccctggcacctcccaacttctgcccttctcttttaactctgttcaccaagcttgtaaataataataataataagcttaactacaagaagattgatgtctttgagttgcactggttttgctcttgaaaagaggtgtgcaggctgggtgtggtggctcacccctgtaatcccagcacttttgggaggccaaggcaggcagatcatgatcatggtcaggagtttgagaccagccggaccaacatggggaaacctgtctactaccaaaaccc

SEQ ID NO: 79800 - DNA, 355 bp, Homo sapiens
  misc_feature (1)...(355): n = a,t,c or g
  sig_peptide (265)...(130): this location contains the signal peptide sequence, MGVIHLKFHCRVLWVNLLTTCQVFNKVTLPVSYLEEKGLRTSILG, Run with SignalP
  misc_feature (172)...(350): similar to gi3880827 in the genepept database release 114, Run with FASTXY 3.3t00, default parameters
nttaaattctgaagaggtaatgggcttgcacagatgaaagcataggtatagaaccaaaaatgggattaagttacacacacacacagcaaccagatattgaatcccagctctcttctcacactgggctcccaaaatgctggtacgcagacctttttcttctaagtaggagactggaagagttactttattgaaaacctgacaagttgttaataaattcacccagagaaccctacagtgaaatttaaggtggatgacacccatatattcatagcttccagttgaattttttggtctatttgttctaatcatgaacacaaaactaaggattatcagaaagaagagaacaatgcaaaca

SEQ ID NO: 79801 - DNA, 385 bp, Homo sapiens
  sig_peptide (101)...(236): this location contains the signal peptide sequence, MINTLVVSFLLLKIMLQPTAFYVCAGIPIRLIGYCWYKDKLFICT, Run with SignalP
  misc_feature (56)...(327): similar to gi2688484 in the genepept database release 114, Run with FASTXY 3.3t00, default parameters
tttctttttttgttaaaataaacaaaacaaaaacatgcctttcctatacatagtgttctatagcatactactttaatttctaaatggcatcagtctcctaatgataaacactttggttgtttcatttttgctacttaaaataatgctgcaaccaacagccttttacgtatgtgctggtatacccatacgactaattggttactgctggtataaagataagctatttatttgtacatttattatgtatcttgccaccttgataagtgtcttagattttgttaggtgataatctacaaataatatttttgctcttcttatatttatgtcaattaaaatcaccaaaagaatgctaaaatataatggcaacagcagtcatgtttggttt

SEQ ID NO: 79802 - DNA, 425 bp, Homo sapiens
  misc_feature (1)...(425): n = a,t,c or g
  sig_peptide (78)...(213): this location contains the signal peptide sequence, MLGTKPLEIILFFLCYLTEETHGRLHVLACPVGQGSLEAKPLVRS, Run with SignalP
  misc_feature (122)...(325): similar to gi4249558 in the genepept database release 114, Run with FASTXY 3.3t00, default parameters
tataaggaagttcgcccctccacgccaagaattcgccacgagaaaaactaataagtttttgtaattaacatttttaaatgttgggaacaaaacccttagaaataattttattcttcctctgttatttaacggaggaaactcacggcagattacatgtgttggcttgtcctgtggggcaaggctccttggaggcaaagcctcttgtaaggagcaggctccctggctcctcactttgtgctgggagtgccttacacgatctgattcctgagggcgtgtaccaccccagtactgcgtgtgcgcttgcattgccttactcttcactaagaacatggaagttgttgagaaactctaagcagtgaaattgtggaaactagaacactttgaaaataacatatatctctctagcatgccttctgtgacatgcn

SEQ ID NO: 79803 - DNA, 422 bp, Homo sapiens
  sig_peptide (262)...(127): this location contains the signal peptide sequence, MFCALSLSGHALLNSTLLSTHLGGIGTAQKPKLYLAAHQVFIGPR, Run with SignalP
  misc_feature (267)...(425): similar to gi2894266 in the genepept database release 114, Run with FASTXY 3.3t00, default parameters
caactttatgattccaaagccatgaaagcatttgccgcctaatagactttggaaacccttctacggggctcagagctgagctaacgttctctaaaagcatcgcaataaagcttcatgttcttcagcattctcgggcctataaaaacctgatgtgctgccaagtagagtttgggtttctgggctgttccaatcccaccaaggtgggtggagagaagggtggaattcaggagagcatggccactcaggctaagagcacagaacattaccagcaacagagactagtggcctctgaaaagggaaggccagcacccaccctcccatgggctttgggtaaggcctgaattaaggacatacgaactattagcataatgcctggcatacaacgggatcctttatccccttcctcatcctccactccactc

SEQ ID NO: 79804 - DNA, 423 bp, Homo sapiens
  sig_peptide (183)...(48): this location contains the signal peptide sequence, MRRRWWGLWASVGILLPAELDSRLWREGTTLGACESGGSPARSWA, Run with SignalP
  misc_feature (47)...(401): similar to gi1869805 in the genepept database release 114, Run with FASTXY 3.3t00, default parameters
ccaggaaggagggagggcgcgccacaaggagagggcagggctggggggcccagctgcgagcgggtgaccctccactttcacaagcacccagcgtggtgccctctctccacaacctgctgtctagctcagcagggagcagaatccccacggaggcccagaggccccaccacctcctcctcatccgcagtgctaacccctgccgagccctgcccacttgatctcagtgcgccatctcacccagtcctcacactgcccatcgcctccagtttaattctgtggacagaagctcagggaggctgaggagttcactcaccatcacagagctggggcctgtggtgagggcaagggcggggacaggtgcagctgctctaagtctgcaatgagtgaggcccccattggagctcgtccgacataccgcagggt

SEQ ID NO: 79805 - DNA, 1892 bp, Homo sapiens
  sig_peptide (1542)...(1407): this location contains the signal peptide sequence, MACKGLLQQVQGPRLPWTRLLLLLLVFAVGFLCHDLRSHSSFQAS, Run with SignalP
  misc_feature (893)...(1885): similar to gi2723362 in the genepept database release 114, Run with FASTXY 3.3t00, default parameters
ttttttttttagaaatcaaatctgtgtcctttattccacctggtagggcatacccaagaaccatatactgagtcctgtctcaggttgatggagggttccctgggcccaaggcacacaactgcctgtgctctgctctacagatgataggagggatggacagtggagagaagctgagccttgtgaccaagacccccagcatgatggggaatggaaagttggaagaagtaggactacaagggaggggacagggaggggcttagaggcatttggggcaggctgggcattttgaagtgagaggcatttccatccagctccccatgtccactgacagccacacccaggcttcaggtggaggtgaggctgctgtttcccaatgcggtgctatattcttctggaagcccctttccttctgctgtggctagagctgtgaccaagaatgggaacaggaggctgctaaagtctggagaagcaggaatcatttgtcagaagaacacagaagccacctgctgggagttctatctttttagagatgagctgtttggggtttagaaatgagatggaaggaagtggaaggcagagggcaagggcggagttgtgagaggctaccagcacaaggatggaggctgggggccatgtgcagtagggccagaaaagtgttcagtggaattgtgggtaggaggctgagatgctgctgggccctgtccccaccaaagatggaagaactgaggtggaggcaactggccacttgcctaggagagaactcaggcaccaagttaaaaagactcccatgaagaactgccaccttctacccgctgcagtcttggatggtctacccatgcagaaatcagtggccaggaaggcagggcctactgctgggatatcagggcaagtgcccagtccaagaaagccactgtaatgtcctgtaggcaaagccaggtccagtggacagcctcactgagctgtgtcttcatgcagtcccaggtcacctcacctctgcatgcctcatggcagtgctcctgggcccaggccagggcctcaagcaagaggtgccacagtggcagcagcacattctggtggaaaagcaggggcagctctctcagatagcggagtagctgattcacggaatcggggagctggatctgtagcctctgagagagactggtgagactgtcaccaaaccacgcaaggtgagaggcacagtgggcagaaaggaagctgactgtggcattggtgtgagcccaggccagctgcaagctgggccgcaccacggtgagcaggtgggagccccagagcggcagtgtctcccccagccagctgtagccttgcagactgtaggagtagagcttggcacacgcttgttggctagcaggtaagaagccagatgatcgaagcaaccggccagtaagggaggcctggaaggagctgtgtgaccggaggtcatggcacaggaagcctacagcgaagaccagcagcaacaggaggagccgcgtccagggcagccgaggaccctgaacctgctgcaacaggcccttgcaggccatgtcacaggtgacgacatcctggttgttactgctacccttcctcagcagctcctgattggtaagcttgagggactgaatggtttcttgcaaagacttctgtaccttcttgggaatctgctcccaggagctgagcaagtgctccagcagaaggctggactgtgacaggtgcttagggtacagctgcctccagacgctggcactgagggggtccaccgtcaggcactcagtcaggctgctcaggagctgaatgtgctctctcttgggatccatcttctgagggtgaagctcgagtgagcggggcaggcagctgtcaacagggagctctttcttcatctcagggggacagctagg

SEQ ID NO: 79806 - DNA, 434 bp, Homo sapiens
  misc_feature (1)...(434): n = a,t,c or g
  sig_peptide (82)...(217): this location contains the signal peptide sequence, MGAFMVVAAIAMGVLFLGGVNGKLFGGLVATAVGTFTMLVWLSPW, Run with SignalP
  misc_feature (43)...(429): similar to gi5106559 in the genepept database release 114, Run with FASTXY 3.3t00, default parameters
tgcanacccctcgccttgcttggcccgagcatggcgttcgcggtcggcctggtcggctcgctgctgttgctttagccggacatgggcgcgttcatggtggtcgccgcgatcgcgatgggcgtgctgttcctcggcggcgtgaacggcaagctgttcggcggtctcgtcgcgacggcggtcggcacgttcacgatgctcgtgtggctgtcgccgtggcgtcgcgagcggatcttcgcgtatctcgacccgtgggacgagcgctacgcgcagggcaaggcataccagctcacgcactcgctgatcgcattcggccgtggcgagtggttcggcgtcggcctcggcggcagcgttcagaagctgaactacctgccggaggcgcacaccgacttcatccttccggtgatcggcgaggaactcggtttcctctgcgtgct

SEQ ID NO: 79807 - DNA, 393 bp, Homo sapiens
  sig_peptide (165)...(30): this location contains the signal peptide sequence, MKFWLPGGRGCVLLISVPIVPTPVSHSMYSTNADECRGARGWHAL, Run with SignalP
  misc_feature (126)...(294): similar to gi3892136 in the genepept database release 114, Run with FASTXY 3.3t00, default parameters
cccatcgacgcagcccttataaggggtcaagagcgtgccagcccctcgcccctctgcattcatcagcattggttgagtacatgctgtgactgaccggtgttggtacaatgggcacagagattaataagacacagcctctgcccccagggagccagaatttcatgtcccttttcttttattcttccacaaaactggaaacatcatccagacatgagaatttcaagatttttaaaaaaaaatcctctcagaaaccacttaaagggaaaacctactgatcaccaactgagggctgaattttgacagcccctaacatccaggtgactatacccaggggcataacggaattcaagtgctaaggaaccacaggcattttaaagataaatttagtggcat

SEQ ID NO: 79808 - DNA, 383 bp, Homo sapiens
  sig_peptide (132)...(267): this location contains the signal peptide sequence, MCVHICLILVKWIFPITYNGYLTIFLCKLFMFSAHFSIDVSVFHI, Run with SignalP
  misc_feature (90)...(192): similar to gi598155 in the genepept database release 114, Run with FASTXY 3.3t00, default parameters
aaggaaatacagatccatgtagaaaaattaagcaaaattaaaaaaaataaggaaaaaacggaattttatgcaaactctcaccccagagacaatcactaaaaacctttccagtcatatctctatgcatatacatgtgtgtccatatatgtttgatactagtaaaatggatatttccaattacatataatggctacttaactattttcctttgtaaattgtttatgttctcagcccatttttctattgatgtttctgtttttcacattgatttgtaagctctttgtaaattaagaatattaattttttcactatcatagatggggaaaatatttccctccatactttggcttttaccttggttatggggggggaggggcttatat

SEQ ID NO: 79809 - DNA, 391 bp, Homo sapiens
  sig_peptide (195)...(330): this location contains the signal peptide sequence, MLLLFSLCVYACLCNVIIYCDVSRLLSGIGHHMHVENLFQNKIYW, Run with SignalP
  misc_feature (67)...(335): similar to gi340613 in the genepept database release 114, Run with FASTXY 3.3t00, default parameters
ctttcaagaactcctctatttcagctctaccattatctcacacttaaaaagttactggggtctccaatgtctgaaagttttaagttactttagttcatttttcttgttaacatctttaactctagacatctttttcttagttactctctgaccatctgcttcatattttgcaaaattgtattgtaaactgttttatgttgcttctcttttccctttgtgtttatgcatgtctatgcaatgtaatcatttactgtgatgttagtagacttttgagtgggattggacatcatatgcatgtagaaaatctttttcaaaacaaaatttactggaatatatttcaaatctcagtaatacagattatgcagtgtcactccccagacatctataaagg

SEQ ID NO: 79810 - DNA, 737 bp, Homo sapiens
  sig_peptide (304)...(169): this location contains the signal peptide sequence, MRPLFSWSCFCSCGILLLSLKYQALTRVKCWVNIYEVFHLFELKD, Run with SignalP
  misc_feature (146)...(33): similar to gi1196915 in the genepept database release 114, Run with FASTXY 3.3t00, default parameters
ggatctgccacagtggtgatgcctcctggctggtttctttcctccaggtactgtttactgagcttggccaccaagctccccaaggctccacagtcaggggcagggcacagatttgagcctaggatttctaagtccacctctgggatctactttccagggtctcgccacttatccttgagttcaaacaaatgaaaaacttcataaatattgacccagcactttacccttgttagtgcctgatactttaaacttaaaagcaagattccacaggaacagaaacaactccaggaaaaaaggggtctcatgaaggtgcaggggagagggagcagtcaggagcagttctgcctcctgtgccgataagagggaccttgtgtttgcaatggtggctgctctctgccgatccagggcctggtaataactgcgtgcacacacctgtacaaatccaactctgctggcttctttccaggcacactcctcagtggaaagagctggggtaattggtggagtgaaattaaaagccatcccctcagatgggtacttcgccatgcgtgcgtctggcctgcagaacgcgtggagagagacaaacgggtgggaccgaaacaattttttgaaatttggaacactggggctcttggccctttaggggaactcccctcaaattaaaaaaaaaaacccctcttcccccggcgggggagtttccctcgggggggaatttttcttggggtggccggcttcca

SEQ ID NO: 79811 - DNA, 369 bp, Homo sapiens
  sig_peptide (98)...(233): this location contains the signal peptide sequence, MSTGRFFLVYTFSVLNLVPLACRRHPHDGSQRKFLLNGRWNFLTY, Run with SignalP
  misc_feature (14)...(248): similar to gi1098983 in the genepept database release 114, Run with FASTXY 3.3t00, default parameters
tgcctctttctttctctctctctccagctagctgacaccacagattgcatttgataacataccatttcatcagagccttgagctaattatttcattcatgtctactggtagatttttcttagtgtacacttttagtgtcttgaatctcgtgccactagcctgtagacggcatccccatgatggctcccagaggaaattcttgttaaatggaaggtggaatttcttaacatatgggatccaaactagaagcaactcctgctagggagaagctctgttctatttccatttcctccctctggtgctgcggccgtctctgctgtttgcctacctctttattcgtagctcactgaggccaatgtgaacctattg

SEQ ID NO: 79812 - DNA, 387 bp, Homo sapiens
  misc_feature (1)...(387): n = a,t,c or g
  sig_peptide (221)...(356): this location contains the signal peptide sequence, MTIIILLLAKKALCPLAEVQTLLLPARLGNXKELQKEGQQSISFC, Run with SignalP
  misc_feature (199)...(387): similar to gi599879 in the genepept database release 114, Run with FASTXY 3.3t00, default parameters
ttcgagaatatataaatgaataaatggaatgaaggagtcctgtagtaatttgggaattctctgggccctgggattgtctcttaatcatgtgagtatgcctggaacaaagcaggtgcttagtaagtgcttacagaattaaattacatcctgcaggcaccaattctgacatttgggaggccctgttaccccataaaaagcttccctcctgttttggcccatcatgaccataattatacttctcttagccaaaaaagccctttgtcccttggctgaggttcagaccctgctgcttccagccagactgggcaacanaaaggagcttcagaaggaaggacaacagtcaatttctttctgcagaattcctcccaagctgcttaagcctctttc

SEQ ID NO: 79813 - DNA, 397 bp, Homo sapiens
  sig_peptide (166)...(301): this location contains the signal peptide sequence, MWSENTVNLWRNTATSLLQVLFFQSCFVPFYLVHFMPKPNRFYLK, Run with SignalP
  misc_feature (42)...(226): similar to gi3540219 in the genepept database release 114, Run with FASTXY 3.3t00, default parameters
tgtaaattggagtcctgatgtcctttccagatcttcgattttatgctgatgattagtttttatgccactattctctgtaggaagcagacaatgatccaacaggggaagcagcagctaatacccagcagactcttactttctatgagctagaccttggtttaaatcatgtggtccgaaaatacagtgaacctttggaggaacacggcaacttccttattacaggtacttttctttcagagctgctttgtacccttttacttggttcattttatgcccaaacctaataggttttacttaaagggtttgggaattaatccatttgttgtgaacctgaataccttatcttttggacaggttagaagttcatgtggtggagtgacttataccaaggggtgcc

SEQ ID NO: 79814 - DNA, 356 bp, Homo sapiens
  sig_peptide (349)...(214): this location contains the signal peptide sequence, MSTCLPPPLLYHLWSLFWLPLLRGVQAGTRRPSGGCCTKEAQSPN, Run with SignalP
  misc_feature (67)...(345): similar to gi3169697 in the genepept database release 114, Run with FASTXY 3.3t00, default parameters
cacagctacaccaagaggtattttcatcatgattttaaagaaataaaagccctcaaaccatgtaatacacaagttaaaaatcctatcagcaccgtgacttcatctgcaagtaccaggccctcgctaggaacaccagtctcccacctaccctacttcttcctgctgctccatgagcacgttttgggggtctcgcctgtgagtaactgaaatgaagtgtttgggctctgtgcctccttggtacagcagcctcctgaaggcctccgtgtgcctgcctgcactcctctgaggaggggcagccaaaagagtgaccataaatgataaagcagtgggggtgggagacaggtgctcatgtttgg

SEQ ID NO: 79815 - DNA, 827 bp, Homo sapiens
  sig_peptide (240)...(375): this location contains the signal peptide sequence, MMVMTLKCLFPVLNSMSMFLAGFLTFSPGSPENTSSSACSNSDGL, Run with SignalP
  misc_feature (221)...(105): similar to gi2924778 in the genepept database release 114, Run with FASTXY 3.3t00, default parameters
cgacgcactattgggaaataggccctcctggccgccaattattcacgacgggagacgccagtgactggccagtcctcctgtaggtggggagcttccctcccctggcccgtgccgtgccacactgactgttcccgactctgcttcactgctgcatccccagctatggatgttcctaacagatttgtccttaatacttaccatacactatatttttcctaaatgatttcacaggctctaacatgatggtaatgactctgaaatgtctatttccggtcttgaattccatgtcaatgtttttagctggcttcctgactttttcacctggcagccccgaaaacacctccagttcagcttgttcaaactctgatggattgtcattctctccagacgggctcacctttctgtgtttcctttggtggcaaaagccattatcatctgctgggaagtgccggcaagagtcctggggctgttgcagatggttctctcaccgctggagttccatccgttcttccccaaggctcatctgttctttctcttaaatatccctccatcttctctccctctttgccttggaacacatgccaaacacgttttatctgagccttcacgggagcctagttaactcttttcgctgtcactagcctggccccttttgaatccatcttttggggtggcttacaggtttctcaaaaacaaaagggctccttactttggtggcctaaggctctatgtaatctgggcccaagctctctctctctctctctctctctttttggcggcctcttcggggggatgagcccttggatgcccgaaccctggcttttggc

SEQ ID NO: 79816 - DNA, 346 bp, Homo sapiens
  sig_peptide (242)...(107): this location contains the signal peptide sequence, MAGLWFVVAACAEKCLSLPWSLRQLEVAPRSRQGRGRAGAASFLL, Run with SignalP
  misc_feature (33)...(178): similar to gi1944586 in the genepept database release 114, Run with FASTXY 3.3t00, default parameters
ggtcattcagcttgagcagattgttaaagtcgtgccgaaacgggtaaggcattcatctgctctcgctggcactctctgagaaaagacagttaacagaaccagtaggaaagatgctgcccctgccctgcccctgccctggcggctgcgtggtgccacctccagctggcggaggctccagggcagggacaagcacttctcagcacacgctgccaccacaaaccacaacccggccatgccacagcccgatgcagaagcacgtggcatcccccacggaagctgcctgcagtgtggaggcagaggctgtagcttcatggagctcattttaaaagttttgattaaaggctgg

SEQ ID NO: 79817 - DNA, 372 bp, Homo sapiens
  sig_peptide (208)...(73): this location contains the signal peptide sequence, MKLMRPLMLLYISQLYMLMKRNSPHIGDCLSLLFLQEKKQKEVYT, Run with SignalP
  misc_feature (181)...(367): similar to gi31130 in the genepept database release 114, Run with FASTXY 3.3t00, default parameters
cgctgagatgtatacctggcaggtgggcaataattagacgagaataaaagacacttgcatcattgccagaagtgtgtaaacttctttttgcttcttttcctggaggaatagaagagagagacagtccccaatgtgtggagaatttctcttcatcagcatatatagctgtgatatgtaaaggagcatcaaaggtctcataagtttcatcgtcgttaaaatatacaaaaagggctgtcaatgcttgagacatcagaattaacatacactctctcttcgtaacagtccacggttgctacctattaaccgtccccggttaataccttttatccatagccggccaccacctcatacccatcccctgtgccctgtatt

SEQ ID NO: 79818 - DNA, 445 bp, Homo sapiens
  misc_feature (1)...(445): n = a,t,c or g
  sig_peptide (140)...(275): this location contains the signal peptide sequence, MQPSGLEGPGTFGRWPLLSLLLLLLLLQPVTCAYTTPGPPRALTT, Run with SignalP
  misc_feature (88)...(443): similar to gi4680231 in the genepept database release 114, Run with FASTXY 3.3t00, default parameters
gtcagcttcggaanttccgggnagactcaccgcgacgggacttggtgggttcttggtctcactgagttctagtttgaagctgtttaccctcgcagctctctgactggcacccctgcctgcctgcccggccctgcacaacatgcagccctccggcctcgagggtcccggcacgtttggtcggtggcctctgctgagtctgctgctcctgctgctgctgctccagcctgtaacctgtgcctacaccacgccaggcccccccagagccctcaccacgctgggcgcccccagagcccacaccatgccgggcacctacgctccctcgaccacactcagtagtcccagcacccaaggcctgcaagagcaggcacgggccctgatgcgggacttcccgctcgtggacggccacaacgacctgcccctggttctaaggcaggtttaccacaat

SEQ ID NO: 79819 - DNA, 627 bp, Homo sapiens
  misc_feature (1)...(627): n = a,t,c or g
  sig_peptide (402)...(267): this location contains the signal peptide sequence, MGRNPVFTLLFMISQGFLGYNYIQLQVMVESTIREYFYKEKMAKL, Run with SignalP
  misc_feature (28)...(175): similar to gi5732618 in the genepept database release 114, Run with FASTXY 3.3t00, default parameters
atcgagacccctagttagtgtgccgtaattccaaataatcgcatttcaaaaagagaacactttaggccaactcagtcttacagccacaattctgatgacctttccagagagggaaatgctaggcccattttcttcactccaaaggacaatatgagtattcccctgtaagtgaaatgtttatttatgtataaatgggaaacttcttggagtatttttattaaggtgccttgttctgctccaactatttgtgtaaagtggctgctcaacttggccattttctctttgtaaaaatattccctaattgttgactctaccatcacctgaagttggatgtagttatatcctaggaatccttgactgatcatgaatagcagagtaaatactgggttcctccccattaagtgagaagcatttgtgaagggcagtacagtgcctataaacatagtaggcattcaccgaatactgcgtgctttacagctgtgaagtttagtagttgaaggttgtttgtttcaggctttaaagaagttaaattgttttgttacagctgttggcctatttatggtcatcattacgttcattatacttctttgtnggcgcgnccgcatatcaagaagtatgccgtgttgg

SEQ ID NO: 79820 - DNA, 425 bp, Homo sapiens
  misc_feature (1)...(425): n = a,t,c or g
  sig_peptide (160)...(295): this location contains the signal peptide sequence, MRKIYTTVLFANIYLAPLSLIVIMYGRIGISLFRAAVPHTGRKNQ, Run with SignalP
  misc_feature (1)...(420): similar to gi4530469 in the genepept database release 114, Run with FASTXY 3.3t00, default parameters
gtcctaattagaattatgctgggcctaaccatgaccaatacgtggccataggtggtaccggtgcgagagcgagatcagctcacttacccactcagactacgatccgaaagcataaccagttcagtctactggtgccgggaagactggccaaatcaggaaatgaggaagatctacaccactgtgctgtttgccaacatctacctggctcccctctccctcattgtcatcatgtatggaaggattggaatttcactcttcagggctgcagttcctcacacaggcaggaagaaccaagagcagtggcacgtggtgtccaggaagaagcagaagatcattaagatgctcctgattgtggccctgctttttattctctcatggctgcccctgtggactctaatgatgctctcagactacgctaaaccgan

SEQ ID NO: 79821 - DNA, 403 bp, Homo sapiens
  sig_peptide (388)...(253): this location contains the signal peptide sequence, MSRRWGACLAWPCPACMGAHPAPPSRKLRGASLLPREDPPWWVEV, Run with SignalP
  misc_feature (122)...(402): similar to gi1916844 in the genepept database release 114, Run with FASTXY 3.3t00, default parameters
acaagccagaatggtgtggctccacaccccattcagtggggtgaccccttcttgattcatcttgctccccagcagtcacctcctccctcggggtgctggctctccccagacgcacagcagcccgcacagacccgtggcctgtgtcctgtctccccattcccccaggacggccaggctgtgtagacagggcaggggaccagcatcttatgaggccccagacacggctcctcaggccccgcctttggcccccacacacctccacccaccaagggggatcctcacggggcagcagtgatgccccacggagtttcctggagggtggggcggggtgagcgcccatgcaggcagggcaaggccatgcaaggcaggctccccatctccggctcatcaaacctcggcgacg

SEQ ID NO: 79822 - DNA, 706 bp, Homo sapiens
  sig_peptide (347)...(482): this location contains the signal peptide sequence, MKWRRKSAYWKALKVFKLPVEFLLLLTVPVVDPDKDDQNWKRPLN, Run with SignalP
  misc_feature (386)...(708): similar to gi1922938 in the genepept database release 114, Run with FASTXY 3.3t00, default parameters
ggattgagtgagcccaggaggtctaggctgcagtgagctgtgatcacacctctgcactccagcctgggtgacagagaaagatcctgtcccaaataactaagtaaataagatggcctgaacacttgcacccctaaacctgctctgtcccagtgtgccccctcgaaaatggtctgggttctgtatgtaactgggcctctctcctgcagagatcctctcagactccgaggaggaccgggtatcttctaataccaacagctatgactacggtgatgagtaccggccgctgttcttctaccaggagaccacggctcagatcctggtccgggccctcaatcccctggattacatgaagtggagaaggaaatcagcatactggaaagccctcaaggtgttcaagctgcctgtggagttcctgctgctcctcacagtccccgtcgtggacccggacaaggatgaccagaactggaaacggcccctcaactgtctgcatctggttatcagccccctggttgtggtcctgaccctgcagtcggggacctatggtgtctatgagataggcggcctcgttcccgtctgggtcgtggtggtgatcgcaggcacagccttggcttcagtgaccttttttgccacatctgacagccagccccccaggcttcactggctctttgctttcctgggctttctgaccagcgccctgtggatcaac

SEQ ID NO: 79823 - DNA, 1662 bp, Homo sapiens
  sig_peptide (1220)...(1355): this location contains the signal peptide sequence, MLQAPPLTSLQLSLKYLFAVRWSPVRPLVFAAASGKGDVQLFDLQ, Run with SignalP
  misc_feature (455)...(1550): similar to gi18156 in the genepept database release 114, Run with FASTXY 3.3t00, default parameters
cgctggtgttgcggcgctggcgacagtcggggttgcgagcggcccggggccggggcggccagggccgctgcaggacgagaccctgggtgtggcgtccgtgccctcgcagtggagggccgtccagggcatccgcggggagacgaaaagttgccagacggccagcattgccactgccagtgcatccgcccaggccaggaatcatgtggacgcccaggtgcagacggaggcccccgtgcctgtcagcgtgcagcccccgtcccagtatgacatacccaggctcgcagcctttcttcggagagtggaggccatggtcatccgagagctgaacaagaattggcagagccacgcgtttgatggcttcgaggtgaactggaccgagcagcagcagatggtgtcttgtctgtataccctgggctacccgccagcccaagcgcagggtctgcatgtgaccagcatctcctggaactccactggctctgtggtggcctgtgcctacggccggctggaccatggggactggagcacgcttaagtccttcgtgtgtgcctggaacctggaccggcgagacctgcgtccccagcaaccgtcggccgtggtggaggtccccagcgctgtcctgtgtctggccttccaccccacgcagccctcccacgtcgcaggagggctgtacagtggtgaggtgttggtgtgggacctgagccgtcttgaggacccgctgctgtggcgcacaggcctgacggatgacacccacacagaccctgtgtcccaggtggtgtggctgcccgagcctgggcacagccaccgcttccaggtgctgagtgtggccaccgacgggaaggtgctactctggcagggcatcggggtaggccagctgcagctcacagagggcttcgccctggtcatgcagcagctgccacggagcaccaagctcaagaagcatccccgcggggagaccgaggtgggcgccacggcagtggccttctccagctttgaccctaggctgttcattctgggcacggaaggcggcttcccgctcaagtgttccctggcagctggagaggcagccctcacgcggatgcccagctccgtgcccctgcgggccccagcacagtttaccttctccccccacggcggtcccatctactctgtgagctgttcccccttccacaggaatctcttcctgagcgctgggactgacgggcatgtccacctgtactccatgctgcaggcccctcccttgacttcgctgcagctctccctcaagtatctgtttgctgtgcgctggtccccagtgcggcccttggtttttgcagctgcctctgggaaaggtgacgtgcagctgtttgatctccagaaaagctcccagaaacccacagttttgatcaagcaaacccaggatgaaagccctgtctactgtctggagttcaacagccagcagactcagctcttggctgcgggcgatgcccagggcacagtgaaggtgtggcagctgagcacagagttcacggaacaagggccccgggaagctgaggacctggactgcctggcagcagaggtggcggcctgaggggtcccgggaggcgggtgcaagccttcgctgtgccgagccttgtgtttctgacgcaagccaaatgaagaaaagcaaagcttataaaaaaaaaa

SEQ ID NO: 79824 - DNA, 353 bp, Homo sapiens
  sig_peptide (135)...(270): this location contains the signal peptide sequence, MFVFMLLVGSGIYAPEAVKVYHYDMETESGQLLLSELKSRPRREP, Run with SignalP
  misc_feature (141)...(353): similar to gi4128049 in the genepept database release 114, Run with FASTXY 3.3t00, default parameters
cagagtcaaattggaacttaggccaatgtaacagctatctccttagctatcttgaaaatatgctttaataactttgtatttaacttcacatgggaatattctattagttggtcaccataacaaatctgaaaccaatgtttgtatttatgttgcttgtagggagtggaatctacgccccagaagcagtcaaggtgtaccactatgacatggaaacagagagtggtcagctgttgctatcagaactgaagtctcggccccgccgtgagcccacctaccctgcagctgttgactggcatgcgtatgccagcagtgtcaagccattttcctctgaacagtcagattttctggggatg

SEQ ID NO: 79825 - DNA, 349 bp, Homo sapiens
  sig_peptide (91)...(226): this location contains the signal peptide sequence, MTTRGEDFLYKSSGAIVAAVVVVVIIIFTVVLILLKMYNRKMRTR, Run with SignalP
  misc_feature (121)...(296): similar to gi190203 in the genepept database release 114, Run with FASTXY 3.3t00, default parameters
gccggcgggaggccgagcggggctcgacagagcaggatcgagatgaccacagccacccctctgggggataccaccttcttctcactgaacatgaccaccaggggagaagacttcctgtataagagttctggagccattgttgctgccgttgtggtggttgtcatcatcatcttcaccgtggttctgatcctgctgaagatgtacaacaggaaaatgaggacgaggcgggaactagagcccaagggccccaagccaaccgccccttctgccgtgggcccaaacagcaacggcagccaacacccagcaactgtgaccttcagtcctgttgacgtccacgtggagacacgat

SEQ ID NO: 79826 - DNA, 341 bp, Homo sapiens
  sig_peptide (32)...(167): this location contains the signal peptide sequence, MWELFTFRVFLSPSFLKNLNEPGEQYLKEACVSLKTHLLKIQRLY, Run with SignalP
  misc_feature (59)...(169): similar to gi3875271 in the genepept database release 114, Run with FASTXY 3.3t00, default parameters
gatattattaaagcacccttggaattaggggatgtgggaactttttaccttcagggtttttctttctcccagtttcctgaaaaacttaaatgaaccaggggaacaatatttgaaggaagcctgtgttagcttaaaaacccatctactaaaaattcagagactatacatatcagggctctctaaagtcagatgaagggggcacacattctttcacagctcatatcttcataatacttaaaaaatagtcaaatgataccatttcacatataaaacaaagctctagtacactgcagcaatgaataaatggtcattgctatttatcccaaacactctcaggagag

SEQ ID NO: 79827 - DNA, 368 bp, Homo sapiens
  sig_peptide (215)...(350): this location contains the signal peptide sequence, MLLCTASVMTLLHCFPKVPTFVAHCALSHICSHVQFLLTCKRMHT, Run with SignalP
  misc_feature (196)...(306): similar to gi3860872 in the genepept database release 114, Run with FASTXY 3.3t00, default parameters
aaatactaatgtcaggaaagagcattttggtgttgggaaggagggacaaaaagcctgtttggagttgaggaaagactggatacagaaaaaactgtactgattatatacaaaaataaagctatatagtttgttcttttgccttttttgaatgtaaatggaattggagatagaaacatgtcttatatcccagtcatattgatctgctcagcttgttatgcttctgtgtactgcatcagtgatgactttactgcactgttttccaaaggtgcccacgtttgttgctcattgtgcactttcccacatttgttcccatgtgcagtttctcctgacgtgtaagcgcatgcacacataaacacacacatatgggc

SEQ ID NO: 79828 - DNA, 262 bp, Homo sapiens
  sig_peptide (57)...(192): this location contains the signal peptide sequence, MAMKILTVVIVIIRHLGSPDTRGLEFLPLPDLEAKLFPVFCPLGF, Run with SignalP
  misc_feature (140)...(46): similar to gi39564 in the genepept database release 114, Run with FASTXY 3.3t00, default parameters
ggtctggaggtttgtggaacccagttcctacagaatttgtaaaacctaaataaatcatggccatgaaaattctcacagtggtgattgtgattataagacacctaggaagcccagacactcggggcctggagttcctcccactgcctgacctggaagcaaaactgtttccggtgttctgccctttaggttttaaggccttgtcttaattcaggaaaaagaacttcccaggttttctctttttcttgagtggactgtttcccta

SEQ ID NO: 79829 - DNA, 376 bp, Homo sapiens
  sig_peptide (196)...(331): this location contains the signal peptide sequence, MSHLLAQLILAMLASWLFLNQLVVLPISGPLPGCSFLEILAILSK, Run with SignalP
  misc_feature (78)...(313): similar to gi5918499 in the genepept database release 114, Run with FASTXY 3.3t00, default parameters
ggaggagtgggcagggtgccacgagatggaggtagagggagaaaggagcaagagagaattgaaggatgaagtgcaagttatcaggctgggttaccacatccggttttggcctgtgggctgtcggtagatctgccttaacctgggagtggcgagggagtgatgcatctgccaaaacgaggagggtcactacatctcatgtctcatctccttgctcagctcatcctagccatgctggcctcctggctgttcctcaaccagctagtcgtgctccccatctcagggcctttgcctggatgctctttcctggagatcttggctatcctgtcaaaacttgtgttccccaccccgcctttatacactccctattctatgtatt

SEQ ID NO: 79830 - DNA, 277 bp, Homo sapiens; identical to SEQ ID NO: 36716
  sig_peptide (9)...(144): this location contains the signal peptide sequence, MFTHLSHLVLTAALCQGEERWLHPQFPHKENMDSPSGPVTSKGRV, Run with SignalP
  misc_feature (99)...(268): similar to gi551293 in the genepept database release 114, Run with FASTXY 3.3t00, default parameters

SEQ ID NO: 79831 - DNA, 388 bp, Homo sapiens
  sig_peptide (317)...(182): this location contains the signal peptide sequence, MPNTSVSLSLFVLILWFWEKMKLPPLCGFYPLKKPGFGVFGDQIN, Run with SignalP
  misc_feature (62)...(138): similar to gi1773369 in the genepept database release 114, Run with FASTXY 3.3t00, default parameters
cctgtctcaatgtgcacacagtttaaggggggtttagtgcgacagggttccaacccttttttccaaaggaggttacctttggaaaagttcgggattccgtccctggggaactatatatgaattcttagggtggaatcctctccttaaggttttaaaaagcttcataaaggccaaccttgggtttatttggtccccaaatacaccaaaacctggtttttttaaagggtaaaaaccacaaagtggcggtaatttcattttttcccaaaaccaaaggattaaaacaaaaagagagagagaaacagacgtatttggcattttctctacttcctcctgaataggttaaggccctgagattagactcttatattcttgggaccagagggctcct

SEQ ID NO: 79832 - DNA, 1345 bp, Homo sapiens
  sig_peptide (1181)...(1316): this location contains the signal peptide sequence, MLALSSSFLVLSYLLTRWCGSVGFILANCFNMGIRITQSLCFIHR, Run with SignalP
  misc_feature (95)...(1347): similar to gi5052588 in the genepept database release 114, Run with FASTXY 3.3t00, default parameters
gagtggcgggggcatttgctggagactgagcctggcgcggaggctatgggcagccaggaggtgctgggccacgcggcccggctggcctcctccggtctcctcctgcagactaacgctgctttactcaaccaccctcttcctggccagagaggccttccgcagagcatgtctcagtgggggcacccagcgagactggagccagaccctcaacctgctgtggctaacagtccccctgggtgtgttttggtccttattcctgggctggatctggttgcagctgcttgaagtgcctgatcctaatgttgtccctcactatgcaactggagtggtgctgtttggtctctcggcagtggtggagcttctaggagagcccttttgggtcttggcacaagcacatatgtttgtgaagctcaaggtgattgcagagagcctgtcggtaattcttaagagcgttctgacagcttttctcgtgctgtggttgcctcactggggattgtacattttctctttggcccagcttttctataccacagttctggtgctctgctatgttatttatttcacaaagttactgggttccccagaatcaaccaagcttcaaactcttcctgtctccagaataacagatctgttacccaatattacaagaaatggagcgtttataaactggaaagaggctaaactgacttggagttttttcaaacagtctttcttgaaacagattttgacagaaggcgagcgatatgtgatgacatttttgaatgtattgaactttggtgatcagggtgtgtatgatatagtgaataatcttggctcccttgtggccagattaattttccagccaatagaggaaagtttttatatattttttgctaaggtgctggagaggggaaaggatgccacacttcagaagcaggaggacgttgctgtggctgctgcagtcttggagtccctgctcaagctggccctgctggccggcctgaccatcactgtttttggctttgcctattctcagctggctctggatatctacggagggaccatgcttagctcaggatccggtcctgttttgctgcgttcctactgtctctatgttctcctgcttgccatcaatggagtgacagagtgtttcacatttgctgccatgagcaaagaggaggtcgacaggtacaattttgtgatgctggccctgtcctcctcattcctggtgttatcctatctcttgacccgttggtgtggcagcgtgggcttcatcttggccaactgctttaacatgggcattcggatcacgcagagcctttgcttcatccaccgctactaccgaaggagcccccacaggcccctg

SEQ ID NO: 79833 - DNA, 402 bp, Homo sapiens
  sig_peptide (136)...(271): this location contains the signal peptide sequence, MGIKHFSGLFVLLCIGFGLSILTTIGEHIVYRLLLPRIKNKSKLQ, Run with SignalP
  misc_feature (22)...(403): similar to gi1050330 in the genepept database release 114, Run with FASTXY 3.3t00, default parameters
cgggtcgacccacgcgtccgatccgagctaatcagtcaatacaagtcacatgggtttatggatatgctccatgacaagtggtacagggtggttccctgtggcaagagaagttttgctgtcacggagactttgcaaatgggcatcaaacacttctctgggctctttgtgctgctgtgcattggatttggtctgtccattttgaccaccattggtgagcacatagtatacaggctgctgctaccacgaatcaaaaacaaatccaagctgcaatactggctccacaccagccagagattacacagagcaataaatacatcatttatagaggaaaagcagcagcatttcaagaccaaacgtgtggaaaagaggtctaatgtgggaccccgtcagcttaccgtatgg

SEQ ID NO: 79834 - DNA, 407 bp, Homo sapiens
  sig_peptide (76)...(211): this location contains the signal peptide sequence, MLASRVSWGRGWGKPFCGALGLLLVLLPETLLEWQPCHSPLQWKI, Run with SignalP
  misc_feature (16)...(240): similar to gi2621578 in the genepept database release 114, Run with FASTXY 3.3t00, default parameters
gaacttttgctgctgttacaaatacttgtcactagcttccatttcctcttcattgtatttgaaaacaatgggagaatgttggccagcagggtgtcctggggtagggggtggggtaagcctttctgtggagctctgggtttgctcttagtactgctgccagaaacactgttagaatggcaaccctgccattctcccctccagtggaagattctactttattcaggaaggctggtggcttgcaagggctaggcttacacaagccagccaagattgacaaggtaggggagtgctttcaatggaggccatagttgtcatcttttcttctgagcaggctctaggacatacaatgagcacattgagatgtcctgtattgcgaggatgaggctgatatgtttcatcattctcag

SEQ ID NO: 79835 - DNA, 409 bp, Homo sapiens
  sig_peptide (244)...(379): this location contains the signal peptide sequence, MRTGFLAPTSMFTFVVLVITIVICLCHVCFGHFKYLSAHNYKIEH, Run with SignalP
  misc_feature (1)...(392): similar to gi3882305 in the genepept database release 114, Run with FASTXY 3.3t00, default parameters
tttggcgcagcctacgcctggatgatgtgcgtcttcacggtggtcatgacctacagtatcacctgccccatcatcgtgcccttcgggctcatgtacatgctgctgaagcacctggtagacaggtacaatctctactacgcctacctgccggccaagctggacaagaagatccactcgggggctgtgaaccaggtggtggccgcgcccatcctctgcctcttctggctgctcttcttttccaccatgcgcacggggttcctagctcccacgtctatgttcacatttgtggtcctggtcatcaccatcgtcatctgtctctgccacgtctgctttggacacttcaaatacctcagtgcccacaactacaagattgagcacacggagacagatactgtggaccccagaagca

SEQ ID NO: 79836 - DNA, 322 bp, Homo sapiens
  sig_peptide (129)...(264): this location contains the signal peptide sequence, MHRGVLVTLLKITVLKSMHRGILVTLLKITILKSMHRGVLDTLLK, Run with SignalP
  misc_feature (8)...(297): similar to gi4995988 in the genepept database release 114, Run with FASTXY 3.3t00, default parameters
tgctaaacgtcacggtcttaaaatccatgcacagaggcgtcctagacacactgctgaacatcacaatcttagaatccatgcacagaggcgtcctagacacactgctaaagatcgctgtcttaaaatccatgcacagaggcgtcctagtcacactgctaaagatcacagtcttaaaatccatgcacagaggcatcctagtcacactgctgaagatcaccatcttaaaatccatgcacagaggcgtcctggacacactgctaaagatcaccatcttaaaatccatgcacagaggcgtcctggtcacactgctgaagatcacaat

SEQ ID NO: 79837 - DNA, 329 bp, Homo sapiens
  sig_peptide (17)...(152): this location contains the signal peptide sequence, MCAHYVYGVVTSTYVIFSLFAFIIIIFSISYYFFILINILIHGEA, Run with SignalP
  misc_feature (11)...(328): similar to gi5869818 in the genepept database release 114, Run with FASTXY 3.3t00, default parameters
tacaattatcttccacatgtgcgcacattatgtttacggggtggtcacatctacttatgtaatattctcattatttgccttcatcattataatttttagtatctcatattatttctttatactgataaatattttaatacatggcgaagctgtttcaatttttactacctatgcaacatcgtacaatatcccgtatctttttctatttactgacactatttccttatatacatattttaagacttctattgatcttatctcatattccgcatcatcattttatctcctcctcccactaatctcttcgtactttctatacatatattccc

SEQ ID NO: 79838 - DNA, 584 bp, Homo sapiens
  misc_feature (1)...(584): n = a,t,c or g
  sig_peptide (371)...(506): this location contains the signal peptide sequence, MVGSEGEEFSSNSRVDSVMRRLCLWVLSSAVFLAMTLSSALSAAG, Run with SignalP
  misc_feature (1)...(375): similar to gi5420222 in the genepept database release 114, Run with FASTXY 3.3t00, default parameters
tacagacagattcacattgacattccaaggacgaatcctctcattccgttgttccagcaaccacttgtacaggagatctttgaaagaattctatttatttgggccatccgccaccctgccagtgggtatgtccagggaattaatgacctggtcactccattctttgtcgtcttcctctcagaatatgtggaagaggatgtggagaactttgacgtgaccaacttgtctcaagacatgctgcgaagcattgaggctgacagcttttggtgcatgagcaagctgctggatggaatccaggataactacacctttgcacaaccaggaatccagaagaaggtgaaggcactggaagagcttgtcagccggattgatggtaggttcagagggagaagagttctctagcaatagcagagttgattctgttatgaggcggttgtgcttgtgggtcctctcctcagctgtcttcctagccatgaccctttccagcgcactgagtgctgctggcagcaccgggatccttccacatctcancaggaaggcgaagtgagaactgtgctgttatatcaagttcttctttccccttg

SEQ ID NO: 79839 - DNA, 311 bp, Homo sapiens; identical to SEQ ID NO: 40115
  sig_peptide (50)...(185): this location contains the signal peptide sequence, MGRGLISRLEWGAGFSSFLLKLSQFSLFMVVLIYKVATNPKLANT, Run with SignalP
  misc_feature (137)...(48): similar to gi1197795 in the genepept database release 114, Run with FASTXY 3.3t00, default parameters

SEQ ID NO: 79840 - DNA, 292 bp, Homo sapiens
  sig_peptide (93)...(228): this location contains the signal peptide sequence, MCYGQLGLWFVVHLSAEGLDCSHVHLHQPRGPRRITWFCWVKKIP, Run with SignalP
  misc_feature (192)...(83): similar to gi20705 in the genepept database release 114, Run with FASTXY 3.3t00, default parameters
tatttgtctttcttgttcacgttaacttcccatcagacttgacaaaatgccaaattagctgttcacttttggtggatgaaggccaggtacagatgtgttatggccagctaggtttgtggtttgtggttcacctctctgctgaaggcctggattgtagccatgttcatctgcaccagccccggggcccaagaagaataacatggttttgttgggtcaaaaagatacccatggagaaaaatccaaaggtagcaatggcagctgccatcccaggtagccccagactcatgctcag

SEQ ID NO: 79841 - DNA, 348 bp, Homo sapiens
  misc_feature (1)...(348): n = a,t,c or g
  sig_peptide (169)...(304): this location contains the signal peptide sequence, MFLVSIICVTLFFPIVALFDLYATLAHCVYAFSTDSLLPAVMLTA, Run with SignalP
  misc_feature (15)...(258): similar to gi5305594 in the genepept database release 114, Run with FASTXY 3.3t00, default parameters
ggcacgagagaggctatgagtacaatcaggacctgatccgcaagggtcaggccaacaaggtgaagaaactctccatcgttgtctccctggggacagggaggnccccacaagtgcctgtgacctgtgtggatgtgatatctagcagcatcaccggttacttacgttcgtatgtttttggtgtcaattatatgtgttactctcttctttcctattgtagctctcttcgatctttacgccactctcgctcactgtgtgtacgcgttttctactgactctcttctgcctgctgtgatgcttactgcgcttcctcgtagtctcttcttttcgtcgtcgttgattttatcatcg

SEQ ID NO: 79842 - DNA, 347 bp, Homo sapiens
  sig_peptide (99)...(234): this location contains the signal peptide sequence, MVPAAGALLWVLLLNLGPRAAGAQGLTQTPTEMQRVMLRFGCSVI, Run with SignalP
  misc_feature (47)...(208): similar to gi162885 in the genepept database release 114, Run with FASTXY 3.3t00, default parameters
ggcacgagccggtgggtctacagcggaagggagggagcgaaggtaggaggcagggcttgcctcactggccaccctcccaaccccaagagcccagccccatggtccccgccgccggcgcgctgctgtgggtcctgctgctgaatctgggtccccgggcggcgggggcccaaggcctgacccagactccgaccgaaatgcagcgggtcatgttacgctttggctgctctgtcatctgttgctattgtatctcagttcgtactggtcggtcccgggaaactggatagtctggagcagtcgattatgtactcggcatctctttgagttgatggagtatcgatgtgtggttg

SEQ ID NO: 79843 - DNA, 608 bp, Homo sapiens
  misc_feature (1)...(608): n = a,t,c or g
  sig_peptide (238)...(373): this location contains the signal peptide sequence, MKVWTWPSWFSGLTPRTFCQAHLVALSCLKSCSSRGLPNCGGKTM, Run with SignalP
  misc_feature (141)...(347): similar to gi4894651 in the genepept database release 114, Run with FASTXY 3.3t00, default parameters
gacacacagacacacacagatacacatacacacacacacacacacacacacacacacacacacacgctgtgcaaacgcgccgcattaggaacccaggggccaaggacaacttggccacactgcaaagaagtgagtgctggatttgtttaaaagccgcggagcaagagatccagggaataaacacatccaacactcttttggtaaacatttgctcatgggtcctctctcaccgtagacatgaaagtgtggacttggccaagctggttttctgggctaacgcccagaacattctgccaagcccaccttgtagccctctcatgcctcaaatcgtgttcttcccgtggcctccccaactgtggagggaaaacaatgtatatattctttaacaaaaggtaacaacatccttgtttaccaaaagagtgttggatttgtttaaaagccgcggcgaggagatccagggaaaaaacacttgatgagtcccgaatcacccctgcctcaggaatgacagcacaggcaccagtgtttagagggaattaaaatgacaggagccagggaggcctgacattaggtgccaccacatgcatgcaccggcggntagacggcgccgc

SEQ ID NO: 79844 - DNA, 378 bp, Homo sapiens
  sig_peptide (165)...(30): this location contains the signal peptide sequence, MWRLLSALCLCAWLLCLVLLLSVLLVCVDVSPVVRRVSCSWRPRL, Run with SignalP
  misc_feature (6)...(228): similar to gi9144 in the genepept database release 114, Run with FASTXY 3.3t00, default parameters
caggtagacccgcccagcgcgaaggcagcaaccgagggcgccaagaacaagaaacacgacgcacaacgggggagacatccacgcagacgagcagcacagaaagcaacaggaccagacaaaggagccatgcacagaggcacagagcagacagcaaacgccacataacgtgtcctcaccagaggagtgacaggagacagcgcgcgcaagccacaccacctccacagtaacaacagcttagctgtgtagcacccaatatgtctgggggaccatggccctaccctccacgcctctctctcttcctgggccacacaccctaccctattctatggcatttacgtcactcccaccttaggtaccatctcctgtccttctcgtgcc

SEQ ID NO: 79845 - DNA, 649 bp, Homo sapiens
  sig_peptide (70)...(205): this location contains the signal peptide sequence, MLLKILKGCVVFHHLPCSTQVYKPSLGMWGFLSPLWEVVFCHTPC, Run with SignalP
  misc_feature (649)...(52): similar to gi165919 in the genepept database release 114, Run with FASTXY 3.3t00, default parameters
ggcacgagcacctctttgagttccccaggaagaacccatttgcactaaaaacattattgagcaaagtagatgttactaaagattttgaagggatgtgtagtctttcatcacctaccttgcagcactcaagtttacaaaccctcattgggcatgtgggggttcctgagtcccctgtgggaagtggttttttgccatacaccttgtttcagagctcagcctcagttagacagggcaggctccagtttcctcatctacccctctccccacagcacctctaattaaccagcccttttcttaccactgagaaattgaactctactaaataattacagccttgtgccacataatgacgttttggttaacaggggaccgtgtgtataatggtggtctcataagaatataataccatgggtttactatacttttctatatttagaaatgtttagatttaagttagatatggttagatttaaaatacgtaacacaggctggacccggtagctcatgcctggaatcccagcactttgggaagccgagttgggtggatcacctgagggcaggagtttggaaccaccctggccaacttgggggaccccattcttctaaaaaacacacattacctgggggggggcgagccctttatcctacc

SEQ ID NO: 79846 - DNA, 1014 bp, Homo sapiens
  sig_peptide (318)...(183): this location contains the signal peptide sequence, MVNACWCGLLAALSLLLDASTDEAATENILKAELTMAALCGRLGL, Run with SignalP
  misc_feature (361)...(139): similar to gi5441889 in the genepept database release 114, Run with FASTXY 3.3t00, default parameters
aatacattgttggtgagattcacttgttggacttatcatcataacactttggccctgaacggaatatgatttgttggaaagtgtatctgcagtggtggtattcaatacagtaagagcataatggggaggcagggaacctttgcatattgcagttataaaggcatctcttgaagttacaaggcccagtcttccacaaagagcagccatagtcagttcagcttttaaaatattctcagtggcagcttcatctgtgctggcatcaagaaggagtgagagtgcagcaagaagaccacaccagcaggcattcaccatttcttcccaaacagtcctactaacaatttccttatccatttggtctgatgttgactgtaaatcctgctgttctgtcgactgtgttggtgaagaaccttcttcagtggtggtttgacattctgtttcaagctctcctagctctccttcaatcatacttgtgattccacgaacaaggtctagcaaacaatggaatgccacagacatggcgtaaccttcaggtatagttggaggctcaactttgtccaacatttctaagctgaaattatgaaaaatatagaatactaatgagaagccacaacaaaaaaaatacataaaactattttctacaatttacagactatagaaattaagattaacagaatagcaaaaaataaagggacattaccaaatttctttcatttagggaagagatctcttcatggtattctaaaaacctgattagaaaaattaaggcctgaccactgccataactaattattttaataatttacttctcattctcccctgagttgtgccaatgttttcattaaatattagatattagaaaaattaagactgacatgcaaaatacaatgagataaaacttcttaaactctgacttgtgccttaaaaataagatccattgccgggcgtggtgctcacgctgtaatccagcactttgggagccgagtggcggtcacgaggcaggagataagatatctg

SEQ ID NO: 79847 - DNA, 336 bp, Homo sapiens
  sig_peptide (234)...(99): this location contains the signal peptide sequence, MAKVTAFLYFFTRCTTWAFWSGVTLQQITVLHMQASSRRSFLTSL, Run with SignalP
  misc_feature (42)...(270): similar to gi4966252 in the genepept database release 114, Run with FASTXY 3.3t00, default parameters
agcagcagctggagttggattctattgtagaagaaaccataacaggagattatgccttaatcataaatggccacagtttggctcatgccctagaaagtgatgtcaagaatgatctcctagaacttgcttgcatgtgtaagactgtaatttgctgcagggtcactccactccagaaagcccaagtggtacatctggtgaagaagtacagaaatgctgttactttggccattggtgatggagccaatgatgtcagcatgattaaaagctagaaaaagacgtcgttcaccttttactatttgaggaagtaagtagctacggtgtagaggaaagaacacc

SEQ ID NO: 79848 - DNA, 791 bp, Homo sapiens
  sig_peptide (462)...(597): this location contains the signal peptide sequence, MLMYMFYVLPFCGLAAYALTFPGCSWLPDWALVFAGGIGQAQFSH, Run with SignalP
  misc_feature (84)...(233): similar to gi927525 in the genepept database release 114, Run with FASTXY 3.3t00, default parameters
ggcacgagactgttcactacctcctctacctggccatggccggcgccatctgcagaaggaagagataccggaattttggactctactggctgggttccttcgccatgagcatcctggtgttccttacaggaaacattcttggcaaatacagctccgagatcaggcctgccttcttcctcaccatcccctacctgctggtgccatgctgggctggcatgaaggtcttcagccagccccgggcgctaacccgctgcaccgccaacatggtgcaagaggaacaaagaaagggactcctgcagcgtccggctgacctggcccttgtcatatatctcatccttgctggcttcttcactctgttccggggcctggtggtgcttgattgccccacagatgcctgctttgtctatatctaccagtatgagccatacctgcgggaccctgtggcctaccctaaggtgcagatgctgatgtacatgttttatgtcctgcctttctgcggcctggctgcctatgctctcaccttccctggttgctcctggcttccagactgggccttggtgtttgctggaggcatcggccaggcacagttctcgcacatgggggcttccatgcacctgcgcacacccttcacctaccgtgtgcctgaggacacctggggctgcttcttcgtgtgcaatctgctgtatgcgctgggcccccacctgctggcctaccgttgccttcagtggcccgcattcttccaccagccaccaccctccgaccccctagccctccacaagaagcagcattga

SEQ ID NO: 79849 - DNA, 625 bp, Homo sapiens
  sig_peptide (152)...(287): this location contains the signal peptide sequence, MWSRCLLRHCYGLWFICLPAYVKVCHSKVRALKTAYDVLKKMQSK, Run with SignalP
  misc_feature (5)...(567): similar to gi3413914 in the genepept database release 114, Run with FASTXY 3.3t00, default parameters
ggcacgagctgatggatttctacaagcaaagaagaacaaattgccttcaaaatcaagtagtcctaatagccctttgcccatgttcagaagaacaaaacaggaaattaaatcagcccataaaattgcaaagaggtactcttccatccctcagatgtggtctaggtgtctactgcgccactgttatggactgtggtttatttgtctcccagcttatgtaaaagtctgtcattcaaaagtcagggctctgaaaacagcatatgatgtgcttaaaaaaatgcagtcaaagaagatggatccacctgatgaggtatgctaccgcattcttatgcaactctgtggacaatatgatcagccagtgcttgcagttcgagtgctttttgaaatgcagaaagctggtattgaccccaatgccattacttatggttattataataaggctgttttggaaagtacctggccttcaagaagtcgtagtggctattttctttggacaaaagtaagaaatgttgttttaggagtaacacagttcaaaagagctttaaagaagcatgcacacttatcacaaacaactatctcaggtggccagtatgatctatgagatataattcattatctaaagatgaag

SEQ ID NO: 79850 - DNA, 348 bp, Homo sapiens
  sig_peptide (76)...(211): this location contains the signal peptide sequence, MLLLLTWPYILLGFLFCAFVVVNGGIVIGDRSSHEACLHFPQLFY, Run with SignalP
  misc_feature (1)...(346): similar to gi3513451 in the genepept database release 114, Run with FASTXY 3.3t00, default parameters
aaaggaccatttgcagaattcagaaaaattcttcagtttcttttggcttattccatgtcctttaaaaacttgagtatgcttttgcttctgacttggccctacatccttctgggatttctgttttgtgcttttgtagtagttaatggtggaattgttattggcgatcggagtagtcatgaagcctgtcttcattttcctcaactattctactttttttcatttactctctttttttcctttcctcatctcctgtctcctagcaaaattaagacttttctttccttagtttggaaacgtagaattctgttttttgtggttaccttagtctctgtgtttttagtttggaat

SEQ ID NO: 79851 - DNA, 343 bp, Homo sapiens
  sig_peptide (198)...(63): this location contains the signal peptide sequence, MMTQLIAVTLLMLLDNRCGSLGSPSLRTRGPRHAFRGDEPGLIRL, Run with SignalP
  misc_feature (197)...(312): similar to gi2895492 in the genepept database release 114, Run with FASTXY 3.3t00, default parameters
cggacgtagcgacgtagcgcgataccaggtcgtgttaaggtaggcggccaagtatgaccaccgagcctgatcaacccaggctcgtccccacgaaatgcatggcgtggaccccgcgtccttaaggacggcgatcctagggagccacaccggttatccaggagcatcagtaaggtgaccgcaatgagttgagtcatcatgcggtgatcagggccctcctccaggagtcctgcaccctctcaggccagggtgggccccaccatccttgtgggcaggtatcctctggagtcaccccgctactccaaaagcttcactaaggtaagcaacatgttttctttcactttgc

SEQ ID NO: 79852 - DNA, 368 bp, Homo sapiens
  misc_feature (1)...(368): n = a,t,c or g
  sig_peptide (266)...(131): this location contains the signal peptide sequence, MTVFRFESLDSVVCXGXFGVGLLVLCGLVVCFWFFLCVSCPSPCL, Run with SignalP
  misc_feature (1)...(312): similar to gi3478639 in the genepept database release 114, Run with FASTXY 3.3t00, default parameters
aagcagggaaaaaagacgaaaaaaaggggaaaagccgaaaaaaacgcgcaacagcagccgaaaaaaaagggnacaaagagaaagaaggaaagcggcaaaaaaaaggagaaaaccaaaagaanagaacagaaaggcaaggagagggacacgaaacacacaaaaaaaaccaaaaacaaacaaccagaccacacaaaaccagcagacccacaccaaanacaccngtacaaaccacagaatccagagactcaaaacgaaatacagtcatacagtaagatatgtgcaaggtttcagggagcccagcagccagaccttacacaaatcaagcaagtttaagaaatattccagaattaattcttccagctcgtgcc

SEQ ID NO: 79853 - DNA, 638 bp, Homo sapiens
  sig_peptide (35)...(170): this location contains the signal peptide sequence, MPIGLRGLMIAVMLAALMSSLTSIFNSSSTLFTMDIWRRLRPRSG, Run with SignalP
  misc_feature (14)...(640): similar to gi520469 in the genepept database release 114, Run with FASTXY 3.3t00, default parameters
cccacgcgtccgccccaagctggtcatggaactgatgcccatcggtctgcgggggctgatgatcgcagtgatgctggcggcgctcatgtcgtcgctgacctccatcttcaacagcagcagcaccctcttcactatggacatctggaggcggctgcgtccccgctccggcgagcgggagctcctgctggtgggacggctggtcatagtggcactcatcggcgtgagtgtggcctggatccccgtcctgcaggactccaacagcgggcaactcttcatctacatgcagtcagtgaccagctccctggccccaccagtgactgcagtctttgtcctgggcgtcttctggcgacgtgccaacgagcagggggccttctggggcctgatagcagggctggtggtgggggccacgaggctggtcctggaattcctgaacccagccccaccgtgcggagagccagacacgcggccagccgtcctggggagcatccactacctgcacttcgctgtcgccctctttgcactcagtggtgctgttgtggtggctggaagcctgctgaccccacccccacagagtgtccagattgagaaccttacctggtggaccctggctcaggatgtgcccttgggaactaaagcag

SEQ ID NO: 79854 - DNA, 411 bp, Homo sapiens
  sig_peptide (227)...(92): this location contains the signal peptide sequence, MYSLARMLRPLRYSWSFWAAPRRAPSVSPGLSPSLCPSNAPTGPA, Run with SignalP
  misc_feature (3)...(99): similar to gi1469185 in the genepept database release 114, Run with FASTXY 3.3t00, default parameters
cagacccaggcagccggcaggcgggccggaggcgcggccagcagcaggagaccgaaaccttctacctcacggtggggagggctgggctggtgggcgggacccgtgggggcattgctggggcagagggaggggctcaagccagggctaacacttggggctcttcttggggctgcccagaagctccaggagtatctgagtggacggagcatcctcgccaagctgtacatgctgatctttcttcagctctgggtcacctcagtggccggagcagctgcctgatcccagggtcctccactctcaatcagtcatcaactgtccttttctgggtgggcctcttccaggccactgttgggctcccctatagcctccgctgattgaagggagcatccttaactagtaatgggaacgtat

SEQ ID NO: 79855 - DNA, 490 bp, Homo sapiens
  misc_feature (1)...(490): n = a,t,c or g
  sig_peptide (272)...(407): this location contains the signal peptide sequence, MISWSFRFRPVIARALRRSRCFPFVFNMNNINIKINVCVFLCIHK, Run with SignalP
  misc_feature (490)...(0): similar to gi5456741 in the genepept database release 114, Run with FASTXY 3.3t00, default parameters
gtgcgnagnnnctacgatgctctggactgaccgccctcccgggncgacccacgcgtccggttacattattggacaaatactagtaaattgctgtctgttatagtcaagatttttcaatcttctcaatagtcagttgagactaatcaaaatagtttttacgtgtagtttggatgtggaaatgctaccactttatcactgaaattgctggagtttcatattgaaggtggaatgcacttaaaatggggtaacacacaagggaaaatttggcaaaatgatttcatggagtttcagatttaggccagtgatagccagggcccttaggagaagtagatgtttcccttttgtatttaatatgaataacattaatattaaaataaatgtatgtgtattcctttgtattcacaaaggaatgttattggatgtgtgagttgtcagttattctgggagatgtttaattcagtagcaggaaatggagcggccctggaatttn

SEQ ID NO: 79856 - DNA, 470 bp, Homo sapiens
  misc_feature (1)...(470): n = a,t,c or g
  sig_peptide (88)...(223): this location contains the signal peptide sequence, MFSTLLLVVIRVQVIQSQLPVFTRFDNPAAVSPTPTRQLTFNYLL, Run with SignalP
  misc_feature (82)...(408): similar to gi5901846 in the genepept database release 114, Run with FASTXY 3.3t00, default parameters
aggcgccaattatcgctgtgactgagancgtaagnaccggcccgacccacgcgtccgcccacgcgtnncggaaaactcattgtcttgatgttcagtacattattacttgttgtgattagagtccaggttattcaatcccaacttccagtattcaccaggtttgataacccagctgctgtaagcccaactcctacaaggcaactaacttttaactacctccttcctgtgaatgcttggttgttattaaatccttcaaagctctgctgtgattggaccatgggaacaataccacttatagagtcattactagatattcgaaatctggccacatttactttcttttgttttctggggatgttgggagtattcagtatcagatactctggtgattcctccaagactgttttaatggcgctttgtttaatggcattaccatttattcctgcatcgaaccttttttttccagttgg

SEQ ID NO: 79857 - DNA, 649 bp, Homo sapiens
  sig_peptide (17)...(152): this location contains the signal peptide sequence, MLRGGCLFWETPGLGMAVLGEATQPGEGTAMEGDLSLLGEPVGER, Run with SignalP
  misc_feature (612)...(11): similar to gi2570024 in the genepept database release 114, Run with FASTXY 3.3t00, default parameters
ggcggtggaagagttcatgttgagaggcggctgcttgttctgggagacccccgggctgggcatggccgtcttaggtgaggcaacccagcctggagaaggcaccgccatggaaggagacttgagcctgctgggcgagccagtgggtgaacggacactgagggaggagccgaggacctggggcgacttgagaggtcctggcgggttggcagaaggcaagggcaccatctgtgagggagtctggggtgacttgaggttggcagagggcgaggtgaccaggggtgagtgcacctggctaagggtgggcgacttcaagtgccccatgcccggtgagcccatctgattaatactgatggtgaggtccgaaggccgcctgcctagcccccggtttggggctgaatgcacggtcccaggaggattggacgcagggggcagaggcatgtggctgagccgggtggtgcccacgttgctcatgggcattgagctctgatcagggctgaacatgtcttgggtattgcccatgtcctgggacatggcttggtagggtccctggcctccagagaatccctgctggccctggttgggaaactgtgaaggcatcagcatcttctgcgggccgcccatcacgccactgctgttctgggcccgaacc

SEQ ID NO: 79858 - DNA, 428 bp, Homo sapiens
  misc_feature (1)...(428): n = a,t,c or g
  sig_peptide (37)...(172): this location contains the signal peptide sequence, MLFFLQSLFMLATVVLYFSHLKEYVASMVFSLALGWTNMLYYTRG, Run with SignalP
  misc_feature (1)...(428): similar to gi5263196 in the genepept database release 114, Run with FASTXY 3.3t00, default parameters
tcgatgaagaccctgtttgtggacagctacagtgagatgcttttctttctgcagtcactgttcatgctggccaccgtggtgctgtacttcagccacctcaaggagtatgtggcttccatggtattctccctggccttgggctggaccaacatgctctactacacccgcggtttccagcagatgggcatctatgccgtcatgatagagaagatgatcctgagagacctgtgccgtttcatgtttgtctacatcgtcttcttgttcgggttttccacagcggtggtgacgctgattgaagacgggaagaatgactccctgccgtctgagtccacgtcgcacaggtggcggggtttttctnanacccccctctntcttctacataaactgtactccacctgcctggaactgtccaactccaccatngattg

SEQ ID NO: 79859 - DNA, 1599 bp, Homo sapiens
  sig_peptide (1466)...(1331): this location contains the signal peptide sequence, MSPKPFSIPFLAFILSFSLSLSFFFSFPVLSFFLSVLSPFSWFPF, Run with SignalP
  misc_feature (23)...(1502): similar to gi3868778 in the genepept database release 114, Run with FASTXY 3.3t00, default parameters
cccgggtcgacccacgcgtccggtgagccttctggtctttcgccaggaagacgccttccacccaatggaactgaatgcagagccaagccagatgcagattccaaaagaaacgaaagcagaagatgaggatattgttcttacacctgatggcaccagggaatttctgacatttgaagtcccacttaatgattcaggatctgcaggccttggtgtcagtgtcaaaggtaaccggtcaaaagagaaccacgcagatttgggaatctttgtcaagtccattattaatggaggagcagcatctaaagatggaaggcttcgggtgaatgatcaactgatagcagtaaatggagaatccctgttgggcaagacaaaccaagatgccatggaaaccctaagaaggtctatgtctactgaaggcaataaacgaggaatgatccagcttattgttgcaaggagaataagcaagtgcaatgagctgaagtcacctgggagcccccctggacctgagctgcccattgaaacagcgttggatgatagagaacgaagaatttcccattccctctacagtgggattgaggggcttgatgaatcgcccagcagaaatgctgccctcagtaggataatgggtaaataccagctgtcccctacagtgaatatgccccaagatgacactgtcattatagaagatgacaggttgccagtgcttcctccacatctctctgaccagtcctcttccagctcccatgatgatgtggggtttgtgacggcagatgctggtacttgggccaaggctgcaatcagtgattcagccgactgctctttgagtccagatgttgatccagttcttgcttttcaacgagaaggatttggacgtcagagtatgtcagaaaaacgcacaaagcaattttcagatgccagtcaattggatttcgttaaaacacgaaaatcaaaaagcatggatttaggtatagctgacgagactaaactcaatacagtggatgaccagaaagcaggttctcccagcagagatgtgggtccttccctgggtctgaagaagtcaagctcattggagagtctgcagaccgcagttgccgaggtgactttgaatggggatattcctttccatcgtccacggccgcggataatcagaggcaggggatgcaatgagagcttcagagctgccatcgacaaatcttatgataaacccgcggtagatgatgatgatgaaggcatggagaccttggaagaagacacagaagaaagttcaagatcagggagagagtctgtatccacagccagtgatcagccttcccactctctggagagacaaatgaatggaaaccaagagaaaggtgataagactgatagaaaaaaggataaaactggaaaagaaaagaagaaagatagagataaggagaaggataaaatgaaagccaagaagggaatgctgaagggcttgggagacatgttcagccttgccaaactgaagcccgagaagagatgaacaacaaagcgattcaaaacatgtcttgaacagcacatattgcacagttgttgttttttttaaacaaacaataaatttacttttaatgaaaaaaaaaa

SEQ ID NO: 79860 - DNA, 892 bp, Homo sapiens
  sig_peptide (242)...(377): this location contains the signal peptide sequence, MNRVMRGLAITTTCLLSMLQAITISPSILWNHAAVQYVHGHSLVQ, Run with SignalP
  misc_feature (188)...(321): similar to gi1055254 in the genepept database release 114, Run with FASTXY 3.3t00, default parameters
cccggaagctgggaaatgacttattaaccttcatggcctctggtcttctgaggaagcagtctgaggagcccgagttttgaaaagggaagcaatcctccaaggctgcgatttccacagaaatcacatgtgagccacaggtgtcattttaaaatttctagtagcaacagaaacgaggaataaacagatggtgtttgagtcactgaatttttggaaggacttcaaatgtcaagcattattctccatgaacagggtgatgaggggtctggccatcaccaccacctgcctcctgagcatgctccaggccatcaccatcagccctagcatcttgtggaatcatgctgctgtccagtatgtacacggtcattctcttgttcaggcatgagaggtgataccagagccttcgcaacaccagccgctccccaagagcctccccagagaaaagggccatgcagaccagcctgtgtcttctggaactggaacacggactacccacccctatgttgaggcagcttctgacaggccttactgcttacggtcatcggtcatcagcccacccgcttgcatctccagctgcaagtcactctgggcccagttctcagacaaggccaagtcggccacaccaggggctctctggggagcctggaggaaggttgactctttagtctgctgcatctcagccaggagttcatccatcttgaaggtctgaggggcacggggatacaacgggccaactggggcccttcatagaatacccccaccctattcttttccgaacctctctccaaggctctgaagactgcctccgacgtctgtctctcgcgcccgcgccacccgtaaaccactacgactcttcactcattcctgcaagtcttcactccctctactccgatgc

SEQ ID NO: 79861 - DNA, 312 bp, Homo sapiens
  sig_peptide (66)...(201): this location contains the signal peptide sequence, MTARLMRSLLAAQLTFVYRVAHLMNVAQRIRGNRPIKNERLLALL, Run with SignalP
  misc_feature (6)...(315): similar to gi987948 in the genepept database release 114, Run with FASTXY 3.3t00, default parameters
catagacccatgagatgtacttgaacggcctgagaagattcagtcatgcattgttgatgggcgatatgactgccagacttatgcggtctttgctggctgcacaacttacatttgtatatagggtggcgcatctaatgaacgttgctcaacgcataaggggaaatcgtcccattaagaatgagagactacttgcattgcttggagataatgaaaagatgaatttgtcagatgtggaacttatcccgttgcctttagaaccccaagtgaaaattagaggaataattccggaaacagctacactgtttaaaagtg

SEQ ID NO: 79862 - DNA, 346 bp, Homo sapiens
  sig_peptide (75)...(210): this location contains the signal peptide sequence, MYFGEGENDHKKQILGRKLAFWLSTVFLAWVIVVAWWRILGVCGM, Run with SignalP
  misc_feature (69)...(298): similar to gi2329841 in the genepept database release 114, Run with FASTXY 3.3t00, default parameters
ggcacgagggggctgcagcattcagatatgagtctcacagaggggtttgcagaaacaattagctggagctgaaaatgtactttggggaaggggaaaatgaccacaagaaacagatacttggaaggaaattggctttttggctatccacagtgtttctggcatgggtcatagtcgtggcttggtggagaatcctcggtgtttgtggcatggatcgtagtcatggcttggtggagaatcctcggtgtttccagcatgggtcagtcgcggcttggtggagaatggctgaatcctggcaactgtggcctttgcaggggctgtagttgtgcattcgtgaatctgacgggga

SEQ ID NO: 79863 - DNA, 426 bp, Homo sapiens
  sig_peptide (157)...(22): this location contains the signal peptide sequence, MSTLRMLHVVIRVFYSLQRTFTPIISLDLDHSLGKWTRERTGRFC, Run with SignalP
  misc_feature (148)...(259): similar to gi747662 in the genepept database release 114, Run with FASTXY 3.3t00, default parameters
tgcgggcagcgcagaatcagtgcagaatctgccagtccgttcccttgtccactttccaaggctatgatcaaggtcaagtgagataataggtgtgaaggttctttgtaaactgtaaaacaccctgataacaacatgtaacattcgtaaggtgctcatgccataccaagtgttgttctaaatagttatataactcattctacccttacaatagtcctaagaagcaactattattacgatcattccctttacacagacgggcagactgaggtgagaaagattaagtaagctgccccaaattccagagctagaaagtagcagagcctagattcaatcccaagcaacctggctccagggtccttgctctgagcactcagctctccctcctatatgccactcagtggctctgtggcctcgcccacgcgtccg

SEQ ID NO: 79864 - DNA, 347 bp, Homo sapiens
  sig_peptide (180)...(315): this location contains the signal peptide sequence, MFTNYKLFYLFYLTLSFQSEPDNTSLLIALESIHSYSTLQNYLAF, Run with SignalP
  misc_feature (126)...(329): similar to gi41981 in the genepept database release 114, Run with FASTXY 3.3t00, default parameters
ctttcataaaaggccttatctattaggaaacaaacattactcaacacatcacaatgtgataaggaaaactaacaaatctatactatcatttcaattagagttaatgaggttaaaatatcaccaagaacataaatactaaaaattacttttatattagcctaaatagaaagtcatgtataatgtttacaaattacaaactcttctacctattttacctaacattatcttttcaatctgaacctgacaacaccagcttacttattgcacttgaatccatacacagctactctactttgcaaaactacttagcctttcccgcctcctatcattctagttgcttctaatta

SEQ ID NO: 79865 - DNA, 206 bp, Homo sapiens
  sig_peptide (38)...(173): this location contains the signal peptide sequence, MCRALLLLLCSPNSSFQWLPLPVHPHTTIRYRSYNMVPVKLTNVQ, Run with SignalP
  misc_feature (151)...(74): similar to gi43014 in the genepept database release 114, Run with FASTXY 3.3t00, default parameters
catctgttccctcctctctatattcattgaggccaccatgtgcagggctttattacttctcctgtgctcccctaacagctctttccagtggctgcctcttccagtccatcctcataccaccatcagatataggtcctacaacatggttccagtcaagctcacaaatgttcagtgacatttagtgacacatgctgtcgacgcggccg

SEQ ID NO: 79866 - DNA, 857 bp, Homo sapiens
  sig_peptide (137)...(272): this location contains the signal peptide sequence, MLTLFAAMLSCGIHLQRLIQEKGFVSTIIRLLDSPSTCIRAKAFL, Run with SignalP
  misc_feature (11)...(361): similar to gi602380 in the genepept database release 114, Run with FASTXY 3.3t00, default parameters
ggggataacagcagtatcggccttgtgtagaatcactcgccattctcctactgccttccaaaatgttattgaaaaggtgggactgaactcagtaataaactccctggcctctgccatctgcaaagttcagcagtacatgttgaccttattcgctgccatgttgtcctgtgggattcatcttcaaagactaatccaagaaaagggttttgtctccacaattatccgtttacttgacagcccctcaacatgcattagagcaaaagccttcctggttcttctatatattttgatttataaccgtgagatgttgctgctcagttgccaagcaagactggtgatgtacatcgagagagacagcagaaagaccactccaggcaaggagcagcaaagtggcaatgaatacctgtccaaatgcctggatcttctcatctgtcacattgtgcaggagctgccacgaatcctgggtgacattcttaactccttggctaatgtttctggacgtaaacacccatcaacagttcaagtgaaacagctgaagttgtgtctccccctgatgcctgtagtgcttcacctcgtaacttcacaggtatttcgaactcaagttgggaacaaaagagtttctttttaactatggaactattcttaatcatattaaatctgtagactcaggaagaaacgaaccttgatggggcccctatggactggcaccctttccaaaaaatttattcaagaaacacctttgcaacttttttgaacccattaatcccagtttcctatttttattgaaaagactattccttcccacggtggtggactatatactgggccccccttggggcccctggtttcaaaaaccc

SEQ ID NO: 79867 - DNA, 238 bp, Homo sapiens
  sig_peptide (16)...(151): this location contains the signal peptide sequence, MHTIIHLRFLSIVLCFSSVSYGYLHFPQFSHQASPRSRSLAFSSI, Run with SignalP
  misc_feature (21)...(70): similar to gi436923 in the genepept database release 114, Run with FASTXY 3.3t00, default parameters
ccttgattgagcaaaatgcacacaattatacatttgcgttttctctctattgttttatgtttttcaagtgtttcatatggatatttacattttccccaattctcacaccaagcttctccaagatcaagaagccttgccttcagtagtatcttgggtatagactacccaatatactactgaaggcaaggcttcttgatcttggagaagcttggtgtcataattggtgctgacgcgggcg

SEQ ID NO: 79868 - DNA, 426 bp, Homo sapiens
  sig_peptide (196)...(331): this location contains the signal peptide sequence, MVANMFYIVVIMALVLLSFGVPRKAILYPHEAPSWTLAKDIVFHP, Run with SignalP
  misc_feature (91)...(412): similar to gi3243075 in the genepept database release 114, Run with FASTXY 3.3t00, default parameters
gccataatttctttcttcattggatttggactaagatttggagcaaaatggaactttgcaaatgcatatgataatcatgtttttgtggctggaagattaatttactgtcttaacataatattttggtatgtgcgtttgctagattttctagctgtaaatcaacaggcaggaccttatgtaatgatgattggaaaaatggtggccaatatgttctacattgtagtgattatggctcttgtattacttagttttggtgttcccagaaaggcaatactttatcctcatgaagcaccatcttggactcttgctaaagatatagtttttcacccatactggatgatttttggtgaagtttatgcatacgaaattgatgtgtgtgcaaatgattctgttatccctcaaatctgtggtccgtcgacgcggccg

SEQ ID NO: 79869 - DNA, 360 bp, Homo sapiens
  misc_feature (1)...(360): n = a,t,c or g
  sig_peptide (23)...(158): this location contains the signal peptide sequence, MDWTWRILFLVAAXXXXXXXXXLVQSGAAEKKSGASVTVSCRASG, Run with SignalP
  misc_feature (360)...(): similar to gi37836 in the genepept database release 114, Run with FASTXY 3.3t00, default parameters
ccccagagcacagcgcctcaccatggactggacctggaggatcctctttttggtggcagctgnnnnnnnnnnnnnnnnnnnnnnnnngcttgtgcagtctggggctgcggagaaaaagtctggggcctcagtgacggtttcctgcagggcttctggatacaccttcagtacctccgttatgcattgggtgcgccaggcccccggacaaaggcctgagtggatgggatggatcaacgttgacagtcgtcatacaaaatattcacagaagttccagggcagactctccattaccacaaacacgtacgcgaacacagcctacatggggctgagcagcctgagatctgaagacacggccgtgtn

SEQ ID NO: 79870 - DNA, 427 bp, Homo sapiens
  sig_peptide (168)...(303): this location contains the signal peptide sequence, MCLITSLSWTIFELILGMPSWCRPKESCLELHSRGRNSICGFHFP, Run with SignalP
  misc_feature (111)...(226): similar to gi3323367 in the genepept database release 114, Run with FASTXY 3.3t00, default parameters
acgctcacatctatctacatatataggagagtatacactcgcttcatgagaactttgtgaagacaatcattgctccatttgctaatgccaaattcaatttttgccagctggccctctatattttcacagtaaatccctgtctctatgtaattataaccacaacatacatgtgtttaatcacctctctatcttggacaatttttgaattaatacttgggatgccttcatggtgtaggcctaaggaatcctgccttgaactacattcaaggggcaggaattctatctgcggattccatttccctgtaaaattatgcagccctggctgcataatgctgtcactgcctgaagcagctgctcctgctgctttcagcattgtacattgtcaacttttctgtcacttcattcacaaactttggctccacattgt

SEQ ID NO: 79871 - DNA, 445 bp, Homo sapiens
  sig_peptide (117)...(252): this location contains the signal peptide sequence, MMHNIIVKELIVTFFLGITVVQMLISVTGLKGVEAQNGSESEVFV, Run with SignalP
  misc_feature (83)...(192): similar to gi4809026 in the genepept database release 114, Run with FASTXY 3.3t00, default parameters
aagcgcgctagtagcagctctggcagaagcaacggtggcttcgagggatggcggcggctgcaacaggacctgcagcatcccagaggaactgactaagactttggaacagaaaccagatgatgcacaatattatcgtcaaagagcttattgtcacattcttcttgggaattactgtggtgcagatgctaatttcagtgactggattaaaaggtgtcgaagctcagaatggctcggaatctgaggtgtttgtggggaagtatgagaccctcgtgttttactggccctcgctgctgtgccttgccttcctgctgggccgcttcctgcatatgtttgtcaaggctctgagggtgcacctcggctgggagctccaggtggaagaaaaatctgtcctggaagtgcaccagggagagcacgtcaagcagctcctgaggataccccgccctca

SEQ ID NO: 79872 - DNA, 514 bp, Homo sapiens
  sig_peptide (73)...(208): this location contains the signal peptide sequence, MNVEGNIVLLWNAGTLTGVTFSFLSLFSFWSTLFVCSVSSILWDS, Run with SignalP
  misc_feature (61)...(185): similar to gi3860714 in the genepept database release 114, Run with FASTXY 3.3t00, default parameters
gaattatgtggggtcattcatggggtttatgaggtttgaagacatacttaaataacatgtgggttctctagaatgaatgtggaaggaaacattgtactcctgtggaatgctggcaccctaacaggagtgactttctcttttctctctcttttctccttttggtcaactctgtttgtatgtagtgtgagctctatactgtgggatagcattttttttagaatgcatgcatgtgaattgtgtagtgcagagatttgctatatccatttccagaatgtacatattgaacactgttttgcgaaaggcaggtctatgcaaactaccccaaagtccgaggaagctgagaggctgaaggaagagcctgacaaatcccgtttcttagaaagaaacatttaatagagacctacaagcagaagccgcatctgtgtctagggcagcggtaagacgagatgggggagccccacgccattaccccccagacccagggcttctatgccatagcgggtcgacgcggccg

SEQ ID NO: 79873 - DNA, 487 bp, Homo sapiens
  misc_feature (1)...(487): n = a,t,c or g
  sig_peptide (231)...(366): this location contains the signal peptide sequence, MTIHLCSNLMCHFLQRMGTILLCPNMQPHQNLTTVICSKGNLLRA, Run with SignalP
  misc_feature (275)...(393): similar to gi5739567 in the genepept database release 114, Run with FASTXY 3.3t00, default parameters
tttagatgatcccctctgaaaatgatagctgcgaanccnccnaantnngggtgacccacgcgtgcgggatacaggcctaggctatggtaattgtaagcggaagtgaaataaatattttatttgtgtgtgcatttatttaacaaacattaattatctccttgattaataaagcactgttcctgccctcaagtagttcatggtgggctagtccaagaacaattaaatatagtatgactatacatttatgtagtaatctaatgtgtcatttcttgcagagaatgggaacaattctcctttgcccaaatatgcaacctcaccaaaacctaacaacagttatatgttcaaaagggaacctcctgagggctgtgaaagggtcaaagtctttgaggaatgctcgtaagtatcccttccaccatccgcccnnggnggaaccccccaatggggggcaaacaaggnnggggggggcgcggtttaaacaacccacgan

SEQ ID NO: 79874 - DNA, 324 bp, Homo sapiens
  sig_peptide (102)...(237): this location contains the signal peptide sequence, MLVVFFFRIFAASCPFYFSIFHPFRPRPPAFRSSSPCTAIFPPTP, Run with SignalP
  misc_feature (133)...(274): similar to gi6007542 in the genepept database release 114, Run with FASTXY 3.3t00, default parameters
gcagagacaataatgcctagcagatggttgtcttgaggatgtcagccgtgagcgaatgcctggcacctagtaagtgctcagtagctggtgaaatattattaatgctggttgttttctttttccgcatctttgccgcctcctgtcctttctatttttctattttccaccccttccgcccccgccctcctgcctttcgctcctcatcgccttgcactgccatcttcccacccactcccctcaccccctggcgccctggccgcccctccgctgccgtgggtgcagctggagttcgtggactacgtgttccacggggagcgcggccgc

SEQ ID NO: 79875 - DNA, 775 bp, Homo sapiens
  sig_peptide (47)...(182): this location contains the signal peptide sequence, MSGRWVLAWYRARRAVTLHSAPAVLTADCSRPAVAPDLFWGTYRP, Run with SignalP
  misc_feature (2)...(459): similar to gi2344810 in the genepept database release 114, Run with FASTXY 3.3t00, default parameters
tggaggagtggctctggccgtcgtggtcctgtctttggccctgggtatgtcggggcgctgggtgctggcgtggtaccgtgcgcggcgggcggtcacgctgcactccgcgcctgctgtgttgactgccgactgctccagacccgccgtggccccggacctcttctggggaacctaccgccctcacgtctacttcggcatgaagacccgcagcccgaagcccctcctcaccggactgatgtgggcgcagcagggcaccaccccggggactcctaagctcaggcacacgtgtgagcagggggacggtgtgggtccctatggctgggagttccacgacggcctctccttcgggcgccaacacatccaggatggggccttaaggctcaccactgagttcgtcaagaggcctgggggtcagcacggaggggactggagctggagagtgactgtagagcctcaggtcagggcctcaggacacccttttctcagcccagaccccctccatccttcccttgctgccagcaaatgcagcatgaagtgggctctggctgcctggcttaaatcctgccttaaacccagccttatattttttaattaccagaatcctgagtaatgggcttctttacaaaagagaaaatggatggttagacatggtggctcatgcctgtaatcccaacaacttgggaggccaaggtgggcggatcacttaaggtcaggaattcaggaccagctgggccaacatggcgaaacctcttctctactagaaacacaaaaatag

SEQ ID NO: 79876 - DNA, 611 bp, Homo sapiens
  sig_peptide (281)...(416): this location contains the signal peptide sequence, MYALYITVHGYFLITFLFGMVVLALVVWKIFTLSRATAVKERGKN, Run with SignalP
  misc_feature (11)...(571): similar to gi2117161 in the genepept database release 114, Run with FASTXY 3.3t00, default parameters
tgatgctgcctgctgggcccggggggctgtcttccactacttcctgctctgtgccttcacctggatgggccttgaagccttccacctctacctgctcgctgtcagggtcttcaacacctacttcgggcactacttcctgaagctgagcctggtgggctggggcctgcccgccctgatggtcatcggcactgggagtgccaacagctacggcctctacaccatccgtgatagggagaaccgcacctctctggagctatgctggttccgtgaagggacaaccatgtacgccctctatatcaccgtccacggctacttcctcatcaccttcctctttggcatggtggtcctggccctggtggtctggaagatcttcaccctgtcccgtgctacagcggtcaaggagcgggggaagaaccggaagaaggtgctcaccctgctgggcctctcgagcctggtgggtgtgacatgggggttggccatcttcaccccgttgggcctctccaccgtctacatctttgcacttttcaactccttgcaaggtgtcttcatctgctgctggttcaccatcctttacctcccaagtcagagcaccacagtctcctcttctactg

SEQ ID NO: 79877 - DNA, 396 bp, Homo sapiens
  sig_peptide (201)...(66): this location contains the signal peptide sequence, MNHWGAKRNLCLLFIFSLPLKHFLFGSCFGLLSTYFIYTCIHIEC, Run with SignalP
  misc_feature (222)...(354): similar to gi1418980 in the genepept database release 114, Run with FASTXY 3.3t00, default parameters
agtttgtcatctttattcatcaagcactccagcaaaaaaaaatctgaacatgtatataaatacattcaatatgtatgcatgtgtatataaaatatgtactcaataatccaaaacaactcccaaaaaggaaatgttttaagggtaatgaaaatatgaataataagcataagttccttttggccccccagtgattcatcacatgcatcctacgttgcaaactactgcccagcctacatttgccacagcacggccctctcgctcttgtatgctccctgaattttcctctccccctgccttcccctctctgtataaagcaacccactcttcaccggccaaggtacccggatcccgttacgtgaggagaacgagcccagaaaggacgccatggtggtcccc

SEQ ID NO: 79878 - DNA, 880 bp, Homo sapiens
  sig_peptide (438)...(573): this location contains the signal peptide sequence, MVKSVIFLSFWQGMLLAILEKCGAIPKIHSARVSVGEGTVAAGYQ, Run with SignalP
  misc_feature (207)...(883): similar to gi5596705 in the genepept database release 114, Run with FASTXY 3.3t00, default parameters
cgccaccccccatctcctccatctcctctatccttccatcccctccatcccttcgtccctccatcccctccgtccctccatccctccgtcctctccgtctccttcatcctctctgtccctccatccggtacagttccgtctgccagaggcagggcttgcttcatgccttctgtgctcctcctccacactcaacctccttttccccccaacaggccaccctgcagttctgtgtggtgaagccactcatggcggtcagcaccctccaagggtctgtcccagccagaaaatgctccccgtcccgcagcgtcaccagtggctacctctacgtgaccatcatctacaacatctccgtcagcctggccctctacgccctcttcctcttctacttcgccacccgggagctgctcagcccctacagccccgtcctcaagttcttcatggtcaagtccgtcatctttctttccttctggcaaggcatgctcctggccatcctggagaagtgtggggccatccccaaaatccactcggcccgcgtgtcggtgggcgagggcaccgtggctgccggctaccaggacttcatcatctgtgtggagatgttctttgcagccctggccctgcggcacgccttcacctacaaggtctatgctgacaagaggctggacgcacaagcctcctcacctgcccctcccgctccctgcccggcaggccgctgtgcccccatgaagagcatctccagcagcctcaaggagaccatgaacccgcacgacatcgtgcaggacgccatccacaacttctcacctgcctaccagcagtacacgcagcagtccaccctggagcctgggcccacctggcgtggtggcgcccacggcctctcccgctc

SEQ ID NO: 79879 - DNA, 609 bp, Homo sapiens
  sig_peptide (90)...(225): this location contains the signal peptide sequence, MTEPPGASSHLRQALRCCQWLAGIPSQWVLFWEVLWKWVLQTDAA, Run with SignalP
  misc_feature (489)...(594): similar to gi3077808 in the genepept database release 114, Run with FASTXY 3.3t00, default parameters
cacattttgataaagcatctgtgctgtgtttggggatccctttctcgttcggatctttggactctgcaaaggctggctgagttgtccaaatgacagagcccccaggggcttcgtcccatctcagacaggcattacgctgctgccagtggctggctggaattccaagccagtgggttttattttgggaggtgctatggaagtgggtcctgcagactgatgctgcttggtcccctggattcagcccccttcctaggggtatgtaccaacatcctgccttgcctgagatgccatcacctttcttggggatcctaaggctggagtatgtaaagctcctgggtctctgtatgtgcctgagcaccggttcttcctagactccacacagctctgtgtgttggacccaaggccctggtggggtgggctcatgaggggatatcctgatctgagggttgcaaagatccataggagaagtgtggtttccaggggtcacacattcactcactgcctcccttggcttgggggggggcctcccttggctccgtgttgctcctgggtgggccactgccctgccctgcttttctccattttctctgcattgaattgcttccctga

SEQ ID NO: 79880 - DNA, 609 bp, Homo sapiens
  sig_peptide (105)...(240): this location contains the signal peptide sequence, MKKLVSFFLLILLLVFLKFGSKDVFSSLQYNIEKLGNKPLTKFMN, Run with SignalP
  misc_feature (14)...(143): similar to gi3851160 in the genepept database release 114, Run with FASTXY 3.3t00, default parameters
cggattttgatgacacacagaaaaagatctttctgatactcagcgacaccttgctaagaaaaaatatgagctacagcttactcaggagaaaattatgtgcttggatgaaaaaattggtgagtttttttctcttaatattacttttagtttttcttaagtttggtagcaaagatgtattttcttctcttcagtataacatagaaaaacttggaaacaagcccttaactaagtttatgaataaaaaatagtagagaaattcatttttctttggcagcaaaattttttagatttagcaccataagtacttagtgataagttaaaatttatcaatgaagtaatagctaaactcagcagcaacagtttgtaaacttacgatgataacttaaatttgaattttttgtgtaatattgtagcttggccatagctgctgtaatgaaacagtacctatatattacttttggtggaaagggtacatatggtaagatatgtctagcgagtactcacttatcaccaaggggatagcgttagttatgtctatgatattactggggtttatagagaaagttacttttttaaagattcttatttatgtttcttggtagcgatcag

SEQ ID NO: 79881 - DNA, 474 bp, Homo sapiens
  sig_peptide (277)...(142): this location contains the signal peptide sequence, MYILVVHAMWWSRLSGISTATWALVVSSHGPEMSKLWKARSWVGL, Run with SignalP
  misc_feature (67)...(160): similar to gi4008402 in the genepept database release 114, Run with FASTXY 3.3t00, default parameters
cccttcaagaaaaaatttcaggtatgaatcatatcttcacggcacaaggatttcataaaacacacttggttgaggtggctcttgacccacacggctgcacctaacgggatctctcacttacttccctgggccaggatggtcaagcccacccaggaccgtgccttccacaacttgctcatttcagggccatgtgaagacaccaccagtgcccatgtggctgtagagatcccagacaaacgggaccaccacatggcatgaactactaagatgtacatttcctcgcattgccacatccctgaaagaggacatgcctttcaatccattacgtgtcatggtttcattgcaagcagtttttctaagagatacataaaataacagtgcatcttagcatcattggcatctggcgttcgatggaatacagtgggtacatgtgagcaaagtgtgttaaaaggcaacatcgaattcacgcacact

SEQ ID NO: 79882 - DNA, 452 bp, Homo sapiens
  sig_peptide (136)...(271): this location contains the signal peptide sequence, MWKPLTSVLMHFPAVCPHSLWAGGVRVCHHADRSPEAGQADCFGF, Run with SignalP
  misc_feature (103)...(348): similar to gi1006579 in the genepept database release 114, Run with FASTXY 3.3t00, default parameters
atgagccctctgttggagcgcgtaagactgctcatttcatgatctgctgaggtgctaattgtgagagaaaggcggagcgcgtgtttttcccgagtgtctgtcatgacacattttcgtggcacgttcatttctcggatgtggaaaccattgacgtctgtcttgatgcatttccctgcggtttgcccacactccctgtgggcaggaggagttagagtttgccatcatgcggatagaagccctgaagctggccaggcagattgctttggcttcccgcagccaccaggatgccaaggtaccggtttgctgctgcgtgcgccacctcctgagaatgtcatgtgtgcccgctggggtccagaagctgctttgctaaccatccgccaggcgggcatcatcggtgtccagcaaagagtcgtttccaaaaagctgaaagcatcactcttgcataaatacac

SEQ ID NO: 79883 - DNA, 559 bp, Homo sapiens
  misc_feature (1)...(559): n = a,t,c or g
  sig_peptide (334)...(199): this location contains the signal peptide sequence, MGWGAAREQALCLGCMLAPVPTKLLPLASKGVGTRVPGQGAGPAR, Run with SignalP
  misc_feature (45)...(196): similar to gi1780969 in the genepept database release 114, Run with FASTXY 3.3t00, default parameters
ccaggtgctgcagtgatagctgggggatccactggacaggagagtgtgggcctggggttccagcaggcacagcaagtgggtgtcaggggcgcaggcctggggttccagtgggcacggtaagcgggtgtcaggggcgcgggcctggggttccagcgggcatggcgagcgggtgtcagggcactgcacatcctccctcctagcaggccctgcaccctggcccgggactcttgtgcccacccccttggaggcaagcggcagcagctttgtgggtactggggcaagcatgcaccccaggcacagggcttgttctctggccgcaccccaccccattgctggttggagtagcagcaggcaccgggtccagaatgggccagattctgactcctggattccacgcattggtcagcacctctgaggtcaggtaggacaagttaagtgctgctggctaagaggggatggagttcccagcctctctagtgatgggccgaacctcagaggcctggctatatgccatcccttgctctcagctgnnttccaccgctcttacagtgcttcgatn

SEQ ID NO: 79884 - DNA, 498 bp, Homo sapiens
  misc_feature (1)...(498): n = a,t,c or g
  sig_peptide (60)...(195): this location contains the signal peptide sequence, MNPAVRQRCLLFCFQQKLILSHFFLLQVPQWCAEYCLSIHYQHGG, Run with SignalP
  misc_feature (138)...(339): similar to gi2407195 in the genepept database release 114, Run with FASTXY 3.3t00, default parameters
acgtctcctaatgaggactgagtgacntgccacgaggacgaaagaaaatcacttataagatgaaccctgctgtaagacagagatgtctcttgttttgttttcagcagaagctgatcctgtctcattttttcctgctacaggttcctcagtggtgtgctgaatattgtctttccatccactaccagcacgggggcgtgatatgcacacaggtccacaagcagactgtggtccagctcgccctgcgggtggcggatgaaatggatgttaacattggtcatgaggttggctacgtgatccctttcgagaactgctgtaccaacgaaacaatcctgaggttggtttgtggggttcagtccgctccctgctgatgattcttggcttaggttctacaattctgaaggagcattattctggcattctacctgttaagcatctatgctgtgcagtagcaactggtctctgtcatcagccagccagcaacagttgctttcccacact

SEQ ID NO: 79885 - DNA, 858 bp, Homo sapiens
  sig_peptide (707)...(842): this location contains the signal peptide sequence, MSRFLLPREGCLLIVFMLCEKTLPFLFTLKEYTFIPEHRTTDINC, Run with SignalP
  misc_feature (426)...(597): similar to gi310658 in the genepept database release 114, Run with FASTXY 3.3t00, default parameters
ctcgacccgcctgcaggaattcggcacgagccggaatccgcgcgcagcccggatcgtttaaatgagagtttgcagaagatgaaaggggagtcttgcattcagcaatttgccctgtatttaatgagccagccaccttgtgtcttcccctcctatgacatagcccttcagctcaccctacaattgccacatgaaaacttctctcatgaaacccacagggtgcaagttctctcctgttgccctgagtgcccactcccaggccctctgtatgagtgacacttcagtctgccatggaacctggccctgctctggcctggctcctgctcctgagcctgctggcggattgtctgaaagctgctcagtcccgagacttcacagtgaaagacattatctacctccatccttcaaccacaccatatcctggtggatttaaatgtttcacctgtgaaaaggcagcagacaattatgagtgcaaccgatgggctccagacatctactgccctcgagagaccagatactgctacactcagcacacaatggaagtcacaggaaacagtatctcagtcaccaaacgctgtgtcccactggaagagtgcttatccactggctgcagagactccgagcatgaaggccacaaggtctgggcaacagagcaagtgaccagtactacatagccagctgccttctcttcagacatctgccagtactcatgagcagattcttactcccccgtgaaggctgtcttttgattgtctttatgctctgtgaaaagacgcttcctttcctgtttactctaaaagaatacacatttataccagagcataggacaactgatataaattgtgtaaacacacatgaaga

SEQ ID NO: 79886 - DNA, 402 bp, Homo sapiens
  sig_peptide (353)...(218): this location contains the signal peptide sequence, MRSDWFLYDCRLLRHVALGLFCCGISVYLAALSIYALLLFEIETG, Run with SignalP
  misc_feature (5)...(185): similar to gi2558592 in the genepept database release 114, Run with FASTXY 3.3t00, default parameters
actgcctctcttggggcctccgtttcctcatcctgctgaggctgagctctggggctggccttggagacttcggcagggcgggcgaggtcgtcttcaaaggatggcggggacaactcatggagcccacggcgggcagcccgggcagcccggaggagagtgtgggtcagcacagccaccagaaccagggtgcccgagccgaggatggaagcagctgctgcgcctgtctcgatctcgaaaagtagcaaggcatagatggacagtgctgctaaatagacggagatcccacagcagaaaaggccaagggccacatgtctgaggaggcggcagtcgtagagaaaccagtcagacctcatggggccaggcccccgcgccagctcggcgcccaggtggccacagagcgcg

SEQ ID NO: 79887 - DNA, 459 bp, Homo sapiens
  misc_feature (1)...(459): n = a,t,c or g
  sig_peptide (208)...(343): this location contains the signal peptide sequence, MRLHSKGSQDPSTKVHIKALQTVTSFLMLFAIYFLCIITSTWNLR, Run with SignalP
  misc_feature (124)...(454): similar to gi4090433 in the genepept database release 114, Run with FASTXY 3.3t00, default parameters
nagcggttnnnnnnaactgacttcctagcatttngcgnggcattcacaaaagaatatgaaggaaatgtgacttggaagatcaaattgaggaatgcaatacacctttcaagcttgactgtaactactctagcaaacctcataccctttactctgagcctaatatgttttctgctgttaatctgttctctttgtaaacatctcaagaagatgcggctccatagcaaaggatctcaagatcccagcaccaaggtccatataaaagctttgcaaactgtgacctccttcctcatgttatttgccatttactttctgtgtataatcacatcaacttggaatcttaggacacagcagagcaaacttgtactcctgctttgccaaactgttgcaatcatgtatccttcattccactcattcatcctgattatgggaagtaggaagctaaaacagacctttctttca

SEQ ID NO: 79888 - DNA, 424 bp, Homo sapiens
  sig_peptide (165)...(300): this location contains the signal peptide sequence, MAACKLLKHLNGFSLLLPRLECNGVISVHCNPLPPGFKRFSCPSL, Run with SignalP
  misc_feature (283)...(192): similar to gi4235350 in the genepept database release 114, Run with FASTXY 3.3t00, default parameters
tttcgtccggaagtgcggatcccagcggcggccgtgtagctgagcaggcctggggcttggttctatgtccctgtggctatgtttccagtgtcctctgggtgtttccaagagcaacaagaaacgaataaatctctgttgaagagataccatttgacattttagagatggctgcatgcaaactcttaaaacatttgaatggattttccctcttgttgcccaggctggagtgcaatggtgtgatctcggttcactgcaaccccctgcctcccgggttcaagcgattctcctgccccagcctcctgagtagctgggattagaggcatgtgccaccatgcccagctaattttgtgtttttagtagagacggggtttttccttgtaggtcaggctggccctgaactcctgacctcaggtgatccacctgc

SEQ ID NO: 79889 - DNA, 822 bp, Homo sapiens
  sig_peptide (54)...(189): this location contains the signal peptide sequence, MIIRVLLFLLPRTLLQEDYGFFRAISLWPPLVLIGIYATALSASM, Run with SignalP
  misc_feature (87)...(825): similar to gi2746853 in the genepept database release 114, Run with FASTXY 3.3t00, default parameters
atctgagtctgatccttaagatcggggctggagattttcttaccccgtgacgcatgatcatccgtgtcctccttttcctccttcctaggaccctgctgcaggaagactatgggttcttccgcgccatcagcctgtggcccccactggtgttgatcggaatctatgccacagcgctctcagcgtccatgagctcgctcattggtgcctcccgcatcctccatgccctggcccgggatgacctctttggcgtgatcttggcaccggccaaggttgtgtcccgagggggaaacccctgggcagctgtactttattcttggggcctggtgcagctggtgctcctggctgggaagctgaacacactggccgctgtggtcactgtcttctacctggtggcctatgctgccgtggacctgtcctgcctgagcctggagtgggcctcggcccccaacttccgccccaccttcagcctgttctcctggcacacctgcctgctgggggtggcctcctgcctgctcatgatgttcctcatcagtcctggcgcggctggtggctccctgctcctcatgggtctgctggctgccctgctcaccgcgcgaggaggccccagtagctggggctatgtcagccaggccttgcttttccaccaggtgcgtaagtatctgcttcggctggacgtccggaaggatcacgtgaagttctggcggccccagctgctgctcctggtggggaacccccggggcgccctgcctctgctgcggttggccaaccagcttaagaagggggggctgtatgtgctgggccacgtcaccctgggagacctcg

SEQ ID NO: 79890 - DNA, 481 bp, Homo sapiens
  misc_feature (1)...(481): n = a,t,c or g
  sig_peptide (136)...(271): this location contains the signal peptide sequence, MGCWGLVIYAATGAICSALLQKYLDNYDLSVRVIYVLGTLGFSVG, Run with SignalP
  misc_feature (46)...(482): similar to gi4680229 in the genepept database release 114, Run with FASTXY 3.3t00, default parameters
ggaggaaaatcgagactgagatcctaggccangncgnggaattccactgacttcatgggccaggtcatcttcgaaggcgaccccaaggccccctctaactcgaccgcctggcaagcctacaacgccggggtcaagatgggctgctggggcctggtcatttatgccgccactggtgctatttgttcagccctgttacagaagtacttggacaactacgacctgagcgtcagggtgatctacgtgctggggacgctgggcttctctgttggcacagccgtgatggccatgtttcccaacgtctacgtcgccatggtcaccatcagcaccatgggcatcgtctccatgagcatctcctactgcccgtacgccctgctgggccagtaccatgacatcaagcagtacatccaccacagccccgggaactccaagcgagggtttggcatagattgtgccatcctgtcctgccaagtgtacatctcgn

SEQ ID NO: 79891 - DNA, 635 bp, Homo sapiens
  sig_peptide (292)...(427): this location contains the signal peptide sequence, MLEQQSPLSTCRGHISSGLSKWSYLLSCVLCCVLCYPVLGSPSLS, Run with SignalP
  misc_feature (228)...(392): similar to gi498154 in the genepept database release 114, Run with FASTXY 3.3t00, default parameters
ggcaccgacctgcagggtgccatcgtagacgtcttctcccgcgccgggcctgtgcgcttcccctcctggaagttccctgaccgcatggcctgtgacctcgacatggtggccctgctggagcactatgaccatgttccgggtgaccccgagttcacgcagctgtcccatgccgtgctgctggagctggtcatcgacaggtgagggccttgaccaagcctggtcatctcaggatgccagcacctgcccctgaaaccagtggcagctacggaagcccctccagaggcaggggtgatgttggaacaacagtcaccattgagtacctgtcggggccacatcagctcaggactttcaaagtggtcttaccttttatcatgtgtcttgtgttgtgtgctgtgctatcctgtgttaggctctcctagcctgtccacctcaggcagttgatttccattccatcggtctctgtggcaccacagctgtgaccacggtctctcagcctctcccagctgcctcctcagggtttctatgttggggaccccatagttgcttctcagagtttccattccgggctctctttcctgttgtcctgtgggttgtgctgttccctctgcatatcacaaggccggacacgggatgtg

SEQ ID NO: 79892 - DNA, 697 bp, Homo sapiens
  sig_peptide (62)...(197): this location contains the signal peptide sequence, MKTKCKPNITFFNTIICFFLTFLFCIYIDSLLCTVPKNPAQAVQL, Run with SignalP
  misc_feature (257)...(91): similar to gi5679464 in the genepept database release 114, Run with FASTXY 3.3t00, default parameters
ggcacgagatttaatgacattaaaagaaaaccataaacaagcctgtgcacagagttcctacatgaaaaccaaatgtaaaccaaatattaccttcttcaacaccatcatctgtttcttcctgacttttctcttctgcatctatatcgattcgctcctctgtactgttccgaagaacccagcacaggcggtacagctgaacagggaccatacaaaagtgcattagtaataggcaaatgtttgcaataatataatagaatggtacctttgtttatcgtctggtgtttttaaaaaatcaaaccatacaggagaatatagatcacaaagaaaaggcctcctaccacactcactcatcaaaacacactaatcattttaaatttttttctgtttttaattctttctgggtgctatttagaacttcaaatgatatacttaaaaatacctacttctggatttgtaatttcagcaaagttgaagatttagctaacctacactataccccagcttcactcattgtccttaacatccaacagttattagccacatcatgatttccttcagtttatctaatggttgcttttataactttcaaactatcttcttaaaatctatttctggaaccatcacatttggctgggatctaagtaccaatggaattccaattgcaattaagaacccttaacccacttcctttttctta

SEQ ID NO: 79893 - DNA, 418 bp, Homo sapiens
  sig_peptide (350)...(215): this location contains the signal peptide sequence, MSSPWLTCLYILSILHADSNLTSYTSTHLGRENGLYSDCFDFFLC, Run with SignalP
  misc_feature (14)...(150): similar to gi2988375 in the genepept database release 114, Run with FASTXY 3.3t00, default parameters
cgcctgcaacacacttccccagagtatcataaggaagctggaagcaaagccttctacattcctacacccctggccgaccgatcgaaaggtcttcaaacctgtaattgtacactttagtttgcaaggcaatcaaagactggatttcactcacaatagtctttcaatgtgacttttgtcctactggatatgctataataaaacctaagttacaatgcaaagaaagaaatcaaaacaatcactataaagtccattttctctgccaagatgagtggaagtatatgaagtcaaatttgaatctgcatggaggattgacaatatgtacaaacacgtaagccaaggtgaggacatagtggaggagttaaaggaatggtgagcagtgacctgggaattagaagtcggaattccaccgcacgtgcta

SEQ ID NO: 79894 - DNA, 698 bp, Homo sapiens
  sig_peptide (46)...(181): this location contains the signal peptide sequence, MAVVRVMVVVRVTAVVRVMVVVRVVVVRVMVVVRITAVLRVMVVV, Run with SignalP
  misc_feature (399)...(4): similar to gi4063042 in the genepept database release 114, Run with FASTXY 3.3t00, default parameters
tttcgtgtcacggctgtagttagggtcaaggtggtagttaggatcatggctgtagttagggtcatggtggtagttagggtcacggctgtagttagggtcatggtggtagttagggtcgtggtggttagggtcatggtggtagttaggatcacggctgtacttagggtcatggtggtagttaggatcatggctgtaattagggtcatggtggtagttagggtcacggctatagttggggtcatggtggtaattagggtcacagcgatagttagcatcatggtggtagttagggtcatggtggtagttagggtcatggtggtagctaggcccatggtggtagttagggtcatggctgtagttagagtcatggcggatagtgcgctcagggctatatgttcgtcgtcgctgaacgttacgttttcgcttgaatagtcaagccctgcctcgtcttttctttttttcactccacaaagaatcgtccttactcgaatgcttttttcccgtgcttaaggtggcacaccatccctggccaacatctcttttggttatgtaactcttagtcgtccttgcatacacctccccccccgcggggtgttaccccccgagttgcgagagcaattctaaactagccgttttagcgtacccccttcactgaacctgttttcccgacaacctctcttcacggcctggggagggcg

SEQ ID NO: 79895 - DNA, 835 bp, Homo sapiens
  sig_peptide (401)...(536): this location contains the signal peptide sequence, MPRAYLSTLLQVNWILSVSAELAEAVCLVNANIWQPLSSGMRGKA, Run with SignalP
  misc_feature (528)...(392): similar to gi3881639 in the genepept database release 114, Run with FASTXY 3.3t00, default parameters
attagattcaggacatagtgaattaaaaatgtcccctaccccaaatcagttacaataacagcagttgctgaataataatggaaatgattgatttgaatgagatctgttggctgtattcactttctagtttaagtggacttaagtgttaaaagtttggagttcatctctgatgcttttggaaagttttcaaacattagtttgagggaggggttaccctttgacttacatttctccctgcttcttaaatcttcgtgtttgattatgagaggagtttgtcatgaactttgttacttgataaaactcacagcattattcctttttcctgacagttaagtacagcaactgtaagtcacttttatttaataagtttacatgccccacagtgtttctgggaaagaaaatgccgagggcatatctgtcaactttattacaggtaaactggattttgagtgtgtctgcagagctggctgaggctgtgtgtttggtgaatgctaacatctggcagccactgagttctggcatgagggggaaggcaggcagatgggggcactattgcctcaaaagtgaaaggtggaaaaggctgcaacattcctttcagtgccatggtggtttcgcccacagcgatttgttgcagtcacactttaaacaggtcaagaaagatctgtttttcaaaactgatcttaaattgttcaaacctgtaaatctttaggaatatctgattactacactatatattgaggttgagtgaaagccaaaaaaacaaaatttcagcctaaactaactttgtgtacagctgcagttttccagtcttcatcagattcgtccgtgaagggcg

SEQ ID NO: 79896 - DNA, 1323 bp, Homo sapiens
  sig_peptide (940)...(1075): this location contains the signal peptide sequence, MLTWLEFFGIYSTIWPTIPIAPDMRGQATMVLSSAHFWLGLFLGP, Run with SignalP
  misc_feature (43)...(1096): similar to gi1663648 in the genepept database release 114, Run with FASTXY 3.3t00, default parameters
ggaattccatggttgaagttttccttcctgcctgtgtggggccttagggccacaagggcagccattactcagcactgcactgaccttgggaatttgctgggcaaggaaaatgacgtggccctcatcatcgatggccacaccctgaagtacgcgctctccttcgaagtccggaggagtttcctggatttggcactctcgtgcaaagcggtcatatgctgcagagtgtctcctctgcagaagtctgagatagtggatgtggtgaagaagcgggtgaaggccatcaccctcgccatcggagacggcgccaacgatgtcgggatgatccagacagcccacgtgggtgtgggaatcagtgggaatgaaggcatgcaggccaccaacaactcggattacgccatcgcacagttttcctacttagagaagcttctgttggttcatggagcctggagctacaaccgggtgaccaagtgcatcttgtactgcttctataagaacgtggtcctgtatattattgagctttggttcgcctttgttaatggattttctgggcagattttatttgaacgttggtgcatcggcctgtacaatgtgattttcaccgctttgccgcccttcactctgggaatctttgagaggtcttgcactcaggagagcatgctcaggtttccccagctctacaaaatcacccagaatggcgaaggcttcaacacaaaggttttctggggtcactgcatcaacgccttggtccactccctcatcctcttctggtttcccatgaaagctctggagcatgatactgtgttgacaagtggtcatgctaccgactatttatttgttggaaatattgtttacacatatgttgttgttactgtttgtctgaaagctggtttggagaccacagcttggactaaattcagtcatctggctgtctggggaagcatgctgacctggctggagttttttggcatctactcgaccatctggcccaccattcccattgctccagatatgagaggacaggcaactatggtcctgagctccgcacacttctggttgggattatttctgggtcctactgcctgtgtgattgaagatggggaacggatagcactctttcacacctggtaaatgaaattgttggacgggggctgggcctggaagccaaccctggggtcctgatataactcgcgccggcgcccttattgggagagacccacaaactttaccgcatgaccccattcttggccccaaaagtggccgactctaccccgggctggagcctgcgagggccttccctcggactcgtccttagaagggacccgg

SEQ ID NO: 79897 - DNA, 659 bp, Homo sapiens
  sig_peptide (182)...(317): this location contains the signal peptide sequence, MIHPTTDQALFPVAKGFIFFALFFMHALICITGSIPLVLLISLAP, Run with SignalP
  misc_feature (2)...(166): similar to gi1182018 in the genepept database release 114, Run with FASTXY 3.3t00, default parameters
tttcgttgcctgtgtgtctatttgttgccagccgatagattccttccgttgccaatacttccacctgctatctccctatggacatctgatactgacaatgtacctgatctacactatttgtttgctgggttattactgttctataggatatggcttgtatttctaatttccatgttctgacatgatccatcctaccactgatcaagctctatttccagtggcaaaggggtttattttttttgctcttttcttcatgcatgctcttatctgtattactggatcaatacccctagtattgctgatatcactggctccacatgttagcttcatcatctgtaccagagtccctctgttgctcctcaccttggcaaaacaaccaagtgctaaatgacccagcctttgtcttttcggaaattatacatgtgtggctggcttactttcatgtcgatgcgttcacgactaagactatatcacaaatgcattagcacacaaatagaaggctgggaacagcggaacgcattcttcccctgcttcacagcgccgcttataccaatcaattgtcaataaagaagcacttcagggcgccagggccagaaactattcttgataaattctgcaccactaaagttaaagtgccaaaatttcaggaggggaccttt

SEQ ID NO: 79898 - DNA, 627 bp, Homo sapiens
  misc_feature (1)...(627): n = a,t,c or g
  sig_peptide (13)...(148): this location contains the signal peptide sequence, MSCFGLLLGGLTPRVLSTEEQLPPGFPSIDMGPQLKVVEKARTAT, Run with SignalP
  misc_feature (67)...(259): similar to gi34267 in the genepept database release 114, Run with FASTXY 3.3t00, default parameters
tttcgtgcagagatgagctgttttggacttctcctggggggcttaactccaagggttctgagtacagaggaacagctgccccctgggttcccttccatcgacatggggcctcagctgaaggtggtggagaaggcacgcacagccaccatgctatgtgccgcaggcggaaatccagaccctgagatttcttggttcaaggacttccttcctgtagaccctgccacgagcaacggccgcatcaagcagctgcgttcaggtgagcagagggcaggggtcaaagggccatgcagacctcagaacaagcgtcttgtcagatcccagcacagcctactcccttgggcctgggcacctccagggctgagcggagggtacctggtggggtgggctgggtcttactgcaggtgtgcctggctcagggaagagagctcgtggttggctgtgccgttaccttcttcggattgtcagactccagactttgggccagttctgcccctcccagcacatgtgatgtgccagtgtggtggactcttcaagggagctctatggatgttaaccctcctccttccctgtancctggcctgagacaggagaatggatgatgcctttaatcagagctggtttgactta

SEQ ID NO: 79899 - DNA, 635 bp, Homo sapiens
  sig_peptide (92)...(227): this location contains the signal peptide sequence, MVVSAWIGLEATVVAACLALLGSVVRETSTSASPTPAALRAAWTV, Run with SignalP
  misc_feature (7)...(636): similar to gi287990 in the genepept database release 114, Run with FASTXY 3.3t00, default parameters
tttcgtttcaagtgctcttgcccaccaggcactcggggcctactctgtgaagagaacattgatgactgtgcccggggtccccattgccttaatggtggtcagtgcatggataggattggaggctacagttgtcgctgcttgcctggctttgctggggagcgttgtgagggagacatcaacgagtgcctctccaacccctgcagctctgagggcagcctggactgtatacagctcaccaatgactacctgtgtgtttgccgtagtgcctttactggccggcactgtgaaaccttcgtcgatgtgtgtccccagatgccctgcctgaatggagggacttgtgctgtggccagtaacatgcctgatggtttcatttgccgttgtcccccgggattttccggggcaaggtgccagagcagctgtggacaagtgaaatgtaggaagggggagcagtgtgtgcacaccgcctctggaccccgctgcttctgccccagtccccgggactgcgagtcaggctgtgccagtagcccctgccagcacgggggcagctgccaccctcagcgccagcctccttattactcctgccagtgtgccccaccattctcgggtagccgctgtgaactctcaactcacccacc

SEQ ID NO: 79900 - DNA, 395 bp, Homo sapiens
  sig_peptide (92)...(227): this location contains the signal peptide sequence, MSHNLPISLRIEVALIFLCFCWHPALSTTICIRTIRTIMCSTLFI, Run with SignalP
  misc_feature (59)...(268): similar to gi1019411 in the genepept database release 114, Run with FASTXY 3.3t00, default parameters
agttttatgtcttgtcctttacatttttacctatcatgaggttgtattatgttgttagatattatttaaaatctttacgatctttgtttggatgtcccataatttacccatttcccttagaattgaggtagctcttatttttttatgtttctgctggcaccctgcactctctaccaccatctgcattagaacaatcagaacaatcatgtgttccaccctttttatcgtagtcactgtaagaaattcaggttgcccctgtcaccacttgtccctcaagctgtaatctgcccacagctcatctttgttaagcccatctcccacctctgctcaccttctgaaaccattcaactgagccttgtggaactcatggtcaaaacagccggacgcgtgggcga

SEQ ID NO: 79901 - DNA, 1100 bp, Homo sapiens
  sig_peptide (83)...(218): this location contains the signal peptide sequence, MTNWMLLLASRIFQSLAIPKQLGLRREMPSGSPTTNSSSGCIRNL, Run with SignalP
  misc_feature (266)...(78): similar to gi4680484 in the genepept database release 114, Run with FASTXY 3.3t00, default parameters
gcaatttggtgctgctcctgcccctgggtgctgagcaggcctggtgctgtctcccgtggacctggtcaggccttacctcttgatgacaaactggatgctgttgctggcctccagaatcttccagagcttggcgatcccgaagcagttgggtctgcggagggagatgccttcgggcagccccaccacaaacagctcctccgggtgcatcagaaacttggagtacagcaccttgatgggttccgagatgccaatggccttggctgcagagacatggctgctgtaagtccagccggtgccacagggccaggaatctcaacccctgtgtcccatgcctgtgtagagggcaaagctgcctgtccttttgagggccttcctgggaggtgagccaggcgtgagccaccttgccctgcctatattacttatttgcttatgcttatctctccacacgaggatgtgtaccccaggaggtggggacatctgtttggtccactgctttttccccagccccttgcacaggacctattacacagtaggtgctcaataaatatttgttgaggcggggtgcattggctcacgcctgtaatcccagctctttgtgaggccagggtaggaggatcatttgaggtcaggagtttgagacctggggggccatcatggggaagccccgtctctactcaaaacgcccaaacaattggcccagcgttgtgggtggcctcctctggtcgccacctacttcagaggtctgagcagcataactggtttcgccccatatgccgtaggtatctaggactcttagatcgcacaattgacttccggccttgccgaatggaagctgtctccctttctataaatctacgaacttgggcgattatgagtcccatgctgctcttagacttccggacgtcgtggatgcccttaatcggcttcctcggtctttcacgctcaaggccttagcccttctgtatctcctcttgtacctacatggcgcccgtacgtgttgccttcgatgcgcacgactcgcccgaatagaggacgtctctccttgctctctcgactcttcgaagactgtcaaacccgtcgcaatactcgctgttgtatcc

SEQ ID NO: 79902 - DNA, 685 bp, Homo sapiens
  sig_peptide (365)...(500): this location contains the signal peptide sequence, MLLMFLLATCLLAIIFVPQEMQTLRVVLATLGVGAASLGITCSTA, Run with SignalP
  misc_feature (5)...(687): similar to gi3004482 in the genepept database release 114, Run with FASTXY 3.3t00, default parameters
caacaacaaaccagaagagggcttaaaggaacttacaaaagctgcacacaggaatggaatgaagaatgctgaagacatcctaaccatggaggttttgaaatccaccatgaagcaagaactggaggcagcacagaaaaagcattctctttgtgaattgctccgcatacccaacatatgtaaaagaatctgtttcctgtcctttgtgagatttgcaagtaccatccctttttggggccttactttgcacctccagcatctgggaaacaatgttttcctgttgcagactctctttggtgcagtcaccctcctggccaattgtgttgcaccttgggcactgaatcacatgagccgtcgactaagccagatgcttctcatgttcctactggcaacctgccttctggccatcatatttgtgcctcaagaaatgcagaccctgcgtgtggttttggcaaccctgggtgtgggagctgcttctcttggcattacctgttctactgcccaagaaaatgaactaattccttccataatcaggggaagagctactggaatcactggaaactttgctaatattgggggagccctggcttccctcgtgatgatcctaagcatatattctcgacccctgccctggatcatctatggagtctttgccatcctctctggccttgttgtcctcctccttccg

SEQ ID NO: 79903 - DNA, 484 bp, Homo sapiens
  misc_feature (1)...(484): n = a,t,c or g
  sig_peptide (364)...(229): this location contains the signal peptide sequence, MCFSAALLGTGFVAATVGGKSQMQTRSASPRFCSHDPCCDFSFDV, Run with SignalP
  misc_feature (6)...(484): similar to gi913395 in the genepept database release 114, Run with FASTXY 3.3t00, default parameters
aagggacccaaagcagcaaaagctgcctgaaaacctgtctacctgctttgcaggctgccctgtggcactggccggcggggccctccgctgctcctctgttccttcccctgacaaatggcntaatgggcctgattcacctcactgggcaggtggcggctatctactgagtggtctgagcaagagccttaggaaaaaggtccagatagactgatgtcattttaaaattgccaacatcaaaagagaaatcacagcaaggatcatgagaacagaacctcgggctcgcagaacgagtttgcatctggctcttccctcccactgttgcagcaacgaatccggtgccgaggagagctgcactgaaacacatcttcagtgccgaggggccgaacagggtgttttactgcctcaaataaggcctggtaatatcctcaggcatctccaaatggtggtaaaggaattcgnccacgctggaatggagnttcgaggn

SEQ ID NO: 79904 - DNA, 413 bp, Homo sapiens
  sig_peptide (12)...(147): this location contains the signal peptide sequence, MIPPAIFWVLIIFGWTLVYGFVYFTTGETIMDKLLRVLYWILVKT, Run with SignalP
  misc_feature (69)...(392): similar to gi486537 in the genepept database release 114, Run with FASTXY 3.3t00, default parameters
gatttttaataatgattccacctgctatattttgggttttaattatcttcggatggacgctcgtctacggttttgtatacttcacaacgggagaaacgattatggacaagttactccgtgtcctctactggattctcgtgaagaccttcttcagagagatttcggtgtcgcaccaggagcgtatccccaaagataagccggtcatgctggtgtgtgctccgcatgccaaccagtttgtggacggaatggtcatttcaacccatctggaccgcaaggtgtactttgtgggtgcggcctcgagtttccgcaagtacaaggtggtgggtctcttcatgaagctgatggcgtccatcatttcgggggagcgtcaccaggacgtgaaaaaagtgctgaccggaatggcgacggagaag

SEQ ID NO: 79905 - DNA, 608 bp, Homo sapiens
  sig_peptide (151)...(286): this location contains the signal peptide sequence, MPKYNCISLLIALLSDFAIRFCSKMHGTKMWKEKNAKRSCFQVGV, Run with SignalP
  misc_feature (185)...(283): similar to gi4240130 in the genepept database release 114, Run with FASTXY 3.3t00, default parameters
gcgagaagaaaggaaacaggtttcactaacctggattgtgaatgtatagctacatttctcccccagcttatgagaatgatccacaactatttacccaaagacaaaacaccaccaacttaattcaaatatttaaataatatttgtgaacttatgcctaaatataactgtatttctttgctcatagccctactttcagactttgctattcgtttttgttctaagatgcatggaactaaaatgtggaaagaaaagaatgcgaaaagatcctgttttcaggttggggtgaaatttaactttatacttaatatcatattttaacattcctagatggtgtctgtgctatcatcttgttaatacagatttacatttacagtggaagcacatgttgattgtcattagggaatgtggattgctgccttactgccaagagatagaactcccaggcagagttctggctgtaagcagctgtaagaaaccttcactccatccaaaatttaataaggacccaaatatgccattctctcgtctgagataattgtgcatccttgaaaagaaaagatgggaaggaatcgatttaacaacataattgagtgctttaaaaatggcgg

SEQ ID NO: 79906 - DNA, 420 bp, Homo sapiens
  sig_peptide (174)...(309): this location contains the signal peptide sequence, MLGKVVILLSLLWNIFEKFYEAKLKNAYYKHMYGNSRSWKNCVLS, Run with SignalP
  misc_feature (40)...(7): similar to gi5306133 in the genepept database release 114, Run with FASTXY 3.3t00, default parameters
aaaaatattacatttaaaagcaaacatgaaaccactgaacttttattagtccttttttttacttcaatttcccaactgaggtttagaaaccaaccacagtttagaaatctgtattcatatcaaaagtaaaccacaagaaatacaattagaaaaattataattgttgcagctggatgttgggtaaagtggttatactattgtctctactttggaatatatttgaaaagttttatgaggcaaagttaaaaaatgcctattataagcacatgtatggaaactcaaggagttggaaaaattgtgtcttgtcattgcgatttactgtttacaaaaatagttctgaacacaggtgaatctagagagcctatagaatatgtaatttggagaggtagctttctctaggaaaaatgatacctattgatg

SEQ ID NO: 79907 - DNA, 424 bp, Homo sapiens
  sig_peptide (61)...(196): this location contains the signal peptide sequence, MGAAWSSATQAISVFCFTIPLQDFCLQSYLLVQEEFQQFQIVGRP, Run with SignalP
  misc_feature (12)...(181): similar to gi2635528 in the genepept database release 114, Run with FASTXY 3.3t00, default parameters
aaaagacagattttattgttctgccacataaaacaagtctgaaggacattcacggccaacatgggggctgcatggtcatcagcgacccaagctatttctgttttctgttttactatcccattgcaagacttctgtcttcaaagctaccttttggtccaggaggaattccagcagtttcagatagtgggaaggccaaagggatgtgccttacaactgagtcagccctgtctaagcagagacccacacagtcattcctttcatcttagccagaacttccatggccacaccatgcaggcgtgtgaagctgggaaatgcagtcataaagagtgtcacattgcgccccccaaaaaattgaggatcagatactgagaaatatggagaatgcatattgaatggcaagtcactgtctctgccatagctataa

SEQ ID NO: 79908 - DNA, 395 bp, Homo sapiens
  sig_peptide (6)...(141): this location contains the signal peptide sequence, MFYVKAEFLVSFSCPWLTACALLMSCSWFLTLTILSVKGGTPAGM, Run with SignalP
  misc_feature (123)...(209): similar to gi691720 in the genepept database release 114, Run with FASTXY 3.3t00, default parameters
aatggatgttctatgtgaaagctgagttccttgtttctttctcttgcccgtggctgactgcgtgtgctctattgatgtcttgttcctggttcttgacactgaccatcttgtctgtgaaaggaggcactccggcgggcatgcttgatcagaagaaagggaagtttgcttggtttagtcactccacagaaacccatggtaatgttcccctgtgctctgtgtgtgtaaatgcgtgtgggtgcataccagactgaatgggaaggtgtctctcttgatggcttgtgccgcagtagttctgtgtgtgtgcatatatgtgtatgtatatatgttgtgtgggtgtgtgtgtttgtgaagggatggcaacctgtccccctcaaagccactgccttatcatggct

SEQ ID NO: 79909 - DNA, 904 bp, Homo sapiens
  sig_peptide (862)...(727): this location contains the signal peptide sequence, MPLSPLLFHLGPFPFKAESWLNFLPPPFFPLLPLLFLAKAEIQWA, Run with SignalP
  misc_feature (3)...(196): similar to gi438373 in the genepept database release 114, Run with FASTXY 3.3t00, default parameters
cggcaaatgtagtgtattatgtgggagaaaatgtggtcaatccttccagcccatcaccaaataacagtgttctcaccagtggcgttggtgcagatgtggccaggatgtgggagatagccatccagcatgcccttatgcccgtcattcccaagggctcctccgtgggtacaggaaccaacttgcacagtgagtctgccagttttctaaccagcccaaagctcatcatgtgcctaccccttgcttagtaaacatgtgccctgcccttcctaagaacagaatgaagaaagacttcttggggatgacttagtttattgtagaatgtagggtgtctaaataaaagctgctgcacatactaagatgtttagtttgttaaattatcctattttattatagctattttatattaaaatttaacaaattcaggtaaacactatgtattaggcaattacagacctctagagctattggttataaaagaagaagtaatctggccgggctcagtggctcacacctctaaacccagctcttagggaggccaaggtaggtggaggacttgagccaagaggtctagtccagcctgggcaacatggggaaaccctgtctctacaaaaaatacaaaaattagccaggcatagtgtcatgcgcctgtggtcccagctactctggaggctgaagcaggaaaattgcttgagcttaagaagcataagttgcagtggggccaagatcaagcccactggatttctgccttggccaagaaaagaagagggaggagggggaagaagggaggaggaaggaaatttaaccagctttcagctttgaatgggaatggcccgagatgaaaaagtaacggcgacaggggcattgacgagggtccggggatgggcctgcaacattatggtagccc

SEQ ID NO: 79910 - DNA, 399 bp, Homo sapiens
  misc_feature (1)...(399): n = a,t,c or g
  sig_peptide (168)...(303): this location contains the signal peptide sequence, MIRCSCLEQLHLQMLLLPPSCEAVAPRGWRRSCSCPECCRVCSSP, Run with SignalP
  misc_feature (219)...(378): similar to gi5924319 in the genepept database release 114, Run with FASTXY 3.3t00, default parameters
tctgccccctctgcgctgtggagtgcatctgtattgccagcctcgctggaccgttgagaggattcatcgagaccctggatatgaatatgcagtgtgaactgaagtttggggacatgagtaatcagtcacagtggcccaagatttgaggtgtaaatggagaagtcagaatgattcgctgcagctgtctggaacagctgcacctgcagatgctgctgctgccgccctcctgcgaggccgtggcgccacgtggctggaggaggagctgcagctgccccgagtgctgccgcgtgtgcagctctccagtgcggctgcagcgccaccgcgcgttgctttcgacgccggagtccttcgcatgcgcagccagcgcccgggcctcaagtgccccaggacctggcgcan

SEQ ID NO: 79911 - DNA, 1344 bp, Homo sapiens
  sig_peptide (907)...(1042): this location contains the signal peptide sequence, MQCWQLLALCAPLFLPQHHFLWYVKQQLQRHADPRSETGQYATYC, Run with SignalP
  misc_feature (4)...(1345): similar to gi3645961 in the genepept database release 114, Run with FASTXY 3.3t00, default parameters
agtgatgtcatccggaaacctcaaggccaagtggatctgaactcccgctgccaaattgttcgaggggagggttcacagacgtttcagctcatctctgagaagaaaacctactacctgacggccgattcacccagcctgctggaggagtggatccgagtactccagagcctgctgaaggtgcaggccaccgggcctccagctctgcttcggggtggcaccaagcccaccgtgaagggctggctgaccaaggtaaagcatggccactccaaggtggtctggtgcgctcttgttgggaaaatcttctactactatcggagccatgaggacaagcgacccctgggctgcctgcctgtgcgggatgcgcacatagaggaagtagatcgatcctgtgactcagacgaggactatgaggctggaggaaccagacggttgctttcctcccactgcaccctggtgatccaccccacagagcacagccccacctacctcctcattggcaccaagcatgaaaaggatacgtggctctaccacctcacagtggctgcaggtggcagcagtgccaaggtgggcactgcctatgagcagctcattggaaaactgatggatggtgaaggagatccagattcgccgctctggaggcaccccatgctgtgctacagcaaagacggcctatacgcctccctcaccaccctgccctctgaggccttgcagacggaggccctcaagctcttcaagtcctgccagctcttcatcaacgtgccggtggaagctgcctcggtggactaccatgtgtccctggcccagaccgcactgcaggtctgcctggttcaccccgagctgcagagtgagatctactgccaactcatgaagcagaccagctgccgcccacctcagaagtactccctcatgcagtgctggcagctcctcgctctgtgtgctccacttttcctgcctcagcatcacttcctctggtatgtcaagcagcagctccaacgccatgcagatcccagaagtgaaactggccagtatgccacctactgccagcgggcagtggagcggaccctgcggaccggggagcgggaagccaggccatcgcgcatggaagtggtgtccatcctgctgcgtaaccccttccaccactccttgcccttcagcatccccgtgcactttaccaacgggacttaccatgtggttggttttgacggctcttccacggttgatgagttcctccagcggctgaaccaggagataggcatgagaaagccatcccactctggctttgccctcttcacggacgatccctcgggcagggacctggagcactgcctgcagggaagtgtcaag

SEQ ID NO: 79912 - DNA, 411 bp, Homo sapiens
  sig_peptide (273)...(408): this location contains the signal peptide sequence, MFTTLGYLICGFRVVLMYRFEEELFLRSLQDYKIQSALLVPTLFS, Run with SignalP
  misc_feature (3)...(414): similar to gi160794 in the genepept database release 114, Run with FASTXY 3.3t00, default parameters
tcgagggatttcagtcgatgtacacgttcgtcacatctcatctacctcccggttttaatgaatacgattttgtaccagagtcgtttgatcgtgacaaaacaattgcactgataatgaattcctctggatctactgggttacctaagggtgtggcccttccgcatagaactgcctgcgtcagattctcgcatgccagagatcctatttttggcaatcaaatcattccggatactgcgattttaagtgttgttccattccatcacggttttggaatgtttactacactcggatatttgatatgtggatttcgagtcgtcttaatgtatagatttgaagaagagctgtttttacgatcccttcaggattacaaaattcaaagtgcgttgctagtaccaaccctattttcattcg

SEQ ID NO: 79913 - DNA, 3248 bp, Homo sapiens
  sig_peptide (2134)...(2269): this location contains the signal peptide sequence, MWLWPPTHCVWRSTGLCWRMRVSISVRPPTPWARPRPQLTSTLKL, Run with SignalP
  misc_feature (3)...(3053): similar to gi2769750 in the genepept database release 114, Run with FASTXY 3.3t00, default parameters
tggctgaggtccaggtgagcccagcaggtcccatcctggagaaccagacagtgacactagtctgcaacacacccaatgaggcacccagtgatctccgctacagctggtacaagaaccatgtcctgctggaggatgcccactcccataccctccggctgcacttggccactagggctgatactggcttctacttctgtgaggtgcagaacgtccatggcagcgagcgctcgggccctgtcagcgtggtagtcaacctcctgacagccttcctggagacccaggcgggacttgtgggcatccttcactgctctgtggtcagtgagcccctggccacactggtgctgtcacatgggggtcatatcctggcctccacctccggggacagtgatcacagcccacgcttcagtggtacctctggtcccaactccctgcgcctggagatccgagacctggaggaaactgacagtggggagtacaagtgctcagccaccaactcccttggaaatgcaacctccaccctggacttccatgccaatgccgcccgtctcctcatcagcccggcagccgaggtggtggaaggacaggcagtgacactgagctgcagaagcggcctaagccccacacctgatgcccgcttctcctggtacctgaatggagccctgcttcacgagggtcccggcagcagcctcctgctccccgcggcctccagcactgacgccggctcataccactgccgggcccgggacggccacagtgccagtggcccctcttcgccagctgttctcactgtgctctacccccctcgacaaccaacattcaccaccaggctggaccttgatgccgctggggccggggctggacggcgaggcctccttttgtgccgtgtggacagcgacccccccgccaggctgcagctgctccacaaggaccgtgttgtggccacttccctgccatcagggggtggctgcagcacctgtgggggctgttccccacgcatgaaggtcaccaaagcccccaacttgctgcgtgtggagattcacaaccctttgctggaagaggagggcttgtacctctgtgaggccagcaatgccctgggcaacgcctccacctcagccaccttcaatggccaggccactgtcctggccattgcaccatcacacacacttcaggagggcacagaagccaacttgacttgcaacgtgagccgggaagctgctggcagccctgctaacttctcctggttccgaaatggggtgctgtgggcccagggtcccctggagaccgtgacactgctgcccgtggccagaactgatgctgccctttacgcctgccgcatcctgactgaggctggtgcccagctctccactcccgtgctcctgagtgtactctatcccccggaccgtccaaagctgtcagccctcctagacatgggccagggccacatggctctgttcatctgcactgtggacagccgccccctggccttgctggccttgttccatggggagcacctcctggccaccagcctgggtccccaggtcccatcccatggtcggttccaggctaaggctgaggccaactccctgaagttagaggtccgagaactgggccttggggactctggcagctaccgctgtgaggccacaaatgttcttggatcatccaacacctcactcttcttccaggtccgaggagcctgggtccaggtgtcaccatcacctgagctccaagagggccaggctgtggtcctgagctgccaggtacccacaggagtcccagaggggacctcatatcgttggtatcgggatggccagcccctccaggagtcgacctcggccacgctccgctttgcagccataactttgacacaagctggggcctatcattgccaagcccaggccccaggctcagccaccacgagcctagctgcacccatcagcctccacgtgtcctatgccccacgccacgtcacactcactaccctgatggacacaggccctggacgactgggcctcctcctgtgccgtgtggacagtgaccctccggcccagctgcggctgctccacggggatcgccttgtggcctccaccctacaaggtgtggggggacccgaaggcagctctcccaggctgcatgtggctgtggcccccaacacactgcgtctggagatccacggggctatgctggaggatgagggtgtctatatctgtgaggcctccaacaccctgggccaggcctcggcctcagctgacttcgacgctcaagctgtgaatgtgcaggtgtggcccggggctaccgtgcgggaggggcagctggtgaacctgacctgccttgtgtggaccactcacccggcccagctcacctacacatggtaccaggatgggcagcagcgcctggatgcccactccatccccctgcccaacgtcacagtcagggatgccacctcctaccgctgcggtgtgggcccccctggtcgggcaccccgcctctccagacctatcaccttggacgtcctctacgcgccccgcaacctgcgcctgacctacctcctggagagccatggcgggcagctggccctggtactgtgcactgtggacagccgcccgcccgcccagctggccctcagccacgccggtcgcctcttggcctcctcgacagcagcctctgtccccaacaccctgcgcctggagctgcgagggccacagcccagggatgagggtttctacagctgctctgcccgcagccctctgggccaggccaacacgtccctggagctgcggctggagggtgtgcgggtgatcctggctccggaggctgccgtgcctgaaggtgcccccatcacagtgacctgtgcggaccctgctgcccacgcaccctcactctatacttggtaccacaacggtcgttggctgcaggagggtccagctgcctcactctcattcctggtggccacgcgggctcatgcaggcgcctactcttgccaggcccaggatgcccagggcacccgcagctcccgtcctgctgccctgcaagtcctctgtgagcagagggtccttggccagggctgcccaggaggagggtggtggagggtgcttctgggctctggtgggagtgggcaaaggactgcagtgggcccaggaatgggcagttggggaaagaggacataggtgctagagaaagagacagtcctataagccctgcctggagcactctgcccacaggactcctgggaaggtgtcacttctagg

SEQ ID NO: 79914 - DNA, 859 bp, Homo sapiens
  misc_feature (1)...(859): n = a,t,c or g
  sig_peptide (174)...(309): this location contains the signal peptide sequence, MLNLAFTVGSFLLSAITLPLGIVMDKYGPRKLRLLGSACFAVSCL, Run with SignalP
  misc_feature (3)...(742): similar to gi3462515 in the genepept database release 114, Run with FASTXY 3.3t00, default parameters
tcctcctgggctggggctcgctgctcatcatgctcaagtcagagggcttttactcctacctgtgtaccgagccagagaatgtcaccaatggcacagtgggcggcacagcagagccggggcacgaggaggtgagctggatgaacggctggctcagctgccaggcccaggacgagatgctaaatttggccttcactgtgggctcctttctgctcagtgccatcaccctgcccctgggtatcgtcatggacaagtatggcccgaggaagctcaggctgctgggcagcgcctgcttcgcggtttcctgcttgctgattgcgtacggagcaagtaaaccaaacgctctctccgtgctcatcttcatcgccctggctctgaatggctttggtgggatgtgtatgaccttcacctcattaacactgcccaacatgttcggcgaccttcggttcacgtttattgccttgatgattgggtcctacgcctcctcggcagtcacctttccaggaatcaagctcatctatgatgctggtgtctccttcatcgtcgtcctcgtggtctgggccggctgctccgggctggttttcctcaactgcttctttaactggccccttgagcccttcccggggccggaggacatggactactcggtgaagatcaagttcagctggctgggctttgaccacaagatcacagggaagcagttctacaagcaggtgaccacggtgggccggcgcctgagtgtgggcagctccatgaggagtgccaaggagcaggtggcgctgcaggagggccacaagctgtgcctgtccaccgtcgaccggaattccgngcggtcggangccttagtttcaggttatcccca

SEQ ID NO: 79915 - DNA, 592 bp, Homo sapiens
  sig_peptide (207)...(342): this location contains the signal peptide sequence, MTIFFSLLVLAICIILVHLLIRYRLHFLPESVAVVSLGILMGAVI, Run with SignalP
  misc_feature (159)...(592): similar to gi4894991 in the genepept database release 114, Run with FASTXY 3.3t00, default parameters
cgacccacgcgtgcgggaagctccgcaggatgggggagaagatggcggaagaggagaggttccccaatacaactcatgagggtttcaatgtcaccctccacaccaccctggttgtcacgacgaaactggtgctcccgacccctggcaagcccatcctccccgtgcagacaggggagcaggcccagcaagaggagcagtccagcggcatgaccattttcttcagcctccttgtcctagctatctgcatcatattggtgcatttactgatccgatacagattacatttcttgccagagagtgttgctgttgtttctttaggtattctcatgggagcagttataaaaattatagagtttaaaaaactggcgaattggaaggaagaagaaatgtttcgtccaaacatgtttttcctcctcctgcttccccctattatctttgagtctggatattcattacacaagggtaacttctttcaaaatattggttccatcaccctgtttgctgtttttggaacggcaatctccgcttttgtagtaggtggaggaatttattttctgggtcaggctcacgtaatctctaaactcaacatgac

SEQ ID NO: 79916 - DNA, 518 bp, Homo sapiens
  sig_peptide (113)...(248): this location contains the signal peptide sequence, MASSSSLSWPTSAWPLSWTLVFSPERMRMRTRRTTSGLRCTRTWM, Run with SignalP
  misc_feature (7)...(477): similar to gi5824783 in the genepept database release 114, Run with FASTXY 3.3t00, default parameters
tttcgtccggtggccacggccgccgcgctgctggtcggctccagcaccctcttcttcgtgttcacgtgcccgtggttgacacgagctgtgtccccagctgttcccgtctacaatggcatcatcttcctctttgtcctggccaacttcagcatggccactttcatggaccctggtgttttcccccgagcggatgaggatgaggacaaggaggacgacttccgggctccgctgtacaagaacgtggatgtgcgaggtatccaggtccgcatgaagtggtgtgccacgtgccacttctaccgcccgccgcgctgctcccactgcagcgtctgtgacaactgtgtagaggactttgaccaccactgcccctgggtcaacaactgcatcgggcgtcgaaactatcgctacttcttcctgttcctgctgtcactcagtgcacacatggtgggcgtcgtggccttcggcctggtctacgtgctgaaccacgctgaggggctgggagccgcgcacaccaccatcac

SEQ ID NO: 79917 - DNA, 452 bp, Homo sapiens
  misc_feature (1)...(452): n = a,t,c or g
  sig_peptide (164)...(299): this location contains the signal peptide sequence, MFFFLCTFSRTGVQTFRRDHDRFWVLAAHPNLNLFAAGKGHFLSF, Run with SignalP
  misc_feature (191)...(280): similar to gi1237029 in the genepept database release 114, Run with FASTXY 3.3t00, default parameters
ggtcagttttgaagtctcctctttttgttccttggtagaatttatcacgactactgttacttaggatatgcagtttactctccctgatttacattttaatcagcttgctggcttaccatttaatattcttgtgtaggatgggctgaagattcctaggaaattaatgtttttctttttgtgtaccttttctaggactggggttcagactttccgcagagaccatgatcgtttctgggtcctagctgctcaccctaaccttaacctctttgcagcaggtaagggccattttctctcttttttctttgcttaattcaaagtttataagtcttgaagtgattattagctttgtctctagtaaatgtatagtaggatgacaagaagaagaaggactctcagagccacttagttgaagcttttctcctttntttcttccactatatatgtacagaaaa

SEQ ID NO: 79918 - DNA, 413 bp, Homo sapiens
  sig_peptide (236)...(371): this location contains the signal peptide sequence, MRFLTDLWLLPLGPPAMPLGNPPTLDPIFFSFTSDTLPTSRLLCF, Run with SignalP
  misc_feature (46)...(150): similar to gi3420888 in the genepept database release 114, Run with FASTXY 3.3t00, default parameters
cgtgtcgtactggttgggcaaaaccggctcgacccacgcgtccgctctgtgctatggcttgttttaggcctttgccttttccccccacgaatggggctggaagacgagttcccccctgcattgcagaaccatgcagcctacctgggtgagcagcagagagttgcagaggacttacagggtaggggaggaaatacatccctagtgggggcgggtatgaaatactccctcttaactcatgcggtttctcactgacctctggctacttcccttgggacctcctgctatgcctttagggaacccccctactctggaccccatcttcttttcctttacctctgatactttgcccacttctaggttactctgtttcttccatgcttttgcggggaggacgccgcctgtttctctctggg

SEQ ID NO: 79919 - DNA, 436 bp, Homo sapiens
  sig_peptide (227)...(92): this location contains the signal peptide sequence, MWDMLPWGITWVLLTTQLHSPLLYVIGFTYWVCKGDRDSYLEENS, Run with SignalP
  misc_feature (283)...(365): similar to gi2580578 in the genepept database release 114, Run with FASTXY 3.3t00, default parameters
cccgaggcggcttttaaccagcatctggggtgaccaatctaagtagacagggtcaggacaacactgatgtgtatacagatgctgtttccctgctgttctcttctaagtatgaatcccggtcccctttgcagacccagtaggtgaatccaattacgtagagcaggggactgtggagctgtgttgtgagcagcacccaggtgatgccccatggcagcatgtcccacattccttccatcttttaaaaaaaatttttctcggtggcagtcttgctctgtcgcctaggctggggtacagtggtgcaatctcagctcaccgcagcctcaacctcccgggttcaagcaatcctcccaccttggcctcccaaagccaaagattgcaggtgtgagtcctcggctcggcggtgggtcgacccggaattccggccggacgacgtcgt

SEQ ID NO: 79920 - DNA, 266 bp, Homo sapiens
  sig_peptide (49)...(184): this location contains the signal peptide sequence, MTQDLVLTVPFMGCLLILVDGLKPNRPAYIQTGSQATQAGVQWHN, Run with SignalP
  misc_feature (161)...(259): similar to gi1710216 in the genepept database release 114, Run with FASTXY 3.3t00, default parameters
agaaactgcctctctggatggtgactataacctatagccttgcccaatatgactcaggatttggtactgactgtgcctttcatgggatgcttacttatcctggtcgatggcctaaagcccaaccgtccagcttatatccagacagggtctcaagccacccaggctggagtgcagtggcacaattatggctcactgtagcctcaccttcctgggatcaagcaatcttctttcttcagcctccagaggagctgggaccacagatcctt

SEQ ID NO: 79921 - DNA, 234 bp, Homo sapiens
  sig_peptide (213)...(78): this location contains the signal peptide sequence, MGFFGVGSLFVFLNGSTPTNYPSIRDFCFFWVKAKGVECSQKLTH, Run with SignalP
  misc_feature (10)...(109): similar to gi2677843 in the genepept database release 114, Run with FASTXY 3.3t00, default parameters
tttccccgaaattcaaaaccccccccggggcttttttgggccccttttttctggccaaccgggaaccctttggggaatgggttaatttctgggaacattccacccccttagcctttacccagaagaaacagaaatcccgaattgatggataattagtgggggtggatccatttaaaaaaacaaaaagactcccaacaccaaaaaagcccataaccagatggattcacagctgaa

SEQ ID NO: 79922 - DNA, 373 bp, Homo sapiens
  sig_peptide (39)...(174): this location contains the signal peptide sequence, MRLQWGDAQEWASLHVLLIALLRAAQTFHPHSSQPASKAAETQSS, Run with SignalP
  misc_feature (23)...(207): similar to gi5326919 in the genepept database release 114, Run with FASTXY 3.3t00, default parameters
gagttgcccctgcccccatctgaaccccacctccaactatgaggctccagtggggggatgcccaggaatgggcttctctgcatgtgttgcttatcgctctcctcagggctgcccagactttccatcctcactcatctcagcctgcctcaaaggctgcagagacccagagcagtgtgggcaccataagggatattgttcaccccttcttgggggagtgcagctgccagagccctccatggggcactgatgtccaccttgcagacttctgagagagactgggaggatatagggaaacaagacaaaaatgcagagacttgagtccacagctggcacaaaaatagaggcagcctgggagcagggtagtggagtggag

SEQ ID NO: 79923 - DNA, 420 bp, Homo sapiens
  sig_peptide (271)...(136): this location contains the signal peptide sequence, MVASAAQLLSHVCLGGLQLLHSFLSSLQLPALLLKLAPEALALFT, Run with SignalP
  misc_feature (1)...(418): similar to gi3978134 in the genepept database release 114, Run with FASTXY 3.3t00, default parameters
agcctgcaggcccagctcgcccaggcagagcagcgggcccagagcctccaaggggctgcacaccaggagctcaacaccctcaagttccagctgagtgctgaaatcatggactaccagagcagacttaagaatgctggtgaagagtgcaagagcctcaggggccagcttgaggagcaaggccggcagctgcaggctgctgaggaagctgtggagaagctgaaggccacccaagcagacatgggagagaagttgagctgcactagcaaccatcttgcagagtgccaggcggccatgctgaggaaggacaaggagggggctgccctgcgtgaagaccaagaaaggacccagaaggaactcgaaaaagccacgtgtattgcggacgaaatcgtcgacccgggaagtccggtccgaatgctgtca

SEQ ID NO: 79924 - DNA, 412 bp, Homo sapiens
  sig_peptide (38)...(173): this location contains the signal peptide sequence, MRLGLLLLARHWCIAGVFPQKFDGDSAYVGMSDGNPELLSTSQTY, Run with SignalP
  misc_feature (74)...(408): similar to gi3882337 in the genepept database release 114, Run with FASTXY 3.3t00, default parameters
tttcgtcgcgttctctcgctgcctgggcttctgtggaatgagactcgggctccttctacttgcaagacactggtgcattgcaggtgtgtttccgcagaagtttgatggtgacagtgcctacgtggggatgagtgacggaaacccagagctcctgtcaaccagccagacctacaacggccagagcgagaacaacgaagactatgagatccccccgataacacctcccaacctcccggagccatccctcctgcacctgggggaccacgaagccagctaccactcgctgtgccacggcctcacccccaacggtctgctccctgcctactcctatcaggccatggacctcccagccatcatggtgtccaacatgctagcacaggacagccacctgctgtcgggccagctgcccacg

SEQ ID NO: 79925 - DNA, 391 bp, Homo sapiens
  sig_peptide (118)...(253): this location contains the signal peptide sequence, MGSTGISKFLFILAADTLAYTFLSNQNIFPSLLYQGKFKPERETS, Run with SignalP
  misc_feature (366)...(278): similar to gi1326362 in the genepept database release 114, Run with FASTXY 3.3t00, default parameters
ttgactggatagtccactcttgatgatctgtgaatttacatattatttaattcaagaggaatatttacattttggcaaatcttgaattaaaactcccatagttacctttgattaattatgggctctactggcatctcaaaatttctatttattttggcagctgacacactggcgtacactttcctttcaaaccaaaatattttcccttcccttctttaccagggaaagtttaagccagaaagagaaacttctgtagcctggtacagatatgtagcagtctgagaaatgatgatcacagtaatatatgtttttatagaaatagaatgagtcaagggatagctgaattttggctttggttcttaataatgtggttacattcaattaattacct

SEQ ID NO: 79926 - DNA, 389 bp, Homo sapiens
  sig_peptide (180)...(45): this location contains the signal peptide sequence, MDLFSLKCASFVLIGYVRICTLEQFVLEVYNLEVMSWYYKSESLQ, Run with SignalP
  misc_feature (122)...(313): similar to gi145112 in the genepept database release 114, Run with FASTXY 3.3t00, default parameters
cagagcacagcattccatgcgattcataagctgaagactctcagacttatagtaccaactcatgacttccaaattatacacttctagcacaaactgctctaatgtgcatattctcacatatccaatcaggacgaaagaggcacatttcaaactgaacaagtccatcccttctacatcccccacccctaactgtcccttccctgtaagaggcccactcatctatccagctgctcaacttggaggttcatcctcggattctctctctccatctagtacattcaaatccaccagcaagttctgttggttctggctcctcaaaatatatctcaaatccatccatttctcttcatttccactagcaccaaccatacttaaagccaccatcatca

SEQ ID NO: 79927 - DNA, 400 bp, Homo sapiens
  sig_peptide (199)...(334): this location contains the signal peptide sequence, MPGSLCGRRTVCWLLGSVTSKQVLTFDLRKFSRSSRLQEDQERSL, Run with SignalP
  misc_feature (382)...(3): similar to gi5923788 in the genepept database release 114, Run with FASTXY 3.3t00, default parameters
ggcacgcactcccccgcgcggcaccacttgtctgccccacactcggtgccatccaggggagggtccagcttggtcttgcaggatgtgtctccttctaccaggcaccacagtccagcacacattagatgctccatgtttctgcagaaggtggcattcatgccaaacaggatctggcactgctcgttggcactgtagtgcatgcccggcagcttgtgcgggaggcgtactgtgtgctggcttctggggtccgtgactagcaagcaggtgctgacttttgacttgaggaagttttcaaggtcatctcggctgcaggaggaccaagagaggtcacttgggttccggcctttcacccactctcctgacatgatgtgggacctgccagcgcaagatgagtggtcat

SEQ ID NO: 79928 - DNA, 783 bp, Homo sapiens
  sig_peptide (11)...(146): this location contains the signal peptide sequence, MCTLYLISTPHLLLGRLLISKESAAPALKRKQAPGPTNPYSISEG, Run with SignalP
  misc_feature (35)...(185): similar to gi4371292 in the genepept database release 114, Run with FASTXY 3.3t00, default parameters
gggcccatatatgtgcactctgtatctaatatccactccacatctgctgttaggacgattgttaatatcaaaggaaagtgctgcccctgccctcaaaaggaagcaggcccctggccccactaatccttacagcatctcagaaggcaaggaagacaagggagagattagtcttctctggagactagaaaactggaatccagagagtttaagtcccttacaccaaacgcctgatgcagggggacctcccctcccaagagtcggcctcactgacgtggcttctgtgtcctctgcttggttccagcaggtccaacgcagacctcaccactctgatgcacaacgaggtatggccttggggtttttctgtgctttggaatcacttgaaaatccctcagcacttcttcatggaaacccaagattcagaaccagattttcaacagccacagatccaccttagagttcccttcagtgaggattccattgacaaaatgttattattaaaaaggacacattggctgggcgtggggggtcatgcctctggactcccacgctttttggggggcccccggggggaggaccccttgggccccggaattaaagaaaccccgtggccaaacagggggaaaccccccccctgttcataaaaaaaacaaaaaaataccttgggggggggggaaggggacccgggtaaaagccccattattggggagggcttgaggccgggaaaaaaacatttgaaaccggggggggcacaaggtttcacatgaccccccccacccgcccccg

SEQ ID NO: 79929 - DNA, 403 bp, Homo sapiens
  sig_peptide (388)...(253): this location contains the signal peptide sequence, MCFLNKLLLLAALDWLFQIPTVPEDLFFLEEGPSYAFEVDTVAPE, Run with SignalP
  misc_feature (223)...(383): similar to gi3413460 in the genepept database release 114, Run with FASTXY 3.3t00, default parameters
cggtccggcgcaaggagggcggctggttgtggaaaaaggcctgggcgagctgtgcctgcagcccctggctggtttgggaaggctgggctcccaggctggtggtagtggtgggggtgattttcctcatgaagcccccactccgtccactactgcctgacacccacgaagcgagcagtttccggagctctccgatgtaggggcagcaggtgtagagcagctgctggtccaccacaggcgcattgtccaagccatgctctggggctactgtgtccacctcaaaggcatatgagggaccctcttccagaaagaacaagtcctcagggactgtgggaatctggaaaagccagtccagggcagcaagaagcagcagcttgttcaggaaacacatcttcccctcactctc

SEQ ID NO: 79930 - DNA, 428 bp, Homo sapiens
  misc_feature (1)...(428): n = a,t,c or g
  sig_peptide (183)...(318): this location contains the signal peptide sequence, MPCLLCHQICLILAHLRHSVLVFSFAYNIFGIADSSFTFSLSSPQ, Run with SignalP
  misc_feature (267)...(428): similar to gi3551960 in the genepept database release 114, Run with FASTXY 3.3t00, default parameters
atgatcattttaaaatttaagcaaaatgtgtcataaacatgcacaactccacgagtatcattcacattgcagctgtgaggtctcattcacaacaaactacattgctgtggagctgtatggtgctagtgagcttcctacatgtgcttgtctgggctgcctgacctaaaccctgtgctctagccatgccatgcctcttgtgtcatcaaatctgcctaattcttgcccatctcaggcattcagtacttgtattttcttttgcctacaatatttttggcatagctgactcatctttcactttcagtctgtcatctcctcagagagatactctgatcatgctatctaaagtaagtgtctcttcacctcccccctcttttttctctccatccctaatncagtataagatcaatgaagatatagaacatgtatgt

SEQ ID NO: 79931 - DNA, 429 bp, Homo sapiens
  sig_peptide (253)...(388): this location contains the signal peptide sequence, MQLLQILEPKMFRYAHLPSLPQLATLLTPHLFQVLLQVAGPTGTS, Run with SignalP
  misc_feature (103)...(298): similar to gi2341020 in the genepept database release 114, Run with FASTXY 3.3t00, default parameters
gacgtaccggatcgggatacccggcccgacccacgcgtccgatggaggaagcgaacttattttccctctttttttttctcagggtttgatataattttttggtttgcgggctccgggaggggggcggccggctgctttaaagccattgctaatgttttccagaacagggattatcaatgtgacacagtgatgcttctaaatctgatactgtttaaagcagctgattcttctagaagtatctatgaagttgctatgcaacttttacagattctggaaccgaagatgtttcgctatgctcacttgccttctcttccccagttagccacgttactcactcctcacctctttcaggtcctccttcaggtggcagggcccactgggacttctgctgcccatcctgtctaaaactgcaaatgcaccacctccacc

SEQ ID NO: 79932 - DNA, 1239 bp, Homo sapiens
  sig_peptide (201)...(66): this location contains the signal peptide sequence, MATLPQASNLATRILLLTLLFEEMKLPCAWVVESSGILNVLIKLL, Run with SignalP
  misc_feature (751)...(913): similar to gi3176689 in the genepept database release 114, Run with FASTXY 3.3t00, default parameters
ccacttccaagagtttgattagaacattaaggatgccgcttgattcaaccacccaagcacaaggtagtttcatctcctcaaaaagtagcgttaaaagcaagattctagtagccaaattggaggcctggggcagtgtggccatctgacttatccactctgacacggtttttgtgtcacttgttgtcaggggaagagcagctttgatcaatacatcagcagcttcccacacgtgattgactacttgcttcagaatcatgtcacgataatctgctccattacgtttgattgctgtcatgatcaggtcacacacacggtatactgtgtctggcagctcatcaagaaggtggaagcagcctggcaacatagtatctgtgaaagtgtggagctcatcttgttccaacgggtcagcatcctggaacttctctagacatttagcctcttcctcctcctgcttttcccgagctttccgttcctcttcctccttccggcaagcaacttcctcaggtgactctgccctttgatccattggaatatcctgtcccagagacatagcaattgctctcatcatctggtcctcttcagacatgctgagatcccgaacaactcctcccatgattggaggagggtgggttaaaaggtactctgtggcctgctccatggtgctggtgttcaacagtgcctccattgcatgttcccttgtgaagcccatgtccatgagctgttgcagttgttgctggttgacttgaggttcccggcgggagccaccttcctcttgccctgtatcctcttctcctcgagacccctccttctccttgcttagtctctctcgaatcacaggttctcctcggaggatgtggcatagaatggccagcatcgattcagccattcgtccaccatataccttcaggggtttccggttccataagtttttgatgcaagtaaaggctgctttctgagttaccacaaggaagcgcagtgcactgaactggggaaagttctggacacctccaggcaatttggcaggcagcgaatgtggagattcaagcaccgtggtgggattcaccatcttctccaccagcataagccaggcatctaggaattctcctgtgccatcaggcaagtctgagtgttccaatccctcagaaacaggaactttacctcccatggacagagcccagttgaaagtttcaaaaagagcattgtggcctccggagcagagaaatttttgcagcatgaggt

SEQ ID NO: 79933 - DNA, 277 bp, Homo sapiens
  sig_peptide (88)...(223): this location contains the signal peptide sequence, MWADSILASLLLWPHQSLQLWHHPHLANKNMGVPPPTTCKPWSTV, Run with SignalP
  misc_feature (77)...(153): similar to gi39199 in the genepept database release 114, Run with FASTXY 3.3t00, default parameters
cggccgcgtcgacaaaacatgcatacttgcttttttgcccatggagcactttaaggcacaattcccggcagggtgctgtcttcctccatgtgggcagacagtatcctggcatctctcctcttgtggccccaccagtctctacagctgtggcaccacccacatcttgctaataagaacatgggggtgccaccccctaccacctgcaagccttggtccacagtggcacagaagtttgctgattacattccattcatgacaacatggccacccctaggta

SEQ ID NO: 79934 - DNA, 376 bp, Homo sapiens
  sig_peptide (58)...(193): this location contains the signal peptide sequence, MISVCPLWAARARGVNPYVLCGSGCAPETSISFTMSSLPSLAASW, Run with SignalP
  misc_feature (268)...(36): similar to gi1841966 in the genepept database release 114, Run with FASTXY 3.3t00, default parameters
ccctttgttagtgtgctgaccaaacagaagatcttgcctttccgcagtaacatttccatgatttcagtgtgtccactttgggcagcaagagcaagaggagtgaatccatacgtgctctgtgggtcagggtgtgccccagaaaccagcataagcttcaccatgtcctctctgcccagtttggctgcttcgtggagagctgtcctctcgttggcacaacgcagattgacatctgctccatagttgatcagcaaggcagccatgtcatagcagtcacgcagcacagctgggaaatgagaagtgtggtgggcatgttcaacgggaagttaagcccaaagtagcatatctgcaagtatccctcaggctttcttaaggagtt

SEQ ID NO: 79935 - DNA, 391 bp, Homo sapiens
  sig_peptide (139)...(4): this location contains the signal peptide sequence, MFRPLPTLFFTGLMILKTMKKKYDSRSRVWNEHSALPAGELREDP, Run with SignalP
  misc_feature (96)...(160): similar to gi854082 in the genepept database release 114, Run with FASTXY 3.3t00, default parameters
tatgtgggtcctcacggagttccccagctgggagagcagagtgttcattccacactcgggaccgactgtcatatttcttcttcattgtcttcaggatcatgagtcctgtgaaaaacaatgtgggcagaggcctaaacatcgccctggtgaatggtgagttgcatatccatccccagacagttcccacccagaaccagggagggtagggggtagcggcatattcattcaaccaacattggctcagctcctacctcatggcaggaatgcccgtagagctcaggaggggaagcgtggctggcctgggggaacagaaggtctcaaagacccgcagagctgtagaaccgcagagctagccaggcccctgccacatgctcctatctcaggaggacac

SEQ ID NO: 79936 - DNA, 477 bp, Homo sapiens
  sig_peptide (305)...(440): this location contains the signal peptide sequence, MYILTFMKVGLKLSGCFVFLLALISINWYINLPHCRVSFIRTGSW, Run with SignalP
  misc_feature (126)...(273): similar to gi2832404 in the genepept database release 114, Run with FASTXY 3.3t00, default parameters
cggcacgagtcaaaaactaaatgccattgaaagagagggaaattatgatttgatgggaagatggcagtggctttgtttttggaaattcacaagaggcagtcttatgaatttgagtataaagttagcctatatctccatcaaaaaacaaaaaaaaaagcaaaaaaccaaaaataatttttaaactcacaacaaaaaactctgtctctgggagttcctacactaccaatgagtggcccatgaaaaatcccaaaggaaaaattttatcttccaggcccagggctctgtttctttttagctcctgaatatgtacattctgacttttatgaaggttggtttaaagctctctggatgttttgttttccttctagcacttatctcaatcaattggtatattaacctacctcactgcagggtcagcttcataaggacaggatcttggtccagtacctaaaaggggtacctagcacctttggtgcc

SEQ ID NO: 79937 - DNA, 368 bp, Homo sapiens
  sig_peptide (124)...(259): this location contains the signal peptide sequence, MSSSSAKVFYLLQYPVLKPLLRTLCIPAGVILPYHYLFTLHSLLL, Run with SignalP
  misc_feature (8)...(136): similar to gi5824504 in the genepept database release 114, Run with FASTXY 3.3t00, default parameters
gcccctctgtagctgctctcctccatctactcttgcagactctggcagctctaacacaccttgctgcttccccaccctggcccaccctctctgtagtcctcatccttgtcctggctggttgctatgtcctcctcttcagctaaagtgttctacctccttcaatatccagtcctaaagccacttctcagaaccctgtgtataccggcaggtgtcattctgccttatcattatttgtttacattacactccctcctgctacactctaacggaaatcatggcctcatggacctctgggggcatctgcagtctgtctctcctatggcactgggtgctctctgaaggcaagggcatccttctggcaccctcag

SEQ ID NO: 79938 - DNA, 439 bp, Homo sapiens
  sig_peptide (199)...(334): this location contains the signal peptide sequence, MMRLEKFVTWSVMALGWFVFRQQNCWALWSKSVLISWSRPLTRSM, Run with SignalP
  misc_feature (2)...(156): similar to gi1171250 in the genepept database release 114, Run with FASTXY 3.3t00, default parameters
tgagggtggcgcaggggccccggccagcccggggctgcagcagtgcggacagctccagaagctcatcggcatctccattggcagcctgcgcgggctgggcaccaagtgcgctgtgtccaacgacctcaccgagcaggagatacggaccctggagcattgtcccaattccttcttctaatgaagaaatacgcttagttgatgatgcgtttggaaaaatttgtcacatggtcagtgatggctcttgggtggttcgtgttcaggcagcaaaactgttgggctctatggagcaagtcagttctcatttcttggagcagacccttgacaagaagcatgtcagatctgaggaggaaacgtactgcacatgagcgtgccaaggaactttacagttcgggggagttttccagtggcagaaagtggggagatgatgctcccaaggaag

SEQ ID NO: 79939 - DNA, 985 bp, Homo sapiens
  misc_feature (1)...(985): n = a,t,c or g
  sig_peptide (144)...(279): this location contains the signal peptide sequence, MLVWLYGTIRWPALGAPRWWPWVWPPGVWSGIETPSSTPRARSLR, Run with SignalP
  misc_feature (89)...(549): similar to gi3928756 in the genepept database release 114, Run with FASTXY 3.3t00, default parameters
ggcagcatggtggtgccggagaaggagcagagctggatccccaagatcttcaagaagaagacctgcacgacgttcatagttgactccacagatccggggagcctggattgtcactgggggtctgcacacgggcatcggccggcatgttggtgtggctgtacgggaccatcagatggccagcactgggggcaccaaggtggtggccatgggtgtggccccctggggtgtggtccggaatagagacaccctcatcaaccccaagggctcgttccctgcgaggtaccggtggcgcggtgacccggaggacggggtccagtttcccctggactacaactactcggccttcttcctggtggacgacggcacacacggctgcctggggggcgagaaccgcttccgcttgcgcctggagtcctacatctcacagcaaaacacggccgtggcagggactggaattgacatccctggcctgctcctcctgaaagaatgtgatgagaagatggtgacgcgaatacacaacgccagccaggctcagctcccatgtcttccttatgattgcgttaagggggagctacggacttgcctagcgggcaccccttggaataccctcttgcccccgggaacggtggttttccagcctacgccccgaaccccgagaatgcatccacgcgcctcgttttgctgaattgangatccttggacgtccttgcatcccacatcgtggcgaaattatttatctacccccccccgccggtgggagtaattgcatacttccatccctattgcctcgttttggaggagttggtgactctcacttctatcggtaataggacattaccgtatccgaccttatgactcggttccccgatcaacaatcgactagtaccggccgcggccacctacctccttataacacttctcttaccggcacctccgtccttggtagtaaactcctggcgctgtatctgtgtgctactgctaggcc

SEQ ID NO: 79940 - DNA, 435 bp, Homo sapiens
  sig_peptide (281)...(146): this location contains the signal peptide sequence, MRPEAAGSSAVFLASLLLALRTTLSCLATREYFWAKTWGLGEDGA, Run with SignalP
  misc_feature (8)...(431): similar to gi4886900 in the genepept database release 114, Run with FASTXY 3.3t00, default parameters
tttcgtctcccctggcccacgggactcgccagcctttccagattctccatggcgggagcgggtgctggctcccatcctgccggataacttctccacgcccacgggctctcgcacggactctcaatcggtgcggcacagcccgatcgccccgtcttccccgagtccccaagtcttagcccagaagtactctctggtggccaaacaggaaagtgttgtccgcagggcgagcagaaggcttgccaagaagactgccgaagagccagctgcctctggccgcatcatctgtcacagttacctggagaggctcctgaatgttgaggtgccccagaaagttggttctgagcagaaggaaccccccgaggaggctgagcctgtggcggcagctgagccagaggtccctgagaacaacggaaataactcgtggccccatgtatt

SEQ ID NO: 79941 - DNA, 390 bp, Homo sapiens
  sig_peptide (284)...(149): this location contains the signal peptide sequence, MLPGSPSPQAAGLSQFQWAPGCHWLQPLLWVKVYVLLVPDGTEGR, Run with SignalP
  misc_feature (38)...(386): similar to gi5921489 in the genepept database release 114, Run with FASTXY 3.3t00, default parameters
ttctcaggactatcgtgtggtggcagctcagaggaaggaggaacccagccccctcaacctatcccatcatacccccgaccatcagggtgaggggcgagggtcagccaggaaccctgcagagctggcagagaaaagtcaggcccgtgggttctaccctcagtcccatcaggaaccagtaaaacatagacctttacccaaagcaatggttgtagccaatggcaacctggtgcccactggaactgactcaggcctgctgcctgtgggctcggagatcctggtagcatcaagtctggacgtgcaggccagagccaccttcccagacaaggagccaacgccgccccccattacctcctctcacttgccatcccatttcatgaaaggcggtgtatt

SEQ ID NO: 79942 - DNA, 396 bp, Homo sapiens
  sig_peptide (380)...(245): this location contains the signal peptide sequence, MFLWVKRLLFAASLLASDSSTILCSRDLILESIALIIAFCSLRIL, Run with SignalP
  misc_feature (1)...(391): similar to gi3360514 in the genepept database release 114, Run with FASTXY 3.3t00, default parameters
ctgcagaaccgagaggattcttctgaaggcatcagaaagaagctggtggaagctgaggagctcgaagagaaacatcgggaggcccaagtctcagcccagcacctagaagtgcacctgaaacagaaagagcagcactatgaggaaaagattaaagtgttggacaatcagataaagaaagacctggctgacaaggagacactggagaacatgatgcagagacacgaggaggaggcccatgagaagggcaaaattctcagcgaacagaaggcgatgatcaatgctatggattccaagatcagatccctggaacagaggattgtggaactgtctgaagccaataaacttgcagcaaatagcagtctttttacccaaaggaacatgaaggcccaatgtatt

SEQ ID NO: 79943 - DNA, 384 bp, Homo sapiens
  sig_peptide (53)...(188): this location contains the signal peptide sequence, MCTFLIPILSLFAIQLAQNLSHFYLVSLSPVQLTQLVFLICYFIF, Run with SignalP
  misc_feature (37)...(163): similar to gi1518553 in the genepept database release 114, Run with FASTXY 3.3t00, default parameters
atgatttatttcccttctcaattccatacccacagatgcttattatttatttatgtgtacctttcttatccccatactctccctgtttgcgatacaactagctcaaaacctcagtcatttttaccttgtctctctctctccagtccaactcactcaactagtttttctcatttgttacttcatttttgtcctggttcttctaccagatttattagcaactgcctggactattaataaagcctcctacttaggctttcaatagattgttctgttcctgctccattccaatctgtcctatatactgccatcagattgatcaaagctgtggtttctttgtctattattttgattcatttttagatatggtatcattcatttttaaat

SEQ ID NO: 79944 - DNA, 379 bp, Homo sapiens
  sig_peptide (267)...(132): this location contains the signal peptide sequence, MYFKWKSSQKITGFAILPVLLPALEYLHSCFPCLPGWRKGTGLGP, Run with SignalP
  misc_feature (2)...(156): similar to gi3327160 in the genepept database release 114, Run with FASTXY 3.3t00, default parameters
gggcatagaggtaaatgagtctccttccctggttcgaattaggagtaagcctgtgagtccaagcccccctcatattcaggcagcgaccattccggcttccctttctgtgccctggtcagagaataggccgctgggcccaggcctgtccctttcctccaacctggcaggcatgggaagcagctgtggaggtattctagagctgggagaagcacagggaggattgcaaagcctgttattttctgtgaactcttccacttaaaatacatctatgtttaaaagaataatccggttccttttaatcaagcatgttttccttagagcaataaaggcttttgcaatatggtaaaggtgacaaccatctaaggagtgtggggaagct

SEQ ID NO: 79945 - DNA, 418 bp, Homo sapiens
  sig_peptide (3)...(138): this location contains the signal peptide sequence, MRALVLLGCLLASLLFSGQAEETEDANEEAPLRDRSHIEKTLMLN, Run with SignalP
  misc_feature (3)...(421): similar to gi623545 in the genepept database release 114, Run with FASTXY 3.3t00, default parameters
ccatgagggcgctggtcctgctcggctgcctcctggcctcgctcctgttctcaggacaagcagaagagacggaggatgcaaatgaagaagccccattgagggaccgctcccacatcgagaagaccctcatgctgaatgaggacaagccatccgatgactactctgcggtgctgcagcggcttcggaagatctaccactcatccatcaagcctctggagcagtcctacaagtacaatgagctccggcagcatgagatcacagatggagagattacctccaagcccatggtactgttcctgggaccgtggagtgttggtaaatctaccatgataaactacctccttgggctggaaaatactcgctatcagctctatacaggcgctgaacccaccacctctgagttcacggtcctcatgcg

SEQ ID NO: 79946 - DNA, 686 bp, Homo sapiens
  sig_peptide (27)...(162): this location contains the signal peptide sequence, MRTLLTILTVGSLAAHAPEDPSDLLQHVKFQSSNFENILTWDSGP, Run with SignalP
  misc_feature (18)...(611): similar to gi6013325 in the genepept database release 114, Run with FASTXY 3.3t00, default parameters
caagggagggctctgtgccagccccgatgaggacgctgctgaccatcttgactgtgggatccctggctgctcacgcccctgaggacccctcggatctgctccagcacgtgaaattccagtccagcaactttgaaaacatcctgacgtgggacagcgggccagagggcaccccagacacggtctacagcatcgagtataagacgtacggagagagggactgggtggcaaagaagggctgtcagcggatcacccggaagtcctgcaacctgacggtggagacgggcaacctcacggagctctactatgccagggtcaccgctgtcagtgcgggaggccggtcagccaccaagatgactgacaggttcagctctctgcagcacactaccctcaagccacctgatgtgacctgtatctccaaagtgagatcgattcagatgattgttcatcctacccccacgccaatccgtgcaggcgatggccaccggctaaccctggaagacatcttccatgacctgttctaccacttagagctccaggtcaaccgcacctaccaaatggtgagtgtatgttgcaccctggtctttctctgcctaggaagcctcttccctcccaattagatctgagttgctttaagaaaaaaaggggacatgttatgtaaattagcatttcccacaacatgtcccttg

SEQ ID NO: 79947 - DNA, 392 bp, Homo sapiens
  sig_peptide (178)...(313): this location contains the signal peptide sequence, METGRLAIWAIVAACVGTEAGRWLLREMRGPGPASKGQLPGRGLL, Run with SignalP
  misc_feature (306)...(49): similar to gi1491971 in the genepept database release 114, Run with FASTXY 3.3t00, default parameters
aggacagaggtcccttgctggctgtgtgtgcaaatattgagcaccaaatggctaccagaggaatggggaagaactgactcgggataagagtgggatgcgtacaaggagagaaggctggagaaaaccttgcacgctgcgggagcaggctccccaggacgtgtcagaagggcccagtccatggaaacagggagacttgccatatgggccatcgtggctgcctgtgtggggactgaagctgggcgctggctgctgcgcgagatgagggggccaggtccagcttccaaagggcagcttccaggcagagggctgctaactggctggaaaactatcagcgtgtggagtggaaacctgtaggggcagggaaaccaaggaacatttgggcattttccggc

SEQ ID NO: 79948 - DNA, 620 bp, Homo sapiens
  sig_peptide (199)...(334): this location contains the signal peptide sequence, MWPSVHLCRCVEWFLPFAFHFHGRSRATNWLCTFEHFLSSLGLCF, Run with SignalP
  misc_feature (1)...(330): similar to gi780179 in the genepept database release 114, Run with FASTXY 3.3t00, default parameters
tctgcctccctctgggtagaagcaaccccctctcattgtggaggggccgcagtggaaggtgatgctttatccccaagggcagctctgctggcctcagttgttcttgctcagccgagctccctcagctttagagcttcctgctcaggcccggagacctgtgcaccatctgcagcggacggtggccatggttggtgggcgatgtggccaagtgtgcatctgtgccgctgtgtggaatggtttttgccatttgcctttcactttcatggaaggtcaagggctaccaactggttatgcacctttgagcactttctttcctctttgggcctctgcttttttgcttaaatttagcaggcaaaaatgagatgtttatagcatccattgagctttgatgtggttcttcttgatggctaaaacctgcggtgctgaagagagggccccagggctgagggcttgctcctagaccaagatattgagtgcttgaccctgcactgggccctgctcctgatggcaaggccatgagctgagatccgtacctttgctctaccccttccaactccgtttttttttgaagacaaagtgcctggtgctttccccccaaggctggaaattaaaagggccct

SEQ ID NO: 79949 - DNA, 383 bp, Homo sapiens
  sig_peptide (158)...(293): this location contains the signal peptide sequence, MEYRLQKGAGFHLDLFCVAVLMLLTSALGLPWYVSATVISLAHMD, Run with SignalP
  misc_feature (5)...(385): similar to gi3298572 in the genepept database release 114, Run with FASTXY 3.3t00, default parameters
cagagagttcaagcccacactccctgggcgtgtctggctggtgtcaccttttggagccaacccctggtggtggagtgtggcagctgccctgcctgccctgctgctgtctatcctcatcttcatggaccaacagatcacagcagtcatcctcaaccgcatggaatacagactgcagaagggagctggcttccacctggacctcttctgtgtggctgtgctgatgctactcacatcagcgcttggactgccttggtatgtctcagccactgtcatctccctggctcacatggacagtcttcggagagagagcagagcctgtgcccccggggagcgccccaacttcctgggtatcagggaacagaggctgacaggcctggtggtgt

SEQ ID NO: 79950 - DNA, 444 bp, Homo sapiens
  misc_feature (1)...(444): n = a,t,c or g
  sig_peptide (301)...(436): this location contains the signal peptide sequence, MAWGLATLLCVEGAAMLYYPSVSRCERGLDHAIPHYVTMYLPLLL, Run with SignalP
  misc_feature (277)...(445): similar to gi1113125 in the genepept database release 114, Run with FASTXY 3.3t00, default parameters
gtaccctannccnnnncgcgaattcggctgcagagcattgtgaatgtactaaatgccactttgttgttcactttaaaatagttaattttatgtgatgtgaatttcacctcaatggaaaacaaccaaccaacctcagcagcacgaggaaactctttgccgaggggctttcctctgtgtacattttcctgacctttccagagcgcaggagctggcctggcagttccaggcaggcctctgtgccccactgagctgtggctgctgttgtgcttgtcccctagcaccatcctgctgtatcacatcatggcgtggggcctggccaccctgctctgtgtggagggagccgccatgctctactacccttccgtgtccaggtgtgagcggggcctggaccacgccatcccccactatgtcaccatgtacctgcccctgctgctggttctcgtg

SEQ ID NO: 79951 - DNA, 673 bp, Homo sapiens
  sig_peptide (69)...(204): this location contains the signal peptide sequence, MPFSTCTALPSWATLSTWSWTPKVSLAGEERGETCQPDPFPPHPS, Run with SignalP
  misc_feature (2)...(144): similar to gi2224619 in the genepept database release 114, Run with FASTXY 3.3t00, default parameters
caaccccaagaccaagaagcacctgggcattgccaaggtggtctttgccacggtccggggagccaaggatgccgttcagcacttgcacagcacttccgtcatgggcaacattatccacgtggagctggacaccaaaggtgagcctggcaggggaggagcgtggggagacctgtcagcccgaccctttccctccccacccttcctgcagcgtggggaggaccccccctcactcttccttgggatccccccccacaaccttatttcttagccccctcctgagggtagagtcgcgtggagctaaatgtgttgtctgttgctaggagacagtctgtaatttaccaaatgtgccggtccttggccaccgcacccctagggaccacccggaggcttccccaccgctgacacccccgcgggccccctctctgagccctggtggcttgggtttagacagtccccagtgttgcctgtgttaggggaggagacagagtttgtttacttgtgggggactgaggaagtgccactaggatgccttgaaatacatcaagagaaggtctgaaaactgaaaagagagtcctctaaggatccagggtgtccccccacctccttgctgacccttcccctctggaagtggcagccaatctggggcccaggaatgttgtttcattgataaggg

SEQ ID NO: 79952 - DNA, 499 bp, Homo sapiens
  sig_peptide (101)...(236): this location contains the signal peptide sequence, MCAMALVHARILRVFYGAPSPDGALGTRFRIHARPDLNHRFQVFR, Run with SignalP
  misc_feature (44)...(237): similar to gi5832838 in the genepept database release 114, Run with FASTXY 3.3t00, default parameters
cgtccgcgcaggcgccgtgcgtaaactggacgcagacgaggacggcctcccctacctgtgcactggctacgacctgtacgtgacccgcgagccatgcgccatgtgcgccatggccctggtgcacgcacgcatcctgcgcgtcttctacggtgcgccctcgcccgacggcgccctgggcacccgcttccgcatccacgcacggcccgacctcaaccaccgcttccaggtgttccgcggggtgctggaggagcagtgccgctggctggaccccgacacgtaggcgccgccctcctgcctccggacccttcccgctcccggccgtggggcgcccctcctggacttccgggcctcgatttcttccgcacaagcctgaccgtggatttcagggacacataccgcctccagcggggagcacgggtgctgccttccgtgcggatcgagctttcctggactcggtcattggggccaccccgtgccagcggtgcccttctgcggccgc

SEQ ID NO: 79953 - DNA, 289 bp, Homo sapiens
  sig_peptide (134)...(269): this location contains the signal peptide sequence, MINFIYFLAFLIASDAMSVQYYECGPNHKTGFSYRLQLCLLKIRD, Run with SignalP
  misc_feature (74)...(189): similar to gi4262523 in the genepept database release 114, Run with FASTXY 3.3t00, default parameters
tatagaattagcaagaaaataatcagcagggtttgccctccagcgggctaggcttcattctgggcatgcagaaggctgtattctgagtttacattctaaagagcttatattgcttatatatttctcattcaaaatgataaatttcatttatttcttagctttcctgatagcttctgatgcaatgagtgttcagtattatgaatgtggaccaaaccataagacagggttctcctataggctgcaattgtgcttacttaaaatacgggatcctgagggatggctcttaatg

SEQ ID NO: 79954 - DNA, 2161 bp, Homo sapiens
  sig_peptide (8)...(143): this location contains the signal peptide sequence, MSLVLLSLAALCRSAVPREPTVQCGSETGPSPEWMLQHDLIPGDL, Run with SignalP
  misc_feature (107)...(1416): similar to gi1161343 in the genepept database release 114, Run with FASTXY 3.3t00, default parameters
ggcggcgatgtcgctcgtgctgctaagcctggccgcgctgtgcaggagcgccgtaccccgagagccgaccgttcaatgtggctctgaaactgggccatctccagagtggatgctacaacatgatctaatcccgggagacttgagggacctccgagtagaacctgttacaactagtgttgcaacaggggactattcaattttgatgaatgtaagctgggtactccgggcagatgccagcatccgcttgttgaaggccaccaagatttgtgtgacgggcaaaagcaacttccagtcctacagctgtgtgaggtgcaattacacagaggccttccagactcagaccagaccctctggtggtaaatggacattttcctacatcggcttccctgtagagctgaacacagtctatttcattggggcccataatattcctaatgcaaatatgaatgaagatggcccttccatgtctgtgaatttcacctcaccaggctgcctagaccacataatgaaatataaaaaaaagtgtgtcaaggccggaagcctgtgggatccgaacatcactgcttgtaagaagaatgaggagacagtagaagtgaacttcacaaccactcccctgggaaacagatacatggctcttatccaacacagcactatcatcgggttttctcaggtgtttgagccacaccagaagaaacaaacgcgagcttcagtggtgattccagtgactggggatagtgaaggtgctacggtgcagctgactccatattttcctacttgtggcagcgactgcatccgacataaaggaacagttgtgctctgcccacaaacaggcgtccctttccctctggataacaacaaaagcaagccgggaggctggctgcctctcctcctgctgtctctgctggtggccacatgggtgctggtggcagggatctatctaatgtggaggcacgaaaggatcaagaagacttccttttctaccaccacactactgccccccattaaggttcttgtggtttacccatctgaaatatgtttccatcacacaatttgttacttcactgaatttcttcaaaaccattgcagaagtgaggtcatccttgaaaagtggcagaaaaagaaaatagcagagatgggtccagtgcagtggcttgccactcaaaagaaggcagcagacaaagtcgtcttccttctttccaatgacgtcaacagtgtgtgcgatggtacctgtggcaagagcgagggcagtcccagtgagaactctcaagacctcttcccccttgcctttaaccttttctgcagtgatctaagaagccagattcatctgcacaaatacgtggtggtctactttagagagattgatacaaaagacgattacaatgctctcagtgtctgccccaagtaccacctcatgaaggatgccactgctttctgtgcagaacttctccatgtcaagcagcaggtgtcagcaggaaaaagatcacaagcctgccacgatggctgctgctccttgtagcccacccatgagaagcaagagaccttaaaggcttcctatcccaccaattacagggaaaaaacgtgtgatgatcctgaagcttactatgcagcctacaaacagccttagtaattaaaacattttataccaataaaattttcaaatattgctaactaatgtagcattaactaacgattggaaactacatttacaacttcaaagctgttttatacatagaaatcaattacagttttaattgaaaactataaccattttgataatgcaacaataaagcatcttcagccaaacatctagtcttccatagaccatgcattgcagtgtacccagaactgtttagctaatattctatgtttaattaatgaatactaactctaagaacccctcactgattcactcaatagcatcttaagtgaaaaaccttctattacatgcaaaaaatcattgtttttaagataacaaaagtagggaataaacaagctgaacccacttttactggaccaaatgatctattatatgtgtaaccacttgtatgatttggtatttgcataagaccttccctctacaaactagattcatatcttgattcttgtacaggtgccttttaacatgaacaacaaaatacccacaaacttgtctacttttgcc

SEQ ID NO: 79955 - DNA, 505 bp, Homo sapiens
  misc_feature (1)...(505): n = a,t,c or g
  sig_peptide (32)...(167): this location contains the signal peptide sequence, MXPPTRPRTRGVGIFYFVIYIIISFLVVVNMYIAVILENFSVATE, Run with SignalP
  misc_feature (65)...(507): similar to gi825473 in the genepept database release 114, Run with FASTXY 3.3t00, default parameters
cataagccttgggcanagnaccttgaaataaatgnggccacccacgcgcccgcggacgcgtggggttggaatattctactttgttatttatatcatcatatccttcctggttgtggtgaacatgtacattgcagtcatactggagaattttagtgttgccactgaagaaagtactgaacctctgagtgaggatgactttgagatgttctatgaggtttgggagaagtttgatcccgatgcgacccagtttatagagttctctaaactctctgattttgcagctgccctggatcctcctcttctcatagcaaaacccaacaaagtccagctcattgccatggatctgcccatggttagtggtgaccggatccattgtcttgacatcttatttgcttttacaaagcgtgttttgggtgagagtggggagatggattctcttcgttcacagatggaagaaaggttcatgtctgcaaatccttccaaagtgtcctatgaacccatcaca

SEQ ID NO: 79956 - DNA, 608 bp, Homo sapiens
  sig_peptide (139)...(274): this location contains the signal peptide sequence, MGNRAVIIARQLSSVHTLICNFFWLLLRTTGGDLDSLKCSYESIG, Run with SignalP
  misc_feature (42)...(212): similar to gi1517936 in the genepept database release 114, Run with FASTXY 3.3t00, default parameters
ttcagtttttggctctggtgcaccatgtgcctgggttaatttgggtggctcaatcccaaagcagctctgaaccccaaagcggctcctctgaattcccagtttcaagttccactctgtccctgctgggcatctcgagatatgggaaacagggctgttataattgccagacagctgagttctgtacataccttgatttgcaattttttttggctgcttctcaggacaactgggggagatttagattccttaaaatgcagttatgaatctattggcctcaactctatttctacccatgaattcatttgtacttggcaaagacgacttaatttctcatttgttatgtcatttaaacctctctttagagcctctcctcactcttacctgttaataatcggaagtcagctacatgaaacgttcaatttgggttccatctcctctgaagaaaaatgcagttaaaaaaaaaataagaggtttggccagccgcagtggctcacacctgtaatcccagcattttgggaggccgaggcagtcagatcacctgggggcgggagttcgggaaccggcctggcccaacacaggagaaaccccgtcttatactaaacaatata

SEQ ID NO: 79957 - DNA, 772 bp, Homo sapiens
  misc_feature (1)...(772): n = a,t,c or g
  sig_peptide (49)...(184): this location contains the signal peptide sequence, MLWALWPRWLADKMLPLLGAVLLQKREKRGPLWRHWRRETYPYYD, Run with SignalP
  misc_feature (184)...(587): similar to gi3811347 in the genepept database release 114, Run with FASTXY 3.3t00, default parameters
tttcgtagcgcaggcagggttccctgctggggcccgggctgcccagccatgctttgggcactctggccaaggtggctggcagacaagatgctgcccctcctgggggcagtgctgcttcagaagagagagaagaggggccctctgtggaggcactggcggcgggaaacctacccatactatgacctccaggtgaaggtgctgagggccacaaacatccggggcacagacctgctgtccaaagccgactgctatgtgcaactgtggctgcccacggcgtccccaagccctgcccagactaggatagtggccaactgcagtgaccccgagtggaatgagaccttccactaccagatccatggtgctgtgaagaacgtcctggagctcaccctctatgacaaggacatcctgggcagcgaccagctctctctgctcctgtttgacctgagaagcctcaagtgtggccaacctcacaaacacaccttcccactcaaccaccaggattcacaagagctgcaggtggaatttgttctggagaagagccaggagcctgcatctgaagtcatcaccaacggggttctgggggctcacccctggctgagaatgaagggtatgattttgggagaggggagagccccacggcaacagcacggccaatcttgggaggggggggtgggaccctcccccctctccccnngnanaaacaccggagggaagatagttgggttttgggaagaaatggcgaatgggaccggcgccccaccccgccccccct

SEQ ID NO: 79958 - DNA, 405 bp, Homo sapiens
  sig_peptide (252)...(387): this location contains the signal peptide sequence, MMNLFFILLNQIVLSLIYFLCCLQVDKLGVMSMFFPLYSHKYNLQ, Run with SignalP
  misc_feature (192)...(381): similar to gi40338 in the genepept database release 114, Run with FASTXY 3.3t00, default parameters
tttcgtgtttataatcacatgaagaatttgaggcaggatgtcctacctgacatcaggtacttcttctacatttgataaaacgaaaaatgcattggaagacagatgcagtactttggaagacagacagaaaagtacaataaagattaaaagaaagatgggcaatttggcagtcaaacaaatttagctctgagtgctggggtctcttttctaattactcagcttttagtacgttaaaattggatgttaatctcatgatgaatcttttctttatactattgaaccaaatagttctttctcttatttattttttatgttgtcttcaggtggataaattaggtgttatgtctatgtttttccctttgtattcacataagtataatttgcaaaaaagcctttgccacagtg

SEQ ID NO: 79959 - DNA, 704 bp, Homo sapiens
  misc_feature (1)...(704): n = a,t,c or g
  sig_peptide (525)...(390): this location contains the signal peptide sequence, MLLMLLFRCCSSKDLWPVLIAHLVPQGGQEGNVGEQTKGKSNRVL, Run with SignalP
  misc_feature (641)...(706): similar to gi1213639 in the genepept database release 114, Run with FASTXY 3.3t00, default parameters
tttcgtggcatgatgagcatgattaccagcctcggccactggctgctgcagggcttttcctgagccatggtgtcttctgccgtcaaagggcgaccctaactgcatcctgctggagtcgagaaaaccaggtagactggaaaggatgtgtctacagtaactgaaacacatcactgcgttttgttacagtcaatgatagggcagatctgagttccagagcacggctcacagacctttccttgcatcagtctgtgccgaagtcnnnnnnnnnncttttttctttttttgcccacattacatcacttcataatttaccacctacgtagcatgactgtatatttggaatcatttcttcacaagttttagaccatattaaaggaacactggcagaaccctgtttgatttccctttcgtctgttcccctacattgccctcctggcccccttgaggaactagatgagcgattagaactggccagaggtccttggaggaacaacagcgaaacagaagcattagtagcattgtcctccccagtctaacacttgtcggacccctgatgagcagacttccctgtggggtgttcatatccccatgccccgctcagtgggcttcatgtctgagtcatatttgcctgctttcctttgaggtggtgggcgccaaggttgtgacaaatgcccggagtcctggagctcgctgttacggttttg

SEQ ID NO: 79960 - DNA, 410 bp, Homo sapiens
  sig_peptide (69)...(204): this location contains the signal peptide sequence, MAAARALGDVTVLGSLLLQHLLHFSTPGLVLRSLGALTGPQLLSL, Run with SignalP
  misc_feature (102)...(413): similar to gi1644314 in the genepept database release 114, Run with FASTXY 3.3t00, default parameters
aattcccgggtcgacgatttcgtctgacggaggaggagggggcagtgcctgcagagcaccaggtggcaatggccgcagccagagccttgggggatgtgacagtccttgggtctctactgctccagcatctgctgcacttctccactcctggtcttgtacttcgaagtctgggtgccttgacgggaccacagcttctgtcccttgcccaaagtcccgctggctctcatgtgctcgatgccatcctgaccagcccctctgtgacgcgcaagctgcgccgccgtgtgctgcagaacctaaagggacaatatgtggctctggcctgtagtcgccatggcagccgtgtgctagatgccatctggagtggagcagccttgagggcccggaaggaaattgctgctgagcttggggag

SEQ ID NO: 79961 - DNA, 389 bp, Homo sapiens
  sig_peptide (171)...(36): this location contains the signal peptide sequence, MCSAFSSFWWVPPLAGSGVKLQTFTASVTAHKRSTDPKSEQQLDL, Run with SignalP
  misc_feature (150)...(326): similar to gi1787398 in the genepept database release 114, Run with FASTXY 3.3t00, default parameters
tttcgtgaggctttgttcttttgttctttgtgatagatctaattgctgctcactctttgggtctgtactgcgtttatgagctgtgacactcgccgtgaaggtctgcagcttcactcctgaaccagcgagaggaggaacccaccagaaggaggaaaacgcggaacacatctgaatatcagaaggaacaaactccagacacgccgcctttaagaactgtaacagtcaccgcgagggtccgtggtttcattcttgaagtaagtgagaccaagaacctgccaatttcagacacaatggagagcgccagtcctgctgcggggccatacatctatttaatttcctctcatcttccccccggttccgagaggaaggtgctttcacctgcactgttc

SEQ ID NO: 79962 - DNA, 445 bp, Homo sapiens
  sig_peptide (220)...(355): this location contains the signal peptide sequence, MLIGEIFELMQFLFVVAFTTFLVSCVDYDILFANKMVNHSLHPTE, Run with SignalP
  misc_feature (145)...(332): similar to gi3806164 in the genepept database release 114, Run with FASTXY 3.3t00, default parameters
tttcgtgcgccgcgggtcgcgccgagccgagccgagccgagcggattccgtttagcctctggaatcacccgggtcgctgttcctgagcagctgcagagcatcgagggctggagaggagcacatactgtccatggagctgcaccttggcaccatattgaaaaccttgacctcttcttctctcgagtttataatctgcaccagaagaatggcttcacatgtatgctcatcggggagatctttgagctcatgcagttcctctttgtggttgccttcactaccttcctggtcagctgcgtggactatgacatcctatttgccaacaagatggtgaaccacagtcttcaccctactgaacccgtcaaggtcactctgccagacgcctttttgcctgctcaagtctgtagtgccaggattcaagaaaatggctcccttatcaccatcctgg

SEQ ID NO: 79963 - DNA, 643 bp, Homo sapiens
  misc_feature (1)...(643): n = a,t,c or g
  sig_peptide (159)...(294): this location contains the signal peptide sequence, MPSASLLVNLLSALLILFVFGETEIRFTGQTEFVVNETSTTVIRL, Run with SignalP
  misc_feature (237)...(583): similar to gi4140708 in the genepept database release 114, Run with FASTXY 3.3t00, default parameters
tttcgtggatggagccctcctcctgatcctgtagtggtagtaagaatcaccagcgcgggcaaggagtacggacgggagtcagaggcagagcgagggtgtgtggagggccggcggggaccgccgggagcgcgcggatgtcggtgttcctggggccagggatgccctctgcatctttattagtaaatcttctttcagctttactcatcctatttgtgtttggagaaacagaaataagatttactggacaaactgaatttgttgttaatgaaacaagtacaacagttattcgtcttatcattgaaaggataggagagccagcaaatgttactgcaattgtatcgctgtatggagaggacgctggtgacttttttgacacatatgctgcagcttttatacctgccggagaaacaaacagaacagtgtacatagcagtatgtgatgatgacttaccagagcctgacgaaacttttatttttcacttaacattacagaaaccttcagcaaatgtgaagcttggatggccaaggactgttactgtgacaatattatcaaatggacaaatggcattttgggaatttattttcattttaaatattggccttccccctccaattccgccaagtggaagnttgaaagcccccct

SEQ ID NO: 79964 - DNA, 498 bp, Homo sapiens
  misc_feature (1)...(498): n = a,t,c or g
  sig_peptide (108)...(243): this location contains the signal peptide sequence, MGIYQMYLCFLLAVLLQLYVATEAILIALVGATPSYHWDLAELLP, Run with SignalP
  misc_feature (237)...(498): similar to gi5001689 in the genepept database release 114, Run with FASTXY 3.3t00, default parameters
attcccgtgtcgacgatttcgtagcgcctgagagggcggtggggtggcggngttcctgcgcgcggcccgccatggatgtggaggaggcgttccaggcggtgggggagatgggcatctaccagatgtacttgtgcttcctgctggccgtgctgctgcagctctacgtggccacggaggccatcctcattgcactggttggggccacgccatcctaccactgggacctggcagagctcctgccaaatcagagccacggtaaccagtcagctggtgaagaccaggcctttggggactggctcctgacagccaacggcagtgagatccataagcacgtgcatttcagcagcagcttcacctctatcgcctcggagtggtttttaattgccaacagatcctacaaagtcagtgcagcaagctcttttttcttcagtggtgtatttgttggagttatctcttttggtcagctttcagatcgcttcggaaggaaaaaagtctatc

SEQ ID NO: 79965 - DNA, 404 bp, Homo sapiens
  sig_peptide (80)...(215): this location contains the signal peptide sequence, MLWFSGVGALAERYCRRSPGITCCVLLLLNCSGVPMSLASSFLTG, Run with SignalP
  misc_feature (254)...(397): similar to gi2731578 in the genepept database release 114, Run with FASTXY 3.3t00, default parameters
tttcgtctgtgagctgcggcagctgagcagaggcggcggcgcgggacctgcagtcgccagggattccctccaggtgacgatgctctggttctccggcgtcggggctctggctgagcgttactgccgccgctcgcctgggattacgtgctgcgtcttgctgctactcaattgctcgggggtccccatgtctctggcttcctccttcttgacaggttctgttgcaaaatgtgaaaatgaaggtgaagtcctccagattccatttatcacagacaacccttgcataatgtgtgtctgcttgaacaaggaagtgacatgtaagagagagaagtgccccgtgctgtcccgagactgtgccctggccatcaagcagaggggagcctgttgtgaacagtgcaaaggttgca

SEQ ID NO: 79966 - DNA, 401 bp, Homo sapiens
  misc_feature (1)...(401): n = a,t,c or g
  sig_peptide (88)...(223): this location contains the signal peptide sequence, MKLLLILTAFQANLCITMPASACQRSTFPSFCTTIGILPLSVGKT, Run with SignalP
  misc_feature (57)...(248): similar to gi699096 in the genepept database release 114, Run with FASTXY 3.3t00, default parameters
ctgaagattcaagaggattgcaggttgctatgttaatgttgtttgtctttggagtcttacttcatgaagtctcactgagtggtcagaatgaagctcctcctaatactcacagcattccaggcgaacctctgtataactatgccagcatccgcttgccagaggagcacattcccttctttttgcacaacaataggcatattgccactgtctgtaggaaagactctctttgtccatataagaaacacctagagaagctaaagtactgctggggttatgagaaatcctgcaaaccagagttcaggtttggttacccagtttgcagctatgtcgacatgggatggacggacactcttgagtcagctgaggacatattttggaaacaagctgactttggatatgcn

SEQ ID NO: 79967 - DNA, 398 bp, Homo sapiens
  sig_peptide (73)...(208): this location contains the signal peptide sequence, MAFIEMIISFCFLLLGKGEHGKPYPLTEEDHDDSAYRENGFNIFV, Run with SignalP
  misc_feature (124)...(252): similar to gi3047203 in the genepept database release 114, Run with FASTXY 3.3t00, default parameters
agctccttctgcagagcacagcaataggcgatgatacacattccagtcttcctatctgttctagaagataaaatggcttttatagagatgataatctcattttgttttctcctgctagggaaaggtgaacatgggaaaccttacccccttactgaagaggaccatgatgactcagcttacagggaaaatggttttaatattttcgtcagcaacaatattgctctagagaggtctctgccagatattcgtcatgctaagtgagtatcagcatatcagtgatcagggtgggtttttttgtttttttttgtccattgatttttttttttgcgtgtgctacctgtggtgctgtaggggggtttttcaccctactctgtgggatagagagtcttttctcttaa

SEQ ID NO: 79968 - DNA, 832 bp, Homo sapiens
  sig_peptide (333)...(468): this location contains the signal peptide sequence, MAIWSRPLLFILYVFVGELGMQTYRDPWVARCPWESWKPLLTLKD, Run with SignalP
  misc_feature (463)...(405): similar to gi3702452 in the genepept database release 114, Run with FASTXY 3.3t00, default parameters
aaagtgcggtggaatttctttctccaccagggctgctcctcctttacaggatcattctccttgatctcaacatcactgctggagctaagtctcagttctaagccccttttctcctcactctgactccttgagtcaccaccagctggaacctcttctctgagtgaatccaagtacctctcatgcatctccacttggatgtctcaaaagcaaaacaaagcctcaacctctaatcctacactcataatgcatgtattaatcaattccctaactattagttgaatgtctactatggctaccccagacttccctaaagtcatgacggatttgtgtatatggccatatggagtagaccactgttatttatactttatgtctttgttggggaattaggcatgcaaacctaccgggatccctgggtagcccggtgtccctgggagtcctggaaacccctgctcaccctaaaagacatacaaagtttcttattattcttagttgttctagaagagcctattcagatatttttcctgtttctcgcttccaaccttgcaatggtaaatctagacaaagtaacccgaattccttatggctactgggtcatgaggctgaagaccaaaaaaccattatcttaattaaaaacaggattagaatactgtttctcaaattgtgcataaatggcaaagtctaattgcgccaagaactttttaaatgctggttccttcaaacttgagtaattagttcattcatggccacccttctggagaaaaggaagagtcagttcgaaaacaaaaggaggtgagtggacagggaaaactcagtcctttccttccccaag

SEQ ID NO: 79969 - DNA, 512 bp, Homo sapiens
  sig_peptide (363)...(498): this location contains the signal peptide sequence, MGGSGVYGCFYLFGFLSAGYLCCVLWGWFSACGLDIVLWSFLLAV, Run with SignalP
  misc_feature (285)...(515): similar to gi5802786 in the genepept database release 114, Run with FASTXY 3.3t00, default parameters
aattcggagagggggagagagagagagagagagaaagaggtttttaaattctccatgaagtgtactatgttccatcattccttcccaaagccaccggaagcattccttctaggaaaggtggagtcggtagtgagaagccggaggtgagaagacccctgagcggatggattcattcattttctgaatttcctatgtgaggacagtattagagcccagtgaggctttgagaggccccaaagatgagcgccaacagcagcagagtgggccagcttctcttgcagggttcagcgtgcattaggtggaagcaggatgtggaaggggctatctaccacctagccaactgcctcttactcctgggcttcatggggggcagtggggtgtatggatgcttctatctttttggcttcctgagtgcaggttacctgtgctgcgtgctgtggggctggttcagtgcctgtggcctggacattgttctttggagcttcctgctggctgtggtctgcctgctccag

SEQ ID NO: 79970 - DNA, 435 bp, Homo sapiens
  sig_peptide (172)...(307): this location contains the signal peptide sequence, MLFYLVSVCLCVAVIVAFQLTAFTFRKNLAATALLLSLFGYATLP, Run with SignalP
  misc_feature (22)...(427): similar to gi1943947 in the genepept database release 114, Run with FASTXY 3.3t00, default parameters
gaattcatccgtcagtgtggagtggccctctgcatcgtgctgggattctccatcctgtctgcatccatcggcagctctgtggtgagggacagggtgattggagccaaaaggttgcagcacataagtggccttggctacaggatgtactggttcacaaacttcctatatgacatgctcttttacttggtttccgtctgcctgtgtgttgccgttattgtcgccttccagttaacagcttttactttccgcaagaacttggcagccacggccctcctgctgtcacttttcggatatgcaactcttccatggatgtacctgatgtccagaatcttttccagttcggacgtggctttcatttcctatgtctcactaaacttcatctttggcctttgtaccatgctcataaccattatgccccggttgctagccatcatc

SEQ ID NO: 79971 - DNA, 847 bp, Homo sapiens
  sig_peptide (56)...(191): this location contains the signal peptide sequence, MCKFLCYFFYKNFAFTMVHFWFGFFCGFSAQVINVPSPLLCKSVN, Run with SignalP
  misc_feature (8)...(150): similar to gi3628757 in the genepept database release 114, Run with FASTXY 3.3t00, default parameters
gaattcgttcctgcagcgcctcctgctggtgcatgggcgctggtcctacctgcgaatgtgcaagtttctttgctatttcttctacaaaaactttgctttcaccatggtccacttctggtttggcttcttctgtggcttctcagcccaggtaataaatgttcccagtccactgttgtgcaaatctgtaaacctgagggcagaggttctgtcttgtttatcactcagtcccccagggcctagctattttctggtacatactcttaaaaaatgcttattaaaggaggagagaaggagcctcagaaaatttcttagggttctctgtatgcgacatcagctgtcttcctgagcctgacgtgtaacaaagaaaggctgtatgctcccttgctccctgttctctttcagaccgtctataaccagtcttttctcatcctgtataacactctcgaccaccttctttcctgccccttctaagcagcgtctttgggcccaggtgccgtctcgtcccttcacggtcggtaaatcccaaacagccataccaccatttccgttacgatcatttttgttccccagcgcccgtactcccttctcccggcctcccctccatcctcttgacaagcagactaccgtagcatttacaaacttccttacacacaccttcacccttcatccctttcccgtcaccgcccgctatgtcgctcctctactcgactccttctctgcgctagacacctacatttagaattaatccatttcacccccggctcctgctcgtcgtatccggtcgtcacactgttcagtcagtaatcgccggccggctcctgccctcagccgacaactccatcaaacg

SEQ ID NO: 79972 - DNA, 703 bp, Homo sapiens
  sig_peptide (27)...(162): this location contains the signal peptide sequence, MCWARCWTRWNTCTIWTSSTDPFRKCWMAPEALNFSFSHKSDIWS, Run with SignalP
  misc_feature (102)...(370): similar to gi3851169 in the genepept database release 114, Run with FASTXY 3.3t00, default parameters
cctacttctcccccagtggatgcagaatgtgctgggccaggtgctggacgcgctggaatacctgcaccatttggacatcatccacagacccctttcgtaagtgctggatggcccctgaagccctcaacttctccttcagccataaatcagacatctggtccctgggctgcatcattctggacatgaccagctgctccttcatggatggcacagaagccatgcatctgcggaagtccctccgccagagcccaggcagcctgaaggccgtcctgaagacaatggaggagaagcagatcccggatgtggaaaccttcaggaatcttctgcccttgatgctccagatcgacccctcggatcgaataacgataaagtgagctcagggtcggggtttattttaacctgtggatttatctttcaacatctctccaccctaatacaagcacagctagttggctttgtaacgcctcaaagaactccatcacagatgccctgattatccctgcacagctgggctttgcccagttctggctctcccaaaccgtgctgcggcgagtaatcccgaatgtacggtggagtgagcagactgacccccaggaggcacaggaggcgtagcccccaggacccacgacacttttagggttccagaaaaaagttttcattcaacataaaaaaaaaaaaattcctaaagacaaaaaaaaaaaaa

SEQ ID NO: 79973 - DNA, 429 bp, Homo sapiens
  sig_peptide (84)...(219): this location contains the signal peptide sequence, MSERVERNWSTGGWLLALCLAWLWTHLTLAALQPPTATVLVQQGT, Run with SignalP
  misc_feature (150)...(351): similar to gi4406696 in the genepept database release 114, Run with FASTXY 3.3t00, default parameters
tattatgacagtgcggtggaattcgtggagtgagtctgaggacagcagatgaacagacagaaactgaaagatcccctaatttgatgagtgagagggtcgagcggaactggagcacgggcggctggctgctggcactgtgcctggcctggctgtggacccacctgaccttggctgccctgcagcctcccactgccacagtgcttgtgcagcagggcacctgcgaggtgattgcggctcaccgctgctgcaaccggaaccgcatcgaggagcgctcccagacggtgaaatgctcctgtttttctggccaggtggccggcaccacgcgggcaaagccctcctgcgtggacgacctgctcttggctgcccactgtgctcgtagagaccctagagctgcactccgcctcctgcttccacagcctccatcgtcct

SEQ ID NO: 79974 - DNA, 446 bp, Homo sapiens
  sig_peptide (174)...(39): this location contains the signal peptide sequence, MAIQLVPCWVAWALYPAGSIVVTYTSLLQQENSRRKLWEPFQPQQ, Run with SignalP
  misc_feature (170)...(358): similar to gi2746863 in the genepept database release 114, Run with FASTXY 3.3t00, default parameters
aggaatggtccctagctcaagaagcacagactgtgtctgttggggttgaaatggctcccacagcttccttctagaattctcctgttgtaacaggctggtatacgtcaccacaatgctgcctgcagggtataaagcccaggccacccagcaaggtaccagctgaattgccatctctgctagtgtggccagtggacttcaccagaccttatccagtccaacctttatccagcctgaggcaggcattgcctggaatgtcatttcaagctgtcctgaaagcatcatcttctggagagagagctccaactcactgacgctctgggtgagagctccctctcctagctaccatagctcctgccttcccctgtagcttttatcataaagtatcacagttgctgctgattggtccatctcctctgctagaatatttggaattccaccagactgga

SEQ ID NO: 79975 - DNA, 436 bp, Homo sapiens
  misc_feature (1)...(436): n = a,t,c or g
  sig_peptide (138)...(273): this location contains the signal peptide sequence, MSSQARFLGQAGLCLWVRSLSGASGQQRALRSQGVSSGSPRWVPI, Run with SignalP
  misc_feature (149)...(309): similar to gi1653203 in the genepept database release 114, Run with FASTXY 3.3t00, default parameters
gacctccggnataccgccacgnncccccagggcttaggagatgcggaaaatgccccaacattgcccgttctgcctttgagcagctaaagaatagcgggcggagaattatgaactggattttaaggcaaggggactgaatgtccagccaggcccgcttcctggggcaggcaggcctctgcttatgggtgagaagcctgtcgggtgcttccggccagcagagggcattgagaagccagggagtcagttctgggagccccagatgggttcctatcaagtcaagttcctgtggactgaaaaagatccgtccacatgatgaggacatttttctctctcatagtcattctgcaaggcatgagtaccctgtttctggcacccagccacagtgctttcttctctcaggacttgactataatgggtatgatgattaccaagaaag

SEQ ID NO: 79976 - DNA, 527 bp, Homo sapiens
  misc_feature (1)...(527): n = a,t,c or g
  sig_peptide (338)...(473): this location contains the signal peptide sequence, MNFASVFAVLFNGCTGIMAGANMSGELKDPSRAIPLGTIVAVAYT, Run with SignalP
  misc_feature (287)...(526): similar to gi2746853 in the genepept database release 114, Run with FASTXY 3.3t00, default parameters
tgagctacaatggtgccactgcactccagcctggatgacagagccagaccctgtctctaaaaaataaataaataaataaaagagcgtggattagggtctggagggaggaatatcggagcactggggggacgtggcaatgtgtctggctgacccagggccagtgcaggaacaggctggggtcttagtgagggcagtgcaggggaggcaagaggaccgtgggaatgtgtggagagggtggctaagaggcctggatccctgagacggatgctgatgcactctcctccctgggaggatcctcctagctggctatgctgaggactacaccacgggagccgngatgaattttgccagcgtctttgctgtcctctttaacggctgtacaggcatcatggctggggccaacatgtcaggggagctgaaggaccccagccgggcgatccctctgggcacgatcgtcgccgtcgcctacaccttcttcggctatgtcctgcttttctttctcttcagcttcacttgtgacaggggtc

SEQ ID NO: 79977 - DNA, 404 bp, Homo sapiens
  sig_peptide (139)...(274): this location contains the signal peptide sequence, MMFICSHLIFLRSVCTYSLPVSPSSIPSQSFLVTTEHCMRWKVHH, Run with SignalP
  misc_feature (154)...(315): similar to gi632993 in the genepept database release 114, Run with FASTXY 3.3t00, default parameters
aaaagatcagcaatactggttatggctaagtgagactgctgggctcacagtggcctttattcacttttattatttcttctgttttctccatgatcaacggtgtgactgttgggtggttgaattgaaacttaggagtgtatgatgttcatatgttcccacttgatctttctcaggagtgtttgtacatacagcctccctgtctccccttcctccatcccttcccagtcatttctagtaaccactgaacactgtatgaggtggaaagtccatcacgtagtagagaaaaagattcaggcatctcacctaaagttgtctatgaagttttcaaaagcaaatataatgatctccttgtgccagtggacttctttggtttatttggggggtaaaatgccttatgaaaagag

SEQ ID NO: 79978 - DNA, 1140 bp, Homo sapiens
  sig_peptide (68)...(203): this location contains the signal peptide sequence, MILSLLFSLGGPLGWGLLGAWAQASSTSLSDLQSSRTPGVWKAEA, Run with SignalP
  misc_feature (92)...(1061): similar to gi927596 in the genepept database release 114, Run with FASTXY 3.3t00, default parameters
cgtcactagcagtttctggagctacttgccaaggctgagtgtgagctgagcctgccccaccaccaagatgatcctgagcttgctgttcagccttgggggccccctgggctgggggctgctgggggcatgggcccaggcttccagtactagcctctctgatctgcagagctccaggacacctggggtctggaaggcagaggctgaggacaccggcaaggaccccgttggacgtaactggtgcccctacccaatgtccaagctggtcaccttactagctctttgcaaaacagagaaattcctcatccactcgcagcagccgtgtccgcagggagctccagactgccagaaagtcaaagtcatgtaccgcatggcccacaagccagtgtaccaggtcaagcagaaggtgctgacctctttggcctggaggtgctgccctggctacacgggccccaactgcgagcaccacgattccatggcaatccctgagcctgcagatcctggtgacagccaccaggaacctcaggatggaccagtcagcttcaaacctggccaccttgctgcagtgatcaatgaggttgaggtgcaacaggaacagcaggaacatctgctgggagatctccagaatgatgtgcaccgggtggcagacagcctgccaggcctgtggaaagccctgcctggtaacctcacagctgcagtgatggaagcaaatcaaacagggcacgagttccctgatagatccttggagcaggtgctgctaccccacgtggacaccttcctacaagtgcatttcagccccatctggaggagctttaaccaaagcctgcacagccttacccaggccataagaaacctgtctcttgacgtggaggccaaccgccaggccatctccagagtccaggacagtgccgtggccagggctgacttccaggagcttggtgccaaatttgaggccaaggtccaggagaacactcagagagtgggtcagctgcgacaggacgtggaggaccgcctgcacgcccagcactttaccctgcaccgctcgatctcagagctccaagccgatgtggacaccaaattgaagaggctgcacaaggctcaggaggccccagggaccaatggcagtctggtgttggaacgcct

SEQ ID NO: 79979 - DNA, 433 bp, Homo sapiens
  sig_peptide (392)...(257): this location contains the signal peptide sequence, MPARLVLASLQVALHLDDLSGLRVKGLWRRGLGLLDLLRGWGQHT, Run with SignalP
  misc_feature (1)...(377): similar to gi5052670 in the genepept database release 114, Run with FASTXY 3.3t00, default parameters
cactcgctgaagctcctggcagcccactgcttcatccagcaccagtacctcatgcctgagaatgtggtggaggagaagaccaaggccatggacctgcacgcggtcttggcggagcttccccggccccgcaggcccccgctgcagtggcggtactcggaagtctccttcatggagctggacaaattcctggaggatgtcaggaatggaatctacccactgatgaactttgcagccactcgacccctggggctgccccgtgtgctggccccacccccggaggaggtccaaaaggccaagaccccgacgccagagccctttgactctgagaccagaaaggtcatccagatgcagtgcaacctggagagaagcgaggacaaggcgcgctggcatgtgagcggggcctgggagggcggcggacgcgtgggtcgacccg

SEQ ID NO: 79980 - DNA, 378 bp, Homo sapiens
  sig_peptide (94)...(229): this location contains the signal peptide sequence, MTKLYALFFFRQYLQTLHLQSWDLLDIFGGIRSFPLDIMTYLKNQ, Run with SignalP
  misc_feature (118)...(307): similar to gi4884455 in the genepept database release 114, Run with FASTXY 3.3t00, default parameters
gttgcgctgtttgctagtatgtaattgtaccataaatgtgaggctgacataagatgattttcagttatcaaggagcattatattcagcgtactatgactaaattgtatgccttattttttttccgacagtatttgcaaacgctacatttgcagtcatgggacctacttgacatttttgggggaatcagatccttcccgttggatataatgacttatttgaaaaaccaggcctttattagtaaaatggaggaaagcctgaatatagtcgaatacactgtttttatctataacgatcagctgatttggtaggtacaccccgaggcatggtattagacgaagaaattatgattctcgatactgcagtgactggattgatga

SEQ ID NO: 79981 - DNA, 1139 bp, Homo sapiens
  sig_peptide (1026)...(891): this location contains the signal peptide sequence, MLCSRLGTTASWRRLGIRAWAPLLLLFPWDWHFILSFSSRPWAGT, Run with SignalP
  misc_feature (1)...(171): similar to gi3043718 in the genepept database release 114, Run with FASTXY 3.3t00, default parameters
tgccactgtgaaggagatgatgagagccccctgatcaccccctgccactgcacaggaagcctccacttcgtgcaccaggcctgcctgcagcagtggatcaagagctccgacacgcgctgctgcgagctctgcaagtatgagttcatcatggagaccaagctgaagccactgagaaaatgggagaagttgcagatgacgtccagcgagcgcaggaagatcatgtgctcagtgacattccacgtcattgccatcacatgtgtggtctggtccttgtatgtgctcattgaccgtactgctgaggagatcaagcaggggcaggcaacaggaatcctagaatggcccttttggactaaattggtggttgtggccatcggcttcaccggaggacttctttttatgtatgttcagtgtaaagtgtatgtgcaattgtggaagagactcaaggcctataatagagtgatctatgttcaaaactgtccagaaacaagcaaaaagaatatttttgaaaaatctccactaacagagcccaactttgaaaataaacatggatatggaatctgtcattccgacacaaactcttcttgttgcacagagcctgaagacactggagcagaaatcattcacgtctgattgtgtgcgggttgtcattttcctggacatccatgaagagctgaaggaaattgtttactgccaattgtatacctttcttatgtcctttaatagcatagactggacaggtgactatttatagtggcttctctttttctaaaccctccttagtctcctagaaaaccttcctgtgggccaggcatgcctgggtcctgcctctgcctggcagctctgtgggaaagtggaagaccccatgatgacatcatggggagccagcagagttcctgcccatggtcttgagctgaatgagagaataaaatgccaatcccaagggaagaggaggagcaggggtgcccaggccctgatacccagccgcctccagcttgcagtggtccccagcctggagcagagcattggggagtgtctaagccatgacgagaagattccctctgcatcacggcgaacccccaggagatggtatttgaaaacagacccccaaacacagactcctgcctgccctcttgccgatg

SEQ ID NO: 79982 - DNA, 698 bp, Homo sapiens
  sig_peptide (215)...(350): this location contains the signal peptide sequence, MSVIPALWEATVGGLALVWMIKLLDNIDTYVSFFAGSQKTVREIR, Run with SignalP
  misc_feature (275)...(162): similar to gi4263796 in the genepept database release 114, Run with FASTXY 3.3t00, default parameters
gagagtgaagaagccagttttatatagttgcagtaggctaaccagaatttaattcatgagatccttttaattgaaggttaatgctgttgatagacttttctgataggctcaccaatatttccttttgtgtgtagccagcaaaataataaattagtacaaatcgaagtctgactctttagaaaatgtgtggactccaggcctggtgcggtggctcatgtctgtaatcccagcactttgggaggccacggtgggtggattagctttggtgtggatgataaaactccttgacaacatagatacctatgtgagcttctttgctggatcacaaaaaactgtaagagaaattaggcggggagtaatcatcactgcagcacttgcgagaaatatgagaaactagtccacctactaccttaaatctgctgggctttttggaggttctttggaaagcccgcttcagacttgagttgaaacgccatccattgaggcttttacttggctaacaccttaaattaggccgtgataatactaacccgtgcgatcataatgacgcgcagtattaattttgggctctctatcccctgtgcggataaaaacgtgtacttgggggaataatacttgttcccccatttggaccgctgagaaacgaaggcccgggaagagctaggatgcggattctgagccagagagggttacaagtc

SEQ ID NO: 79983 - DNA, 351 bp, Homo sapiens
  sig_peptide (343)...(208): this location contains the signal peptide sequence, MLIGKSQREGEVALPQLFDVSGLLFIWCGFVLVSVLSNCLVLACD, Run with SignalP
  misc_feature (149)...(353): similar to gi3881426 in the genepept database release 114, Run with FASTXY 3.3t00, default parameters
gacctgttcctcgacactggccctcatcgtagagcctgcacgctccgtgccgaaactcctgctctgcccccatgagaaggaatgtccaccaccggatgaccttgcagttcagttcatcaacacattgagggacatgggaatgtcccaaaggtggatggtggtagtcaccggctacaaaggtggagtctctacagaacatttattgaaatcacatgcaagtaccaagcaattgctcagcacagataccaaaacaaagccacaccaaatgaacaacaaccctgacacgtcaaacaactgtggcagtgcgacctctccctctctctggctctttcctatcagcatttatttttt

SEQ ID NO: 79984 - DNA, 369 bp, Homo sapiens
  sig_peptide (145)...(280): this location contains the signal peptide sequence, MPSLLIVLFFRLFPDGVKLWLRQWYRRQPGPLFPGALCLPEAFAG, Run with SignalP
  misc_feature (87)...(3): similar to gi3341920 in the genepept database release 114, Run with FASTXY 3.3t00, default parameters
ggaaattacccttaaaaagtcccaccagctgggttgagtcagaatcatgtctttttctgttgaaatctattccttctggtggagagtatgattctaaaattaacgttaagctaatttaaagcaactgaatagcttggaatgaacatgccaagccttctcattgttttatttttcagattgttcccagatggggtaaagttatggcttaggcagtggtacaggagacaaccagggcccctttttccaggagccctttgtctgcccgaggcatttgctgggtatagtggcctagtttagcaggatttaagtgtgcattcaccttcattcttatgtgtgggttgcattatttaaggagtagggagaattttt

SEQ ID NO: 79985 - DNA, 711 bp, Homo sapiens
  sig_peptide (496)...(361): this location contains the signal peptide sequence, MPPRCTSLYVCTQVCLWCFPGPPPRPLPSFASNPFKGFSEPNLTE, Run with SignalP
  misc_feature (174)...(72): similar to gi562110 in the genepept database release 114, Run with FASTXY 3.3t00, default parameters
ctcgtgtggacttttgaagttgtgtgcagctttgatgttttattaattattttcaagggggctttctttccagagcgaagcatacatattgattttgtgtatgatgaagactgaaatttctatcttggcactgatactccttgcaatcagatctagtaagggtttgatcgttttaagcaactctccaacagttaactgttggctgccaaagttcaatttagataagtgaaggggaagagtttagaaatttcacacattaaatgtgtgatgggaaaaacccaatataatgtattaaagatgcagcctttggaaggaaaacatggagtatcgtaagaattgtgcgccagtctccaaaggttttcagtcaggtttggttcagaaaagcccttgaatgggttggaagcaaaacttggaaggggccgtggggggggtccgggaaagcaccagagacagacctgggtacacacatacagtgaagtgcaccgtgggggcatgacaaaaatagggctgtgtagatttccactgtcgaatttcatgagagagacacattagtggaggcccatatattatatagggggccctatagtgtggtgaaactggcggaagagggatttatataaagtgttttttcatatcattggcccaacccccccggggaaaaagatttaaaaaatttggcccttccctcttatgtttaatgggacccccgcc

SEQ ID NO: 79986 - DNA, 700 bp, Homo sapiens
  sig_peptide (92)...(227): this location contains the signal peptide sequence, MNEQVPKGQLHFPLLCLFTWVTLWHCIDPSPSPNQSMPFLVLRPS, Run with SignalP
  misc_feature (167)...(300): similar to gi2773234 in the genepept database release 114, Run with FASTXY 3.3t00, default parameters
ggatagaattcagtgaatttattataccaacctcttagcacagagcctggcacagagccacacaccatccacatttgctgagaatggatgaatgaatgaacaggtccctaaaggacagctccatttcccacttttgtgcttgttcacctgggttaccttgtggcactgcattgatccttctccttcccccaaccagtccatgccgtttctagttctcaggccatcacctctgccgggagccccttccccctccctttcatctgggtgccgtctcctctcctggtcatcttttaggatccagcttagatgtccctccctctacctgcatttctggcttccctttgtgccttccttgaacctaaagagttgtcattgtctgtgcctgcaagccctgccagacaacgcagagtgttcccaggttaactcagcatcagatgggtagtctcaggccccaactcagctgagtcccagctttcaggtccagggagtaaggagttggggctctgggcaatgcatttgattaggaagaaaaaaagtaaggctgggtgtggggggtcacgcctgtaatcctaacactttgaaaagctgagaagggtggatcacttgaggccaggagtttgaaaccattctgggccacatggcgaaacccctctctactaaaaaaaaaaaataacgggcgcaggggcccaccggattccca

SEQ ID NO: 79987 - DNA, 219 bp, Homo sapiens
  sig_peptide (67)...(202): this location contains the signal peptide sequence, MALKSFLSTFLSKILVKILILKYERRSLYCTPGNLWLEMYSISSE, Run with SignalP
  misc_feature (46)...(163): similar to gi2331265 in the genepept database release 114, Run with FASTXY 3.3t00, default parameters
tttgaaataaatttatgttctattttatctcacacattggattgttttctgagcattttttcatgcatggccttgaaaagcttcctttctacatttttatctaaaatacttgtaaaaatactgatcctgaaatatgaaaggagatccctgtattgcacacctggaaatctctggctggaaatgtactccattagcagtgaaattattcagcggttattt

SEQ ID NO: 79988 - DNA, 428 bp, Homo sapiens
  sig_peptide (63)...(198): this location contains the signal peptide sequence, MRSSPWSTFSKGFCLQWLFNALAQQLLQAHFKNVRSCMKTLRYDS, Run with SignalP
  misc_feature (251)...(361): similar to gi4959054 in the genepept database release 114, Run with FASTXY 3.3t00, default parameters
tccgggtcgacccacgcgtccgcggaaccagaagcttacgtggggtggaggtgacagcatgcatgaggagttcaccctggagcacattttccaaagggttttgtctccaatggctgtttaatgcattggcacaacagttattacaagcacattttaaaaatgttagaagctgtatgaagaccttgagatatgattcaagggcagagagtgatgccttttttactatgactgcttcccatacactgaaagcaggctgtgtccacacccacaccttgctgcatctgagaacaagttggcccctgcccaggctggacaacctgtcagggttgcaagctgccagtgttcacagaaaatggagtgaacatccttggaatttgcagataccttcacatggaaggctttttaaagtggtacctcctttgaaactg

SEQ ID NO: 79989 - DNA, 862 bp, Homo sapiens
  sig_peptide (127)...(262): this location contains the signal peptide sequence, MQWWLELVYRHMQWWLELVYRHMQWWLELAHVVSLLCTSLPSLEF, Run with SignalP
  misc_feature (221)...(16): similar to gi3297821 in the genepept database release 114, Run with FASTXY 3.3t00, default parameters
aaaatcttgcaagtattttagagacatatgcagtggtggctggagctggtttacagacatatgcagtggtggctggagctggtttacagacatatgcagtggtggctggagctggtttacagacatatgcagtggtggctggagctggtttacagacatatgcagtggtggctggagctggtttacagacatatgcagtggtggctggagctggctcatgttgtgagcctattgtgtacatctcttcccagccttgagttcagtgacttcaccttggtagcttgaaattggccatggcaggagaatttacaccacaagaaatggcaaatgccacagatcatggcgcctccctgcttccccatccccacgcccagctggtcattaaacatttaccagcacactgctgactctttccttaaaagttaaccattgtgggccaggcacagtggctcatacccataatcccagcactttaagaggctgaggctggaggatggcttgatccaacagttcaagaccagcctgggcaacataacgagaccccatctttacaaaaacttttaagattagtcaggcatggtggcatgcacctgtagtcctagctactcaggaggctgagaaaggagttcgaggttgcagtgagatatgattgtaccactacgctctagcctgggttacagagtaaaacccccatctctgtggtttatttttttatttcattgtatggattttaatttcctttttgagaacagaggcttgctttgtcacccaggctggagtatatcggcgtggacttgggttactgcaccccccctttgggttcaagcaatttaagtgcttaatagctgggtttcagggatgc

SEQ ID NO: 79990 - DNA, 401 bp, Homo sapiens
  sig_peptide (177)...(42): this location contains the signal peptide sequence, MLEQASLWLGRSFLLAGFLVSSSCPSLEQAAKGEGCSPIPCFAHC, Run with SignalP
  misc_feature (16)...(357): similar to gi3511287 in the genepept database release 114, Run with FASTXY 3.3t00, default parameters
gagggtgacacagaaagtttctcaccagggagtcgaggcagtgggcgaaacaagggatgggggaacagccctcacccttggccgcctgctccaggctggggcagctgctcgataccaggaagcctgccagcaggaagctacggcccagccacaggctggcctgctccagcatctgcagctgccagtcctccgcggctccctccaggggcaggcctcgcatccagagcaaggttcccagcatcagcccttggaactccaaccaagctctatccaaatgcaaacgagggcagctgggggaaatcactcaggagcctacatgctttgtctgaggcactacccctagaatctccagctttcaaaagtggcatggacagggaagttgttttcctttttaagaagga

SEQ ID NO: 79991 - DNA, 372 bp, Homo sapiens
  sig_peptide (235)...(370): this location contains the signal peptide sequence, MVDVASLCIQFYIWIRCLWMISLGGSSIQRMLPRIEAAWALWVAG, Run with SignalP
  misc_feature (373)...(322): similar to gi451314 in the genepept database release 114, Run with FASTXY 3.3t00, default parameters
gccacgtggctggtcctcctcctcctgctgtggctgagccttggggtgaagacaggtgaggagctaggctggcatctgtgctacaggtcaaagagaccccagtctctgctctctcattcattcaatcaattaatctgttttgtctctggcatgacccacctcctgtgacccagcattcattaattcattaatcaaataattcatgtattcagacacttattaagtaccgactatatggttgatgtggcttctttgtgtatccagttttatatctggataagatgtctttggatgatcagcttgggagggtctagtatccagaggatgctccctcggatagaggcagcgtgggcactgtgggtggctggggtg

SEQ ID NO: 79992 - DNA, 496 bp, Homo sapiens
  sig_peptide (319)...(454): this location contains the signal peptide sequence, MVASFRESRVLLLGLVVRVLTFDFLTQVVRVGSECGDELVRLYSF, Run with SignalP
  misc_feature (343)...(476): similar to gi1825671 in the genepept database release 114, Run with FASTXY 3.3t00, default parameters
aatacagccctggtctaaatgaaatcgaagagttcttattaattattcataatgccatgaatatgttaccttattttttataattgccagtctgtataattaacctttcatttggttaaagtacttaacattaagtagagctataattacaactgtttttaaaagtatatggaagaatgtttaaatgtttaattagaaccactttttttagcttcataaagaattttttttacttgtcaacaaggatctttaattatttaaaccaaaagagcagaacagaccagaaaagaaaaacaactagtcaagctgggaactgcaatggtggcgtcgttccgtgagtctcgggttttgcttcttgggcttgtggtcagagtccttacctttgatttcctaacacaggttgttagagttggaagtgagtgtggagatgagttagtccgactttattctttcacggatgagaaagcgaattatcttcagcaaggtgggtgcaggg

SEQ ID NO: 79993 - DNA, 689 bp, Homo sapiens
  sig_peptide (140)...(275): this location contains the signal peptide sequence, MHMLNGALLALLFPVVNTRLLPFELEIYYIQHVMLYVVPIYLLWK, Run with SignalP
  misc_feature (7)...(180): similar to gi1151260 in the genepept database release 114, Run with FASTXY 3.3t00, default parameters
tttcgtggggaaccgagcgcccggcgcggagagcgcgggagcggagcagtagcccgatccggggccgcgggccgagctgccgatctttctcctggcctgccctccatgtcggggagctatcgtcgtcttcaagctacagatgcacatgttgaatggagctcttctggcattgctgtttcctgtggtaaacactcggctgctcccctttgaattggagatttactacattcagcatgttatgctctacgtggtacccatctacctgctttggaaaggaggtgcttacactccagagcccctcagcagtttccggtgggctcttctctcaactggcctcatgttcttttatcacttcagcgtcttgcagatcctcggcctggtcaccgaagtgaatttgaacaacatgctgtgtccggccatctcagacccattctacggcccctggtatcgcatctgggcctcgggacaccagactctcatgaccatgacccacgggaagctggtcatcctgttctcatacatggctgggcccttgtgtaaatatctgctggatttgctccggcttccagccaagaaaatagactgaaggtgcttattttttttttttttcctccctgaggaagcaagtcgtgacttgacttggagaacacccagttcttgataaaatcatgggagagggcaaaaaaaaa

SEQ ID NO: 79994 - DNA, 824 bp, Homo sapiens
  sig_peptide (330)...(465): this location contains the signal peptide sequence, MVRETVFKYAWFFFELLVKSMAQHVHNMDKRDSFRRTRFSDRFMD, Run with SignalP
  misc_feature (258)...(746): similar to gi5689453 in the genepept database release 114, Run with FASTXY 3.3t00, default parameters
atgtgcccaagtcaggcgctcccactgccctcctagaccctcggagctaccacacgtatggccgcacatcagctgctgctgtgagttcaaagctgctgcaggcccgggtgatgagcagcagtaacccagacctcgcggggacacactccgcagcagacgaggaagtgaagaacatcatgtcttcaaagatcgccgatcgcaactgcagccgaatgtcttactattgctctggcagtagtgatgctccaagttcacctgcagccccaaggccagccagcaaaaagcatttccatgaggagcttgcccttcagatggtggtcagcaccggaatggtgagagaaacagtcttcaagtatgcctggttcttctttgagcttctggtgaaaagcatggcccagcacgtacataacatggacaaacgggacagttttcggaggactcgtttttctgaccgtttcatggatgacataactactattgttaatgtggtcacctcggaaattgcagcccttttagtaaaaccacagaaggaaaatgaacaggcggaaaagatgaacatcagcctggctttcttcttgtatgaccttctctccctcatggatcggggctttgtgtttaacctcatcagacattattgcagccagctgtcagccaagctcagtaaccttccaacgctcatttccatgaggctagagttcctgagaatcctctgtagccatgagcattacctcaatctgaaccttttttttatgaatgctgatactgctccaacatctccttgtccttccatatcttcccaggtaataaaagaattatttaactaa

SEQ ID NO: 79995 - DNA, 546 bp, Homo sapiens
  sig_peptide (310)...(445): this location contains the signal peptide sequence, MSVVMLSYLLSAFFSQANTAALCTSLVYMISFLPYIVLLVLHNQL, Run with SignalP
  misc_feature (133)...(547): similar to gi5734134 in the genepept database release 114, Run with FASTXY 3.3t00, default parameters
atgctgggtatccgtgatgtgagagggtttagcacgggaacactgcagacgcctgcctgggagctcaggtgctgcggtcctcccttctgcctgaaggaggcatatggccaggggctccgcctgacactcacgaggcagtatatgcggatgatgggagtgcatccagtgatccatttcctggcctggttcctggagaacatggctgtgttgaccataagcagtgctactctggccatcgttctgaaaacaagtggcatctttgcacacagcaatacctttattgttttcctctttctcttggattttgggatgtcagtcgtcatgctgagctacctcttgagtgcatttttcagccaagctaatacagcggccctttgtaccagcctggtgtacatgatcagctttctgccctacatagttctattggttctacataaccaattaagttttgttaatcagacatttctgtgccttctttcgacaaccgcctttggacaaggggtattttttattacattcctggaaggacaagagacagggattcac

SEQ ID NO: 79996 - DNA, 328 bp, Homo sapiens
  sig_peptide (60)...(195): this location contains the signal peptide sequence, MFRGLAGAITLPMVGATSLAVATGALAYAWYQGNSTLSDFNKTLV, Run with SignalP
  misc_feature (9)...(331): similar to gi215120 in the genepept database release 114, Run with FASTXY 3.3t00, default parameters
tctcgagactcctcgaacaggcggggcaggtgaaggactccttcggcgggatgatccccatgttcagggggcttgccggtgcgatcaccctgccgatggtgggggccacctcgctggcggtggcgaccggtgcgctggcgtatgcctggtatcagggcaactcaaccctgtccgatttcaacaaaacgctggtcctttccggcaatcaggcgggactgacggcagatcgtatgctggtcctgtccagagccgggcaggcggcagggctgacgtttaaccagaccagcgagtcactcagcgcactggttaaggcggcggtaagcggtga

SEQ ID NO: 79997 - DNA, 918 bp, Homo sapiens
  sig_peptide (166)...(301): this location contains the signal peptide sequence, MNVIYFPLHLFVVYSRAYTSLVLVGCTNLCAVLFARCLDDHLVSL, Run with SignalP
  misc_feature (379)...(469): similar to gi3805840 in the genepept database release 114, Run with FASTXY 3.3t00, default parameters
ctgcggaattcggcacgagcgggaaagtggtctagctgcttcaggataggtggatgagagtttgctctgattgaacggaatgttccaccgtgtttcatctttattcattatcctttgttctttaaaatctgatatattggcataaaagtaattgtacatatatatatgaatgtgatttattttcctttacatctttttgttgtgtacagcagggcatatacttctcttgtcttggttggatgcacaaatctgtgtgcagtgctttttgcccgttgcctagacgatcacttggtttctctgaggatgtctggttctcgtaaagagtttgatgtgaaacagattttgaaaatcagatggaggtggtttggtcatcaagcatcatctcctaattctacagttgacagccagcagggagaattttggaaccgaggacagactggagcaaacggtgggagaaagtttttagatccatgtagcctacaattgcctttggcttcaattggttaccgaaggtccagccaactggattttcagaattcaccttcttggccaatggcatccacctctgaagtccctgcatttgagtttacagcagaagattgtggcggtgcacattggctggatagaccagaagtggatgatggcactagtgaagaagaaaatgaatctgattccagttcatgcaggacttccaatagtagtcagacattatcatcctgtcatactatggagccatgtacatcagatgaatttttccaagcccttaatcatgccgagcaaacatttaaaaaaatggaaaactatttgagacataaacagttgtgtgatgtaattttagtcgctggtgatcgcagaattccagctcacagattggtgctctcctctgtctcagactattttgctggcatgtttactaat

SEQ ID NO: 79998 - DNA, 348 bp, Homo sapiens
  sig_peptide (346)...(211): this location contains the signal peptide sequence, MLHYICTPARQFRLSPVLFGLLMRFGLTIRNCVRKSRDELVSQVA, Run with SignalP
  misc_feature (2)...(338): similar to gi215108 in the genepept database release 114, Run with FASTXY 3.3t00, default parameters
ttttttccggctcagtcatcgcccaagctggcgctatctgggcatcggggaggaagaagcccgtgccttttcccgcgaggttgaagcggcatggaaagagtttgccgaggatgactgctgctgcattgacgttgagcgaaaacgcacgtttaccatgatgattcgggaaggcgtggccatgcacgcctttaacggtgaactgttcgttcaggccacctgggataccagttcgtcgcggcttttccggacacagttccggatggtcagcccgaagcgcatcagcaacccgaacaataccggcgacagccggaactgccgtgccggtgtgcagatgtaatgcagcatgcc

SEQ ID NO: 79999 - DNA, 715 bp, Homo sapiens
  sig_peptide (239)...(374): this location contains the signal peptide sequence, MGLGKTLQCITLMWTLLRQSPECKPEIDKAVVVSPSSLVKNWYNE, Run with SignalP
  misc_feature (164)...(717): similar to gi1495483 in the genepept database release 114, Run with FASTXY 3.3t00, default parameters
gttgttgaccctattctcagtaaggttttgcggcctcatcagagagaggtaaatgagggtgaggggaacgaggtatgggctatgggctgagcctgggagactaccatccctgggacagcagcagcgtaggtgccaaagtggactgaaggctgttattctctagggagtgaaattcctgtgggagtgtgtcaccagtcggcgcatccctggcagccatggctgcatcatggctgatgagatgggcctaggaaagacgctgcagtgcatcacattgatgtggacacttttacgccagagtccagagtgcaagccagaaattgacaaggcagtggtggtgtcgccttccagcctggtgaagaactggtacaatgaggttgggaaatggctcggagggaggatccaacctctggccatcgatggaggatctaaggatgaaatagaccaaaagctggaaggattcatgaaccagcgtggagccagggtgtcttctcccatcctcatcatttcctatgagaccttccgccttcatgttggagtcctccagaaaggaagtgttggtctggtcatatgtgacgagggacacaggctcaagaactctgagaatcagacttaccaagccctggacagcttgaacaccagccggcgggtgctcatctccggaactcccatccagaatgatctgcttgagtatttcagcttggtacattttggtaat

SEQ ID NO: 80000 - DNA, 604 bp, Homo sapiens
  misc_feature (1)...(604): n = a,t,c or g
  sig_peptide (252)...(387): this location contains the signal peptide sequence, MLIDVFFFLFLFAXWMVAFGVARQGILRQNEQRWRWIFRSVIYEP, Run with SignalP
  misc_feature (42)...(607): similar to gi3928756 in the genepept database release 114, Run with FASTXY 3.3t00, default parameters
agcgtggtggaattccgcagtggtacgtaaatggggtgaattattttactgacctgtggaatgtgatggacacgctggggcttttttacttcatagcaggaattgtatttcggctccactcttctaataaaagctctttgtattctggacgagtcattttctgtctggactacattattttcactctaagattgatccacatttttactgtaagcagaaacttaggacccaagattataatgctgcagaggatgctgatcgatgtgttcttcttcctgttcctctttgcggngtggatggtggcctttggcgtggccaggcaagggatccttaggcagaatgagcagcgctggaggtggatattccgttcggtcatctacgagccctacctggccatgttcggccaggtgcccagtgacgtggatggtaccacgtatgactttgcccactgcaccttcactgggaatgagtccaagccactgtgtgtggagctggatgagcacaacctgccccggttccccgagtggatcaccatccccctggtgtgcatctacatgttatccaccaacatcctgctggtcaacctgctggtcgccatgtttgg

SEQ ID NO: 80001 - DNA, 994 bp, Homo sapiens
  sig_peptide (733)...(868): this location contains the signal peptide sequence, MKEIKYLFPLIFLSLASPLPLLSFLNACRFTRPEHLGSSAKIKCS, Run with SignalP
  misc_feature (817)...(989): similar to gi5689463 in the genepept database release 114, Run with FASTXY 3.3t00, default parameters
ctggccgacctctcacctctttacattaaactgcttatgttgagatcattgtagattcacatgcagttgtaagaagcctttaggtaccctttaccccggtcccccgatggtgacctcctcagcactgtggtgcgacgccctggccaggattcagacattcatgcggaaagtacccagcatctccagtgcctcctccctcaccaccccctctgtaaccacagtcaccctggactcctgcatttccatacgcctgacaattccagaatgtcatgtcaactgaatgatataacggaaccctttgagattggcttttcttgcacatcctaattctctggggacgcatccagggtacagcttgggatcagtagttccttccttttttgctgctgtctcatactccatggtacagtgttccacagtttctttaattattcagccatgggaagaaacggggtgtttccagttttgtgactctcgtgagtaacattctggtgcacatttgtggacagtttgtgtgtgaacattagttttcatttctctggctcaaattcaactgctgggtcatatggtacttagaaaattattaccatttccccaggcctttcctggaaaaaaattatttaagataaatattctgtagagacaggcagcaaaggtggacaacattttctctttttttcattgtttcatttttagttgtaagtgtatgtttttggtagggaaatcaacccaatgaaagagataaaatacctctttcctctcatttttctgtctcttgcatctcccttaccgctcctgtcttttttgaacgcctgtagattcaccagaccagagcacttgggcagcagcgccaagatcaagtgcagcggttgccatagctaccaggagtccacaaagcagctcactatgaagaaactgcccatcgtagcctgttttcatctcaaacgatttgaacactcagccaagctgcggcggaagatcaccacgcaaaaaa

SEQ ID NO: 80002 - DNA, 462 bp, Homo sapiens
  sig_peptide (317)...(452): this location contains the signal peptide sequence, MCKSSATRLLYCTTGVLLRRLEGDTALQGVSHIIVDEVHERTEER, Run with SignalP
  misc_feature (320)...(446): similar to gi5102733 in the genepept database release 114, Run with FASTXY 3.3t00, default parameters
cagaagtcatctagtaaagactgttttgctcttgaacttgggacataatccatttaaccaaataaggagcagacagattgagaactgttttcattattcactgttttttaatgctttttatgaaaatcttaacattgtgatatgaagtagaaaggcttttattactgtccctggcaagaaactatgtttagtatggtttcctattaaatggaactgctggtgtttccaatattttttatcactatccattcaaaatggctttccagtaatgtttcctttttttgaaaattttattaatgatttatattgccctttcatgtgtaagtcctcagccaccagactgttatactgcaccacgggagtgctgctgagaaggctagaaggagatacagctctacaaggagtttcccatatcattgttgatgaagttcatgagaggacagaagaaaggtaaaacaaaga

SEQ ID NO: 80003 - DNA, 420 bp, Homo sapiens
  misc_feature (1)...(420): n = a,t,c or g
  sig_peptide (188)...(323): this location contains the signal peptide sequence, MLAAGVTSAAGLALAFSGDYLKAFIDVPTVPAALVFLLLVGLLNA, Run with SignalP
  misc_feature (2)...(407): similar to gi405957 in the genepept database release 114, Run with FASTXY 3.3t00, default parameters
cggcgtcatcgccggtgaagttggtgaaaccgtctgggtaccactgctcgtagcgctcgtcatggcattgctgacagcaacgtcgtatgccgaactggtcaccaaatatccgcgggcgggcggtgcagcagtattcgcccaacgggcgtatcggaaaccactgatctcgttccttgtcggcttctcgatgctggcggccggcgtaaccagtgcggcgggactcgccctcgccttctcgggcgactatctcaaagccttcatcgacgtcccaaccgttccagcggcgctcgtcttcctgctcctggtgggacttctcaatgccagaggcatcaaggagtccatgcgcgccancgtcgtcatgacagtcgtggaagtcaccgggctcgtcctcgttgtcgtcctcgcgctcgtgccaggcag

SEQ ID NO: 80004 - DNA, 854 bp, Homo sapiens
  sig_peptide (62)...(197): this location contains the signal peptide sequence, MLQLIFMHMAGVIQLLILKRELISFVYMLAVKNRMTVRLKNEGLF, Run with SignalP
  misc_feature (29)...(205): similar to gi2736339 in the genepept database release 114, Run with FASTXY 3.3t00, default parameters
agcgcaaaatctctgcttgtcacgaggtggcaccaggtggcacgaggtatgttactatgaaatgttacagcttattttcatgcatatggctggtgtgatccagttacttattttaaaaagagagttgatttcctttgtttatatgctggcagtgaaaaacagaatgacagttcgacttaagaatgagggcttgttctcagtacagaaacagaagtagcctagatcaagaagtgcggaccaccgctttgtacaatggtctccaaactttggtcacttcatcaggaaatagtatgagcacttctctccatacatagttatttgtaaagtatacatgcttctgctattgtactctaaaacgtgctgtattatataccaaaaaagtccaaaaaatgagaaaaaataaatagaaataggagttctaatattctttttgcttccccagggaatgtcttgctcacttcactttaaaaaaacactgctttcttgggttttggttatggactgcgacaccgcacagagggcgaccgagagggagcgccgctcctcagtgccacgagcgtgagagccgggcagcggcagcacgtcgcgcgagacgtgcgaggcgcgcccgacgagcgccacgcgccgtgcgcagtggcatcgtctcgctgttcgtagttgcgatttaattgccgagtagcagacggcggagagagattatgtagactaacaaccctcacgataaaaatgcgtccgctaccactccgcctccgaggaccctggcgagacgctcgagacgaagaactccgttgaagtacgccgcggttcccctacgccccccgcgacccaccctgtgcttcgacccaccggcgcct

SEQ ID NO: 80005 - DNA, 1696 bp, Homo sapiens
  sig_peptide (877)...(1012): this location contains the signal peptide sequence, MWAASWCLSLWCCWVWSGTSESITANSSQHLPLSPWWESPSSSAS, Run with SignalP
  misc_feature (390)...(850): similar to gi156195 in the genepept database release 114, Run with FASTXY 3.3t00, default parameters
accctgaacagaatcgcagattgccagcccttttcccgacccctacggaaagacgagtccaggggccgtcctggcgaggtcaaaacatttagtctggtcttttcagcgtggaccctgccagcagccaggccatggagctctctgatgtcaccctcattgagggtgtgggtaatgaggtgatggtggtggcaggtgtggtggtgctgattctagccttggtcctagcttggctctctacctacgtagcagacagcggtagcaaccagctcctgggcgctattgtgtcagcaggcgacacatccgtcctccacctggggcatgtggaccacctggtggcaggccaaggcaaccccgagccaactgaactcccccatccatcagagggtaatgatgagaaggctgaagaggcgggtgaaggtcggggagactccactggggaggctggagctgggggtggtgttgagcccagccttgagcatctccttgacatccaaggcctgcccaaaagacaagcaggtgcaggcagcagcagtccagaggcccccctgagatctgaggatagcacctgcctccctcccagccctggcctcatcactgtgcggctcaaattcctcaatgataccgaggagctggctgtggctaggccagaggataccgtgggtgccctgaagagcaaatacttccctggacaagaaagccagatgaaactgatctaccagggccgcctgctacaagacccagcccgcacactgcgttctctgaacattaccgacaactgtgtgattcactgccaccgctcacccccagggtcagctgttccaggcccctcagcctccttggccccctcggccactgagccacccagccttggtgtcaatgtgggcagcctcatggtgcctgtctttgtggtgctgttgggtgtggtctggtacttccgaatcaattaccgccaattcttcacagcacctgccactgtctccctggtgggagtcaccgtcttcttcagcttcctagtatttgggatgtatggacgataaggacataggaagaaaatgaaagggtcctctgaaggagttcaaagctgctggccaagctcagtggggagcctgggctctgagattccctcccacctgtggttctgactcttcccagtgtcctgcatgtctgcccccagcacccagggctgcctgcaagggcagctcagcatggccccagcacaactccgtagggagcctggagtatccttccatttctcagccaaatactcatcttttgagactgaaatcacactggcgggaatgaagattgtgccagccttctcttatgggcacctagccgccttcaccttcttcctctaccccttagcaggaatagggtgtcctcccttctttcaaagcactttgcttgcattttattttatttttttaagagtccttcatagagctcagtcaggaaggggatggggcaccaagccaagcccccagcattgggagcggccaggccacagctgctgctcccgtagtcctcaggctgtaagcaagagacagcactggcccttggccagcgtcctaccctgcccaactccaaggactgggtatggattgctgggccctaggctcttgcttctggggctattggagggtcagtgtctgtgactgaataaagttccattttgtggtcctgcaaaaaaaaaaaa

SEQ ID NO: 80006 - DNA, 433 bp, Homo sapiens
  sig_peptide (170)...(305): this location contains the signal peptide sequence, MSVFAVFYSWLAVFYINNLLIVFNFTLLKFPIFILFINVAESYLY, Run with SignalP
  misc_feature (179)...(372): similar to gi2735946 in the genepept database release 114, Run with FASTXY 3.3t00, default parameters
agtcgatcattacgcctagcttggcacgaggtttacggatgagtaacgagtagggactattaatgcccccactttgttattgataggataacaaaaaaaggattatgatgattgataagttcttgagaaggcagatagatgcaaacagggtttcggaacgttataaaccatgtcagtttttgcagtcttttacagttggttggcagtgttttacatcaacaacttgttaattgtttttaatttcacattactaaaatttcctatttttattctttttataaatgtagctgaatcatatttatatatttcttgggtatttgaataccttattatagaaattcagggagtctttttttgttcttacatggccaagggtcatttctaagttgcataacagtgcagtggtcattaatttctgaagaatgttggctcg

SEQ ID NO: 80007 - DNA, 430 bp, Homo sapiens
  sig_peptide (254)...(389): this location contains the signal peptide sequence, MSFLQAVLALAASWTSRQVGERTLTGIVIDSGDGVTHVIPVVSRI, Run with SignalP
  misc_feature (263)...(378): similar to gi217422 in the genepept database release 114, Run with FASTXY 3.3t00, default parameters
gctgcaggacattcggcacgagccacagtcagccacgtttctttattgaaaacttgactcctatagttgtaagtactcaacattttcgtgttagttgtccaagtttgaattggaatttgagggacaggggttagaggatggataggaaaaggaaagagttactcagacatattaagtaagagagtttgttgattggacctggaaggagcaggcaggtggctttagaaagagttcctatgtgcgagcggttttcatgtcttttctccaggcagtgctggccttggcggcatcttggacatctcgacaagtgggtgaacgtacgttaacggggatagtcattgacagcggagatggagtcacccatgttatcccagtggtaagcagaatagttaatatataagtctctgtaggcttaacacctgattcgagg

SEQ ID NO: 80008 - DNA, 436 bp, Homo sapiens
  sig_peptide (10)...(145): this location contains the signal peptide sequence, MLQQTEKKIQFVVVFSIIAIVILIVLSSLSTWFLARRIAKPLREV, Run with SignalP
  misc_feature (4)...(437): similar to gi1280446 in the genepept database release 114, Run with FASTXY 3.3t00, default parameters
tatgacgaaatgcttcagcaaacagagaagaaaattcagtttgtagtcgtgttttctatcattgcaattgtgatattaattgtattatctagcctttcgacttggttcttggctagacggatagcaaaaccgttacgtgaagtagtaaaccatgcgattaaagtggcagacggagacctcacggttgaagtggatgaggtgaaggaagatagttcatatgagttggaccaattaaaatctgcttttgcccttatgatttcgaatgtcagacaaaccgttcaatcgatcgagcaggttggtgaacgtgtgaccggctttacctctgaagtgtctggtcatatggtaagcttgcgtgaaatcagcaaccaggtggcggtttcaaccgaagagctcgctcgcggtagccaatcggtttcagctcgtgcggaattcgtca

SEQ ID NO: 80009 - DNA, 395 bp, Homo sapiens
  sig_peptide (193)...(328): this location contains the signal peptide sequence, MLPQGFAGQFLCLLLLAHSRSYVQLERQLGWTVQDGHIHMSNRWH, Run with SignalP
  misc_feature (49)...(294): similar to gi295068 in the genepept database release 114, Run with FASTXY 3.3t00, default parameters
tcagaatctgcacactcactaaacaaaatgaagctagcaaacagagggagcgttgtaaacagtacagctaccctctgcattctcttctttccagtttcgcactgtattggagctttcccactgtggtatattggttatcttgcggcacaacagaccatagtggctcaaaaaaagaatgatgtatcattcctcatgcttccacaaggttttgctgggcagtttctctgcttgcttctcctggcacactccaggagctatgttcagctggaaaggcagctgggctggacggttcaagatggtcacattcacatgtccaacaggtggcactggccatcgcctgggttccctcctttctcctccatggagccgcccaggctccagtgagccagagtggg

SEQ ID NO: 80010 - DNA, 893 bp, Homo sapiens
  sig_peptide (389)...(524): this location contains the signal peptide sequence, MFPLGYWLSSALCGFLLCQGCTEFKCRVSQSLYSSSPRSTHSLFT, Run with SignalP
  misc_feature (292)...(56): similar to gi1469243 in the genepept database release 114, Run with FASTXY 3.3t00, default parameters
aaatgaaagggggagtaatgggagataccccatactttcaataagtagcctccaggcattcccttccaccagaggagcaattgttttttaaatagccctttggcgcccagtctattactaaaccatatgagtcattttttaagattactgcatgtgagttaacatagtcttcccaaattaaagttttagatgggccctcaaaatttttagggcatggttttcctgcaggtttatatgcaaagtatggggtccctgacttctcgcaacagtggcctacactgcctttcagtttacctaggcctccaaagcactttagcctgtggggcttgccagaactcgggttccagctgctggaatggacagttcccctctggctagggttgatctaatgttccctctgggttactggctgagttctgccctgtgtggctttctgctgtgccagggctgcactgagttcaaatgcagagtctcacaatcattgtattcttcctcccccaggagcacccattctctctttacaccaattggccactgccaggggatgaagagggatgatgttgacaattcaagactatttcttaccctcttcagtgcctgtttccttaatatgataataaaccaggtactgcgatcactcacctgattattggttcttatgaaggtgcttttttaatgtacttgttcagtttgatatttctgtcggagggatgactgctggaggattctattaagccatcttgctctgccttcttgcaacacataaaattcaacagttttgtgcaactgtaagttcaagtgtttgtaattttatttatttcatttttttctttgagatgaagtctcactccagcctggatgacagagcaagactctgtctcataaaaaaaaaa

SEQ ID NO: 80011 - DNA, 421 bp, Homo sapiens
  misc_feature (1)...(421): n = a,t,c or g
  sig_peptide (144)...(9): this location contains the signal peptide sequence, MGLGVIIWHAFSLDPEETRFRTQYFLPAMMWRRFLFIFWYFTYSI, Run with SignalP
  misc_feature (232)...(269): similar to gi5051492 in the genepept database release 114, Run with FASTXY 3.3t00, default parameters
naaggaagatggaataggtgaagtaccagaaaatgaagaggaatcttctccacatcatggctggtagaaagtattgggtacggaacctagtctcctcagggtccagtgagaaagcgtgccagatgatgacccccagacccatccagccctgggtcatccaacaaagatttaatgtagtccttgagaaaatatccatgttctgtagatcatgaatgtctagtaaacacttctccagagacctcactaagtaatgagttgggggtgaggaagggaaacatccatcatttatagagcccctatattatactcctggttccccaacaagtagggtgcttgatgcattataatggccattttcaacactgacactgaggtaacactgcgcacgcgtgggtcgccccaataattccggacgttcacc

SEQ ID NO: 80012 - DNA, 1410 bp, Homo sapiens
  sig_peptide (202)...(337): this location contains the signal peptide sequence, MTAWRRFQSLLLLLGLLVLCARLLTAAKGQNCGGLVQGPNGTIES, Run with SignalP
  misc_feature (289)...(613): similar to gi2547126 in the genepept database release 114, Run with FASTXY 3.3t00, default parameters
gtccggaatttccgggtcgacgatctcgtggaagcgagccgggcgcccagaccttcaggaggcgtcggatgcgcggcgggtcttgggaccgggctctctctccggctcgccttgccctcgggtgattatttggctccgctcatagccctgccttcctcggaggagccatcggtgtcgcgtgcgtgtggagtatctgcagacatgactgcgtggaggagattccagtcgctgctcctgcttctcgggctgctggtgctgtgcgcgaggctcctcactgcagcgaagggtcagaactgtggaggcttagtccagggtcccaatggcactattgagagcccagggtttcctcacgggtatccgaactatgccaactgcacctggatcatcatcacgggcgagcgcaataggatacagttgtccttccatacctttgctcttgaagaagattttgatattttatcagtttacgatggacagcctcaacaagggaatttaaaagtgagattatcgggatttcagctgccctcctctatagtgagtacaggatctatcctcactctgtggttcacgacagacttcgctgtgagtgcccaaggtttcaaagcattatatgaaggtaggagattggttgtgttttgcacatgcattcactgtccaaatgatctaatacatgctacactggattaataatgacaaactaggctgctatgtcgcaggtcgttccgtggtgtagacatttggcttctgtgtaatgcaatggcatttggtaacactgttataatcgccaaactttccagcccaaaacgtgttcacaattttcttcttatcactagaacttttcttcttggggttttgttttggttaatttgtagcgaataagttttgagaaatttgactataaactaatagccctcttatgtggtaaagagttcatttttaatgcagaagagtttcattaaatttttggttggacaattatactgatagtgcttgagtaaaggaaatttcattaaatgagcttttgttgtcaaagctgaaatttttaagagagaaaattaatttgcttttactgttgtttgatcatgcaaggcatagagacttatttgttttcatgtcttcagattttgtgcctagatacctttgaggtattgctatcattattaaaacggcttttggcagaaattttttttaaatgcagagatagaactttggaaaaggaaattatcatttcaagtattaggttttaagaaattgaactagttaatactttaaaggccgatgtgtgtctacttttgttttgcatggagattttaaattgccttttacacgtaatacaagagctactgtctgtaacagaaactctggagtctgtaaatttaaaaagcaatctatcgttaggggtgctgtatt

SEQ ID NO: 80013 - DNA, 450 bp, Homo sapiens
  sig_peptide (160)...(295): this location contains the signal peptide sequence, MLWTTLTGVSLALFPVAQAPTALVALAVAYGFTSGALAPLAFSVL, Run with SignalP
  misc_feature (13)...(382): similar to gi4753706 in the genepept database release 114, Run with FASTXY 3.3t00, default parameters
gggttcgagtcccacctggtggcccatctgcgggacctggattgggacccactacctgctgccttcctactctcagttgttgctatttctgacctcgtggggcgtgtggtctccggatggctgggagatgcagtcccagggcctgtgacacgactcctgatgctctggaccaccttgactggggtgtcactagccctgttccctgtagctcaagctcccacagccctggtggctctggctgtggcctacggcttcacatcaggggctctggccccactggccttctccgttctgcctgaactaatagggactagaaggatttactgtggcctgggactgttgcaaataataaaaagctatcgggggttgctggggcctcctttttcaagtaaggggaatgggggtttccaaggggtgaagggctgtccttttttcccacttttggggggg

SEQ ID NO: 80014 - DNA, 528 bp, Homo sapiens
  sig_peptide (415)...(280): this location contains the signal peptide sequence, MTVMVTVTVTVMVMVMVMVMVTVMVTVTVMVTVMVTAEMTVMVGV, Run with SignalP
  misc_feature (259)...(409): similar to gi9999 in the genepept database release 114, Run with FASTXY 3.3t00, default parameters
tccctaaaacaggacagtgatcgggcaggttgattaggagggctggccaggctttttgatccagacatttcatatgaggccatttaaccagtggtgtgatccagctctcagtttcctcatctgaaagctggggatataagagtagccactccctatgataaaggggagaatacatggaattctgagaataaaggagagaatacatggaaagtacttagtagagtgtggacacgtggcatgtgctcaacagatgtttgctaccatcatcatcatcatcatgacccctaccattactgtcatctccgctgtcaccatcactgtcaccatcaccgtcaccgtcaccatcactgtcaccatcaccatcaccatcaccatcaccatcactgtcaccgtcaccgtcaccatcactgtcattactgtggctaccgcttctcttgtgttggggttgccacctgtataccttcctgcttcctgcaggactgtgagcttgaaggcagggtttgggtccgtttttccaggaatacccgg

SEQ ID NO: 80015 - DNA, 887 bp, Homo sapiens
  misc_feature (1)...(887): n = a,t,c or g
  sig_peptide (221)...(356): this location contains the signal peptide sequence, MLIVQFIFELVSSILVSNVKDMLDFESGFCSKILSYFFSSPRYRL, Run with SignalP
  misc_feature (486)...(857): similar to gi3150464 in the genepept database release 114, Run with FASTXY 3.3t00, default parameters
ctttcctggagaactgagaaaattctttaccggctggatgtgggttggcctaagcacccagaatattttaccggaacaacattntgtgttgcagttgactccctcaatggattggtttacataggtcaagtaagtaaatagagatttaaaaaattatgaacacaaaggaagtaacagccttcctgtcttgctgtagtaactgaccatatgcgtttatatcatgctaattgtgcaatttatttttgagttggtctcaagtattttggtttcgaatgtgaaagatatgttagattttgaaagtggtttttgtagtaaaattctcagttattttttttcttcgccaagatacagattacctttcctttaagctgatcctaaggaagttattttttgtataccttcagagaggggataacatcccaaagatattagtgttcacagaggatggatatttcctacgagcctggaattatacagttgacacacctcatggtatatttgcagccagtactctatatgaacaatccgtctggatcacggatgtaggaagtggattctttggtcatactgttaaaaaatacagttcttttggtgatcttgttcaagtcttgggtactccaggcaaaaaaggcactagtttgaatcctttgcagtttgataacccagcagaattatatgtagaggacacaggagatatttacattgtggatggagatggaggattgaataacagattgatcaaactgtcccaagatttcatgatcctttggctgcatggagaaaatgggacagggcctgctaagttcaacatacctcacagtgttacacttgattcagctggtcgggtacaaatacagcgtcattgtgtctgggaaaaaaaaaaaaaa

SEQ ID NO: 80016 - DNA, 413 bp, Homo sapiens
  sig_peptide (370)...(235): this location contains the signal peptide sequence, MKSWRLPACMLAFWASSTAGAGGLLKASSRLPRAQPGAPGAPSES, Run with SignalP
  misc_feature (307)...(402): similar to gi547008 in the genepept database release 114, Run with FASTXY 3.3t00, default parameters
ccaggagaggcctcagttttcccagcgccttggtctgggactcacagcctccatgacatgaatcaatgttgctctgttacggcagcacgggaggactaacacgggggccagagtcatgttataatgaagacccgcggcccggccgtactgcagaagagcacggagaagacagctcctcaaatagcacaggtgagaagggatgaggccgggctgtgccaggcacaggtgcaggaatggctttcagagggagctccaggggctcccggctgagctctggggagccgtgaagaggcttttaagaggcctcctgccccagccgtggatgaggcccagaaagccagcatgcaggcagggagtctccaggacttcatccaggaagctgggtctcccggggagtccaggaggagaggccg

SEQ ID NO: 80017 - DNA, 344 bp, Homo sapiens
  sig_peptide (42)...(177): this location contains the signal peptide sequence, MISVLHGRFCVFGVGLSHSSPALSFTCCHNLCQPPWPAFPSCLCS, Run with SignalP
  misc_feature (78)...(218): similar to gi1841543 in the genepept database release 114, Run with FASTXY 3.3t00, default parameters
cggcctggattccggtctgcaccccctcttcacttggcctcatgatttcagttctccatggacggttttgtgtcttcggggttgggctctcccattccagtcctgctttgtcattcacctgttgtcataacctctgccagcctccttggccggctttcccgtcctgtctctgctccacggtaggcggaggcccctccgcatgtgcgccgagagccgcctccctgctgcctgtgttcctaccactctgcactcaactctttcatgaagcttcgtggaggaatgtgtgttgataggactttttcatataatctggaattttttctggttttctaaatcctaataaa

SEQ ID NO: 80018 - DNA, 350 bp, Homo sapiens
  sig_peptide (309)...(174): this location contains the signal peptide sequence, MCKWKALGLKLGSRGLLWRVVPCACCRLIPAGFNWADTGQGNIFL, Run with SignalP
  misc_feature (85)...(291): similar to gi21673 in the genepept database release 114, Run with FASTXY 3.3t00, default parameters
caaagtccaggagccataagagatccaaagggcggggttaccgtctgaatggtgtgtaactgaaaaatgacttaggtccatggaccactgcccttttgtgaaacattcttccaataccaccttccaagacctaatcctaaagccagtcatccccagccactgagaggaggggagaaatatgttcccctgcccggtgtcagcccagttaaaaccagcagggatgagcctgcagcaggcacatggcacaactctccaaagcagacctctactccccagcttcaatcccagtgctttccatttacacatagaggatattcagtgcatgcttcacactgaggcacaaaagcagg

SEQ ID NO: 80019 - DNA, 323 bp, Homo sapiens
  sig_peptide (290)...(155): this location contains the signal peptide sequence, MSFLMVVHRLWTQGKVFLSRGLLSSYCLPKHTPAISLGCLTPPKP, Run with SignalP
  misc_feature (10)...(192): similar to gi188866 in the genepept database release 114, Run with FASTXY 3.3t00, default parameters
ccccttcatccaacaaagaccagccacatctcccccaccccagtgacccagacacttcccatcacaccagtggcccagaggcctcccgccacaacagtgtccatgacaactcactataggccggcaccaacactggcgatccaatgtcagcctgaggttttgggggtgtcaaacatccaagcgatatcgctggggtatgtttggggaggcagtatgatgacagaagacctcgagacaggaagaccttgccttgggtccaaagcctgtgcacaaccatcaggaaactcatctgtttctgctggagtttaacttgactttgattg

SEQ ID NO: 80020 - DNA, 350 bp, Homo sapiens
  misc_feature (1)...(350): n = a,t,c or g
  sig_peptide (221)...(86): this location contains the signal peptide sequence, MPPGLLTTGILLSLWLHNRMLLDIAVQFLGVVYEELNDMHIVSLE, Run with SignalP
  misc_feature (224)...(310): similar to gi4584539 in the genepept database release 114, Run with FASTXY 3.3t00, default parameters
aagccatcccactttggggaatggtgcttttgcttctcanatagatctgtgccttggttactccctctgttcttctgttgtgttgttcaagtgatacaatgtgcatatcgttaagttcttcgtacaccacgccaagaaactggacggctatatccagtaacattctgttgtgaagccacaaagataataagatgcctgtagtgagaagtccaggtggcattttcttacgcccatcttgacactgccgttttatgtttcgaaccccagtccaccccacagctccaaaccaccctccctgcctccacctacagctggcacctgcagccgcgtcgtcgtggggctgccgctgt

SEQ ID NO: 80021 - DNA, 412 bp, Homo sapiens
  sig_peptide (4)...(139): this location contains the signal peptide sequence, MATQRMLPCVIHQWLLITTTVRYHYIAARTAKSGKRSRNQCGYRE, Run with SignalP
  misc_feature (1)...(167): similar to gi56590 in the genepept database release 114, Run with FASTXY 3.3t00, default parameters
caaatggctactcaacggatgctcccctgtgttattcatcagtggctgctgattacaaccacagtgagatatcactacatagccgccaggacagcaaagtcaggaaagaggagcaggaatcagtgtggatacagagaaactgaactcagacactgttggtgggaactgaactcacacactgctgaggagaactgaactcactcacacaccatggggggactgaactcactcacacagcactgaggggactgaactcacacaccacaggggggcctgaactcactcacacactactgtgtggaaactgaactcacttgcgcacccctggggggaagtaacatttttgcattgaccctggaccaataaccactgaaactgaactgaagcttccatggcgacactgtgattcccc

SEQ ID NO: 80022 - DNA, 417 bp, Homo sapiens
  sig_peptide (161)...(296): this location contains the signal peptide sequence, MLCWKTTSGRLKDILAILLTDVLLLLQEKDQKYVFASVDSKPPVI, Run with SignalP
  misc_feature (2)...(383): similar to gi3043566 in the genepept database release 114, Run with FASTXY 3.3t00, default parameters
tatcatctcacaagtgcacgccaaggtcagtgagtgtgagaagggccagcgcctcagggagatcgcagggaagatggacctgaagtcttccagcaaactcaagaacgggctcaccttccgcaaggaagacatgcctcagcggcagctccacctggagggcatgctatgctggaagaccacatcagggcgcttgaaagatatcctggctatcctgctgaccgacgtacttttgctgctacaagaaaaagatcagaaatacgtctttgcttctgtggactcaaagccacccgtcatctcgttacaaaagctcatcgtgagggaagtggccaacgaggagaaagcgatgtttatgatcagcgcctccttgcaagggccggagtgtattgcggccgctcgagaggatccaagcaaacagaa

SEQ ID NO: 80023 - DNA, 379 bp, Homo sapiens
  sig_peptide (342)...(207): this location contains the signal peptide sequence, MAIPSVVISGLAVLLVAMALPSLSGSEAIKSMTIPGLVVPTVVRF, Run with SignalP
  misc_feature (48)...(379): similar to gi386852 in the genepept database release 114, Run with FASTXY 3.3t00, default parameters
ttagccacaatggccgccaacagacctagcttggctatcaatttagccacaccaaacacatcccaactggacacaggcacagagttccctgccctggatatcaagctgggcacagccagagacttgtcttcggtagggacagtcaagtcaggcaaaaccgtgaacttggctacagcaggcacaatcaagccgggcacagccatgaatctgactacagttgggacaaccaagccagggatggtcatggatttgatagcctcagaaccagacaagctgggcaaagccatggctacaagaagcacagccaaaccagatatgaccacagagggtatagccatggattcagcaacatcagacccagtcaagccggacatgtatt

SEQ ID NO: 80024 - DNA, 397 bp, Homo sapiens
  sig_peptide (12)...(147): this location contains the signal peptide sequence, MRVYGTCTLVLMALVVFVGVKYVNKLALVFLACVVLSILAIYAGV, Run with SignalP
  misc_feature (3)...(400): similar to gi5106521 in the genepept database release 114, Run with FASTXY 3.3t00, default parameters
tgctgcacaacatgcgtgtgtacggcacgtgcacgctcgtgctcatggccctggtggtcttcgtgggcgtcaagtatgtcaacaagctggcgctggtcttcctggcctgcgtcgtgctgtccatcctggccatctatgccggcgtcatcaagtctgccttcgaccccccggacatcccggtctgcctcctggggaaccgcacgctgtcacggcgcagcttcgatgcctgcgtcaaggcctacggcatccacaacaactcagccacctccgcgctctggggcctcttctgcaacggctcccagcccagcgccgcctgtgacgagtacttcatccagaacaacgtcaccgaaattcagggcatcccgggcgcggccagtggtgtcttcctggagaaccg

SEQ ID NO: 80025 - DNA, 398 bp, Homo sapiens
  sig_peptide (194)...(329): this location contains the signal peptide sequence, MELLKLLLTCFSEAMYLPPAPESGSTNPWVQFFCSTENRHALPLF, Run with SignalP
  misc_feature (2)...(397): similar to gi1072198 in the genepept database release 114, Run with FASTXY 3.3t00, default parameters
cctgtccgagtccctgctcctggtcattgctgacctgctcttctgccgggacttcacggttcagagcccccggaggagcactgtggactcggcagaggacgtccactccctggacagctgtgaatacatctgggaggttggtgtgggcttcgctcactccccccagcctaactacatccacgatatgaaccggatggagctgctgaaactgctgctgacatgcttctccgaggccatgtacctgcccccagctccggaaagtggcagcaccaacccatgggttcagttcttttgttccacggagaacagacatgccctgcccctcttcacctccctcctcaacaccgtgtgtgcctatgaccctgtggaatacgggatcccctacaaccacctgtatt

SEQ ID NO: 80026 - DNA, 413 bp, Homo sapiens
  sig_peptide (141)...(276): this location contains the signal peptide sequence, MCNPWVSLLGAVGSLLIMFVIQWVYTLVNMGVAAIVYFYIGRASP, Run with SignalP
  misc_feature (117)...(341): similar to gi2950398 in the genepept database release 114, Run with FASTXY 3.3t00, default parameters
ctcagcttaagggaccatatgaagagcactttgttcttgagctgtgcaaccaatcagagtccagtggagaagatttcttcctgaagtccaggctccaagaacaagatgtctggagaagatccacttctttctatacccacatgtgcaacccctgggtctccctgttgggggctgttgggtcccttctcatcatgtttgtgatacagtgggtgtataccctggttaacatgggtgttgctgccatcgtgtatttctacattggccgggccagcccagggcttcaccttggatcagcctccaacttcagctttttccggtggatgaggtctctcttgctcccctcctgcagcctctccattccattatttttgacaaaaaaaaggcaaagaaaagctacagagccccactgtatt

SEQ ID NO: 80027 - DNA, 397 bp, Homo sapiens
  sig_peptide (15)...(150): this location contains the signal peptide sequence, MYFSSLFPYVVLACFLVRGLLLRGAVDGILHMFTPKLDKMLDPQV, Run with SignalP
  misc_feature (3)...(394): similar to gi262843 in the genepept database release 114, Run with FASTXY 3.3t00, default parameters
cctcggggaaggtgatgtatttcagctccctcttcccctacgtggtgctggcctgcttcctggtccgggggctgttgctgcgaggggcagttgatggcatcctacacatgttcactcccaagctggacaagatgctggacccccaggtgtggcgggaggcagctacccaggtcttctctgccttgggcctgggctttggtggtgtcattgccttctccagctacaataagcaggacaacaactgccacttcgatgccgccctggtgtccttcatcaacttcttcacgtcagtgttggccaccctcgtggtgtttgctgtgctgggcttcaaggccaacatcatgaatgagaagtgtgtggtcgagaatgctgagaaaatcctagggtaccgtgtatt

SEQ ID NO: 80028 - DNA, 632 bp, Homo sapiens
  sig_peptide (375)...(510): this location contains the signal peptide sequence, MYASSWFLTLFLTTFPLPVATRVFDIFMYEGLEIVFRVGLALLQV, Run with SignalP
  misc_feature (33)...(626): similar to gi3093476 in the genepept database release 114, Run with FASTXY 3.3t00, default parameters
ccttcgtagtccatagtcagtgtggtggaattcgggacatcgcccgcacctacccggaacacgagttcttcaagggccaggacagcctgggccaggaggtcctcttcaacgtcatgaaggcatactcgctggtagaccgggaggtgggctactgccagggaagcgccttcatcgtgggcctgctcctcatgcagatgcctgaggaggaggccttctgtgtgttcgtgcggctgatgcaggagtaccggctgcgggagctcttcaaacccagcatggccgagctcgggctctgcatctatcagttcgagtacatgctgcaggagcagctcccagacctcaacacccacttccgttcccaaagcttccacacatccatgtatgcctcgtcctggttcctcacactgttcctgaccaccttcccactccccgtcgccacccgggtctttgacatcttcatgtatgaggggctggagatcgtgttccgagtgggcctcgccctgctgcaggtgaaccaggcggagctgatgcagctggacatggaggggatgtcccagtacttccagagagtgatcccccaccagttcgacagctgcccggacaagctggtcctcaaagcctaccaggaatgtatt

SEQ ID NO: 80029 - DNA, 380 bp, Homo sapiens
  sig_peptide (132)...(267): this location contains the signal peptide sequence, MWKFVSPLCMAVLTTASIIQLGVTPPGYSAWIKEEAAERYLYFPN, Run with SignalP
  misc_feature (3)...(374): similar to gi262843 in the genepept database release 114, Run with FASTXY 3.3t00, default parameters
cggccaccctgccactcactctcatcgtcatccttgagaacatcgctgtggcctggatttatggaaccaagaagttcatgcaggagctgacggagatgctgggcttccgcccctaccgcttctatttctacatgtggaagttcgtgtctcctctatgcatggctgtgctcaccacagccagcatcatccagctgggggtcacgcccccgggctacagcgcctggatcaaggaggaggctgccgagcgctacctgtatttccccaactgggccatggcacccctgatcaccctcatcgtcgtggcgacgctgcccatccctgtggtgttcgtcctgcggcacttccacctaatctgtgatggctccaacaccccatgtatt

SEQ ID NO: 80030 - DNA, 389 bp, Homo sapiens
  misc_feature (1)...(389): n = a,t,c or g
  sig_peptide (3)...(138): this location contains the signal peptide sequence, MKMFVAHGFYAAKFVVAIGSVAGLTVSLLGSLFPMPRVIYAMAGD, Run with SignalP
  misc_feature (12)...(350): similar to gi2116552 in the genepept database release 114, Run with FASTXY 3.3t00, default parameters
ncatgaagatgtttgtggctcatgggttctatgctgccaaattcgtagtggccattgggtcggttgcaggactgacagtcagcttgctggggtccctcttcccgatgccgagggtcatttatgccatggctggtgacgggctccttttcaggttcctggctcacgtcagctcctacacagagacaccagtggtggcctgcatcgtgtcggggttcctggcagcgctcctcgcactgttggtcagcttgagagacctgatagagatgatgtctatcggcacgctcctggcctacaccttggtctctgtctgtgtcttgctccttcgacaccaccctgagagtgacattgatggttttgtcaagttcttgtctgaggagcacacgtgtagt

SEQ ID NO: 80031 - DNA, 431 bp, Homo sapiens
  misc_feature (1)...(431): n = a,t,c or g
  sig_peptide (271)...(406): this location contains the signal peptide sequence, MVGKIKRLKKSAFVVLILLITAKLLVLPLLCRKMVELLDKGCIAA, Run with SignalP
  misc_feature (16)...(363): similar to gi2636241 in the genepept database release 114, Run with FASTXY 3.3t00, default parameters
ncaatatctcttatgatgttaaaccctatagggtttattttctgtgaaatccaaaagtggaaagacactcaaaatgcttctcaaaataaaataaaaattgtgggactcggactcctgcgtgtattacagaacccaatagtatttatggtcttcattggcatcgccttcaattttattcttgatcgaaaggtacctgtatatgtcgaaaattttcttgatggacttggaaattctttttctggatcagccctattttatcttggtctcacgatggtgggaaaaataaagagactgaagaagtcggcatttgtagtactaattcttctcatcacagctaaacttctggtgctgccacttctgtgcagaaaaatggtggaactcttggacaagggctgtattgcggccgctctggaggatcctcgcaacaggcg

SEQ ID NO: 80032 - DNA, 447 bp, Homo sapiens
  misc_feature (1)...(447): n = a,t,c or g
  sig_peptide (60)...(195): this location contains the signal peptide sequence, MKIVHVLQVTRAVAPLLLSVTVAYISTTIPAIQTHYHARRGRRLQ, Run with SignalP
  misc_feature (77)...(449): similar to gi1203931 in the genepept database release 114, Run with FASTXY 3.3t00, default parameters
agtgattttaacagtgtcatttttaaaaagagcacctgctttcctcaaactcccattgaatgaagattgtgcatgtgctccaagtgaccagagcagtggcacctcttctcctctctgtgacagtggcttacatctcaactaccatcccagcaatacagacacattatcatgctcgtcgtggccgacgtctccaggcttgaggtgggagaagcgatggtgcgacctcagactgatccctctacttcattcgcgcttctctcagtatgtgcccggcacagatttgagtcggcagaatgcctttcaagtcattgctgtggatggggtctgcactgggattattcagtgcctctctgctgaagactgcgttgnctggctacaagcaatagcaactaacatttcaaatctcacaaagcactgtattgcggccgctggtagcataacgcatcg

SEQ ID NO: 80033 - DNA, 415 bp, Homo sapiens
  sig_peptide (135)...(270): this location contains the signal peptide sequence, MGLLMMILGQIFLNGNQAKEAEIWEMLWRMGVQRERRLSIFGNPK, Run with SignalP
  misc_feature (12)...(412): similar to gi3319931 in the genepept database release 114, Run with FASTXY 3.3t00, default parameters
cagcagcccacctggagtgcatttttaggtttgaattgagagaacttgaccctgaggcacacacctacattctgttaaacaaactgggacctgtgccctttgaagggttagaagagagcccaaatgggccaaagatgggcctcctgatgatgattctaggccaaatattcctgaatggcaaccaagccaaggaggctgagatttgggaaatgctctggaggatgggggtgcagcgggaaaggaggctttccatttttgggaacccaaagagacttctgtctgtggagtttgtatggcagcgttacttagactacaggccagtaactgactgtaaaccagtggagtatgagtttttctggggcccaagatcccacctagaaaccaccaagatgaaaattctgaagttcatggcgaa

SEQ ID NO: 80034 - DNA, 428 bp, Homo sapiens
  sig_peptide (231)...(366): this location contains the signal peptide sequence, MTIGFLFPMLSIAYLISPRSNLGLFIKKPFIKFICHTASYLTFLS, Run with SignalP
  misc_feature (3)...(425): similar to gi3212137 in the genepept database release 114, Run with FASTXY 3.3t00, default parameters
aagctcggagctccagggaactggagatcatcctcaaccatcgagatgaccacagtgaagagcttgaccctcagaagtaccatgacctggccaagttgaaggtggcaatcaaataccaccagaaagagtttgttgctcagcccaactgccaacagttgcttgccaccctgtggtatgatggcttccctggatggcggcggaaacactgggtagtcaagcttctaacctgcatgaccattgggttcctgtttcccatgctgtctatagcctacctgatctcacccaggagcaaccttgggctgttcatcaagaaaccctttatcaagtttatctgccacacagcatcctatttgaccttcctctctatgcttctcctggcttctcagcacattgtcaggacagaccttcatgtacaggggccctgtatt

SEQ ID NO: 80035 - DNA, 365 bp, Homo sapiens
  sig_peptide (159)...(294): this location contains the signal peptide sequence, MQQPEVKTWGGVVTAAMVIALAVYMGTGICGFLTFGAAVDPDVLL, Run with SignalP
  misc_feature (81)...(359): similar to gi603358 in the genepept database release 114, Run with FASTXY 3.3t00, default parameters
acccttcgttatcattcaagtccttctggccagataaagagatgaccccagggaacatcctgaccaggccggcttcctggatggctgtgttcaatgccatgcccaccatctgcttcggatttcagtgccacgtcagcagtgtgcccgtcttcaacagcatgcagcagcctgaagtgaagacctggggtggagtggtgacagctgccatggtcatagccctcgctgtctacatggggacaggcatctgtggcttcctgacctttggagctgctgtggatcctgacgtgctcctgtcctatccctcggaggacatggccgtggccgttgcccgagccttaatcatcctgagcgtgctcacctgtatt

SEQ ID NO: 80036 - DNA, 444 bp, Homo sapiens
  misc_feature (1)...(444): n = a,t,c or g
  sig_peptide (128)...(263): this location contains the signal peptide sequence, MLQLGPFLYWTFLAAFEGTVFFFGTYFLFQTASLEENGKVYGNWT, Run with SignalP
  misc_feature (2)...(443): similar to gi5689373 in the genepept database release 114, Run with FASTXY 3.3t00, default parameters
ncttacaatgcacaatatctgcttcacatccttgcccatcctggcctatagtctactggaacagcacatcaacattgacactctgacctcagatccccgattgtatatgaaaatttctggcaatgccatgctacagttgggccccttcttatattggacatttctggctgcctttgaagggacagtgttcttctttgggacttactttctttttcagactgcatccctagaagaaaatggaaaggtatacggaaactggacttttggaaccattgtttttacagtcttagtattcactgtaaccctgaagcttgccttggatacccgattctggacgtggataaatcactttgtgatttggggttctttagccttctatgtatttttctcattcttctggggaggaattatttggccttttctcaagcaacagagaatggcgaa

SEQ ID NO: 80037 - DNA, 436 bp, Homo sapiens
  sig_peptide (215)...(80): this location contains the signal peptide sequence, MGFLVLKQPMLVAKVFPTLAGVEIILFTLKGFPILGIPVQLPPTV, Run with SignalP
  misc_feature (2)...(432): similar to gi2822143 in the genepept database release 114, Run with FASTXY 3.3t00, default parameters
gggagagaggaacttcacatgcacgcagggtggcaaggattttactgccagctcagaccttctccagcaacaggtcttaaacagtgggtggaagctgtacagggatacccaggatggggaagcctttcaaggtgaacagaatgatttcaactccagccaaggtgggaaagacttttgccaccaacatgggctgtttgagcaccaaaaaacccataatggggagaggccttatgagttcagtgaatgtggggaattgtttaggtacaactccaaccttattaaatatcagcaaaatcatgctggagaaaggccttatgagggcactgaatatggaaagacctttattagaaagtccaacctagttcagcaccagaaaattcacagtgaaggctttctttcaaaaaggtctgaccccattgaacatcaggagtgtatt

SEQ ID NO: 80038 - DNA, 396 bp, Homo sapiens
  sig_peptide (34)...(169): this location contains the signal peptide sequence, MCVVVRFLGRRGGLLLFMILTALASLLQLGLLNLIGKYSQHPDSG, Run with SignalP
  misc_feature (4)...(397): similar to gi6010763 in the genepept database release 114, Run with FASTXY 3.3t00, default parameters
acggccagcatcgcgctggtgtcctgcctggccatgtgcgtggtggtccgattcctcgggcgcaggggagggctgctgctcttcatgatcctcaccgccctggcctcgctcctgcagctcggcctcctcaacctgattggaaagtacagccagcacccagactcagggatgagtgacagcgtcaaggacaaattttccatcgcgttttccatcgtgggcatgtttgcctcccatgcggtggggagcctcagcgtgttcttctgtgcggagatcaccccgacggtgataaggtgtggcgggctggggctggtgctggccagcgcgggcttcggcatgctgacggcacccatcatcgagctgcacaaccagaaaggctacttcctgcaccactgtatt

SEQ ID NO: 80039 - DNA, 466 bp, Homo sapiens
  misc_feature (1)...(466): n = a,t,c or g
  sig_peptide (49)...(184): this location contains the signal peptide sequence, MIQALGGFFTYFVILAENGFLPIHLLGLREDWDDRWINDVEDSYG, Run with SignalP
  misc_feature (466)...(): similar to gi219942 in the genepept database release 114, Run with FASTXY 3.3t00, default parameters
agtacgagttacgtgcggctganccgcacggcctatgggcagattggaatgatccaggccctgggaggcttctttacttactttgtgattctggctgagaacggcttcctcccaattcacctgttgggcctccgagaggactgggatgaccgctggatcaacgatgtggaagacagctacgggcagcagtggacctatgagcagaggaaaatcgtggagttcacctgccacacagccttcttcgtcagtatcgtgggggtgcagtgggccgacttggtcatctgtaagaccaggaggaattcggtcttccagccggggatgaagaacaagatcttgatatttggcctctttgaagagacagccctggctgctttcctttcctactgccctggaatgggtgttgctcttaagatgtatcccctcaaacctacctggagggtctgtgccttcccctactctcttctca

SEQ ID NO: 80040 - DNA, 412 bp, Homo sapiens
  sig_peptide (86)...(221): this location contains the signal peptide sequence, MEGWFAVLSTANDVLGAPWNWLYFIPLLIIGAFFVPTLVLGVLSG, Run with SignalP
  misc_feature (2)...(363): similar to gi1475 in the genepept database release 114, Run with FASTXY 3.3t00, default parameters
caagatctggatcggccccaatgatgggatcacccagtttgataacatcctttttgctgtgctgactgtcttccagtgcgtccccatggaagggtggttcgctgtgctgtcaactgccaatgatgtcttaggagccccctggaattggctgtacttcatccccctcctcatcattggagccttctttgttcccaccctagtcctgggagtgctttccggggattttgccaaagagagagagagagtggagacccgaagggctttcatgaagctgcggcgccagcagcagattgagcgtgagctgaatggctaccgtgtctggatagccaaagcagaggaagtcatgctcgctgaagaaaatttgtatcccagtcacgcacggccagtgaatccgtaatcatggtcatagacc

SEQ ID NO: 80041 - DNA, 458 bp, Homo sapiens
  sig_peptide (119)...(254): this location contains the signal peptide sequence, MAPPGLRRGWFTSRLELYSLQHSLSTEPAVVLGLALALAFATLLL, Run with SignalP
  misc_feature (167)...(430): similar to gi1226281 in the genepept database release 114, Run with FASTXY 3.3t00, default parameters
tgaccatgctactccagcacgcgacgaggtccagaccaacttccggaacagtccggactacaaccagacccagctcttctacaatgaggtcagccactggctggcagcggagctgggcatggcacctccaggcctccgccgtggttggttcactagccgtctagagctgtatagcctgcagcacagcctgagcactgagcctgctgtggtgctgggcctggctttggcgctggcctttgccacactgctcctgggcacctggaatgttcccctcagcctattctccgtggcagctgtggcaggcaccgtgctgctcactgtaggactcctgggtctcctcgagtggcagctcaacactgccgaggccctgtttctctctgcctcagtgggcctctcagtagacttcactgtcaactactgcatctcctatcacctgtgcccacaccctgaccgcctga

SEQ ID NO: 80042 - DNA, 446 bp, Homo sapiens
  misc_feature (1)...(446): n = a,t,c or g
  sig_peptide (66)...(201): this location contains the signal peptide sequence, MLMTVIYLLFAGTMTVSTTVGYTLLLLMKYPHVQKWVREELNREL, Run with SignalP
  misc_feature (446)...(): similar to gi1684709 in the genepept database release 114, Run with FASTXY 3.3t00, default parameters
tgcctgcaggattnttgcgtgcacaggaggaacaaaacccaggcacagaattcaccaacaagaacatgctgatgacagtcatttatttgctgtttgctgggacgatgacggtcagcaccacggtcggctataccctcctgctcctgatgaaataccctcatgtccaaaagtgggtacgtgaggagctgaatcgggagctgggggctggccaggcaccaagcctaggggaccgtacccgcctcccttacaccgacgcggttctgcatgaggcgcagcggctgctggcgctggtgcccatgggaataccccgcaccctcatgcggaccacccgcttccgagggtacaccctgccccagggcacggaggtcttccccctccttggctccatcctgcatgaccccaacatcttcaagcacccagaagagttcaacccagaccgtttcctg

SEQ ID NO: 80043 - DNA, 849 bp, Homo sapiens
  sig_peptide (461)...(596): this location contains the signal peptide sequence, MVVAVLAFWHIQGFPEVGEEELVSVPDAKFTKGEFQVVMKVVQLL, Run with SignalP
  misc_feature (2)...(851): similar to gi1545959 in the genepept database release 114, Run with FASTXY 3.3t00, default parameters
ccagcccagcgccaaggccctggggagcatcctggcctacctgacggacgccaagaggaggctgcgcaaggttgtctgggtgagccttcgggaggaggccgtgttggagtgtgacgggcacacctacagcctgcggtggcctgggccccctgtggctcctgaccagctggagaccctggaggcccagctgaaggcccatctaagcgagcctcccccaggcaaggagggccccctgacctacaggttccagacctgccttaccatgcaggaggtcttcagccagcaccgcagggcctgtcctggcctcacctaccaccgcatccccatgccggacttctgtgccccccgagaggaggactttgaccagctgctggaggccctgcgggccgccctctccaaggacccaggcactggcttcgtgttcagctgcctcagcggccagggccgtaccacaactgcgatggtggtggctgtcctggccttctggcacatccaaggcttccccgaggtgggtgaggaggagctcgtgagtgtgcctgatgccaagttcactaagggtgaatttcaggtagtaatgaaggtggtgcagctgctacccgatgggcaccgtgtgaagaaggaggtggacgcagcgctggacactgtcagcgagaccatgacgcccatgcactaccacctgcgggagatcatcatctgcacctaccgccaggcgaaggcagcgaaagaggcgcaggaaatgcggaggctgcagctgcggagcctgcagtacttggagcgctatgtctgcctgattctcttcaacgcgtacctccacctggagaaggccgactcctggcagaggcccttcag

SEQ ID NO: 80044 - DNA, 421 bp, Homo sapiens
  sig_peptide (277)...(142): this location contains the signal peptide sequence, MAATEPKWVSVWSRFLWVTLLSMVLGSLLALLLPLGAVEEHSSSV, Run with SignalP
  misc_feature (142)...(281): similar to gi1398927 in the genepept database release 114, Run with FASTXY 3.3t00, default parameters
atggagaggccttgttctgagccaccaggagcgtcgcgcccttggagctgatgctaactcctgtggacgggctggtgctcttggtgacggcatcctgcaacctgcagggtttgatcgtgatcaggtagagacttattagcacagacgagctgtgctcctccacagcccccaacggcagcagcagggccagcagggaccccagcaccatgctcagcagcgtcacccagaggaagcggctccagaccgagacccatttcggttcagtcgccgccatcactgaagccattggtatgagcatcatctggactcaggagagggccctttgcgcatgtccacaggcgcctgagagaaagcagaatcgcgcgcagctgtcagaacaccgctcgcgttccgcgcgctcccagctccgggccgcacgaaa

SEQ ID NO: 80045 - DNA, 701 bp, Homo sapiens
  sig_peptide (387)...(522): this location contains the signal peptide sequence, MQLKTPSGQVLSFCILQLFPFTSESKRMGVIVRDESTAEITFYMK, Run with SignalP
  misc_feature (3)...(704): similar to gi3327036 in the genepept database release 114, Run with FASTXY 3.3t00, default parameters
acctgggcaccgtgtcctatggcgccgacacgatggatgagatccagagccatgtcagggactcctactcacagatgcagtctcaagctggtggaaacaatactggttcaactccactaagaaaagcccaatcttcagctcccaaagttaggaaaagtgtcagtagtcgaatccatgaagccgtgaaagccatcgtgctgtgtcacaacgtgacccccgtgtatgagtctcgggccggcgttactgaggagactgagttcgcagaggctgaccaagacttcagtgatgagaatcgcacctaccaggcttccagcccggatgaggtcgctctggtgcagtggacagagagtgtgggcctcacgctggtcagcagggacctcacctccatgcagctgaagacccccagtggccaggtcctcagcttctgcattctgcagctgtttcccttcacctccgagagcaagcggatgggcgtcatcgtcagggatgaatccacggcagaaatcacattctacatgaagggcgctgacgtggccatgtctcctatcgtgcagtataatgactggctggaagaggagtgcggaaacatggctcgcgaaggactgcggaccctcgtggttgcaaagaaggcgttgacagaggagcagtaccaggactttgagagccgatacactcaagccaagctgagcatgcacacgaaa

SEQ ID NO: 80046 - DNA, 433 bp, Homo sapiens
  misc_feature (1)...(433): n = a,t,c or g
  sig_peptide (277)...(412): this location contains the signal peptide sequence, MKISTLMFFQLTLLKIDKDSQELQILRNKLDSKLDKVIGTFLEGS, Run with SignalP
  misc_feature (58)...(434): similar to gi1061268 in the genepept database release 114, Run with FASTXY 3.3t00, default parameters
ccacgtcgatgctcccgggcgcatgggcgcgggattttcccgggtcgacgatttcgagatcctttaattggcatcaacaagcctattttactactattgggacaagtcacaaatttgacgaggtttttgcagactatggaacaggaagaaatgctagagcacggcgataaaattttgagtttgcaagtcgagatttataaattacaaccttcgcttatggcgctggaacatttggatgatgaaaagaaattttactatttagaactattcgagataatgaaaatttctaccttaatgttctttcaattaactttattaaagattgacaaagattcgcaggaactacagatactgagaaacaaattggactcgaagctagacaaggtcatcggaacttttttggaaggatcgttatgcttcccacttttcattn

SEQ ID NO: 80047 - DNA, 352 bp, Homo sapiens
  sig_peptide (190)...(325): this location contains the signal peptide sequence, MYPIVLFGLLAVIFAVFVQFLLPEFTNMGMALPTFVGLPVVLSIV, Run with SignalP
  misc_feature (22)...(287): similar to gi2634906 in the genepept database release 114, Run with FASTXY 3.3t00, default parameters
ttcccgggtcgacgatttcgtcgagaaggacggcatttttatcaactggttacaccgtatgttcggtcagaaatcagacgtgagttagcctttgcagtagtccatggcaatttaatggaaattctagctgaaatcggcagtcgtgaacgacgccgaatgcgacaaattcaaaaattgcgccagttactgatgtatccgattgtactgtttgggttgttagctgttatatttgcggttttcgtgcagttccttttacctgagttcacgaacatggggatggcattgccgacttttgtggggttgccagtggttttatcaatagtcgccgttacgctaataggcattgctgtga

SEQ ID NO: 80048 - DNA, 413 bp, Homo sapiens
  sig_peptide (22)...(157): this location contains the signal peptide sequence, MIHGRSVLHIVASLIILHLSGATKKGTEKQTTSETQKSVQCGTWT, Run with SignalP
  misc_feature (160)...(414): similar to gi1421726 in the genepept database release 114, Run with FASTXY 3.3t00, default parameters
cccgggtcgacgatttcgtacatgatccatgggcgcagcgtgcttcacattgtagcaagtttaatcatcctccatttgtctggggcaaccaagaaaggaacagaaaagcaaaccacctcagaaacacagaagtcagtgcagtgtggaacttggacaaaacatgcagagggaggtatctttacctctcccaactatcccagcaagtatccccctgaccgggaatgcatctacatcatagaagccgctccaagacagtgcattgaactttactttgatgaaaagtactctattgaaccgtcttgggagtgcaaatttgatcatattgaagttcgagatggaccttttggcttttctccaataattggacgtttctgtggacaacaaaatccacctgtcataaaatccagtggaag

SEQ ID NO: 80049 - DNA, 546 bp, Homo sapiens
  sig_peptide (76)...(211): this location contains the signal peptide sequence, MLVYVWSRRSPRVRVNFFGLLTFQAPFLPWALMGFSLLLGNSILV, Run with SignalP
  misc_feature (3)...(368): similar to gi459002 in the genepept database release 114, Run with FASTXY 3.3t00, default parameters
tcttcgggggcgtccttatgatgctggctgggactcctgggcatcctgttcttcctgggccaggccctcatggccatgctggtgtacgtgtggagccgccgcagccctcgggtgagggtcaacttcttcggcctgctcactttccaggcaccgttcctgccttgggcgctcatgggcttctcgctgctgctgggcaactccatcctcgtggacctgctggggattgcggtgggccatatctactacttcctggaggacgtcttccccaaccagcctgggaggcaagaggctcctgcagacccctgggctttcctaaagctgctcctgggatgcccctgcagaagaccccaattaacctgcccctccctgaggaacagccaggaccccatctgccacccccgcagcagtgacccccacccaggggccaggcctaagaggcttctggcagcttccatcctacccatgacccctacttggggcagaaaaaacccatcctaaaggctgggcccatgcaagggcccacctgaataaacagaatgagctgca

SEQ ID NO: 80050 - DNA, 2642 bp, Homo sapiens
  sig_peptide (517)...(652): this location contains the signal peptide sequence, MKKVLLLLWKTVLCTLGGFEELQSMKAEKRSILGLPPLPEDSIKV, Run with SignalP
  misc_feature (295)...(2181): similar to gi1086830 in the genepept database release 114, Run with FASTXY 3.3t00, default parameters
gacaagaagtggactgagctggataccaaccagcaccggacccatgccatgaggctcctggatggcttggaagtcactgccagggagaagagactcaaggtggctcgagcaattctctatgttgctcaaggcacgtttggggagtgcagctcggaggcagaggtgcagtcctggatgcgctacaacatctttctcctcctggaggtgggcacgttcaatgctttggtggagcttctgaacatggaaatagacaacagtgccgcctgcagcagtgctgtgaggaagcctgccatctccctggctgacagcacagacctcagggtcctgctcaacatcatgtacctgatagtggagaccgttcatcaggagtgtgagggtgacaaggctgagtggaggaccatgcggcagaccttcagagccgagctgggctccccgctgtacaacaatgagccatttgccatcatgctgtttgggatggtgaccaaattttgcagtggtcacgcccctcactttcccatgaagaaagttctcttgctgctctggaagacagtattgtgcacgctaggcggctttgaggagctgcagagcatgaaggctgagaagcgcagcatcctgggcctccccccgcttcctgaggacagcatcaaagtgattcgcaacatgagagcagcctctccaccagcatctgcttcagacttgattgagcagcagcagaaacggggccgccgagagcacaaggctctgataaagcaggacaacctagatgccttcaacgagcgggatccctacaaggctgatgactctcgagaagaggaagaggagaatgatgatgacaacagtctggagggggagacgtttcccctggaacgggatgaagtgatgcctcccccgctacagcacccacagactgacaggctgacttgccccaaagggctcccgtgggctcccaaggtcagagagaaagacattgagatgttccttgagtccagccgcagcaaatttataggttacactctaggcagtgacacgaacacagtggtggggctgcccaggccaatccacgaaagcatcaagactctgaaacagcacaagtacacgtcgattgcagaggtccaggcacagatggaggaggaatacctccgctcccctctctcagggggagaagaagaagttgagcaagtccctgcagaaaccctctaccaaggcttgctccccagcctgcctcagtatatgattgccctcctgaagatcctgttggctgcagcacccacctcaaaagccaaaacagactcaatcaacatcctagcggacgtcttgcctgaggagatgcccaccacagtgttgcagagcatgaagctgggggtggatgtaaaccgccacaaagaggtcattgttaaggccatttctgctgtcctgctgctgctgctcaagcactttaagttgaaccatgtctaccagtttgaatacatggcccagcacctggtgtttgccaactgcattcctttgatcctaaagttcttcaatcaaaacatcatgtcctacatcactgccaagaacagcatttctgtcctggattaccctcactgcgtggtgcatgagctgccagagctgacggcggagagtttggaagcaggtgacagtaaccaattttgctggaggaacctcttttcttgtatcaatctgcttcggatcttgaacaagctgacaaagtggaagcattcaaggacaatgatgctggtggtgttcaagtcagcccccatcttgaagcgggccctaaaggtgaaacaagccatgatgcagctctatgtgctgaagctgctcaaggtacagaccaaatacttggggcggcagtggcgaaagagcaacatgaagaccatgtctgccatctaccagaaggtgcggcatcggctgaacgacgactgggcatacggcaatgatcttgatgcccggccttgggacttccaggcagaggagtgtgcccttcgtgccaacattgaacgcttcaacgcccggcgctatgaccgggcccacagcaaccctgacttcctgccagtggacaactgcctgcagagtgtcctgggccaacgggtggacctccctgaggactttcagatgaactatgacctctggttagaaagggaggtcttctccaagcccatttcctgggaagagctgctgcagtgaggctgttggttaggggactgaaatggagagaaaagatgatctgaaggtacctgtgggactgtcctagttcattgctgcagtgctcccatcccccaccaggtggcagcacagccccactgtgtcttccgcagtctgtcctgggcttgggtgagcccagcttgacctccccttggttcccagggtcctgctccgaagcagtcatctctgcctgagatccattcttcctttacttcccccaccctcctctcttggatatggttggttttggctcatttcacaatcagcccaaggctgggaaagctggaatgggatgggaacccctccgccgtgcatctgaatttcaggggtcatgctgatgcctctcgagacatacaaatccttgctttgtcagcttgcaaaggaggagagtttaggattagggccagggccagaaagtcggtatcttggttgtgctctgg

SEQ ID NO: 80051 - DNA, 2053 bp, Homo sapiens
  sig_peptide (1426)...(1291): this location contains the signal peptide sequence, MFLVAVWWRFGILSICMLCVGLVLGFLISSVTFFTPLGNLKIFHD, Run with SignalP
  misc_feature (6)...(268): similar to gi1177607 in the genepept database release 114, Run with FASTXY 3.3t00, default parameters
tttttttttttaatttctcgagacagggtctctgtcacccaagctggagtgcagtgacacaatcaaggctcactgtagcctcaatcttcagggctccagggatcctcccatctcagtctccttgggagctgggagctaggcatgttccaccatgcctggctaattttttaatttttttgtagagatggggtcttgtcatgttgcccatgtcggtctcaaactcctgggctcaagcgatactcccaccttggcttcccagtattgggattacaggtgtgagccaccatgtctggcttgcttctctttttgtattctaaaattcaaaggcctaagtatcaaatccctaaatctccaaatactgtcacagataaagactcaataataaactccctccgaaagtttagacaggctcaggtgagagacttgtttcaaggggttataaaaagaaacaccagtgctctgcagaagaatcagtttttaatttttttaatgtatctatttaatggaataagttgatcatagatttgtaaaccaaaaggtaatttctcaagtatttggaaataagaaaaagcctccctaccaccaaccttttggtcatctttctcattctcttacaatcatcctaatcccctagtacacccttaccatatatcaataagggcaccataatattatgcaaagaacagatatatatgcctgatctcttattagacttgcaccagagactgttgaaccactccaggcatgaactccaaagctgaggcacactgaccaagcccctgggcatctacagaagcaaaggcgttctctctccagctggctgctccttctggaagagccctttaatctgggttaatcggccatagagcctctctctcaatggaggaatgtggtagctagggtccagaatgtttgtcactcggcgctctctctcttgcttccataacttgtatgggtggggagggaagaacggtcgtcctctctctcttcgaatctgtaacgtaattccacttacagccagcatgccccatactgccaggataatgaagtcattagtttgaaaaggcacatttgtgaaagctctgtggaaatccttgttgagcgctctcttgagtacgttcaaagtgatgtaggaaaggcttgtggaccagtaactgtcaatggctaaaaccaccgaataggagccaatgactccacaagtcagtatgttcagtattcttaggcagcccatgaaaactactggaatgaggatagctatgcaagagaaagtgacccagaatacaccatcatcatgaaaaatctttaggtttcccagtggagtaaagaaagtcactgacgagatgaggaaccccagcactagtccaacacagagcatgcagatcgagaggattccaaatcgccaccacacagctaccaagaacattccaccgacgcttccagtgacagctgtcagaatcagattcacatcatacttgataggtgtcagtcttgtaatcagtatataaaagaagaatcccatgatgataaagcctatgaagaataattctgttttccagaatctgtgtccaaagaaacaaatgaagaaaccaagcagggcaaaaagagtgaagaacactttggaagacactcttcctagggaagcacaactaccctctcctgcctcaaagctgcaagcgtatgtgtgagcaggaatgtaggcagcagatgtatttagaaacgggtcccaaacaatgacattgtatatgacaccttgtcccgggagggaggagaaggaaacacttgtcttatcattagctgttagggtaaccaccttgagagcactggccttcacctggggcacactgaccatcctctgcagatgcttcagcaacatctcctcagtgaggtcattctcaggcagaaaatactgatagacatcatactgcaacctccacctggagtcctggtctgtcccagcgtcacatggtgggggatctacgcctctcgcatagcctagggtttgctggggcaaacttgatagtcgtttcaaagaaattatactccaagtaaatgt

SEQ ID NO: 80052 - DNA, 1763 bp, Homo sapiens
  sig_peptide (1079)...(944): this location contains the signal peptide sequence, MVTGLGNVFPLCLLELGVWDDGLRGDGFSAFRLAAMANNQFLFSG, Run with SignalP
  misc_feature (295)...(1095): similar to gi2388986 in the genepept database release 114, Run with FASTXY 3.3t00, default parameters
tacatatggaaggtctccacaccctggcaacctcctactgtgctcctgggtcattctcaagaggtcacgtctgtgtgctggtgtccatctgacttcacaaagattgctacctgttctgatgacaatacactaaaaatctggcgcttgaatagaggcttagaggagaaaccaggaggtgataaactttccacggtgggttgggcctctcagaagaaaaaagagtcaagacctggcctagtaacagtaacgagtagccagagtactcctgccaaagcccccagggtaaagtgcaatccatccaattcttccccgtcatccgcagcttgtgccccaagctgtgctggagacctcccttttccttcaaatactcctacgttctctattaaaacctctcctgccaaggcccggtctcccatcaacagaagaggctctgtctcctccgtctctcccaagccaccttcatctttcaagatgtcgattagaaactgggtgacccgaacaccttcctcatcaccacccatcactccacctgcttcggagaccaagatcatgtctccgagaaaagcccttattcctgtgagccagaagtcatcccaagcagaggcttgctctgagtctagaaatagagtaaagaggaggctagactcaagctgtctggagagtgtgaaacaaaagtgtgtgaagagttgtaactgtgtgactgagcttgatggccaagttgaaaatcttcatttggatctgtgctgccttgctggtaaccaggaagaccttagtaaggactctctaggtcctaccaaatcaagcaaaattgaaggagctggtaccagtatctcagagcctccgtctcctatcagtccgtatgcttcagaaagctgtggaacgctacctcttcctttgagaccttgtggagaagggtctgaaatggtaggcaaagagaatagttccccagagaataaaaactggttgttggccatggcagccaaacggaaggctgagaatccatctccacgaagtccgtcatcccagacacccaattccaggagacagagcggaaagacattgccaagcccggtcaccatcacgcccagctccatgaggaaaatctgcacatacttccatagaaagtcccaggaggacttctgtggtcctgaacactcaacagaattatagattctaatctgagtgagttactgagctttggtccactaaaacaagctgagctttggtccactaaaacaagatgaaaaatacaagagtgactctataactctggtctttaagaaagctgccttttcatttttagacaaaatcttttcaacgctgaaatgtacctaatctggttctactaccataatgtatatgcagcttcccgaggatgaatgctgtgtttaaatttcataaagtaaatttgtcactctagcattttgaatgaatagtcttcactttttaaattattcatcttctctataataatgacatcccagttcatggaggcaaaaaacaagtttcttgttatcctgaaactttctatgctcagtggaaagtatctgccagccacagcatgaggcctgtgaaggctgactgagaaatcctctgctgaagacccctggttctgttctgcctccaacatgtataattttatttgaaatacataatcttttcactatgcttttgtggggttttttttaagtatgtgtaaaaatgtgatgctcagataagtacatttatatcagttcagtgttaaaatgcagtctcttgagtta

SEQ ID NO: 80053 - DNA, 1861 bp, Homo sapiens
  sig_peptide (1761)...(1626): this location contains the signal peptide sequence, MGLLLLKASLLQLAAIYILSYMIAVFKEKNKRTSQQRKTIHLQSH, Run with SignalP
  misc_feature (15)...(143): similar to gi6016936 in the genepept database release 114, Run with FASTXY 3.3t00, default parameters
ccgctgctgtggcctccacgtcagggatcaacccttttctggtgaacagcctgtttgctggaatgggcctgacgagccttcagaatctccagaatctccagtcgctccagctggcaggcctcatgggcttccctccaggactggcaacagctgccaccgccggaggcgatgcgaagaaccctgctgctgtgctgcccctgatgctgccaggaatggcgggcctgcccaacgtgtttgggcttgggcgggctgttgaataaccctctgtcagctgctaactggaaacaccactactgcttctagttcaaggagaaccggaagacagcacttcaaaaggagaggagaaaggaaatgagaatgaagacgagaacaaagactctgagaaaagcacagatgctgtttcggctgctgactctgcgaatggatctgttggtgctgctactgccccggctggattgccctcaaacccgctagccttcaaccctttcctcctgtccacaatggccccgggcctcttctacccatccatgtttctacctccaggactggggggattgacgctgcctgggttcccagcattggcaggacttcagaatgccgtgggctccagcgaagaaaaggctgctgacaaggctgagggaggaccctttaaagatggagagacccttgaaggcagcgatgccgaggagagcctggataagactgcagagtcctccctcttagaagacgaaatagcacagggtgaagagctagactcacttgatgggggggatgaaatagaaaacaatgaaaatgatgaataaccagtaccagttccagttcaagtgtttaaaacttttgacaagtggtagtcctactgtttacactcacagttaatgttcatacctagttttataagctgttctgtaacatagtgtagcaaaaaaaaaagttcaagtcatgttatacaggtgtgtcaaaaggtatcttggtcattaagtattgtgcagtgcattatttattatccctaggagagatgaaatttgagaggtgatcatgtctttttaaggaaacttacataatgctctgctttttttttttctcttggtaccattggtattataataaagagcaatttgtaactgagtggcactaatggaaaaaagtgctgctcaaaggaagtatgaagttatatattaaattttttaattttaatttttaatttttttgctgtgaaggtcaagctgaaatttaccatacatatcatacttgctcatttgtttccctttttgactgtatgggggttcccacactcgtgcatacacacacatccatacactctgacaatctccacgctagtgtgaacgcctctgtcccgaggcgcagcaataataaggcagctgttgaatgtgaagggtccctttggaaaattaacctactgggagggttcttgccagacagaactacagttccattgtctcgtggtcttgtaatgcactggtaaaaacaaaataaatagatgaataaataaagagtgagagaagagagaatcaggtaccttttttaaattaaaggactttgttactttagccacaaagctaaaacagcattacctcagctctaaactagccttgaagtttacagacatgactttgtaaatgtattgtttttctttgttgtgatgtccttttatttttttctttgaaaactgctatcatgtaagataaaatgtaaattgctgccaactgtagtaatgatgcttttaataaaagtagacccatgatatgcagagatgtaattatagaatgtagtatatagggaaactggtgttcactctattttttttgtattcgcaatagatgcaaatacagcaaaaaaaaaa

SEQ ID NO: 80054 - DNA, 621 bp, Homo sapiens
  sig_peptide (176)...(41): this location contains the signal peptide sequence, MDLGYFLVILWPSVFLARSLQCVAACCLVSMENTALPQGNEHGHT, Run with SignalP
  misc_feature (166)...(369): similar to gi872127 in the genepept database release 114, Run with FASTXY 3.3t00, default parameters
ccttcattagcttccatgtcaaatgctccaggtttaggtacagtatgtccatgttcatttccttgaggcagggctgtgttttccatggacaccaggcagcaggctgcaacacactggagagaccttgccaagaatactgacggccacaggatcaccaaaaaatatcccaaatccatcccttccttttacctccgctgctatgccctgcccagtccacgccgtctttacctgcagccctgcagtggcttccagcccctctccctgatgccagtactgtcagttctccacccgcctgccagccagagagatctttttaatcacacaaattgtgtcaggtcactcccatgtcaaaaccttccaagggacttctaattgcatttagcatgaaactacaactatttatccagtctcatccttccaccctggtccccagatgtcggctctcaacacagcagccacagtgatttagatcatgtaattcccctgcctgacaccttgcgtggctcccatctcattcagagctgatgccagagccctggcggtggcctcccaaggccccacacaggccagcaatccattactctcagaccccatctgctaccattcccattcaaactcttc

SEQ ID NO: 80055 - DNA, 4283 bp, Homo sapiens
  misc_feature (1)...(4283): n = a,t,c or g
  sig_peptide (839)...(974): this location contains the signal peptide sequence, MKSENSLQLQPLVLLLWWLHLIHHLHPRVRTPQEERLKNAKIAMM, Run with SignalP
  misc_feature (3)...(2455): similar to gi5262678 in the genepept database release 114, Run with FASTXY 3.3t00, default parameters
aagaaattgcaggtgctgcagcagagaacatgttaggcagtttgctgtgcctcccaggttcagggtcagtgcttcttgacccctgcactggttctaccatatcagagacaacaagtgaagcttggagtgtagaggtattgccaagtgactcagaggccccagacctaaagcaggaggagcgtctgcaagaactggagagctgttctggactgggtagcacatctgatgatacggatgtcagggaggtcagttcccgccccagcacaccaggcctcagtgttgtgtccggcataagtgcaacctctgaggatattcccaataagattgaagacctgagatctgagtgcagctctgattttgggggtaaagattctgtcactagtccagacatggatgaaataactcacgattttctttatatacttcagccaaaacaacattttcaacacattgaagcagaagcagacatgagaatccagctgtcttctagtgcccaccagctgacctctcctccttctcagtcagagtctctgctggccatgtttgatccactgtcttcacatgaaggggcttctgctgtggtaaggccaaaggttcactatgctaggccatcgcatccaccaccagatcccccaatcctggaaggagctgtgggaggaaatgaggccaggttgccaaactttggttcccccatgttttaactcccagctgaaatggaggcattcaagcaaaggcattccttacccctgagagactagttcgaagcaggagctctgaatatagtatcttctgtccggagacccatgagtgaccccagctggaaccggcgtcccaggaaatgaagagcgagaactccctccagctgcagccattggtgctacttctttggtggctgcacctcattcatcatcttcatccccgagtaaggactcctcaagaggagagactgaagaacgcaaagatagcgatgatgagaaatcagacaggaacagaccttggtggagaaaacgttttgtttcagccatgcctaaagctcctataccatttagaaagaaagaaaaacaagaaaaagacaaagatgatctggggcctgacagattctcaacactcacagatgatcccagccctagactcagtgcacaagctcaggtggctgaggatattctggacaaatacaggaatgccattaaacggaccagccccagtgatggagcaatggcaaactatgaaagtacagaggttatgggtgatggtgaaagtgcacatgattctccccgtgacgaagcactgcagaacatctcgggctgatgatctcccagactctgcaagccaagcagccccacccgcaggatttcagctttctcttacagagatgcaaaaaagaaactgaggcttgctccttgctctggggactctgttgccttcccagtgctgaccccattcaacaaggaatggtttaccagaccacacagacccagaagacaatgaaattgtatgcttcttaaaagttcaaatagctgaagcaattaatttacaagataagaatctaatggctcaacttcaagaaacaatgcgctgtgtgtgccgttttgataataggacttgtaggaaactgctggcttcgattgctgaggactacagaaaaagagccccatatattgcttatctcactcgttgtcgacaaggactacagaccacacaggctcacctggaaaggctattgcaaagagttttgcgggacaaagaagtggccaatcgatactttaccactgtctgtgtgagattactgcttgagagcaaagaaaagaagatcagggaattcattcaagactttcagaaactcaccgcagctgacgataaaactgctcaggtagaagattttctgcagtttctttatggtgcaatggcccaggatgtcatatggcaaaacgcgagtgaagaacagcttcaagatgcacagctggccattgagcgaagcgtgatgaaccggattttcaagctcgccttctaccctaatcaagatggggacatacttcgcgaccaggttcttcatgaacatatccagagattgtctaaagtagtgactgcaaatcacagagctcttcagataccagaggtttatcttcgagaagcaccatggccatctgcacaatcagaaatcaggacaataagtgcttataaaaccccccgggacaaagtgcagtgcatcctgagaatgtgctctacgattatgaacctcctgagcctggccaatgaggactctgtccctggagcggatgactttgttcctgtgttggtgtttgtgttgataaaggcaaatccaccctgtttgctgtctactgtgcagtatatcagtagcttttatgctagctgtctgtctggagaggagtcctattggtggatgcagttcacagcagcagtagaattcattaaaaccatcgatgaccgaaagtgaccaagaccaaggcccaccaaggcagcagactgttaatcagacaaacagatctctgagaaggtgcatcagctgctttgaaggctgaagattgttttgtatgatactgcacagcatcaggcattttaaagcagatctttactaaacaggttaatgagctaacaagcaggttctctcgtctttgggctctttcctttctgagttgcatattctattttcttgtccccaagtagagactagtactacaaaaagggaccacatttttcaagtatttctaagtataaaaaacaaaacaaaaatctcttaggaaatgtctagacctccattcttggattccctttctttccttttattttaaaaaagaacagtacccctcttttaagatgctgtcttacattaatgagcatctaatggaaagaaggtatgagttgcactgaggattagaatagtggtgcgttagtggcattatctataaatacactcacctaaattgaaagctaagaaggaaatgtaaatataatatatatttatatttgatgtaatatggacatctgcagattctaataaacaaggactattgctgatagtaggctgtgacatactgtcttgtgaaatggtttccttgacaaaatttaagctgagcttaaaagcaaaaaaacaaaaagtacacagaaatatttattaaaatgtaatacagtttattgaactttctaggtatggagtttgatggacagggctgcctttaatgagtgtgaaggtcactaagtcacttagacatctcaccgtggaagtttgtgagcctgcattaggagatagactgattaccatacatgacataaaaaggaacagtggatagctcatactttatggtggttcttctcctccgaaataatatactgcagaaatcccagacagagctccttacaaacctttaattgtaatatatttttgatgattattcacattgaatgcacagaccaagaattcagtgaatgtcattttttaaaaaactaatttgtattgtctgctctagtgatacaagttttactagtgataaactattttaatcaaccatactattcttatggaaaaaaatatctattttggcaggtttctgtgcctttatttccctcttctgaaaaaaagtctgtgttttcatagtttggtttgcattgtatatcaataattaatcaggaatgggttttggtgcctgaaaaattggccatggaggcacaccaaagcttcaagcacaagtcttgtacatgggccatcactgtctggtttcacttcgtgtgtttcctaaacacatttagctgcttttttaacaaactcagccccatacttgagtcccttgttgttgggagcatttccaggcatcttttaagggaactgtgacaaacagcctcgggcagatgaacacggaggctctctgttgtctgtctctgagatctttgtgtctgggaatgcctaaagattttatttttttttctttggttttattttattttattttatttttttgagacagagtctcaccctgttgcccaggctggagtgcaatggtgcgatcttggctcactgcaacctccacctcccagttcaagtgattcccctgcctcagcctcccgagtagctagggactacaggcgcatgtcacccaagcccggctaaatttttgtatttttagtaggaaacgggggttttcaccatgttgggccagggtggatcctcaatctcctgaacctcgtggatccacccgccttngggcttcccaaagtgccgggatttacaagcgtggaaccacctgncccagccagaaattaggattttt

SEQ ID NO: 80056 - DNA, 640 bp, Homo sapiens
  sig_peptide (74)...(209): this location contains the signal peptide sequence, MIITLFVPSCLLKNKMYIWTFFFQNCFCFKMKILYLIDYLLKSIL, Run with SignalP
  misc_feature (35)...(421): similar to gi4105736 in the genepept database release 114, Run with FASTXY 3.3t00, default parameters
aattcaatcagtttttaaaaattacattgcagaaccaaacttcttaatcgcaaataaattactgaattaagccatgataattacattatttgtcccttcctgtcttttaaaaaataaaatgtacatatggacgtttttttttcaaaattgcttttgttttaaaatgaaaatactttatcttatagactatcttttaaaaagtattctaaggcaatgaaaatctaggaattccacccacacataggttcatcccctcctgtactttcattctttttagtaataccacaggaaatataaataccacagccaatcttaacctgcccctctccatttcttctttatggcctttggttcttcacttggtattacaaagtactgtgtcttttgggaaccttagttatagacaccagaaatggttttgttctaaattgccacttcacccaaagcaatagaaaccctttctggagacaaagaagtctgtgctgagacttttggccactggatgccactgttgatccagcagaggtcggcagatgagcagaggcatcttcagaaaaagtacctctcttctttgtctcagaatatcctttcacttctctacctcaaaaataccttatggctggcagagaaaagcatatat

SEQ ID NO: 80057 - DNA, 2146 bp, Homo sapiens
  sig_peptide (759)...(624): this location contains the signal peptide sequence, MFLSYNFPIFSILFFAFPYFCLPVFHFKLLSSPNCFILPLPINLS, Run with SignalP
  misc_feature (2147)...(1093): similar to gi1022918 in the genepept database release 114, Run with FASTXY 3.3t00, default parameters
cgcgggaactgttgcctgcggaccgccactgattccctgggagacccacgcgtccgcccacgcgtccgcccacgcgtccggccagcgcaggggcttctgctgagggggcaggcggagcttgaggaaaccgcagataagtttttttctctttgaaagatagagattaatacaactacttaaaaaatatagtcaataggttactaagatattgcttagcgttaagtttttaacgtaattttaatagcttaagattttaagagaaaatatgaagacttagaagagtagcatgaggaaggaaaagataaaaggtttctaaaacatgacggaggttgagatgaagcttcttcatggagtaaaaaatgtatttaaaagaaaattgagagaaaggactacagagccccgaattaataccaatagaagggcaatgcttttagattaaaatgaaggtgacttaaacagcttaaagtttagtttaaaagttgtaggtgattaaaataatttgaaggcgatcttttaaaaagagattaaaccgaaggtgattaaaagaccttgaaatccatgacgcagggagaattgcgtcatttaaagcctagttaacgcatttactaaacgcagacgaaaatggaaagattaattgggagtggtaggatgaaacaatttggagaagatagaagtttgaagtggaaaactggaagacagaagtacgggaaggcgaagaaaagaatagagaagatagggaaattataagataaaaacatacttttagaagaaaaagagataaatttaaacctggaaaagtaggaagcagaagaaaaaaagacaagcttaggagacaaaatgctaagggcaaaatgtacgaaacttagaagaaaattggaagatagaaacaagatagaaaatgaaaatattgtcaagagtttcagatagaaaatgaaaaacaagctaagacaagtattggagaagtatagaagatagaaaaatataaagccaaaaattggataaaatagcactgaaaaaatgaggaaattattggtaaccaatttattttaaaagcccatcaatttaatttctggtggtgcaaaagttagaaggtaaagcttgagaagatgagggtgtttacgtagaccagaaccaatttagaagaatacttgaagctaggaaacaaaaagctaagggcaaaatgtacaaacttagaagaaaattggaagatagaaacaagatagaaaatgaaaatattgtcaagagtttcagatagaaaatgaaaaacaagctaagacaagtattggagaagtatagaagatagaaaaatataaagccaaaaattggataaaatagcactgaaaaaatgaggaaattattggtaaccaatttattttaaaagcccatcaatttaatttctggtggtgcagaagttagaaggtaaagcttgagaagatgagggtgtttacgtagaccagaaccaatttagaagaatactggaagacagaagtacgggaaggcgaagaaaagaatagagaagatagggaaattagaagataaaaacatacttttagaagaaaaaagataaatttaaacctgaaaagtaggaagcagaagaaaaaagacaagctaggaaacaaaaagctaagggcaaaatgtacaaacttagaagaaaattggaagatagaaacaagatagaaaatgaaaatattgtcaagagtttcagatagaaaatgaaaaacaagctaagacaagtattggagaaatatagaagatagaaaaatataaagccaaaaattggataaaatagcactgaaaaaatgaggaaattattggtaaccaatttattttaaaagcccatcaatttaatttctggtggtgcagaagttagaaggtaaagcttgagaagatgagggtgtttacgtagaccagaaccaatttagaagaatacttgaagcagaagaaaaaagacaagctaggaaacaaaaagctaagggcaaaatgtacaaacttagaagaaaattggaagatagaaacaagatagaaaatgaaaatattgtcaagagtttcagatagaaaatgaaaaacaagctaagacaagtattggagaagtatagaagatagaaaaatataaagccaaaaattggataaaatagcaaaaaaaaaa

SEQ ID NO: 80058 - DNA, 1239 bp, Homo sapiens
  sig_peptide (183)...(318): this location contains the signal peptide sequence, MQGVFWVARLAGIWGTANVLMVVPQLVEECFGKAVGAVEGALGLK, Run with SignalP
  misc_feature (1207)...(850): similar to gi1589837 in the genepept database release 114, Run with FASTXY 3.3t00, default parameters
ggcacgagcagctaaccaagcagggtggtgaagcagcccattctcagacaggtcaaggacaggcctcgctgcttttgagttgttggggagggaggggctttcggtaactggccacctgcgcccaccctcacccctccgccccagctccttctgcctggtttgggtgctgccccccacccaggatgcagggagtgttctgggttgctaggctggcagggatctggggcacagcgaatgttttgatggttgtaccccagttagtggaagagtgctttgggaaggcagtgggggctgtggaaggagctctgggcttgaagtcatcagacctggcatggcgttaaagcatcttcacttccgcctggctgaccttgttcagctggtcctgggactcctgcgcatactaaatgagaggctatcccccgaaaatgctcagaggttcataaagcatcggtccattggagcagtaggctgtggcttcatgcctttagaatgagctttgggacacgtcctcaggctgtgtgtaagtgggtggagaggggctttatctttcgtctttctcctctccctcccagaggcaagcagcacccatccccccaggctccgtgccttattttgacgtttcttttctctgcatgccaagaaggttgtattcagctgtgctggtctgaggtggtgcttatcctgtgcttcattatgttaagtcgttgatggctgtctcctgggatctgaccgagaattggctctaaagctgctacagtctgcaaaacagttcctgctgatgtcgataaggggcactctttgttttgttgctcagacaggagcttatgctttttcctttcatttaacagcgggcaggggagggcccctgttatcgggcccatgaactgggatgaagctgcttccctctccctaacagtcccctgctgttctcgggtgggggccactttttgcctttgttcctcaaacacgggggatccggggtttcctttccttttaccccccgcgccgggagagggggtcacttttcacggtcccttcggactggaaaggagggaaaaaaccccctctccccctcattctccctcaagttgggaacgccgcgtcttttctaagggcccctggtgggccccggccctctcttgatacctgcctggtctagcgccttcccgggggggccgcccccccacattgggcctctgtactacgccgcttcttgcgggtgccaatcatcttgactgc

SEQ ID NO: 80059 - DNA, 366 bp, Homo sapiens
  sig_peptide (84)...(219): this location contains the signal peptide sequence, MSFSKISLVIFTLKLMYFSVKNEEVVKCNGGWEPGSSLLEWEVTD, Run with SignalP
  misc_feature (369)...(268): similar to gi862343 in the genepept database release 114, Run with FASTXY 3.3t00, default parameters
ggcacgaggtttttcaaaatggcattgtgaaatctttcaagggtttgtgaaaaataaggtataggatctctttggtgagccaaatgagtttttctaaaataagcttggtaattttcaccctaaagttgatgtattttagtgtaaaaaatgaagaggtagtgaagtgtaatggagggtgggagccaggctcctcactgttggagtgggaagttacagacgagcaaagggaggaggctagaataatccatgggtaattgattagagtgggagacatctgtataaactcatatttagcttaatatataaatagtacatgaatatttatagatgtatctgtacatgggttatatagatacgtgtatacag

SEQ ID NO: 80060 - DNA, 539 bp, Homo sapiens
  sig_peptide (14)...(149): this location contains the signal peptide sequence, MRQGLLVLALVLVLVLVLAAGSQVQEWYPRESHALNWNKFSGFWY, Run with SignalP
  misc_feature (48)...(264): similar to gi5104674 in the genepept database release 114, Run with FASTXY 3.3t00, default parameters
ggcacgagtgaagatgaggcaggggctgctggtgctggcgctggtgctggtgctggtgctagtgctggctgcagggtcccaggtgcaggagtggtaccccagggagtcccacgccctcaactggaacaagttttcagggttctggtacattctggccactgccactgatgcccagggattcttgccggccagggacaagaggaagctgggggcgtccgtggtaaaggtgaacaaagtgggccagctccgcgtgctcctcgccttcagacgataggcagaatgtttcgagcttccagagtctgaaggaattcatggacgcttgtgacattctggggctctccaaggccgccgtcatcctcccgaaagacgcgtcccgtacacacaccatcctgccatgagagccagcgtcctctgctcttccctttcgacgcgtgggcctcccagacccgaggagcgttgttccatatgtcaagtggagaccacggcttgttgagaggtgtttggtgactctaggtcattgacagtgtgaaaatcaagtg

SEQ ID NO: 80061 - DNA, 1691 bp, Homo sapiens
  sig_peptide (172)...(307): this location contains the signal peptide sequence, MLRWGFLEILFLRSWFHSWICLLPTPQLPPNGASAGSQDEGSRRR, Run with SignalP
  misc_feature (1691)...(1078): similar to gi3002527 in the genepept database release 114, Run with FASTXY 3.3t00, default parameters
ggcacgagaagccacatccggcgacgtgtggcaccccaccctggctgctacagatggggctggatgcagaagagaactccagctggtccttagggacacggcggccttggcgctgaaggccactcgctcccaccttgtcctcacggtccagttttcccaggaatcccttagatgctaagatggggattcctggaaatactgttcttgaggtcatggtttcacagctggatttgcctccttcccaccccacagttgccccccaatggggcctcggctggctcacaggatgagggttcaagaagaaggctgtccctggaggtaagagggcttatgaaccatgttccaaacctttgcgttgcttttctttccatcgtgtctatttcataacatccctgtgaggctggatgtgggaacttcagcactgccgtactcttgggaaatttgtccaaggccacccggctgagcagcggttgaaccaggacaccatcaggcatgcgtttcttgtctccaccacaccctcaacccacttcccaacgcgccttgcgacaggggctgcggtattgcatccacatgactgataaactagtaaacacacatgaattcattttaaaagtgtattcaatcagttaggtaaactaaaaaccttaagtcttcgttcgatttggaacgcagccagagaacaaatggaaaatttttcaaggtagagaagatgaaaactcagaacgccctcttgtggcatctctacccaccctaggaacactatggctcttcccctacacatggtgattgctaaccttgctacaagacgttggacacacacacacacacacacacacacacacacactgaggttccttttgccccctcacttttgagccagtgactactgaaaccctctccattgttgcaccaccagcaatgcccccatcacttcctctcatttacttccacaggctggttcatcctcaaagccctccttacgtagatctgtgggatcagtgaggctcagagaggtaaagtggccagcccaaggtcgcccagacagcaaaaggcagggccagcgctgatttcaagtccaatggcctatggcaatttcttagccaaaagcaaaatctacaaaaataaaaagtcaggcacagtggtgagtgcctacagtcccagctactgaggaggccgacgggggaggaccacttgagcttgggagttcctggctgcagagagctatgattgtgcctgtgaatagccaatgcactccagcctgagcaagatagggagaccctgtctctaaaaaatacctaaataattttaaaagtcagcctctctgactgcctatagagaatgctaactaactgaatgacagaagacctaatgtaatccaggtgcaaaatcagaactttccggccgggcgcggtggctcacacctgtaatcccaacactttgggaggcccaggcgggtggatcacgaggtcaggagttcaagaccggcctgcccaacatggcaaaaccccgtctctactaaaaatacaaaaaattagctgggcatggtggtggccacctataatctcagctactcaggaggctgaggcaggagaattgcttggacccgggaggcagaggttgcagtgagctgagatcgcgccactgcactccagcgtgggggacaaaagcgaaactctgtctcaaaaaaaaaa

SEQ ID NO: 80062 - DNA, 328 bp, Homo sapiens
  misc_feature (1)...(328): n = a,t,c or g
  sig_peptide (134)...(269): this location contains the signal peptide sequence, MFWSCTSLFLTTLLHFPTYPEPPLFTCSSCPLIFLEPDPCFLHLG, Run with SignalP
  misc_feature (36)...(272): similar to gi3257077 in the genepept database release 114, Run with FASTXY 3.3t00, default parameters
ggcacgagagactcctggggtgtatttctggtctcatgggggctgctaaagggaatgcacgaatttcatgtgttctctgcctcataacaccttgagttctgacccttctgaactctgctganaatagtgcatcatgttttggtcctgtacttctctctttctaactaccttgcttcacttccctacttatccagaaccccccctttttacgtgctcttcatgccctttaatttttttggaaccggacccatgttttctacacctaggttgtaccgtattgtaaaaatctcttctaactgcggccacctcttccttggttcaaataaac

SEQ ID NO: 80063 - DNA, 5345 bp, Homo sapiens
  sig_peptide (849)...(714): this location contains the signal peptide sequence, MLGPFSSLFLLLWSFTRFCIHFYLAPSHHCLTAALLPFSLHPLYS, Run with SignalP
  misc_feature (5329)...(5113): similar to gi3002527 in the genepept database release 114, Run with FASTXY 3.3t00, default parameters
ttttttttttttgagatggagtctcgctctgtcgcccaggctggagtgcagtggcgggatctcggctcactgcaagctccgcctcccgggttcacgccattctcctgcctcagcctcccaagtagctgggactacaggcacccgccactacgcccggctaattttttgtatttttagtagagacggggtttcaccgttttagccaggatggtctcgatctcctgacctcgtgatccgcccgcctcggcctcccaaagtgctgggattacaggcgtgagccaccgcgcccggcctcttccctcctatcattttcgtgttctggagacagtagcatacttggccctgggtttgacataaaactagttctacatatagaaagctagggacaaaaatgagttctggacaaaactaaaggactgaataatcatgtgaaacagcccaactctcccctacatatgcctaagcactgatgaagtgtttcatatattcactcacctaaatttcacaacaatcctatgaaatgctaactagcatgatccccagtttaaaggtgaggaaattgagtcacaggcagaataacttgctctgggtcaccaagctaataaatagatctgggttcaaacccaggcagcctggctccggaatcaactcttaaccacttagagcatcatcactgagatcgggagagggacaggctgctgtaaagagggtgaagcgaaaatgggaggagagcagcggttaagcaatgatgtgatggggctaaataaaaatggatacaaaaacgagtaaaagaccagagtaaaaggaaaagactggagaaggggcctaacattaaaagagaatgaggagaagggagagttgacaagcaaaggtgaaagcagaaagtcagttgtccatatggcttggggagataaagaaggcccaggaaggcctccaggaaaaggctgccatgtcaggcaggacacagaggacaattgaggaaaagtgattcttacaagatggtgaaggtgccattgtgggtgttgggctctggcacaggcacttggcggagcctctgctctgggttgagatcaatacatgacaacatctcatctccgcaggtacagagctcacatatgttggtgcttgtggaggccttgtgttcctctggtgcagttaaagccttattttgggtgtaactttcagactgcaccagtgaatcctgagcaggttctagttcagtaggtggacctgtgacttcagtcaggcttcgatgcagagtctgaacccggtctggacgaggagctgtagtcttctccaggcctgtagaatgtccagtctctgtagtgggttctggaatgatggcaagtcccaggtctggaagttgagttgatgtctcctccatggttgaagatggtttaacccctgtagtaagttgtgtagttatggtaagctccaggtccagaggttgaacggtggcttgagtcaggtgtgaatgctgagcctgacccttgtctgaaggtggaagtgtcacctcagggtgtcctggaggaggagctgtagtcatcagggctgtagaaggttcaacctctgtcatggattttggagtgatggtaaaccccaggtccaaaggttgaactgtggctcgagtcaggtgtgaatgctgagtctgaacctggtctggatgtggaagtgtcacctcaggatgctttggagaaactatagtcctcttcgggggtgtagaatgtccaacctccgtagtgggttctggagtgatggtaagtcccaggtccaaaagttgaactgtaacgctgggtgacactggatgctgagcttgatcctgacctggtgttggatttgttaccccttgatatactcgaagttggggtacaactttcttaggaggctgagttggggtctccttcatggttggagaaagttcaacctctgtcatggattctggagtgatggtaaaccccagatccaaaggttgaactgtggcttgagtcaggtgtgaatgctctggaggttgagctacaactacattagggaactctggagtctgagctggggcctcctgatgggttagggaagactcaccctcctcagcggtctgtggatgctcagctgcagcctcctgctgggttggagaggggttctcattattaataggttccggagatttgaaatgaagtctcctgttgaactgctaaaggtccagcttcttctgatgactctgaaagcagaggtgggcccccgtgctggatggcgggaggttctatatcattacctgaccctgagagccgagttgtagcctcctgctggactagagaagttcccacctctgcactaggctctgctgctatggtgagctgcacgtctggaggcttcacagagacactgggtgaatctaaatgatgagtttgatggtgacctggaggtgaaactgtgacttcatgatgttctggaggctgacctggggtctcctgctgggtcggagaagattcgacctccctagaagtctcagaaggctgaactggctgctgctgctcactgatggaaagttcatgctccataggaggaactggaggctcaattggggcctcctgttgggttgcagaaggttccacctcctctggaaactgaattggggtctcctgctgggtttgggaagattctgtctcattggtaggctctgaagttatggtaacctccacatctgcaggtttaactgtaatgttgggcaagtgataataagcttgatcctcacctggaggttgaactgacacctcatgattcggtagagttagactctccatagaggactctggaggcagagctggggcctcctgctgcattgaagaaggttcttcctcaaggagctgtggaagctgtgctggggcttcttgttggagtgaagaggactggatgtcttcaagggtctctggattttgagtttcgggctctagatggaattgagaaggtccaacttgctcagagggccctggaggctcatctgacttcacccggagttctggaggcaggctaccgggatacggtgtatctgtactggaatattcattctgcaaagtctgtttctgactctgaggtgtggataattggtgtataattccaataatctcagcaaggctccaacgctgagctggatctttcttcagcttcttgggcgaaacagggagcctttcctgtggactcagcttgtcctttaaatcctgctgtgaagccaagaactgctctggctccaggggcagctctccagctgaatcccaggtgtccaggaatggaaccaaattttcagtcgattcctggggtggggctggcatctctgaggaagcagagggccccaggtgatcaaagtcccacgggtctgctgggagagtaggcgcatggggagattcccgtgggaaatgggaggagtgggaagaccagggctcaggcggccccagggggttagaggtcagctggagcgggtccttgacccactccagaggctgagcctccttgactagtagccacaatagttgccacataaggaggggccatgggccccagaaacgcagcggggacatgacacacgctagtgccgggcactgagcggaagtcattctggcagctccgagacgctcgtgccccttgtaagcatgagtcccgccctgtctttatgacacctttatttatgccacagaactgctccatgtcaccagggcactcttatgtcacaatcccgcccaagcacgccttcccatcctgccctgccggagcacccctctcctccccttagtgaggaaggatttgggcctcagatcctggtggtcccaggactccagcgcctgctgtggtggggtagggtggggtagggtgggatgggggcgcggcagagcttcccaaggaagtcaccggacctcgcctcaggatattcagaagtgctagttcagttctggcagccttcctcctttaaggtgaaatccgagaacactcttccttccagggagagcaactgacctgcaaaatgggcgccaggatgtacattacagtcatttattccaaagtgttgccattttcgctaaactgtcgcatgtttgataattaattcaccaccctattaggtaggggctgccagggaataagcgaggactccaaattttctgtaggaggggtgttgggagttggcaattcggtctgggagagaaggttttaatccgagtgaagagccctttgcactagcctgggaggaggctgaactgtcatcctgccttgactcaacacagccattcccctagaagttacagcacttctagggtcacctgtgttcagagatctaccctgtgtgcacacatggagaagaggcttaggttgttaaagtcagcatgttaaatcatttcctgaaatgcgactgtaactagaacccagctgacttcccccacagccgttcttacctattttattactgtctggcataattaccagcatgtaaactccaagaaggtgcttcatcttattttagtgcctggcatagacatagggtgcatagtgatggctttaaaattgaaggggggccgggcgtggtggctcacgcctgtaatcccagcactttgggaggcagaggcgggcggatcacgaggtcaggagatcaagaccatcctggctaacacggtgaaaccccgtctctactaaaaatataaaaaattagccgggcctagtggcgggtgcctgtagtcccagctactcgggaggctgaggcaggagaatggcatgaaccccggaggcagagcttgcagtgagccgagattgcaccactgcactccagcctgggcgacagagcgagactccgtctcaaaaaacaaacaaacaaacaaacaaaaacagaacattctgggcacggtggctcatgcctgtagtcccagcactttgggaggccgaggctggtggatcacaaggtcaggagatcgagaccatcctggctaacacggtgaaaccccgtctctactaaaaatacaaaaaaattagccaggcgtggtggcgggcgcctgtagtcccagctactcgggaggctgaggcaggagaatggcgtgaacctgggaggcggagcttgcagtgagccgagatcacaccactgcactccagcctgggcaacagagcaagactctgtctcaaaaaaaaagaaagattatttgcagccgggcgcggtggctcacgcgggtaatcccaatactttgggaggccgaggcgggcggatcaccaggttaggagatcgagaccatcctggccaacacggtgaaaccccgtctctactaaaaaatacaaaatattagccaggcatggtggaggacgcctgtagtccgagc

SEQ ID NO: 80064 - DNA, 402 bp, Homo sapiens
  sig_peptide (135)...(270): this location contains the signal peptide sequence, MPITCFLLLRSNFGYFIFIRKNTVENLTLAMKMLNMVKFLFTDLF, Run with SignalP
  misc_feature (21)...(305): similar to gi5104917 in the genepept database release 114, Run with FASTXY 3.3t00, default parameters
agaatttttgtcgcaataagccattgggtgtgtgctgtatttatcggatatgtgaaatagaaaagaattaagaactagtaaagtagaaactattttgaagtaagttgtgaaactttcggtattctgaatgcagaatgccaattacatgttttttactcctgaggagtaactttggttactttatattcattagaaaaaatacagtggaaaatttaactttagcaatgaaaatgcttaacatggtcaaatttttgttcactgatcttttttattgaatgggtaaagccaatgtttacactgcatatgataaatgttttgctttctttgatcaaatttacattcaaagagctattataagaaacattctataaaaattccaatatgttgttaaagtagattttg

SEQ ID NO: 80065 - DNA, 449 bp, Homo sapiens
  sig_peptide (122)...(257): this location contains the signal peptide sequence, MALVLTPSLSLLELSLNCLLFIILQPLFNLQRLCTEPSQFELISQ, Run with SignalP
  misc_feature (381)...(18): similar to gi2317257 in the genepept database release 114, Run with FASTXY 3.3t00, default parameters
tttgtgattttatgcccctgtcaatgcattttctctacctcccagcttcgtgtcctctgcagatctcattagtgagttgtttactccttttctgggccctgaataaaacccctaaacaagaatggctttggtgttgaccccaagtctctcactgcttgaactatcacttaactgtcttttgtttatcattcttcagccactttttaatcttcagcgattgtgtactgaaccaagccagtttgaattaatttcccaagcaaaatttcttaaggtactgtatttaatgctttggcaaaagccaaattcataacatctgccacattcatatcagtcattcgttctgacactctttaggtaaataatagacaggtcaggtggcaaggcatcattctgctctgttcctccctaccagggtgttgattccaacagacttctttgaccctggttat

SEQ ID NO: 80066 - DNA, 1219 bp, Homo sapiens; identical to SEQ ID NO: 65897
  misc_feature (1)...(1219): n = a,t,c or g
  sig_peptide (505)...(370): this location contains the signal peptide sequence, MHPPLTPPTPLCLWLRLLKAQILSYPVPRFETHSLISRCSQVPPT, Run with SignalP
  misc_feature (1219)...(468): similar to gi2429362 in the genepept database release 114, Run with FASTXY 3.3t00, default parameters

SEQ ID NO: 80067 - DNA, 958 bp, Homo sapiens
  sig_peptide (218)...(353): this location contains the signal peptide sequence, MFGLKPVIKLYCYICYIYFLCNVYYLSFYENVLLIVKNFYSSGYL, Run with SignalP
  misc_feature (2)...(543): similar to gi1334398 in the genepept database release 114, Run with FASTXY 3.3t00, default parameters
ttttggcttggattctacgttgcctagtatcaggatcacctcccctattttcttattgttctcatttcccctatatttcattgtccatcccattatttttagtcttcttacatcactttgtttcttgtatacagtatactgttggttctagctttgtaagacaaattgaaataagctgaataggtgagtcaagcccactcatcattcatatgactgaatgtttggtttgaagcctgtcataaaattgtattgttatatttgctatatttattttctgtgcaatgtgtactatttgtcattttatgaaaatgttttactgatagttaagaatttttattctagtggttatctttgtatttatactttattctccattttcttatttaagatttactatctagtttgtcaggttttaatgcctgtaattcacacttattgcctatacagcgatcaatgattttaatctcacgtctttttgctcccattttttagttgttttatttctacctgattgcaacatataatgtttgtgtattggttttgcactcgaattcctactgttggtttagtctgaaagctactattaaatatagtaaatattgtaattttattttgctgaagtttttcagtcatctcttgttgaatgaagctcattcattagtagatcttcatgagtggctcaggggtacataattggctaagttatgcgagggaagctggccttctattatagagatttatactgacggaccgcttgactgaaaatgggttcttggttcatacttgcagtttttttggagggggatcggtcacgctctctatctagccgtgtgagaacaccacgcaaccattccaaatctgtaccccgtctggccacaccactctttggtttacctctccgcgccgcgggtaccacccattacatcgggcctgacagggggcgaacaaaagcccgttt

SEQ ID NO: 80068 - DNA, 338 bp, Homo sapiens
  sig_peptide (167)...(302): this location contains the signal peptide sequence, MRSFRVLVPSTLLLCHFLGCFIHLHVEAGSPSHPLTFHWKTLSHM, Run with SignalP
  misc_feature (12)...(229): similar to gi183229 in the genepept database release 114, Run with FASTXY 3.3t00, default parameters
gtcatgaggaaggctgtgtgctggcagccaagtttacatttgctgtggcttggaggtctgtaaataacgaggtgttagttagaatagagacaccccaaagtactatgcttgaataagatagaagtcaatttctctctggcttaagctgtcttggaggctctgctccatgaggtcattcagggtcctcgttccttctacattgttgctctgccattttctaggatgtttcattcatctgcatgttgaggctgggtcaccgtcacatccactcacattccactggaaaactcttagtcacatgggcacccttagttgcaagggaagctgggaaatttttt

SEQ ID NO: 80069 - DNA, 349 bp, Homo sapiens
  sig_peptide (34)...(169): this location contains the signal peptide sequence, MSRILSRSLSFLVCNTGTALRKGLMMLGSSWGGGPEGFRPPGDYL, Run with SignalP
  misc_feature (127)...(349): similar to gi234756 in the genepept database release 114, Run with FASTXY 3.3t00, default parameters
ggttgagggaatacatccagcgtgtgagtttggatgagtcgcatactctccaggagcctcagtttccttgtctgtaacacagggacggcgctaaggaaggggctgatgatgttgggaagttcctggggagggggccctgagggcttcaggcctcctggggattatttgcaaccctgggagaatcctggagggatggtcaagacaattttctagaaagtgaggctcccagagatttggtcactgacgcttgagccctttccttcacagataagcatcaaaattcccgccctccttccacggactaagggctatgtgtccaagaaagacacagacctgccctggaggcctt

SEQ ID NO: 80070 - DNA, 814 bp, Homo sapiens
  misc_feature (1)...(814): n = a,t,c or g
  sig_peptide (105)...(240): this location contains the signal peptide sequence, MVYLYIYLDLFQFLITVLQGFLFVFEMEFHSCRPGQSAMMQSQLA, Run with SignalP
  misc_feature (174)...(402): similar to gi3002527 in the genepept database release 114, Run with FASTXY 3.3t00, default parameters
tgtgctggaattcctagaattctgcctatcacaacagttaacattgattctgtagatcattttgagaactgacatctttaacagcagtctgccaatctatgaatatggtatatctctacatttatttagatctttttcaattcctcatcactgttttgcagggttttttgtttgtttttgagatggagtttcactcttgtcgcccaggccagagtgcaatgatgcaatctcagctcgctgcaacctctgcctcccgggttcaagtgattctcgttgtctcagccccccaagaagctgggactacaggcgcccgccaccacgtccagctaatttttgtatttttattagagatggggttttgccatgttggccaggctggtctcgaactcctgaactcaggtgatccacccacctcggcctcccaaagtgctgggattagaggtgtgaaccactgtgccccgcccattaattcacttttgacatttcagtcttttatccatttggaatgtattgtgatatgagatttgagatatgaacccacttttgtttattgccatgacacctcttatctctgtaaaggatcagatagtgaatattttaggctttgtgggccatatgatctgtgcccttgcagctagtcaactctgcccttgtattgtgaaagcagctatagttaatatgtaagtgaataactggctgtgcttcaataaaacttgatctataaaaaaatggtggtgaagcagatttggcctcccaattgtttcctcagccctgacctangcttaagaattctgttggaaattatggagagcga

SEQ ID NO: 80071 - DNA, 687 bp, Homo sapiens
  sig_peptide (149)...(284): this location contains the signal peptide sequence, MLILRSSLPLLFCHFTKICLEIYKFCLDSIVLPELEDQCLSLIME, Run with SignalP
  misc_feature (350)...(662): similar to gi804807 in the genepept database release 114, Run with FASTXY 3.3t00, default parameters
gtttttagtgtcaacaatttaaatatggcagttattttttctcagcacattggtggtattattccaacatcttttagcttcccttgctgccgttgagaagtctgttgatttcatactccgctgtaagtaatccattttttcctcgcatatgctaattttgagatcttctctgcctttattgttttgccatttcactaaaatatgtttagagatatataaattctgcttggactctattgtgcttccagaattggaagatcaatgtctttcattaattatggaacattcttggtcatggactcattgaatgaatgtttccttttctccattatttctattcttttcttctgaaacttcagtagtcatatgttagtccttttaactccatctgccttgtttcgtaacttctctctcatgttttcccatactgctttttagcatcctgagcaatattcagatccatctcctggtttactatttttatttccataaatttcactggattctttttcaattctgcctggccattttttgatggtattttgttttcagtctcattttaagtttcttccttttaaagaatattttatacataattatttatatttactatctaataatttaaatgtctgaactctgggtgtgtaatcttctctcctgctctttttcatgatggtttgttttccg

SEQ ID NO: 80072 - DNA, 2048 bp, Homo sapiens
  sig_peptide (443)...(578): this location contains the signal peptide sequence, MAILLWTPCQLALELLASAARLLASFVLVNLTGLVLLACVLAVTV, Run with SignalP
  misc_feature (127)...(1263): similar to gi30095 in the genepept database release 114, Run with FASTXY 3.3t00, default parameters
ggcctcgtgccaagcttggcacgagggcggagtcttgctttcattgctggccttgatcgaagccgtggtccggttcacatgtgggggcttgcaggccttgtgtactctgctgtatagctgctgctctggcctagagagcctaaagctcctggggcacctggcctctcatggggcactgcggagcagggagatactgcaccggggcgtcctcaatgtggtctccagtggccatgctttgctgcgccaggcctgtgacatctgtgccattgccatgagcctggtggcttatgtgatcaacagcctggtcaacatctgcctcatcggcactcagaacctcttttccctggtgctggccctgtgggatgcagtgaccgggcctctgtggaggatgacagacgtagtggctgccttcctagcccacatttccagcagtgctgtggccatggccatcctcctttggacaccctgccaactagccctggagctgctggcctcagctgcccgcctcctggccagctttgtgcttgtcaatctcactggcttggtgttgctagcttgtgtgctggcagtgacggtgactgtgttgcatccggacttcaccctgaggctggctacccaggcactcagccagctccatgcccggccatcctaccaccgtcttcgagaggatgtcatgcggctctctcgcctagcactgggctcagaggcctggcgccgagtctggagccgcagtctgcagctggcgagttggccaaaccggggaggggcacctggagctccccagggtgaccctatgagggtattctcagttaggacccggagacaggacactcttcctgaagcggggcgcaaatcagaggcagaagaggaggaggccaggaccatcagagtgacacctgtcaggggccgagagaggctcaatgaggaggagcctccaggtgggcaagacccttggaaattgctgaaggagcaagaggagcggaagaagtgtgtcatctgccaggaccagagcaagacagtgttgctcctgccctgccggcatctgtgcctgtgccaggcctgcactgaaatcctgatgcgccaccccgtctaccaccgcaattgcccgctctgccgccggggcatcctgcagaccctcaatgtctacctctgaagcctccttccctgcctgcccacccctccatgctccacgcaggcactcacgctaggacagcattaacacctcatctccgggtcctggtctgaatcccctcctacccctgtggccatcctgccatacatccaggacattgagttggaagactatgatctgggtgggggcaggataacatggcttctctttacccagtgggtcccttcgatgctgagggtggtgagtatgtcactatgcaagggccctgagactatttgctgtgggctctcctccagcctgcccagggcccacccagatgcctctggggttacccctgtctgcttctggtttttctgttggagatctataggtccttttcctgcctccttcacatttcctccccagcttttgcggccacaacacatcagtgtcatttgggtgttttggcaactcaggggccttcggatgatcttaaacctttgtgttcagccagagcccctgtgccctggtaggcgttggggttagtatctctcgggtgccctcagagccacctctgcctgtgatcgtctgatgaggctccctcccaacctgatccaaaagccagtctcaggagtttacccctgggatgggggatgcatctgcacctgactttggggccacgtgccctgtggcaccccagctcactgggagtctcaggagggataaccggatttctgctctttcccctgtcactcccacatcacacagaaaaatggcattcctctctgtctctccctggcatggagagggcagactgtgcacatttcactagggtccaaatacagaagggcccagggcccaggggcttgcagcttcgtgaggggtctctggcccagtttccaatgaataaagttctcttgacagctcaaaaaaaaaa

SEQ ID NO: 80073 - DNA, 687 bp, Homo sapiens
  misc_feature (1)...(687): n = a,t,c or g
  sig_peptide (139)...(274): this location contains the signal peptide sequence, MWLSFPKLFIPLSIFLVFLLMANSFRIFKSKNIFISLLFWNDTFA, Run with SignalP
  misc_feature (634)...(191): similar to gi2072963 in the genepept database release 114, Run with FASTXY 3.3t00, default parameters
cttccgtctgacttttgtgttattgctatcaaacattttaattttacatatgtcatcattcacacgttacattatgatttttgttttaataataatcttttaaagagatttaaagtaataaaaattacatatttacccatgtggttatcatttccaaagctcttcattcctttgtctatattccttgtgtttttgcttatggcgaattcttttaggatttttaagtcaaaaaatatctttatttcccttttgttttggaatgatacttttgctgggtgtatatttctaacttgacagtttttagtactttaaaaacattgctccactgtcttctcacctgtatttccaatgagaaatctgccggcatccttatctttgttcctttatatgtaacgcgcttttttctctctggctcttttcaagatttttctttatatcactggntttgggcgcgttggatatgatgtgccttgatatagtttcttcctttgtgcttcgggctcacttagcttcttggatacatgggtttatgactctcattagatgtggggaagttttagccattatttttctcaaatattttatttgtaccacactcttgtcttctcctttagggatcccaattacacatagcacgccctttggagatggcctacagctctttttttttgtggacccggccggcgg

SEQ ID NO: 80074 - DNA, 620 bp, Homo sapiens
  sig_peptide (244)...(379): this location contains the signal peptide sequence, MVSHCIFCNLLFSLLTVFLRLLHVDTCHLFIRFNCCKIFFCQDIL, Run with SignalP
  misc_feature (59)...(411): similar to gi501027 in the genepept database release 114, Run with FASTXY 3.3t00, default parameters
tcgaagcttcctctaagttcattctcttttatccttccccagaagaaacgtgtctgaaatatggaatgtatcattgccaaacaaaaagaatttgtgaaaacttcttagttgcataactaggaagactagagactattgactgtcatacatacttttactaaatatgagtactgttgtatttttactatttataaatattaaaattacatactattaacttgcatgtttttaaacaacatataaatggtatcacattgtattttttgcaacttgcttttttcacttctgactgtgtttttaagacttctccatgttgacacatgtcatttattcattcgttttaattgctgtaagatattcttttgtcaggatatactacaacttatatatctgttattctttctgtggacatttaaattgttttcaggttttacattaaaaataatacagcagtgagcattcttggtcatatctcttttgaacatgtgtgagcttttctgttctttacataagaggaggaatgattggaccttagagtacatcttcagtattattagggaattccaaacagctttccaaagtcgctatatgaatttacacccacactagcatcataagcc

SEQ ID NO: 80075 - DNA, 5480 bp, Homo sapiens
  sig_peptide (3804)...(3669): this location contains the signal peptide sequence, MTVLRPFRLCILFSLLLSFLSQSLEQANLTANITTILHLSSHCGN, Run with SignalP
  misc_feature (323)...(1838): similar to gi3327222 in the genepept database release 114, Run with FASTXY 3.3t00, default parameters
gtgttgggcaattccgctcgagctgaagccgacagtgtctgtgacttccctctctgttgcacttaccaaccctctttccatgtctggaatgagaaaagaaaaagagcagcattgccagagcccaggtttgtcatctcccaggcatctcagaaccagtatcctcttggagagcattcaaggaaaaagtccagaaagtgcgctgtcagaccacgtcactaagagtttcatcaagctcttagagatcgctcctgcagggcccactgctgtgcttttctgaaacatccatttattaacagagccccactattttaacatgttccaggccctagcacaaaacacagatcttaaagaacgcttacgcagaatccatgccgagtctctgctcctcgactcccccgctgtcgccaagtcgggtgacaatctggcagaggaaaactccagagatggaaaaccgagctctagttcatcagctttctaatgaaagtaggactcttccatcacttgactccctttctggagtttttttttgatgcttcagggaagttctgttatctccaagctcttcagaaaacgagatttctgatgatgactcatatgtcagtgacataagtgataatctttccttagataatctcagtaatgatttagataatgagagacagaccttggggcctgtccttgatagtggtcgggaagcgaagtcccggagaagaacgtgcctgccggcgccctgcccgagcagcagtaacatcagcctgtggaacatcctgaggaacaacatcgggaaggacctgtccaaggtggccatgccggtggagctgaacgagcccctgaacacgctgcagaggctctgcgaggagctggagtacagcgagctcctggacaaggccgcgcagattcccagccccctggaaaggatggtatatgtggcagcctttgccatatcagcgtatgcatctagctactaccgagctggaagcaagccatttaatccggttcttggagaaacatatgaatgtattcgggaggacaagggcttccagtttttttcagaacaggtcagccaccatccgcctatctctgcgtgtcatgctgagtctagaaattttgttttctggcaagatgtgagatggaaaaacaaattctggggcaaatccatggaaattgttccaattggcacaacccatgtgactctgccagtttttggggatcattttgagtggaacaaagtgacctcttgcatccataacatcttaagcgggcagaggtggattgagcactatggagagattgtcatcaagaacctgcatgatgattcctgctactgcaaagtgaattttataaaggcaaaatactggagcactaatgcccatgagattgaaggcacagtgtttgacaggagtggaaaagcggttcatcggctgtttgggaaatggcatgaaagcatctactgtggcggcggctcctcttctgcctgtgtatggagagcaaatcctatgccgaaaggctacgagcaatactatagcttcacacagtttgcgctggaattaaatgaaatggatccatcatcaaagtctttattgccacctactgacactcgatttaggccagaccagaggtttctagaggaagggaacttagaagaagctgaaatacaaaagcagaggattgaacaactgcagagagaaaggcggcgggtcttataagaaaatcatgtggagcaccagcctcggtttttcaggaaatccgacgatgactcttgggtgagcaacggcacctatttggaacttaaaaaagatcttggtttttccaaactggaccatcctgtcttatggtgaaaaagtaaagaagaaagataacattagtgtatttctcctgtgcttgccttctgaagtggcacaaacctgtgtttatatatttaaaagatactctaggatgatcacttgtgcttatcttagcattgtaactctttaagtctatattttcctcagtgcgtttctttacaatttcaaatgttaccctgattgtttatatgaatgtagaacaccttgacatttttttttatatataaactatttaataaaaatgaaagattgaatgttcatgtgtgggttaaaaaaagaagctttaacactaattttccaaaggttagggaagattccaattaaatttatgccttataaaattatgttgtagaaaaaaaatcaacctctcccaggtgcattaagaaataagaattcccagggttactcacccatgcgtaagctacccaagtttaatttggtagctgaaatatctttttgcctcagacagctcttgaattgctcatacagaacaattctgctggtgctggagtctgaagaatattttcatttgcattttagtggttagggagaggatataagattaatggaatgtatatttttatataagacgtatacggcaccttcttgaaaaggaagcatttgaacttgttcctccctatagttctattgccttatatgcaaaattgtaccctgttgctcagagaaattattcataagagaaaagaattccaattaattaaatatcacaatagcatcccagagagacagtaggaaatttctccttagtgagagctgagtccttgagaagttaagagactgtttcctgcttcccaccccaccccgttttttgtccctccgtttgatcacctccctgttgagtatggaatgtcccagtttaatataaaacatacagtttattccacacagcagtttgactttgtaaaagtttagcaaaataactgattgttttggataactcaacatgtttttccttaaatgctgttttagtattttcctacctcttaataagcacccatattttagatcttgtataaaaagttgccatctgccttatagacaaatgtagagaattgatgttcttgctttgtgttgtgttctggtaaagctttaagtgagtgtcttacccctttcctatactttcttgttatccatatcattcttttgtgagttttgcagcagtcttgaataatacagattataactactgaaaggggaaccttcgtctttttaaatgtgtcatttcacattacaataatatgtgtagtagttgaattgtgttatcaaagcatgtccaacttctgtccagatgacattaaaaccaaagcctaattgttaagcctcttattctaaagtccatagcaatgctatggaatatcaagtataatgatgtagtaaaaagatttctccagaaaacactttgagatacttaaagaaattcagagcatatcgaatgttatgaatgaagagtaaaataattacaggaaaagaatgcatgatttttcattgtcacaccaaataaccagttggacaatattgcattttcaaaatggagagttatttaaaggggatgtgtagccttctggaatctgcacgtgactggcattttaaaacaactcattaaatattggattcattttatcgagatgccaagatgaacacaatgtgaatatcatttccatttctaagcagttgaatgacacagtcagattctttggtgtatgctttgttctttccatctcaagcatttatccaaattctgctcacagacatgaggaagcaggctgtagatttaagggcactcaaggggaaaacaaatgtagtttccacagtgtgaggataaatgtagaatcgtggtaatattggctgttaaattggcctgctccagagactggctcaaaaaagaaagaagcaacgaaaacaaaatgcacagcctgaatggacgtagcactgtcatgtggcatttggaaaatctttaattatcctaatgttatttcacttgcccttatgctttattttagagtcccagggacaactggatgaaacattacgtctgtagtcatcttatttgagatgggggtgggaacgaattaaaatatgatagagaactatatgcagattttaaaatctagtcagtactagcatctataaagggcttttctgaaatttaaacagcttggtgatgcatcctgatattataagcttaaaactatcttgagggggaaatgacttcttttctccttctgtcccttttctcaaaagcatctttcccccaaatgtatgtctctaggacattttatagttttaagaggaagaaaacagaaacgtggcatcatttgggaagaaccaaggtagaatttaattttctggactttaaatctcctgggtaaataatgctaatcactgtaccatttgagttacatgttttaacctcttttttttttctaattattccatccaaaatttctggggaattacacagaaatttttggaaatgggactttgtgcaggtaaccaccctgcacttcaggtaatgttcctgtcacagctgtcgactaccccacgctgcaggaaatccattcaaaaatgagctaacagtctccagtgtagcaggagagccagtcacttccctccccaggccccaaagcacccccaaggctggtattccttgagtcataggtattaataataaaagcctcaatgcagcttctccatgtagttcctctcctacaagccaggtggattctggtcctaactaaagagatgggagttcacctgagggcaagaagtacccaggatgcccaaacagccgcacaggtgtcctgtgcttcctgtgagacttcctgggggaaatatacaaactaatatattttttaatgtttacgtcatttacactgctgcttttctcatattctgcttttaattacttgtagtaaatcatttgtttgggcttcaagcactgtcttccatctgcatcttccagatttatcatgagtgatcttgttctactgttaaagatgtcaagcctaaaaagtaataaagtttttatttggctgttgaaccttgatgtagcccctactacatacactacaagttatgccttctggctactacagaatctccgcagaccttttagttatgagtagaagcaataagaaggtgtccttatggtcttaggaataatagttccaatgtattggcataatttgtttgaatgtctttattttgatattaacaccggcataaatctatttttgctaccagatgatagctattttcatttgctctattttcctctgcattgtactaatctgttactcagtgttagtcttcatttttctgtgttggaaaccttgcgtcatgtaaatatctgcaaatcatgacagtctaaagtgcaaaccatttttcaaagactttggggaatgcagtgatcagaagtggctaatttattttatttctgattattttatccagagggtacttttttaatggatatttgtaaatcttccacttaaccactgaaaattattttgttttaatcccacccttccatccatacctctgcctccccaaaaagctcctattaatttgcttatccccctcatgtagctagttgaatgtgaataaataacatgg

SEQ ID NO: 80076 - DNA, 657 bp, Homo sapiens
  misc_feature (1)...(657): n = a,t,c or g
  sig_peptide (567)...(432): this location contains the signal peptide sequence, MMSATSSPLILTVXPAXRRIMLLGTVRLLVAPANLLIIAFLPNHS, Run with SignalP
  misc_feature (623)...(158): similar to gi5051000 in the genepept database release 114, Run with FASTXY 3.3t00, default parameters
tctgtttctatttattttaataacatttcaaacttgtaatattattgttctcatgcttattctgggtcgttggctcagaggtttaaaagctcttaaactacccaaatttacaagtcctatgacatcctcattcagaaaacattcaaatgatggtttcataatgttatgatagttccatcttctaagagtttttgatctggagcatatgtttcaaattctatgtttgtactactgctaaattcacttaattagaagaagtaaaatcattctatcgagactcaagaatgagtttgttctgtttatgttaacgattccaggcttttgatggtaggaatggctttagcagtcttctgtggcacaccattatcttaaataatattgtcaccttccccactgtcttcatcctttggctcaaagtttggttcaatctgctgtggttaggcaagaaggctattatcagcagattggctggagctaccagaagtctgactgttcccagtaacattattctcctggntgctggnctcactgttaggatgagggggctgctggttgcactcatcatgtctggttacttgattgagaagcttcccctgaacttatgtaccatcaacttctaaaaaccttcatcattaacaggttcatagttctgtgcta

SEQ ID NO: 80077 - DNA, 385 bp, Homo sapiens
  sig_peptide (99)...(234): this location contains the signal peptide sequence, MWLLCLMTKFVFRGVWAAHRENDWLGGLGQAINFLAVHWDQPLLP, Run with SignalP
  misc_feature (385)...(211): similar to gi2996181 in the genepept database release 114, Run with FASTXY 3.3t00, default parameters
catagtatctgccaaagcaaactggcatacagatgctgggtgtttgctggaggcaaagggaccagcagggtgaggggcacctggaggctgtgcctgccatgtggttgctctgcctcatgaccaagtttgtgttcagaggagtgtgggctgcacacagagagaatgattggctgggaggcctcggccaagccatcaatttcctggctgtacactgggaccaaccactgctgcctcccatggtagccactgtgtaagcactagtccccttccctttccctctgcccactggggattcctggctgcagcctgagaaatgagtcctagcctccgtcacttggctctcctgtgtcaaggcaccttggagacaagtccgtcgacgcggccg

SEQ ID NO: 80078 - DNA, 357 bp, Homo sapiens
  sig_peptide (171)...(306): this location contains the signal peptide sequence, MVYFARILFLIQVLFIVNGFFKIVIIIPFYNNLLENYKNFLFNII, Run with SignalP
  misc_feature (25)...(321): similar to gi5832878 in the genepept database release 114, Run with FASTXY 3.3t00, default parameters
gatttttaaattatcttatggaatcattttaattagtatcactttttcatatttaaattgcataacgattttatttatcagtttttacatagattttactaattatcacttcctgtaactgtcagttttcattttatgcctattgccaaatccaattttccatttagccaatggtttattttgcgcgaatattattcttgatacaagtacttttcattgtgaatggattttttaagatagtaattattattcctttttacaataatctgttggaaaattataagaatttcctctttaatattatatttaccctgttatctgagattggtctgttatggaaattggcaaacatttttt

SEQ ID NO: 80079 - DNA, 619 bp, Homo sapiens
  sig_peptide (68)...(203): this location contains the signal peptide sequence, MQPCVQRLSRVFGILASLYASISIFCSMITSSQMLARRSVWRETL, Run with SignalP
  misc_feature (333)...(147): similar to gi5788109 in the genepept database release 114, Run with FASTXY 3.3t00, default parameters
agaatttattcttcatctccaaggtgggatccttgggaagacacagggcctggaggtcgtggaactaatgcagccttgtgtacaacgcctttccagggtctttggtatcttggcatctttatatgcttccattagcatattttgcagtatgataacatcttcacagatgttagccaggaggtctgtttggagagaaactttatgttcccctattcccacatatccacagaatcagaaactttggccaactctttcttcttctcaagggcatgccttcttcctctcttttatctcttgcttgctccttctcatgggaagaggagcaacttgtctcattggttagagtctggcaatcatttggtccctctttgttggacaagagttaatgtgtataacagactcctgctccaaaaagacaacatggggcttatcccttttcttttgctttctttgatcacctagttcaggcagggtgggccttccttctgctcaccattacagtaagcagattaggatggaattgcctctgataaacccagacaggcctttctttcaacttctctttgagggcacttttcccctgggatttagataacattaatttactcggtgaggcgcc

SEQ ID NO: 80080 - DNA, 1080 bp, Homo sapiens
  sig_peptide (301)...(436): this location contains the signal peptide sequence, MLILVYLLCVSFTSTVVLHPGSGNWFETLYFTVLGPNLTLSSQKY, Run with SignalP
  misc_feature (86)...(531): similar to gi3880235 in the genepept database release 114, Run with FASTXY 3.3t00, default parameters
atgagccactgtgctggcccatttctgtctatcttaaaacacttcaaaacccttcctctgatgaagtaattgactttcatgtcagaaggcaagacttcttttgtgcttttggcaatttttgatggtaagatttgtgagctggttgtttagctattgtttgtcagctccaaacctgcccttctattctctttatgttactagtgtgggactggacaaactacatttctttttttttcagctactcccttctaccagtacaaggtgcttagataatggaagtcaaaaaataggagaaggtacatgctcattcttgtttacttattgtgtgttagtttcacttctacggtggttcttcaccctggcagtggcaattggtttgagactctgtattttactgtccttggacccaaccttaccttgtcctctcagaaataccagcaccagctagtcttcatgacagtgtctctaaaactcacctttacacatcagaaacagaaaaataacttttgttttgctcaaacacctatacttttatacatctataatggagaaattgaaagcatctataatggagaaattgaaagcattgctatggctaaccctctaggaagcccttttttcttacccctgcaagaaaggggtatatgttttattcccttccccatggctacctcctactggttccgctgccaattttctcccatgacctataggcaaaccattactatctatccttccggtctagagtaacccacccgtcaatctctcttttcatcttaggtccactcacggatctccccgctctgcgggcaactttgttcgcccttagctccttcgtcgcacgatgttcacagtcactttaaataatcaactccgacgcgtgccactcctccatcaccggcgcctagatctcactctctattctcccgtcgtccacccccctccatcccgctctgacccccagccgccctgcactgcacgccctctgtcctgtcccacacacacctcctactgtaacttatggtttttctggactctactctagctttctctccccctctccttcttgtcgcgcgcgct

SEQ ID NO: 80081 - DNA, 3101 bp, Homo sapiens
  misc_feature (1)...(3101): n = a,t,c or g
  sig_peptide (1654)...(1789): this location contains the signal peptide sequence, MWGWEALFLFCSCSSFSLAGRPLLLHSGPVGAAVAGALLLLSAQG, Run with SignalP
  misc_feature (12)...(1022): similar to gi2654005 in the genepept database release 114, Run with FASTXY 3.3t00, default parameters
cactgcggtgtaattccctcgtggggaatctgagcggaatcgagaaggagcagctggacgctcaacgggttggggtagccgcggccgtggccttcgggagcggggcgttgatgctggggatgttcgtgctgcagctcggcgtcttgtccacctttttgtccgagcctgtggtcaaggcgctgaccagcggggccgcgctgcacgtgctcttgtcccagctgccgagcctcttggggttgtccctcccgcgccagatcggctgcttctctctcttcaagacgctggcctccttgctgactgcgctgcctcggagcagtccggccgaactgaccatctccgcgctcagcctggcgctgctcgtgccggtcaaggaattgaacgtgagattccgagaccggctacccacgccgatcccgggggaagtcgtcttggtgcttctggcctccgtgctctgcttcacctcttctgtggacacaagataccaagtccagatagtggggctgttgcctggagggtaagagaatgaaaagatgccagctttctcttctcccacctctcccacccaacactccctcttatctccaccccccattttctctgccttccttatctcactgaagcacctaacccctcctcaccatggatccctccctctccagatttccccaacccctcctccccaacctggctgagctgcccaggattctggctgactcgctgcccattgcactggttagttttgcggtgtctgcctccctggcctccatccatgcagacaagtatagctacactattgactccaaccaggtgggactctgactgtggaccccaaccctctcatttgacttcccaccatgcctttgtctctcccacttcatctcactgtatccctccaggagttcctggcacatggtgcctccaacctcatctcctccctcttctcttgctttcccaactcggctacgctggccaccaccaatctactggtggatgctggtgggaaaacacaggtaagagggcatccttggatgaggagaaaggatgggccatccaggcaaggtggcggtggtggagaaacaggtggaagatggctagaatcccaggtggcacctatatagagaagactggggatctgtgagaaagggtgactgaggggatggaattatagataggagagatggaagataacaatgttccagtaagacctttgtaggctctaagcgctgaaaaagtttatggtgccccaggtgtggttcaaaataaaaacacaaaactataaaataaacttaagagataaaattcttatttttttcacacaatgacattgtcttttaaaaggaatatcacatatcaaagtctccccctaatatttttggtttcccgtactttgctggtgccctaaacacatataccctgcttatagggtaacccaacagtggcttttaaggtggaggtgggctacaaaactggggaacttgaacaatggacatctacaaggagactggtgaataatgggcatttaattaattggggggagcgggagggttagatgtgaatggcagaatattaagaagggggttgtgtggaaggagatttgggagaagggagacttccgaggaagattaggcagagtgggcaggaagaccagctctcatgtgggggtgggaggctctcttccttttttgctcctgttcctccttttctctagctggcaggcctcttctcctgcacagtggtcctgtcggtgctgctgtggctggggcccttcttttactatctgcccaaggtaaggagcagaggaggcatgagcatggctgggaggggtagctgtattccaggacatcgaggtagtcagcccacctcctctgcctcaaggctgtcctggcttgcatcaacatctccagcatgcgccaggtgttctgccagatgcaggaacttccacaactatggcacatcagccgagtggactttgtgagaaatgccattacccccagattgccccctctcatcttgttagcatccccagcctctgccctgaaccaaacctaattgtcctggtcttaagttctgcaacccacccactcccccagcaaacataactcctagtatgctttactcacaggcaagggaaaggatggggtttgaacccctttggcctgaatatttgtaacttcccaactggtgcgggtcattacatttggtgtgtgtcccattgaatcaaccctgttgtttccttctgtcatgctttccacttcttcctggatcatctctccccatcacttgccttggtagtcactgccctggatctctttacccagcagtgatggcctggcttttcttttgggcaatccacccctatccctatcctgcaggctgtgtggatggacacctgggtggcagtagtgaccctgagtgtggatttgggcctggctgtgggtgtggtcttctccatgatgactgtggtctgccgcacccggagctcctccaggtcccggggctctgcatcctgagctatccaacaccactgtactttgggacccgtgggcagtttcgctgcaacctggagtggcacctggggctcggagaaggagaaaaggagacttcaaagccagatggcccaatggttgcagttgctgagcctgtcagggtggtggtcctagacttcagtggtgtcacctttgcagatgctgctggggccagagaagtggtgcagctggccaaccgatgtccgagattgctaaggatccgcctcctccttggctcaattgtnaatgccttggtgcaggggacactgacccgggtaggactcctggacagggtgactccagatcagctgtttgtgagtgtgcaggatgcagctgcttatgccctggggagcctggtaaggggcagtagccccaggagcgggaaccaggaggcactgggttgcggcaagtgaggcaggggagctcactgacccaaagatttgcaccgtgtgggtttgacctcatcatgtggagtgcagagggccctgatgacatgtgtgtgatgaggaccatgacccttgaacccccttacctaacgtaactaataaaatgaagctgagagctttggaatccatg

SEQ ID NO: 80082 - DNA, 788 bp, Homo sapiens
  sig_peptide (194)...(329): this location contains the signal peptide sequence, MLFIQYLLPCLLLSAELSGTFFLYNTCHLHVPCCHSLVPTGPPSL, Run with SignalP
  misc_feature (789)...(618): similar to gi1783381 in the genepept database release 114, Run with FASTXY 3.3t00, default parameters
acaccgcggtggaataaccattagttgctatcctgccttcttctctcagctgagctgtctgaaacatgctaacatgcttatacaatacttgctgtcctgccttctgctctcagctgagctctctgaaacatgctaacatgcttatacaatacttgctgtcctgccttctcctctcagctgagctctctggaacatgctttttatacaatacttgctgccctgccttcttctctcagctgagctctctggaacattctttttatacaatacttgccatctgcatgtcccatgttgccactccttggttcccacaggccctccgtcattgagttcacattttcagtctcgtggtctctgtgctccctgtgcctccatagcagattctgggatagcagattctgggggcaacaatctcaatttcgttggtgctggaggagtggcctcagggcatctgctgtcacctctgctggggccccagtccagcccgtgccctcactgtccccgcggtggccgcctgccttcccagcctcttcccctctgcagtgcgcgctcttgggcgcaagaagccttgagacttccctcctccgcacagctgtgcccgtgccatccccttccacgaggcctgggccccgtctcaccctctggactgctggccaacatctcgtacaggcacaattggctgctgggctcctggccgggttggctcatttggggggggaaaaaccgggggggtttaaattcatttttggcctaattccgagccagggaggttgacttcagggagaaca

SEQ ID NO: 80083 - DNA, 1587 bp, Homo sapiens
  misc_feature (1)...(1587): n = a,t,c or g
  sig_peptide (252)...(117): this location contains the signal peptide sequence, MADHRLQLLAVLQLLLVLERSPAHGGPHVLPPRSHLPGQESSLST, Run with SignalP
  misc_feature (33)...(826): similar to gi1617319 in the genepept database release 114, Run with FASTXY 3.3t00, default parameters
ggaaaagaaaaacctcgagaccattagganancctgatgtccctagtccatgcggtggaattccgaggagcagctgtgctgcggctgtgctcggccttagtggtgtcggggtctagtggacagagaagactcttggccaggcagatggcttctcggtggcagaacatggggacctccgtgcgccggagatctctccagcaccaggagcagctggaggacagcaaggagctgcagcctgtggtcagccatcaggagacctctgtaggggccctggggtccctgtgcagacagttccaaaggaggctgcccctgagagccgtcaacctcaacctccgcgcagggccctcctggaaacgcctggaaaccccagagccaggtcagcagggcctccaggctgcagctcgctcagctaagagtgctttgggtgccgtgtcccagagaatccaggagtcctgccaaagtggcaccaagtggctggtggagacccaggtgaaggccaggaggcggaagagaggagcacagaagggcagtggatccccaactcacagcctgagccagaagagcacccggctgtctggagccgcccctgcccactcagccgcagacccctgggagaaggagcatcaccgcctctctgtccggatgggctcacatgcccacccattacggcgatcaaggcgggaggctgccttccggagcccctactcctcaacagagcccctctgctctcccagcgagtctgacagtgacctagagcctgtgggggcgggaattcagcatctccagaagctgtcccaagagctagatgaagccattatggcggaagagagtggtgacatcgtctctctcattcatgactgaggaagtgcctgcaggaaacaagccctgtctgaccgccaaggcttcatactcaaggatgtctatgcttccccgtgagcttcctggaaaaaacccccgggagtcgtcagtacccctgggccactgctaacaagcacctaacaaggggcccagagccccctgctccagccacatctggacccatcagtgactgcctgccatagcctgagagtgtcttggggagaccttgcagagggggagaattgttccttctgctttcctaggggactcttgagcttagaaactcatcgtacacttgaccttgagccttctatttgcctcatctataacatgaagtgctagcatcagatatttgagagctcttagctctgtacccgggtgcctggtttttggggagtcatccgcagagtcactcacccactgtgtttctggtgccaaggctcttgagggccccactctcatccctcctttccctaccagggactcggaggaaggcataggagatatttccaggcttacgaccctgggctcacgggtacctatttatatgctcagtgcagagcactgtggatgtgccaggaggggtagccctgttcaagagcaatttctgccctttgtaaattatttaagaaacctgctttgtcattttattagaaagaaaccagcgtgtgactttcctagataacactgctttctcataataaagactatttgcatttgaaaaaaaaa

SEQ ID NO: 80084 - DNA, 758 bp, Homo sapiens
  misc_feature (1)...(758): n = a,t,c or g
  sig_peptide (371)...(506): this location contains the signal peptide sequence, MLSFLVVFQLVLLRFSGRHSHHQLITITFPLFQWLYFFFFMFFCT, Run with SignalP
  misc_feature (6)...(266): similar to gi56590 in the genepept database release 114, Run with FASTXY 3.3t00, default parameters
tttgagacccaggaagcccacttggagacatttatccaggacaaaagaaagcacatatccacaaagacttgaatatgcatgtttatagcagttttgttcataagagtcccaagctggaaataactcaaatgtctaacaacagatgaacaaataaactggaaaaggcatacgatggaacccttctcagcaatcaacaagagaaacaatcactgcaggtatacacagctgcatggatgaatctcaagaacattacacggagcgaggaagccagacagagggctacgtactgcaggattccagagatatgaaatcccaggacgggaaaaactcgcccaagtgacagaaagcagatcggcggttgcctaactccatgctctcatttctggttgttttccagttggttctcttaaggttttcaggaagacattcacatcatcagctaataacaattacttttcctcttttccaatggctgtattttttctttttcatgtttttttgcactggctggaaattttaggacaatatgagatgacagtggtgagagtgtgtaggtttgtcgtgactgtggcctttggctgctgcctatattcatctagactccaggccagcagctcgccagctcnaccgtgccgctcatgtccaggccgtggtccttggagtggtcactgctgcgagggaaggagcccccaacagctcccgtgaacctgaccctggagagggaggctgtgctctaaacccctctcctgcggcacgag

SEQ ID NO: 80085 - DNA, 2709 bp, Homo sapiens
  sig_peptide (1888)...(2023): this location contains the signal peptide sequence, MGRYRCASLLFCFLLLFFFFWLWVRDIFKLAQKGRGWSLDPHVSI, Run with SignalP
  misc_feature (88)...(749): similar to gi1181245 in the genepept database release 114, Run with FASTXY 3.3t00, default parameters
tttccattgccactgcagaatgaagccagtgcacatggtattagtcatcagccagaacttcctgttctgtgggtctggggtcaccagctgagatgtcacctgctttatttctggctttggcctgtggtctgtgatacccatcctccttgatgttctgcagaatggcacttgactgctgggcatgcatgaagttaagggcaagaaacagtatgccatgtgttctgtaccatcatgtgtctcttcttccttctgggcccttctactggtgaactttcatcaagatctgcgccatgccgtgtcactatcaagccattaagttttgtctgggttgctgtcagccccagttggcttcctggtcaacaaggacctcaagaactgcctgtggaccgaggccccctaccagtgcatgagacacacacctaccctccccagctttccaggaaccctactggctgccagactgatgggcgggctggtatgtgtggacatgtgttcactgtcattatgctgtggctccaggtgagggtgaggactgggcctatatagaatccagataccattgtcaacttcccttattcccgtctaagatgtgagcagagtgccatagtaggggttctgggaagaggtatttctgatttgtgggcctctgcttgcttgacttcaggtcacttatacttcttattttgcttgcctgccttcatccctcatttcctccctctcattcttctttcctccctccctttcctggtagcctcctttcctccccttctgccttccccttccttctttccttattcttttttattttgtttaaatagtaccacagagaaaacaactgaaaaaccacatttttctacatacagctggggaggtagctgagaacttggcactgcgcacacatactaggttgaaagagagttgaggaaaccagaaggccaagtggatctgctggcaaaccctgaacctgtctcctgcgcttgctctacagttctgaagttgaaaatccttttcatgcctagcatctgcttgagttataaaccccaaggcagccatgtcatagactagtgtttactcttgttttgactttgttttaatgcttcctaagacccaagtggcctcctgctgtttcctcctttgtggtagcctctggccatctgggacctcaatccccagcttttccacttttcagcagtcctttggctctttttggcttcttaccttcaaattaggccccaggagtgggctttagtcttccaatatggagcatctcaagcttctcctgggggatggggattgggatgggcagaatctgttttggatctccgggttatttccagtgggtgtaaaagcagagctgggcctttccctctcttatccctgagggtgggtaagaaggactgtatctacacctgttcttccctaccttctcttttgttagggaggcctcattctaagttcctcaagagagtccttggcttaaagctgtagcaagggtgtgctaggtgggggatttggagcaaaaccgtcgagtaggcatgatactggtatggagtgggcctgcaaaatcagacagaaatggcttgagaagccgcagggggagcatgcctgtctctcagtgatagagtatgggagggacctccctagcttggaaaatgagaattgaaggggttatgaacaaataggatgcctagttgaggatgttcccaaagttttgtccaatcttatcattagtagattttataagccacagagacaaaccagaaacggaataatgttactttggatgctttatttttttgttctaggtgtggctttgtacatgcagaagaatgctatatgctgcacattttgcctttaaagtcttacgactttccccattttagtctaatgggaagatacagatgtgcaagtctgcttttttgttttttgttattatttttttttttttggctctgggttagggacattttcaaacttgcccaaaaggggagaggatggtccttggacccccatgtgtccatcacctagctgcatcacttatcagctatggtcaacctggtttcatctgtatctcttttttttcacctgtattgtttattgaaaatccaagacactatgccaatgcaaccgtgactactttgggagattggtagtctcttttgatggtgatagtgatggggtgcactatcataatcacatcaaggtctgctttttgcttttaatgttaactaatgaagttcccagagatgggcccttaagaaaatgtgtttttaaggaattaacaaaggagtctccaaaaaggaaatggagaggggatgcttccctttccccttgccatctaccaaaaccaggagagagactgttctgttgtaaaactctttcaaaaattctgatatggtaaggtacttgagacccttcaccagaatgtcaatctttttttctgtgtaacatggaaacttgtgtgaccattagcattgttatcagcttgtactggtctcataactctggttttggaagaataatttggaaattgttgctgtgttctgtgaaaataacctccccaaaataattagtaactggttgttctacttggtaatttgacaccctgttaataacgcaattatttctgtgttcttaaacagtataaatagttgtaagtttgcatgcatgatggaaaaataaaaacctgtatctctgttaaaaaaaaaa

SEQ ID NO: 80086 - DNA, 385 bp, Homo sapiens
  sig_peptide (130)...(265): this location contains the signal peptide sequence, MLTCCVNAVCVCGVCMWGHWYTRPLCMSQLCRSVATCRLSVYSPG, Run with SignalP
  misc_feature (4)...(8): similar to gi4336604 in the genepept database release 114, Run with FASTXY 3.3t00, default parameters
gcagtagatgatgggatgggagataccttggcaggttgttcctgaatccagccaatactccccactgtgttgtatgaatgagacatgggtgtgtacgaacattaactgaaaactctggacattctgcatatgctgacctgctgtgtgaatgctgtatgtgtgtgtggagtttgtatgtggggacactggtatacccggcctttatgcatgagccaactatgtcggagtgtggctacatgcaggttgagtgtatacagtccaggtgtgtgtagtccatgtgtacgcgggcacacagatgccacggtgcatgctgcggccctctcctggcacccctacctgcctcagccaacttctctggccggtgcttggcttgtaagacagtggc

SEQ ID NO: 80087 - DNA, 1327 bp, Homo sapiens
  misc_feature (1)...(1327): n = a,t,c or g
  sig_peptide (1256)...(1121): this location contains the signal peptide sequence, MATGLLAFLGLAAGGQTLCPAGELPGHARAQASGAPGSVLIAVPG, Run with SignalP
  misc_feature (163)...(1239): similar to gi3165522 in the genepept database release 114, Run with FASTXY 3.3t00, default parameters
aaggcgcccatgaaaaatgatgactcttagncagngcggtggaattcgcacctcaatgaatgtgtactcgctgagtgtggaccctaacacctggcagactctgctccatgagaggcacctgcggcagccagaacacaaagtcctgcagcagctgcgcagccgcggggacaacgtgtacgtggtgactgaggtgctgcagacacagaaggaggtggaagtcacgcgcacccacaagcgggagggctcgggccggttttccctgcccggagccacgtgcttgcagggtgagggccagggccatctgagccagaagaagacggtcaccatcccctcaggcagcaccctcgcattccgggtggcccagctggttattgactctgacttggacgtccttctcttcccggataagaagcagaggaccttccagccacccgcgacaggccacaagcgttccacgagcgaaggcgcctggccacagctgccctctggcctctccatgatgaggtgcctccacaacttcctgacagatggggtccctgcggagggggcgttcactgaagacttccagggcctacgggcagaggtggagaccatctccaaggaactggagcttttggacagagagctgtgccagctggctgctggagggcctggagggggtgctgcgggaccagctggccctgcgagccttggaggaggcgctggagcagggccagagccttgggccggtggagcccctggacggtccagcaggtgctgtcctggagtgcctggtgttgtcctccggaatgctggtgccggaactcgctatccctgttgtctacctgctgggggcactgaccatgctgagtgaaacgcagcacaagctgctggcggaggcgctggagtcgcagaccctgttggggccgctcgagctggtgggcagcctcttggagcagagtgccccgtggcaggagcgcagcaccatgtccctgccccccgggctcctggggaacagctggggcgaaggagcaccggcctgggtcttgctggacgagtgtggcctagagctgggggaggacactccccacgtgtgctgggagccgcaggcccagggccgcatgtgtgcactctacgcctccctggcactgctatcaggactgagccaggagccccactagcctgtgcccgggcatggcctggcagctctccagcagggcagagtgtttgcccaccagctgctagccctaggaaggccaggagcccagtagccatgtggccagtctaccatggggcccaggagttggggaaacacaataaaggtggcatacgaaggaaaaaaaaaaaa

SEQ ID NO: 80088 - DNA, 1463 bp, Homo sapiens
  sig_peptide (126)...(261): this location contains the signal peptide sequence, MSLWNQLVVPVLFMVFWLVLFALQIYSYFSTRDQPASRERLLFLF, Run with SignalP
  misc_feature (3)...(1199): similar to gi3395787 in the genepept database release 114, Run with FASTXY 3.3t00, default parameters
tatttaatattttacttctgatttgactcaagtgtttaaagtgtttattgatggtgatgcaagaagttttcctatcttacgtttttatttaggtagtggaggtatatggccttctcgccttgggaatgtccctgtggaatcaactggtagtccctgttcttttcatggttttctggctcgtcttatttgctcttcagatttactcctatttcagtactcgagatcagcctgcatcacgtgagaggcttcttttcctttttctgacaagtattgcggaatgctgcagcactccttactctcttttgggtttggtcttcacggtttcttttgttgccttgggtgttctcacactctgcaagttttacttgcagggttatcgagctttcatgaatgatcctgccatgaatcggggcatgacagaaggagtaacgctgttaatcctggcagtgcagactgggctgatagaactgcaggttgttcatcgggcattcttgctcagtattatccttttcattgtcgtagcttctatcctacagtctatgttagaaattgcagatcctattgttttggcactgggagcatctagagacaagagcttgtggaaacacttccgtgctgtaagcctttgtttatttttattggtattccctgcttatatggcttatatgatttgccagtttttccacatggatttttggcttcttatcattatttccagcagcattcttacctctcttcaggttctgggaacactttttatttatgtcttatttatggttgaggaattcagaaaagagccagtggaaaacatggatgatgtcatctactatgtgaatggcacttaccgcctgctggagtttcttgtggccctctgtgtggtggcctatggcgtctcagagaccatctttggagaatggacagtgatgggctcaatgatcatcttcattcattcctactataacgtgtggcttcgggcccagctggggtggaagagctttcttctccgcagggatgctgtgaataagattaaatcgttacccattgctacgaaagagcagcttgagaaacacaatgatatttgtgccatctgttatcaggacatgaaatctgctgtgatcacgccttgcagtcattttttccatgcaggctgtcttaagaaatggctgtatgtccaggagacctgccctctgtgccactgccatctgaaaaactcctcccagcttccaggattaggaactgagccagttctacagcctcatgctggagctgagcaaaacgtcatgtttcaggaaggtactgaacccccaggccaggagcatactccagggaccaggatacaggaaggttccagggacaataatgagtacattgccagacgaccagataaccaggaaggggcttttgaccccaaagaatatcctcacagtgcgaaagatgaagcacatcctgttgaatcagcctag

SEQ ID NO: 80089 - DNA, 761 bp, Homo sapiens
  sig_peptide (31)...(166): this location contains the signal peptide sequence, MVLPLPWLSRYHFLRLLLPSWSLAPQGSHGCCSQNPKASMEEQTN, Run with SignalP
  misc_feature (364)...(104): similar to gi2583019 in the genepept database release 114, Run with FASTXY 3.3t00, default parameters
ctcacacagctcccggccaggacacccgccatggtcctccctctgccctggctctctcggtaccatttccttcgcctccttctgccctcctggtccttggcaccccagggctcccatgggtgctgctcccaaaaccccaaagcaagcatggaagagcagaccaactccagaggaaatgggaagatgacgtcccctcccaggggccctgggacccaccgcacagctgagctggcccgagctgaagagttgttggagcagcagctggagctgtaccaggccctccttgaagggcaggagggagcctgggaggcccaagccctggtgctcaagatccacaagctgaaggaacagatgaggaggcaccaagagagccttggaggaggtgcctaagtttcccccagtgcccacagcaccctccggcactgaaaatactcgcaccacccaccaggagccttgggatcataaacaccccagcgtcttcccaggccagagaaagtggaagagaccaccacccgcagacccttggcaggcggggggggagccagggctctgcagacttactcccattcccctttgatatcacagcacgccaagcacccaggttttataagaattcaccctggaccatgccctaacataaactggcccaaatacacaaagggacgaacttcttatggataggggaagccagggctctcagtctcaaacaattcctttaattcccgccggggccgacccgacctatagaactcccccgcccc

SEQ ID NO: 80090 - DNA, 1225 bp, Homo sapiens
  sig_peptide (367)...(232): this location contains the signal peptide sequence, MTWLVLLGTLLCMLRVGLGTPDSEGFPPRALHNCPYKCICAADLL, Run with SignalP
  misc_feature (1226)...(934): similar to gi1872200 in the genepept database release 114, Run with FASTXY 3.3t00, default parameters
ggaattccgcgttagatgatagatcgagcagcctcaggccgctggcgttgacgaaaacgccgcgatccagcgcatgtagttcgttgtggtctaagtgcagggcgcgcagctggaagaggggcgccaaccagccggggcgcatgcgctggagcgcgttgtggctcaggtcgaggtccgcagtaccggcaggtaactcggctggcacgtcctgcagccctaggccagtgcagcttagcaggtcggcagcgcagatacatttgtaggggcagttgtggagcgcacggggcgggaaaccctcggagtccggggtgcctaacccaacgcgcagcatgcagagcagtgtccccagcagcaccaaccaggtcatggcggcgaccaccagggacagtacagagcagctctgtgcaggttgcagttccaggactcaccctcttctgctctagtgcgacatgggtggcaccggatggcccttgccgaggaggcacggcgggttcttgccagccgacggcccctactctccggttcccaggttgtgaggcggtgcggcactcttagccgcgctcccttcggcttcgctagccctctccaagcgagttcctgatcggctcctaaatactccccccaggggcggggcccgggctcctattggttcccgtttgaggaggcggggcggctacatccctttgtgcccaatggccccgcatgaccgccagatggggagcaaggccaaccccaaagtccccgtcagcctttggctggcagctctccgccgctcgtttttcctcggggagtaaaagggggagtctggaagaatgtctccaagctgctgttagtgtttatttgaagtgactttgaaggactgataatattatggggcaggcagactctcactatcttaaggtggttcgcctgagccttcttaaagtggtaccccaggccgggcgcggtggctcacgcctgtaatcccagcactttgggaagccaaggcaggtggatcacctgaggtcaggaattcgagaccagcctggccaacctggtgaaaccctgtctctactaaaaatacaacaacaattagccgggcgtggtggtgggcgtctgcaattccagctactcgggaggctaaagcaggagaatcacttgaacccgggaggtggaggttgcagtgagccgagatcgtgccatcgcactccagcctgggcaacagagcgagactcgtctcaagaaa

SEQ ID NO: 80091 - DNA, 1900 bp, Homo sapiens
  sig_peptide (531)...(396): this location contains the signal peptide sequence, MQHTWPRVSCRLVVLLKALLKLICDVARDPNLTPESVKSALLQEA, Run with SignalP
  misc_feature (906)...(1778): similar to gi5420387 in the genepept database release 114, Run with FASTXY 3.3t00, default parameters
ttttttttttccttttttctcccaaactttatttagaaaatgggaaggagttcaattttttcttgttctactttccctattccttatggaggtaaaaggaaaggaaaggaaggaaaaagcagctttcacttacaaagtttcgtgtaaaaatatctttttttcttaaataactccattcatacaaattgggatgggaagaaaatcctttcctcttgggaaagtaatacaaggttttaagttccattgtagggtgcgccttcagaaacctgctgcacttttctgatatagttcaccacttttctgtcttcacagctttggggaattttggccaggagaccctttacccgtccttgagaacagcggtccaggagaatcaggcagtctgtggcctcctgtagcagggcgctcttaacagactcaggtgtaaggtttggatcccttgctacatcacaaatcagtttcaagagggccttcagtaagaccacaagtctgcaggaaactctgggccaagtatgttgcatgagaagttttagggtttccaatatcttcagtctagcttcctcctcaggtccatcataaacctccagataaccaatgatgactctctccagcctctttaagtgccggacagttaggatccccaacctgttcacgaaagccggcaggtttcttgcgtaggtcctgcgtaaaagaaggcggtgctctggctccatgtgggtcaggatcagccgcaggacctcatcacaatgggtggtgggtcgagctccatctcctttccagtgcagggttttctccaggatggggaataaatccagcagacacaggagcacagcctgaatgaggtggtgctctggtgtgtacaggtggttggaaatggcatggtataggacctgggctctgttatactggagcaaatcagcagctggcacattaagcacaatgtgatggagacagtgtacacccaggattttgttctcagtctgatagtcatctgaaatgaccaatgatgcgggaagtaccctttccagatgctggctcagccagggccgagtgacctgttgcagagtccatgagaaaacatgtttgatggcagggttattcttccaggattccttatacaagtcgggtttgagaagccctagtatcaccgaaagtctccctttctcatcttcattttctccatgtaggaatcctgccacagaaccgcattcagtaacttgaagcagtgaggtgagcacctccctagcaacttcccgagatctcggagtggtccatggttgctccaagctgtgtgtgatggcaaaaatataaacgggtcctgccaagtgatgcaggcccgtctgccatgcagggccgaccagggaattcttagcagtctcaactttccctaacagtttaagaaacagtaacccaacttgggctgctttctcggccgcttcggagtgcccatcacctccaccttcctcctccttggagggggctgcatacttctccagggcttttgctacctgccccagtgtctccggcattccgcggagccgtgcaccagtcccctcaaataacctatcaaattctgtggcttctattagatcaccgaggtctttaagaactgcatcttttacattgcctcgtcgtgcctccgggcgggcaagacagtgtaaaatcttggagaaggcctgtccaaaggcggagtgagacaactcctcggacaaattagagtcttcctgcgatggggcttccagagcgctgtcaagctccattcctgactgcagcaccagaaggctggtctctcccacagaacgaggatggaggcggggagggatccgttgaagagggaaggagcgatcacccaaagagaactgcaacggctcgcgcccgccggtgtctaacaggatccgga

SEQ ID NO: 80092 - DNA, 1589 bp, Homo sapiens
  misc_feature (1)...(1589): n = a,t,c or g
  sig_peptide (1161)...(1026): this location contains the signal peptide sequence, MARAPSVALAQLWLICLCPESLASFVQAVPWKVLQPSSNRSTDCS, Run with SignalP
  misc_feature (1589)...(1088): similar to gi5832914 in the genepept database release 114, Run with FASTXY 3.3t00, default parameters
tttttttttaaccatttacaaatatgtttaatagcagcatttctttaaagaaaaacaaagttcaaatgcccaataataattatgtttaacacttggtacacatataaatagacaaaaggctgcggagaacactggatttaaataaaggtgttatgggtataattaactataatttattttatgaataaataagaaaaaagtccctggctataaaggatagtggaggtttatttcccaatattcttccatttggactgaacccctgccaactaagcagacatcccactattacaccaaaaagactgctctccctgcgagcaattacaatacatgacaccactaggcccaatggctcagagggaagagtggcctgtggctcttcaatctttatccaaacctggttctagcttcaggagcctttggtcacctgagactttttatttattaatttttatgagacggagtattgctatgttgcccaggctgattctgaactcctgggctcaagcagttctcccgcctgggcctcccagaatgttgggattacaggcatgagccaccacacgcagccacctgagactttttaaacagcaccagcacttctggctggtttgaaccttaaatgccaccacccaccagagaggaggctctcactagattctaaatctgtgatttattttacttttcaattgaaaaacaaaacagacagaagaaacttattagaataaggccacctaggaatgttcttaacttttccattcagcttttggctgatatatgaaaatacaaataaatacatcctttccccaggtgcaaggctccaaccagcagctccaagggcttggtctacagtgctcagaaagacgccctgccttaaaagtcaggctagtgccctagctccggtggcctctgcaaatgaggccttgacagtcgtcagtggacagacacatagtatccagcacccaggtcttgggccttcctgcttcccagagtttcacaggtaggacgcatgtgaggggagcagtccgtacttctgttggaggatggctgtagtactttccagggcacagcctggacgaatgatgccaaactttccgggcacagacaaatcaaccacagttgagccaaggcgacactcggggctctggccatccccaatttgtcccccatcaataaccaaggacaactgaggccagagatcctggaactcctcgacattcagagaactggcctgggagctgaggttggcactagtgagagcaagcggaccctcaaacatctgagccaagtcttgcataaaagcatgatcaggaatccgaatgcctacaagaggcgtaaaagggtttaggtccttgttgagctcctccgagcgttccatcaccagggtcactggtcctggcagtaggtctttcaggagcccctcaggtactctcacacggcagtatctgtagacgtcggccacgcggccgaggcatacggccagaggcttggcctcgctgcgacccttgaggcggtacacagcgcgcagagccgccgagcagctcgccggnnttccccgcncttccgangntctcaaaggggnctcttag

SEQ ID NO: 80093 - DNA, 447 bp, Homo sapiens
  sig_peptide (300)...(435): this location contains the signal peptide sequence, MPCTWGPGLLAADFWFSLLTPSLSSDPQLCNDLELCDEAMAPLDE, Run with SignalP
  misc_feature (324)...(29): similar to gi2104314 in the genepept database release 114, Run with FASTXY 3.3t00, default parameters
ggaattcctgggccacctgccacgactgctgggccgcctggcccggctcatcaaggaggccgtctgggaaaagattaaggaaattggagaccgtcagccagaaaaccaccctgagggggtccccgaggtgcccctgactcctgaagctgtgtctgtggagctgcggccactcatgctgtggatggccaacaccacggagctgcttagctttgtgcaggagaaggtgctggaaatggagaaggaggctgaccaagagggtgagctctgactcaggctcaggcttgtccaagtctcccatcatgccctgcacctggggacctgggctcctggctgccgacttctggttctccctcttaaccccaagcctgtcctcagacccacagctctgcaatgacttggaattatgtgatgaggccatggcccctctggatgaggccatcatgcgtc

SEQ ID NO: 80094 - DNA, 1215 bp, Homo sapiens
  sig_peptide (540)...(405): this location contains the signal peptide sequence, MLLVVAVTILIVAVFTANTYGMWGGAMLGVAGLLSRLEEDRLLLL, Run with SignalP
  misc_feature (154)...(855): similar to gi2944066 in the genepept database release 114, Run with FASTXY 3.3t00, default parameters
ttttttttttttcctgcaaaattcctaagatttattggagactaggcctcttctctggatccacaaccgtgtccagcccagaatcaggacccccaaacgtgtctgggaccctgtccctttcattctggtctagacaagtccccacacgtggccaaaggacagcacccagactctgcccctgaccagtcaatgtgcagcaaacccacttcagtaggcagaagagtctacccctagggagaaggcgccaggagcaggcaggtgggagggaaagtgttcggcagggcagaaaccctgcctggctgtatccaactgtcactcccactggaggcgctgtgtatgcagggcccggcagtaagcccagctgcctacagccaaggcccagcgacagacatcctccttcggtagcagcagcagcctgtcctcctccagccggctcaggaggcctgccacacccagcatcgcccccccccacatcccataagtgttggccgtgaagacagctacaatgaggatggtcactgcgaccaccaacagcattgcctgaccagccacagagcggccctcagggccgaggtggccgccagccactgccagcaccatgcctcctcccaggagcaggttggcagaggagcggtccccattcacccagtggaaatcgaaggccagaaggggaaggccgatgacggtggccacccaggctccagcaaggcagtcttcatgtgtgctcagccctggggccagcgtggtggtggcagccaagacctggagcaggaagccagcagcagcccctcgacttgcctcggctgtgctcacggctgcgtgcagagacaccactcccagcaccagatgggacagggctgtgctccactcggcccccggcttgggggccatggcacctcaggcggcagtatgtatgaggacacagataggagatactcaactttggagaggaagaaagcgcagaagccagcgacctggagccctacgcgcggcactctagtacgcccaggttccaggtccccattactggatgttaggagaagttcagtcctagactttccggatccctgaggccactgcacacacctggggggggccggttggaggccgtaggagcgggtggggtcgggaggagctcggggaccagaaaacgctctgtttgggtgggtgcgtgcgtgggcatagtggtttgaaaggagcgtgcggacgcgtggg

SEQ ID NO: 80095 - DNA, 426 bp, Homo sapiens
  sig_peptide (132)...(267): this location contains the signal peptide sequence, MIIFKKMLLNGFFCLFFRKVTVDIFQVLKILPYNSPMKFSMGEYR, Run with SignalP
  misc_feature (2)...(180): similar to gi2460175 in the genepept database release 114, Run with FASTXY 3.3t00, default parameters
cgaatttgtggatataggaagtggtggtgtgtgggagtcaaatgatctcctggaccaaggggaatattccacaatttataagacttgactctgcaaaaaccccaaagttgcttctatttggctaccctggcatgattatttttaaaaaaatgcttttaaatggatttttttgtttgttttttagaaaggtaactgtagacatattccaagtcttgaaaatattaccctataattccccgatgaagttttccatgggagaataccgagtaaggaaaccagtccctgggactcagaactgtggacaacagtaaaaccctgaagtctcaccacatgattgcacttctggctttgaaaacacacataactgtttttaccattttgacagttgatggctggttttctgattgaaatgacatttagattaga

SEQ ID NO: 80096 - DNA, 1737 bp, Homo sapiens
  sig_peptide (57)...(192): this location contains the signal peptide sequence, MWPALLLSHLLPLWPLLLLPLPPPAQDSSSSPRTPPAPARPPCAR, Run with SignalP
  misc_feature (80)...(931): similar to gi2653671 in the genepept database release 114, Run with FASTXY 3.3t00, default parameters
tttcgtgctgaaaatctgggtcacagctgaggaagacctcagacatggagtccaggatgtggcctgcgctgctgctgtcccacctcctccctctctggccactgctgttgctgcccctcccaccgcctgctcaggactcttcatcctcccctcgaaccccaccagccccagcccgccccccgtgtgccaggggaggcccctcggccccacgtcatgtgtgcgtgtgggagcgagcacctccaccaagccgatctcctcgggtcccaagatcacgtcggcaagtcctgcctggcactgcacccccagccaccccatcaggctttgaggaggggccgccctcatcccaatacccctgggctatcgtgtggggtcccaccgtgtctcgagaggatggaggggaccccaactctgccaatcccggatttctggactatggttttgcagcccctcatgggctcgcaaccccacaccccaactcagactccatgcgaggtgatggagatgggcttatccttggagaggcacctgccaccctgcggccattcctgttcgggggccgtggggaaggtgtggacccccagctctatgtcacaattaccatctccatcatcattgttctcgtggccactggcatcatcttcaagttctgctgggaccgcagccagaagcgacgcagaccctcagggcagcaaggtgccctgaggcaggaggagagccagcagccactgacagacctgtccccggctggagtcactgtgctgggggccttcggggactcacctacccccacccctgaccatgaggagccccgagggggaccccggcctgggatgccccaccccaagggggctccagccttccagttgaaccgctcactcagtggtcagcgtttcctgcacactttacctctcatgtgcgtttcccggcctgatgttgtggtggtgtgcggcgtgctcactctctccctcatgaacacccacccacctcgtttccgcagcccctgcatgctgctccagaggtgggtgggaggtgagctgggggctccttgggccctcatcggtcatggtctcgtcccattccacaccatttgtttctctgtctccccatcctactccaaggatgccggcatcaccctgagggctcccccttgggaaatggggtaagtgaagggccccagacttcacccccagcccactgctaaaatctgttttctgacagatgggttttggggagtcgcctgctgcactacatggagaaagggactcccatttgcccttccctttctcctaaagtcccttttgtcttgtctgtcctgggctgtctgtgtgtgtgccattctctggacttcagagccccctgagccagtcctcccttcccagcctccctttgggcctccctaactccacctaggctgccagggaccggagtcagctggttcaaggccatcgggagctctgcctccaagtctacccttcccttcccggactccctcctgtcccctcctttcctccctccttccttccactctccttccttttgcttccctgccctttccccctcctcaggttcttccctccttctcactggtttttccaccttcctccttcccttcttccctggctcctaggctgtgatatatatttttgtattatctctttcttcttcttgtggtgatcatcttgaattactgtgggatgtaagtttcaaaattttcaaataaagcctatgcaagataaa

SEQ ID NO: 80097 - DNA, 1033 bp, Homo sapiens
  misc_feature (1)...(1033): n = a,t,c or g
  sig_peptide (172)...(307): this location contains the signal peptide sequence, MVFSIISSFFFSFMPELLWFFSFFLNQAHEKFMFYLYFIIRKLSL, Run with SignalP
  misc_feature (12)...(381): similar to gi1022918 in the genepept database release 114, Run with FASTXY 3.3t00, default parameters
atgttttataggatatctttagtaatttctttttagtctgttttatgatatgttgttctaaattagtttattgcatcttttggagtaatttattcattgctatttaatttcctcaagcatttcaattgtgttgccacttggtagcaactgattttttcctttagtgattttatggtcttctctatcatctcttcgtttttcttttcctttatgcctgaacttttgtggtttttctccttttttcttaatcaagcacatgagaaatttatgttttatttatattttattatcagaaaactatctttgtactctttgttatctatttcattaatctaagcttttatagctattaattcccttttcttggctaactctatttttgttttcttttacttaagagtcatagttcatttatttgaagttcttctactaaaggcatttttaaaggctataaattttcctctgattgcagctttagctgtgacacgtagatctgattatgaaatatgttccttttcattgctttcttgatagttttaattttggggtttgatttttctctttaaagntcttttaatgcttctaattttaagcagaaaattttatcactgtaattatttctaattaatacgctacagtgaaggaaggtacctatgaagtctccctctttttaaaaggaagatttctttggctccagaaagaaaaaaaatcttatttttgcaatgctcccccacccagaaaaatctccgggtttgttaaccccaatttcattttgttctcggccaacaaaccgccatcgagaagcctcggcaacctactataccccgcctactgacgcagctccgccccttccttaaaaccaacaagaggcgctcccccacgggcacccacggcaccgtcacgtcctcagcctgttcctttggctccgagcgcacccccggcgccgcctgacacctccggacgagaacgatcctacccaccgacgaccacgcacgccgtgcctgccacccgatccttcgctcaccacgctccc

SEQ ID NO: 80098 - DNA, 1071 bp, Homo sapiens
  sig_peptide (746)...(611): this location contains the signal peptide sequence, MKTVFTKKLTAALLITVPNCKQPRCPSMGEWLNKLQYIHTMKYYS, Run with SignalP
  misc_feature (3)...(531): similar to gi3002527 in the genepept database release 114, Run with FASTXY 3.3t00, default parameters
tgcaatggtgtgatctaggctcactgcaacctctttctcttttgttcaagtggttctcctgcctcagcctcctgagtagctaggattataggcacacaccaccacacctggctaatttttttggtaatttttagtggattcggtgtttcaccatgttggccgggcttgtcttgaactcctgacctcaggtgatccgcccacctcagcctcccaaagtgctaagtgctgggattacagacccttaaacaatattaagtagtaattagtaaactatattttcttttcttttcttttcttttttttctgagatggagtttcactcttgttgcccaggctggagtgcaatggcatgatcttggctctcactgcaacctccacctcccaggttcaagtgattctcctgcctcagtctccctggtagctgggattacaggtgttcaccaccacgccaggctaatttttgtatttttagtagagaaggggtttcaccatgttggccaggctggtctcgaactcctaacctcaggtgatccacccgcctcagcctcccaaagtgctaggattacaggtgtgagccactgtacctggccaatagttcacttttattgttgagtagtatttcatggtatgaatatactgtagtttgtttaaccattcacccattgaaggacatctgggttgtttacagtttgggaccgtaatgagtaaagctgctgttagtttctttgtgaacacagtcttcatttcttctggataactgcccagtagtgcagttgttaggtcatatgataattgcatatttaaagaaactgctgaactgttttcctgggtgagtcagactgctttacattcccaccaagaacatatgggcgatccacttcatccgcattctcaacaacatttagttgtgtctctgtgttttattttaggcattctggtaggtatatagtgatagatatataacttactctggttttaatttttatttctttaattgggaatggttgtgagtatcttttcatgtactcattttgccatctgcatatcctgttaggtgaaatggtacttatt

SEQ ID NO: 80099 - DNA, 1758 bp, Homo sapiens
  sig_peptide (1368)...(1233): this location contains the signal peptide sequence, MQQRKMRLVWRSYWSMVQTPMLWMATEIPHFTGQPLRTMLSVCGL, Run with SignalP
  misc_feature (70)...(347): similar to gi1710216 in the genepept database release 114, Run with FASTXY 3.3t00, default parameters
tatctttgggacacaattgctgttagctgaaattgtgatttttttaagttttttcacagatcaattaaaatggtttttttttttgagacagttttgctcttgttgtccaggctggagtgcaatggcgcgatcttggctcactgcaacctctgcctcacaggttcaagcgattcttctgtctcagcctcctgagtagctgggattacaggcgcatgccaccatgcccagctaatttttgtatttttagtagagacggggtttcatcatattggtcaggctgggctcgaactcctgacctcaggtgatccacctgcctcagcctcccaaagtcctgggattacagacgtgagccaccatggctggcctaaaatgctttctagaagggattcttctggaccgttaaccacgtccccaaaggaaaaccacacacacattatttaagtactttccatcttcctagagaaatttagttacactgttgactccttccctaaaggggaggattgagggagacctcttcttttgcaaaatgcaatataaaaagccaggtaagcaataaacagaaaacaaaagtgagggattttttttgttgggttgtttggtttgggaaggggaggtgctatggaggttattgttgtgacatgttgcttcgaaatctataaaccacacaacaggaacaactgtttttctgttttctgtgacaaggagtactgcagggacaacctcacccagagctgcctgcacgatggtgcaaacatcttctccggctattctaaaagtaacaggtattccttcaaagaagctggcagtggaaggcccttcactgcatcggggagatactggagtcccaggctacggcgcacggcatagcgagcgagtgtttttagagttcctggagctgagcacagaacagtcagtttttcacatagctgcgggtctctggccacctctcgtggcatggtgccatttttcctcaattcaaagtgtccaacagctctgtggaggagctcaaagcaagagtcctctttctctgttccaagtcccctgactagcagagccaccaggcgggagatgggtgtctggcctattaggttgatgactctgacctctgcgccataatccagaaggatgctgacactctcaagatttcccttcatggcagcccagctgagcggtgtatcattgttgtaatccagggcattgacagaggccccgctctctaggagagcccgcacacactcagcattgttcttaaaggctgcccagtgaagtggggtatctctgttgccatccaaagcattggggtttgcaccatactccaataggacctccacacaagcctcatctttctctgctgcatagtggagggctgttcggttatacccatccagggcattcacctcggctcctttttccagaagtaactccacacagtcagcatctgacaccatacaggcacagtgcaagggcttcagtgtgccatgagtgcagttcacatctgctccccctctgatgaggtcctctacattatcatgtgggaaggaacggatggcagcaattgttcggattaagcgctcggagagagagtatttgctctgaatgctctgcataatataccacatactggaactcatcaaggctcaaggtgttcacatgctccaaactgccgaattgctgggctgaggtgggggttgaaagccgctgtcaaggcgtgacccggaagcagaagctgtcgggggcaggccctctgtttacccc

SEQ ID NO: 80100 - DNA, 608 bp, Homo sapiens
  sig_peptide (234)...(369): this location contains the signal peptide sequence, MICSTELLLNFSCPPLFLFTVQDIFFPMTAFLCKNLPKIWYQFYF, Run with SignalP
  misc_feature (18)...(193): similar to gi459920 in the genepept database release 114, Run with FASTXY 3.3t00, default parameters
tctttgggttacattgggtttccatcttttggactctgctcctatgtgagttgtgtttatgtatgtattatatacatgcagttgtctatctgcgttcctccttgtttgtcagtttgttgttcttgctttcccttcttacctgatggttcatttccaccagcccctttcttgtgcttaattggccataatatctagtatgcagtactgaattattacttattaaatatagtactatgatatgtagcactgaattattattaaatttttcatgcccccctctttttttatttactgtacaagacattttcttccctatgactgcttttctctgtaaaaatttaccaaaaatatggtatcaattttattttttcattttggatagatccacaattaatattctccaaaaagtgatcatcagtagaaaagggttctcactacttttgcatagcgtcattttataaggagcaagatagaaccggtgtggcctgaccaagttaattagtaaaataatgaataatgaagcatgtttttaaaaaataaagattgttttaataaacttttttatattagcaactttaacaaactaagaaaaaaatgaaggtcttgta

SEQ ID NO: 80101 - DNA, 401 bp, Homo sapiens
  misc_feature (1)...(401): n = a,t,c or g
  sig_peptide (85)...(220): this location contains the signal peptide sequence, MLLHVSSVRTGISLSCSLLYHWFLEPCLAYYKFSINIYLLLSNFW, Run with SignalP
  misc_feature (380)...(182): similar to gi3745972 in the genepept database release 114, Run with FASTXY 3.3t00, default parameters
agagattaattctttttccctaaatggtaataaattttgcttacttagcttttatgcttctgatctttgtactttgagatactgatgctcttacatgtaagctctgtgagaacaggtatctcattgtcttgttcactgttgtatcactggttcttagagccctgcttggcatattataagttttcaataaacatttatttgttgttgtcgaatttctggaaaatatcttttgcttatttgtttctgtaacaagagctgaagatggttgacatcatgttagggaataggatataattgataatttgtttaaatgtaaactgtacctatccggnggataacattttaaaactgcaggaggtctgtatgaaaatatagatattctgctccccaccccagtaccc

SEQ ID NO: 80102 - DNA, 617 bp, Homo sapiens
  sig_peptide (475)...(610): this location contains the signal peptide sequence, MMRLWNYLNKCLSLALVGSIVRCWELPLDRSTNGGPTALGWAIGP, Run with SignalP
  misc_feature (379)...(496): similar to gi4105119 in the genepept database release 114, Run with FASTXY 3.3t00, default parameters
ctctgagggaggcccctctggcctctgcttgactatgatacatgtcgagtccatgccgagtggcagaaaagctccgttttcagctgaaactacctccctggcctcagggggcctcattggctctgtctttgtactttctcaatggctcctgatgattccttggttatctgaaggcctgtttgggagacggttcccaggacagttgcttcaggcttatatgtgtgtgctttctggaattcacagcatggcgtgccctggtgagtggtggggagatgggtagtgaacacgtgtggtagcccctgctgggcgtgtcccacctgtcctccatgtcctacaacctggttggccccttttgcttgtcagagcaaagctcagaacctcacctcctctgggaggcctttcctgaccacccacaagcccagtaggtcaggaggtcaggcctcacagcctcctgtgtgatatcccaggcccctgatgatgagactgtggaattacctgaataaatgtctgtctttagcacttgtcgggagcatcgtaaggtgctgggaactgcctctggaccgaagcaccaatgggggccccactgccttgggctgggcaattggccctggggaaag

SEQ ID NO: 80103 - DNA, 437 bp, Homo sapiens
  misc_feature (1)...(437): n = a,t,c or g
  sig_peptide (213)...(348): this location contains the signal peptide sequence, MWQTSLLSLEIATVTAVFSTHYPDQSAAIHIKTLHKQKDNLLKVQ, Run with SignalP
  misc_feature (2)...(355): similar to gi2226005 in the genepept database release 114, Run with FASTXY 3.3t00, default parameters
gtttcctgagatagaatctatcctggtaaagatgccataaacattgttgaaatgacagcagagttttagagtattacataaatttagctgataaagcagtagcatggtttgagaggattgtcttcaattttgaaaggtctgttgtagataaaatgctaacaaacaacattgtgggctacagagaaatcttttgtgagagcgagagtcaattgatgtggcaaacttcattgctatctttagaaattgccacagtcaccgcagtcttcagcacccactaccctgatcagtcagcagctatccacatcaagaccctccacaagcaaaaagataacttgctaaaagttcagatgattgctaaaatttttttagcaataaaatatttntaaattaaggcatgtacgttgttttttaaaagatactgctgttgtacccttaan

SEQ ID NO: 80104 - DNA, 898 bp, Homo sapiens
  sig_peptide (267)...(402): this location contains the signal peptide sequence, MLPTLTAPTLALLLLPKISCLLTSTHPRTQGSRAHFPRAWRLDPG, Run with SignalP
  misc_feature (884)...(538): similar to gi1854452 in the genepept database release 114, Run with FASTXY 3.3t00, default parameters
aacccaggctcggaaggtgagcaggggtgagcgcagccactgcccaacgcaaaccgtgaagaagcttctggaagagcagaggcgccgccagcagcagcagcccgacgctggcggggtgcagggacaatttctccctcccccagagcagcccctgaccccatctgtgaatgaggctgtgactggccaccctcccttcccagcacactcggagactgtgggttctggacctagcagcctgggctttccagactgggaccccaacacgcatgctgcctacactgacagcccctactcttgccctgcttctgctgccgaaaatttcctgcctcctgacttctacccaccctcggacccagggcagccgtgcccatttccccagggcatggaggctggaccctggagagtttctgctgccaaccagcccctgattgtggaggatctgttgaacctgggagcagagcccaatgccgctgaccatcagggacgttcggtcttgcacgtggccgctacctacgggctcccaggagttctcttggtatggccagctggcaggcaggggtttgtctggggggtagactggttgcccagattttggcttccagggccaggaggccaggggatacccttacccagcagtctgccttctctttctcccaggctgggcttaactttggggtccaggttgaccttggaaccaaagacttccaaggtaagttgggggtgggccaaggctggggtggttggtggggcttcgccaaagagggggcaaaatccggggtcccttactggcttcattttgggaggcctggaaccggttgcacaggagcctttggggcctttgaatgtggtatggtcccccttccccactttggtctccgggggtggtgacgaccaaacc

SEQ ID NO: 80105 - DNA, 854 bp, Homo sapiens
  sig_peptide (173)...(308): this location contains the signal peptide sequence, MCWSPLTGWALSSSRCRLSWPLTSFGSTASCRPTTGWRGLMWLQA, Run with SignalP
  misc_feature (45)...(854): similar to gi5911879 in the genepept database release 114, Run with FASTXY 3.3t00, default parameters
cagcaaaaaagattaaatatctacgagtaaacaagaattgtgcaagccctggacactggtgaagcagagatgccagctgaggtcctgcccccagctccccttaagctgagcagtgtggagaacatcttgcacaggctgctgactgccttccaagaagcccttgacctttaccatgtgttggtctcccttgaccgggtgggcactgagcagtagcaggtgtagactgagctggcctctaacttcctttggatccacagccagttgtaggccaacaacggggtggaggggtctgatgtggctccaggccctctccagctcaggttacccctccttatgtacattgtactcagagctgctagtgcaggctgtgcacaggaaggcaggggacactgaggtccagcagtccctgctcctgcttctgaagaaatagatattttaagtgaataaactgacagcttagaggggtaaaaaagagaatatgcaagatctattgagaattttaaggctgggtgtggtggctcacacttggaatctcacctatttgggaggccgaggtgggaggatcctttgagccccaggggtctagaccatcctgggcaacatggttgaaactccatctctacaaaaaatacaaatcttacccaggcggtggggtgcctgcctggaaccccagcttggttggaggctgagtcaggaggaacactttgaccaggactttggggctgcaatgaaactgtggttgttccctctatccagggtgacaggcagaacctgccttaatttaaaaaaagaaaaaggcccgccgctttagagatccaatcataaaaaccggtcatctgcatggcccctcctcc

SEQ ID NO: 80106 - DNA, 3437 bp, Homo sapiens
  sig_peptide (713)...(578): this location contains the signal peptide sequence, MPILFYCPLCLLLSFFLFPWRLFHGLWITITHGRAAVPKWVLVQA, Run with SignalP
  misc_feature (94)...(1092): similar to gi5821145 in the genepept database release 114, Run with FASTXY 3.3t00, default parameters
gctgtccccacagggctgtgtcacctgctccccaatcatccagccgcctgcaaccccccttcagcccccaccccacattgctgtccagtacccccaagcccccagggacgtcagaaccacggagctgctcctccatctcgacggcgctgcctcaggtcaacgaggaccttgtgtctcttccacaccagttgccagaggccagtgagcccccccagagcccctctgagaagaggaaaaagacctttgtgggagagccgcagaggctgggctcagagacgcgcctcccacagcacatcagggaggccactgcggctccccacgggaagaggaagaggaagaagaagaagcgcccggaggacacagctgccagcgccctgcaggaggggcagacacagagacagcctgggagccccatgtacaggagggagggccaggcacagctgcccgctgtcagacggcaggaagatggcacacagccacaggtgaatggccagcaggtgggatgtgttacggacggccaccacgcgagcagcaggaagcggaggaggaaaggagcagaaggtcttggtgaagaaggcggcctgcaccaggacccacttcggcacagctgctctcccatgggtgatggtgatccagaggccatggaagagtctccaaggaaaaagaaaaaaagaaagcaggagacacagcgggcagtagaagaggatgggcatctcaaatgcccaaggagtgccaagccccaagatgctgttgtccccgagtccagcagctgcgcaccatccgcgaatggctggtgtcctggggaccgcatggggctgagccaggcccctcctgtgtcttggaatggagagcgggagtctgatgtggtccaggaactgctcaaatactcatctgataaagcttacgggagaaaagttctgacctgggatggcaagatgtcggcggtcagtcaggatgctattgaagacagcagacaggcccggactgagaccgtggttgatgactgggacgaagagtttgaccgagggaaggaaaagaaaattaaaaaatttaagagagagaagaggagaaacttcaacgccttccagaaacttcagactcgacggaacttctggtctgtgactcacccagcaaaggctgccagcctcagctatcgccgctgactgtgcccctgtggaaggaggactaccgtggtttgttctgcagcctcctggagacaaggcgtcccttcccgggagctgtcggtctggatctgagggagctctctgtgtgggctctgctgtgctgggagcctgtcacggtaggagctctcccggtaccagtgtccacagaccgcccaacacagaggctttgaggcttctctagatcggaacctctttggtgacattcccgaccagccctgcaagagaaacgacagtgtgtgtgtgagcagaggtggccgcacacctgctggacatctttgccaggctgtgccttctcatgtttcatagacagtggtctgtgctggcagaggctgctgcccctggttggggctatcaggagagtgggggatggtggccacatgtcccccaggtggtctcccggtgcatagctggtggctctgggcaagccatcccttgcttctcggggctgacgccaccgttgtgtccgagcccgccctcccctgcttcctcagcgggaccccttcatctgttggccttacctgtcctcagaaaggaagaggtgaccccacccagccacctctcccttttatggaactcgagagggtggccctactgtgcaccccttccttgtgagtagctctcaactgtcctggagagcagaggctatttggggtcggaggagccctcgatacctgcgaatacatctgctttccaggctgctgtttattctgagacgactgtgctgtagcttcccttgcagctgcaataacccgcaggtcttcactgaggtggaggctttggggtagaattctccatttattttactacttaatacaaaacatttatttttgaccagtcctgtggcttccattagcaatatgtttcctttcccaaatatgcaaatagtggctttgtttgctcaattttgtgagtgctttggaatttaaatgattgtataactcaagaagattacttttctatgttgctcaagctgtgcctgccaacttgtaacttaataaatacaggaaatcctcagagaaggtgatattttcaggaaaaagacaaatgccctcatagtagtgggaagtgtgaaggtgaccgtgaacatccttcctcatcgggtctgtccccgtcatttcctcccggagtcgtcgcaggtggagatggacaacgtggtgttggacttagacctccttcagtgtggctctgctgggccagaggcatcctgctgtcccgggtggctgcctcgctgtctgcaccccctctccctggggcagctttgcttcctgcccctgtgctcggggcctgggtggttactggcgtgtagatggaattgcttttttaatatgggaagatacatttatttttttccatgtgggtgggtgtctctttttggattttcttctgtttttacgtttctcttcttagaagggtgggagagaatcaagctcctgtggccacctgtgtcccagcagcagtgagtggagctgctcagggtgccctctcctgcggaccagtctctgaatgttcaaagatgagggcctggcttccgtgctctggctttgtaacttatctggaagggaaagcacatgccttcacgggcagggtatgttccttttcttctcggggtgttgacttgcattcctgtgtgaactgttccctctgccatgtttaccgtgtgatgttctgtagttgaaaatgttagttgtctgctggcacagaatttatctcgttcctttctctcccttctctcctccaaatcagtctcttcccttctccactagataactgtaaaaccttttcctggggtacatacattcgttaattcttgggcagtggtgagcacgagatgactttctgcagcgtttatcactgttgggtggagtcacgtcccttccctccaccgaagtcatcaaccagatagggaagggaaagatgaggcccagaaaacgagttcaaactctaggtcttgtacacgtatgtaagtaaatgtcaataacccaagcctttgtcatagcagtcacttggttgacttaggatctgggtctgttgaattttgtgcttgggaatggagctggagggagtggggcctgtgtacagcagctacctctcccaggtcctctcacttgcctgccccgcgtcctggttgcatggccgcacctgtgtgtgtgcagaggtctgtgtcccatcctctgcacctcctttccgggggcctgcgggagccccacggtgttgccaagatcttggtgcaataaaatactccggttttgtgag

SEQ ID NO: 80107 - DNA, 4283 bp, Homo sapiens; identical to SEQ ID NO: 80055
  misc_feature (1)...(4283): n = a,t,c or g
  sig_peptide (839)...(974): this location contains the signal peptide sequence, MKSENSLQLQPLVLLLWWLHLIHHLHPRVRTPQEERLKNAKIAMM, Run with SignalP
  misc_feature (3)...(2455): similar to gi5262678 in the genepept database release 114, Run with FASTXY 3.3t00, default parameters

SEQ ID NO: 80108 - DNA, 2422 bp, Homo sapiens
  sig_peptide (506)...(371): this location contains the signal peptide sequence, MGEVPKAHRLKLRWLFPVSLCRAPLLSTAHLALLLPCCLLCSSCY, Run with SignalP
  misc_feature (1)...(196): similar to gi299471 in the genepept database release 114, Run with FASTXY 3.3t00, default parameters
ttttttttttttgagacagagtctcgttctgtcgcccaagctggagcgcaatggtgtgatcttggctcactgcaacatccgcctcccaggttcaagtgattctcctgcctcagcctccctcgcaagtagctgggattacaggcgcctgccaccatgcctagcaaatttttgtatttttagtagagacaggattttaccatgttggccaggctggtctcaaactcctgacctcaagtgatctgccctcctcagcctcgtaaagtgctgggattacaggggtgagccgctgtgcctggctggccctgtgatatttctgtgaaataaattgggccagggtgggagcagggaaagaaaaggaaaatagtagcaagagctgcaaagcaggcagcaagggaggaggagagccaggtgagcagtggagagaaggggggccctgcacaaggaaacagggaagagccatcgaagtttcagtcggtgagccttgggcacctcacccatgtcacatcctgtctcctgcaattggaattccaccttgtccagccctccccagttaaagtggggaagacagactttaggatcacgtgtgtgactaatacagaaaggaaacatggcgtcggggagagggataaaacctgaatgccatattttaagttaaaaaaaaaaaagcaaacacaaagatgcttcaagatcttcaggagaagtatggtatacaagtttcagggaccctatttgacaattttcagagtgctctctatgctgattccgagtcgagtgtgtcagctgtgattacagtgcctgtggatctaggccgggttgggggggtgtgggcgggggaagggaagtctggcccggagcaattgctcctgccggtaaccccagcactttgggatgcctaaacaggcgtatcgcttgaggccagtaattcgagaccagcctgggcaacatggcaaatctgtctctacaaaacaaaattggaaaaattgactgggcgtggtggcatgtgcctgttgtcccagctacttgggaggctgaggtgggagaatggcttgagcccgggaggcggaggttgcagtgagccaagatcatgtcactgcgcttcagcctgggtgacagaaccagaccctgtctttaaaaagggagttggtggggagaggttctagaatgtcatgtagcaaccagtttaaggactgggactcacggattccactcccacagtttccctgtgtgaccctaggcatttgacttagcctttctgagcctcaggttttttgtttctgaagtaaaaggattggactaggtaatctccaagatcctaggaacccaggagaaagatgagaaaatgtacaagaatgaacactcaggtggaaatgctgcaatcctgagaagctcccaggatgaatgaaaggcacaggacctcttacccctcacccctgcccccctcaagagctggtttctcaaacctttctcttaggccccttcaaagggggaaaactaaaaattatacaagttatagttcaaggactttaaatagattatttatatgattgctcataaggatgaggctgtgaggagggaacaccttatttaatctaatgaaattccataggaaagaggccttttgtatattgaatcaatttatctgccttctcagtgcatctgtcatattctgaaagattctgggttgatcttttgcgataacctctatggctgtgagtgtgtgtgtgtgtttgtgtattttttaacattttgtataatgattggaggttggtaaaaagtaacacaacagtacttttttaatacaaacttggtgtggtcttgagttgtcttccattggagagcgtacgtgtgccacagattggtgcacctgccggcatctctaggattgcaccaactcccgtctagctcttcttggtggcctgcaggggcctagggcgcattcacttccctctgcttgactttacgtggtgttctagcgtcagacatcaggcgatgccgtgcattacccaagacactggacagctccggatcttcccgtctaaccactaatcaagttaaaaagaggaaattaacgctttcttagtagtctctgaaagaaactagttatttgcgtaaagatgacttggtcttgtgttgtttatccctggggagaagggtaaagaagaccctcaaactggatttgctgctgaagtgcttttaactcacctgtgcggagagcggacttcaagagagggcgtgccggtgctccggacaaaacctggggaatactgaaagccaccaccaccaccgtcattccagcatgcagatctcagtcctgggttggtgttgtagggcatttatttatttgacttgacggcgcctttcaaagcttgcgaggatcccttcctcttcatcgagtgcatctgccaagcctgtgccccggcgc

SEQ ID NO: 80109 - DNA, 1303 bp, Homo sapiens
  sig_peptide (1144)...(1009): this location contains the signal peptide sequence, MKPQRFSPILSSRSFIVLGFTFRSVTLFRLIFIIGCEAWIKVYLF, Run with SignalP
  misc_feature (986)...(1199): similar to gi2197085 in the genepept database release 114, Run with FASTXY 3.3t00, default parameters
agcttgctgatgctcccagctgaatatttccctttcttctacgactcgttgtctgagaggttttgtctgtggctcgtcctgctacatttcttggttccctgacagggaaacgaggtgactgatggatggccgaggcagccccttaagcagcttaagcctgccccgcggagcatccctgcaggggactccggccagcctgagtgacgcgatccaaagagcgctcccggttaggaaattgcccccattggaacgccttgccagagcagcacgtagcaggcccccgtggaggatccacacagtggctgaacactgggaaggaactggcgcttggagtctggacatctaaaagttggacatgagacttcacaacctgctaaaaatgaactttccagacctaccaatctaggaataaaccgtcctagccaggaaaggtcagatgacctttcctgagactggagactcattctgttgtaaaaatgctttctccaaagatgttaaaaaagaaaaggggaaaatgtgaaagaaaaatatcttgggtcccttcaagatgggaactgctcagggcaaatctgccttctattctattcaagtcatccatttgctcacagagacagatgcatattctgattgcctcctttggaaagacttatcagaaactcaaaagaatgcaaccatctgtctctcacctacctgttacttggaagcccccaatagggggccttgctttgagctgtctccgcctttccggacggaactaatgtacttcttacatagtgattgatgtttcatgtctccctaaaatgtataaaaccaagctgtggccggaccaccttgggcacatgtcatcaggacttcctgaggctatgtcactgggcatgtcttcaaccttggcaaaataaactttctaaattaattgagacctgtctcaaatttttggtgttcataggacaaaggaatttttggtgttcacagaaaaggctatcgccttttcaacaaatagtgctggaacaagtaaaccttaatccaggcctcacaccctataataaaaattaacctgaaaagagtcacagacctaaatgtaaaacctaaaactatgaaacttctagaagaaaggataggagaaaacctttgtggcttcatattaggcaaagatttcttagatatgacatctaaagcacaatccataacaggaaaaaaagatcaactggacttcatcaaaattaagaacttctgcatatggaagactattagaatggaaagataagccacaaactgaaaaaaaaaaatctgcaaatcatttatt

SEQ ID NO: 80110 - DNA, 415 bp, Homo sapiens
  misc_feature (1)...(415): n = a,t,c or g
  sig_peptide (18)...(153): this location contains the signal peptide sequence, MLLQTFVTTCISYFYWHFNFVWIQFNVCRVLSFQPERLTLAFLIG, Run with SignalP
  misc_feature (410)...(98): similar to gi2072963 in the genepept database release 114, Run with FASTXY 3.3t00, default parameters
gagtaataagccaaaatatgttattacagacttttgtgactacctgtataagttacttttactggcattttaattttgtgtggattcaatttaatgtctgtagagttctttcatttcagcctgaacgactcactttagcttttcttataggacaggtctactagtgacaaactctgtccattttttcttatctggcagngacttaatttctccttcatttttgaaagggtagttttgccagataaagaattcttagttcgatttttttttctttcagcattttgaatatgttaccttctgacctccatggtttctggtgagaaatcagctgttaatcttattgaggatcccttgtatgtaatgagttgcttctcttggtgttttcaagatgctctctttgtctttcaacaattcg

SEQ ID NO: 80111 - DNA, 387 bp, Homo sapiens
  misc_feature (1)...(387): n = a,t,c or g
  sig_peptide (137)...(272): this location contains the signal peptide sequence, MSGLLSMGSTLTFVSLLIFCLDDLSIIENEALTFSTSIVLQXIKL, Run with SignalP
  misc_feature (387)...(317): similar to gi809078 in the genepept database release 114, Run with FASTXY 3.3t00, default parameters
gggcataaaagttaatatgatttatttttttttaatcgctgagatttgtttaagatatggtctcttctggagaatgttcccttgtggtgatgaaaagaatgagtattctgcagcaattgggtgaagtgttctataaatgtcaggtctattaagtatggggtctactttaacttttgtgtctctgttgattttctgtctggatgatctgtccattattgaaaatgaggcgctgactttctctactagtattgtattacagnctatcaagctatctctccctttagatctactaatgtttgcctcatgtacttgggagctctgatgttgggacatagatacttantattgtacatcggcttctgaataaccagttatcttattagcgag

SEQ ID NO: 80112 - DNA, 1503 bp, Homo sapiens
  misc_feature (1)...(1503): n = a,t,c or g
  sig_peptide (236)...(101): this location contains the signal peptide sequence, MKGRFLFPLRLLLWMCLHLQRQASELHQPSMPGCPLTSSSRLFDN, Run with SignalP
  misc_feature (1503)...(106): similar to gi4884092 in the genepept database release 114, Run with FASTXY 3.3t00, default parameters
ttttttttttttgctagttgtatataaaatttaatctcaccgaatgtacagttttcaaatttcacgtgtatattaaggaactgatgcatctgagcattgtcaaacaaacgggaagaagaagttaaagggcagcctggcattgatggctggtggagctctgaagcctgcctctgcaggtgcagacacatccacaaaagtaaccgcagtggaaataagaatcgtcctttcatttcctgagttggcctcaggaaaggaggatgaaattagatttgcagttacattgactattttggcctgtggattcagcagggatccgtatttagtccacttcacttctataaccaaagcccctgggagctggcaggaatccttcctgttgaatgactgggtgatgaagtggatgggcacccagtccagcatgtccctgggccctgggaatttccaaaaggggccacgtaatctgggaagccctggccccacagcaggctcttcaccttctgtgctacgagctgacacgggagagctccagtcagtcttagtttacagccagattgcatagtgtaaccaaataatactggggtccggaccccctccagtgctaagcagtcttgctcagttgtgctatgaagaatagtaagctgtccatatctatttgtggtctgaataatcccagaccccttatgaggctggaatccagcagctaatgggagccccacgacataaccagggtttccactgagagggactggctgggtattttcctgaagaaaatgaatttcaaacttttgctgcagtgggaccactacgctgctaactgtccccagaacgaatgagagatcagctttggtgacttcacctgcatctgtgtatgtgaggctgtactttacctcaagaacaacattcacgcaaaggctaaagtgtccagcgttgacgagagtcggctgcagcacatcagtgtcctcccgtcgggtgagcgttttatttagagactgaatgacgatggactgaacagtgatagggaccttttttcttgaatcaggtaccctcagaatttccgggctgctgtaaaaagccatgctgagggcttcaatttcttcacactgttctaaatttatttttctggtgcacttaacagcctggttcaccagaaacgctgcagggttattatcagtgcacagagatgatgtcagggacgaaggaaatctcagaaacgaatctgaagtctgcagaggaaccccatactcatatttagcagcagtaggaatatccagtttggttgtgaaggaaacatatgattcagcattcaatgtaaaaccatcagatgttttcatcaatgtatcaaaattgttttcatcaggtacttctggattaataaaggataatgcaggtttatagtttgtaatatgaatgcagaaaatagatggattaatctggtcaacaagttcaaatactctttgaggtgggtttgctgtaaaattcaatgaatagntgactgctttttga

SEQ ID NO: 80113 - DNA, 1097 bp, Homo sapiens
  misc_feature (1)...(1097): n = a,t,c or g
  sig_peptide (635)...(770): this location contains the signal peptide sequence, MLAMLVVLVVLLVLVHLFMSFLHFLLHLLVYYHCWSNHARSQGIH, Run with SignalP
  misc_feature (978)...(613): similar to gi9451 in the genepept database release 114, Run with FASTXY 3.3t00, default parameters
ttttttttttttgagaccaggagaaataactttatttgaataggacccgagacagcatattgggctaaggaggagaggtaaggttccaaaaccgcagtcaaagctcatcaaccaaatggactctacttcccagcaaccttgcagttagtgcaaccaacaaaaggcctgctggggaatgtatttgccactaaattccccaagtatgccaacattacaaaaaagataggtttttcatcataattgaatttccacaaacctccccaatcacaagtattataagtggaagtaaaaaatcacattttacagatctcaaacttgtcttcaacatttagttcatcatcttcaaaaaatagctcccctgcctaattcattagctatatgatctaaccaagcagcaacaagatggccaggccatggcaatcctcttcccatttcccctagccactcagggctcaacagcagggtgaggctcaggtggaggtagggggtggggagcacaagggctacattcccccagtacaacatggcatctgaagcttgatgggagagcagaactggtgagacttgagggaagggtccagggcctgtattcagtcaggaatcactgctggaagaggaggaggaagaggagggaatgcttgccatgcttgtggtacttgtggtgcttttggtgcttgtgcatctttttatgagctttcttcattttcttctgcatcttcttgtctactatcactgctggtccaaccatgccaggagccaagggattcacaggagggattccaggggcagncggtgggtatggaggagggtagggacccaacggttggcatccctggataccctggctgtggcacaggatgagggggcccacctggggggaaagctggattgccatggggagctcctgggggaggaggacaggggcctgggggaaagggtggattaataggtggtgggtgggcaggattggaacctccagggcacccaatattggggggatatggatttggccctggctgcccggcattgggataccacatgtttaggtgtgtcctccagccccatcacctttccaccgccgcctgggcttgctgcgt

SEQ ID NO: 80114 - DNA, 1434 bp, Homo sapiens
  sig_peptide (491)...(356): this location contains the signal peptide sequence, MVRSIRLLFFFGWGFSTTQQPSLCQNSLMFPDGSSFTPLSEAPKG, Run with SignalP
  misc_feature (445)...(839): similar to gi1644232 in the genepept database release 114, Run with FASTXY 3.3t00, default parameters
tttcgtccacctctgccggctcgtactcggctcccccacctcgccgcagagctagcccgggaagcccacactggcggccacggagcagagtccctcacccccaccagctgtagctgaacgtctggatggtggagaagagcagggttccgagtctgaggaagacataaccttgtgcctgcctgcccacctctctctctggtcctgttcatctctcaggctctgagacactgaccttcactgctcagttaaaggttccagggattccactttgtctggacccatccagctgagtgaacccagggtggtggtgtatctggggagagtgaggagtgggttgtccaaacaccagggaaagagccctttggggcctcagacagaggagtgaagctggaaccatcagggaacatgagtgaattttggcacaaactgggctgctgtgtggtagagaaaccccagccgaagaagaagagaagacggattgaccggaccatgattggggaaccaatgaattttgttcacctgactcacattggctcaggggagatgggggccggagatggacttgccatgacaggtgcagttcaggagcagatgagatccaagggaaaccgagataggccatggagcaattctaggggcttatagctccaataatggaatggttctgccatcttgaaacccccattctgtttccagcccagaagaaatgctgcccctaccagatccctccttgaaccagtgatctaaggacccctcttttccctatctgcctaacagtgcctcacaaggcttgggggctggactccctctactccctctggccatagcccctcctggagatggggtcaaggcagcaggactgatcaagtgactactggttagccagaggagctcagctgaagccctggaaaccctcaggtctgagataggagttctctaggaacctggaatgagttcctgtctcctgaatgatggtctgggtgccacctgtttttaaactcttaaacctggaactccttaaatggggtaggtgggtgagattatcaaagctgaagctggctttgctgagaagctccctacctccctgcccttctcctccttcctgctggaatgaactaaagcagatgtcaagcaggggctggtgggggtgcctactcccttttccactctatctttagatttcaaaccttaggcttacagcccctcaatatctctctgctaacaccagtgtctctttctagttaggcctctaatcttctgtttctgtttaccagcttcccagcaactttccttttttaaaatattaaaaatttaattcaggttctcttaaaaaaaaaaaaaaggggcggccgctttaaaggatccctgggggggcccaatcttacccgggcaggcaacgacatagctttttccctaaagggaggcgcattaaaa

SEQ ID NO: 80115 - DNA, 5935 bp, Homo sapiens
  sig_peptide (177)...(312): this location contains the signal peptide sequence, MASAETLTVFLKLLAAGFYGVSSFLIVVVNKSVLTNYRFPSSLCV, Run with SignalP
  misc_feature (3)...(1157): similar to gi1665787 in the genepept database release 114, Run with FASTXY 3.3t00, default parameters
ccaactcctggagtcccctgggagctgccgctgcaggcccccgagccgctaggccccgccgccaggccaccgctgctgcggcagccatggcggaagttcatagacgtcagcatgctcgggttaaaggagaagcccccgcgaaatcctccacactccgagatgaggaggagctggggatggcgtcggccgaaacgctgaccgtgtttctgaagctgctggccgccggcttttacggcgtgagctccttcctgatcgtggtggtgaataagagcgtgctcaccaattacagatttccctcctcactatgtgttggacttggccagatggtggccacagtggcagttctctgggtgggaaaggcgctcagagtagtcaagtttcctgaccttgacagaaatgtacctcgaaagacgtttccactacctctactatattttgggaaccaaatcacgggactgttcagcacaaagaaactgaacttgccaatgtttacagttctgagaaggttctccatcctgtttacaatgtttgctgaaggagttttactcaagaagactttttcttggggtattaaaatgactgtatttgcaatgattattggagcctttgtagctgccagctctgacttggcatttgatctgggaaggatatgcttttattctgataaaccgatggtcttaaccagccgcaaatggtgcatacgtaaaacaaaaattagattcaaaagagctgggaaaatatggactgctctattacaatgcactgttcatgattctgcccaccctggccattgcgtatttcacaggagatgcacaaaaggctgtggagtttgaaggctgggctgacaccctctttcttctgcagttcaccctctcctgtgtgatggggtttatcttaatgtacgccacagtactctgcacgcagtataattctgctcttacaactacaatagttggctgtattaagaatatattaataacttatattggaatggtctttggtggagattatattttcacgtggacaaacttcattggtttaaatatcagcattgctgggagcctggtatattcctatatcactttcactgaagagcagctgagcaaacagtcagaggctaataacaagctggacattaaggggaaaggagcagtgtgaccagaggattgcttcatctgatacgtaggcctaagtttttaatcaactcagaacactggcagttcctacagagacactgaggtgtcttgattatggaggaaataaccattcctttgcacttgtacaatctgaggattgattgctgccttttaaaattttatgaagagagaaacttataattgactctattttaaatatgttgtttgaattaatttatatcagactggaaaaggtactgggctttttaatttatttttcttatatgccgacagtgaaacatcagtgttttgaaagtattttatttcataatttgatatccaggtgtccctgagagctgcatatgtaatgtttgccaactggagcttcatcattcaaattgttgctgcatctggaggcagtttagcctttcctctgctggaaatgcagacgaatatgtgaaatttctcttctttgaatcttatttcttatgattgcattgtcttcatcatatcatcattccatttgccaaggaaaacaactttggcactataaaaatatgtggggctttgaagtgtattgctatctatgttggcttccctgactttcataggatgagcagagtgcattccttgaaaacatgttctttttttgttgtgtagaatggggataatgaagggggtgagaaagtaggccttttactaatttttcatctatttgacttattgattcaactaaaatgttttaagtatatgtgccaggcattgtgctaaatgctggggatacagagatgtttgcagaggtagttgaaacatctcactcctgccatagtgactcaggtaaggttgagaatttagctctgttaatctattcagaagatgtcactaagagtaagttgtttcagcactcaaaagccgcaaatctgtaaattggattaagaacacctgccctacctacccggcaatagtgtgaatccaaatgctgcaatgtgagatgaggtacaagtaaagagctgtgttttgtaaaccagtgcagctcagcattgactccctctctaagtgaaaattgcagacaggcaagtctgttttcccttgccaccttcctttgggtttggttgctctttggatgaatatgatgagggcccacatttctgaatttattggtttgaggggaaaggctggttagacgtctttgtattgtcaatggttggtttttctctggcagtgtcagtgttaaagctatcattttccttcttaaatggcatgagcaatgagcaaacttccctcctttcaacattctcacctacatcatgtgccccttggctcacctactgagcttgccaacttctctcaaaaccaatgctgcattttgggagagcagctgtgaatgggcactgcctaaattgcctcttggggtaatctggagggtggaggtgttaactcaaacataaccctatgacttgactcagagatatccattgactttgaggattagtgtgtttgctcaggccagttgtacagccagtgtgcaagagatttggtacctttgcactaatgcacacaccagtgtctatttcattgggtttggaatccactggactctgttgacctaaacagttaggggttttgattttttttgatatgcaaatttatattgagatcattttcatattcctgtcttttggtttgtctttactaaagcttggctggtggtgctgtgtccctagaattatccctgcaaccaactcccaagttacaagcttcattaagagccttagactcacttttttctagcatcttctgacctgagaaaattccactgggagtaaaggatagtatcttgtgtcatatgggtcttactctccctattttaccaatgagaaaacaaaactcagagaaagatgacttgctaatacatcaaacccatgtcctttttattgaactatgctgccatttaattaaccgcccttcccctctgagggagtaaggaaacagatcctgagttcacttgagcactttcaaaaaagcaagcagttgattgaatttggtgtcagagaggagcatactttgcaaatcaggaagagtgacagcttaccctgtcctggaacccttatcccgcttccaggctgactttagttgataatgcacttctggctgtaaatgttgccaacacttcctggttttgcttaggtacagtgaaagggcatagtgagagctatttttagtgattctgttctttctgtcagcaacatgaaggagggacgtttgaataatttttgttgtagaatatttcttcatgaaaggcttttgggtgtctttaacaggtgttgggctagagccccaccaggagttgaactgcctcttgggggtcaggttccctaggagatctgtcacctcttcaggagtatttgagaacattgtgtagttacagcttcactaaatgcacgtgacaggcttctgtgccttgggagccctggcttatgctgaaacttctggctgaccagagcagtacagcaactttgccctgtctgtgttctgcttcctggatgcatccttcagccactaaccagcattgcaagatggagcagggtgaacaagctggagactgaatagtcttttggagtttgcgttttgattattgcaggcgtgttacaatatactggtgatttacctggtactgtggcacctcccagaaagtctggtttttgccccatgtttgatatttactaggcagaaattctttgtcctgttaactgcctcctgggagaaaaagaggcaatacagagttaaatccttaatttgcccactgagacagatgagctgtggtattccaaaagacaaattctatgactagtgtctcctgttcaatgtaagtgagaccctctttggccaatctgcttctagtcaaggctaaatggattggaataaccctagttggccaggctacacattgccagcatgtcccgttgagttttaattgcctcatgtggctgtggactttatgagtcaatcatttgtaggctccagtttgcacctagttttttttttttaaaaagggcatttacccccttttggtagccctgttttatcaagaatccatggagggttttggtcagtacagctggtgcaggatcctcacggagaaacagtggagtttcacattgagttggtttgaaatggcaccccaggactttgggcctgccttacttgatagcctcgttcagtgagcaaagacttagtgagcagctcttgtatgccaagtattttgctaagctctggaaaaaagataaacaagacatggttcttgctttcaaggagtgtgtaattctttagccagatatggaaacctggaccctgagtgggagaaaggagacagatgaaaggagtccgtgattttgtaaccaagagctgcctgcatggttatgagtatcactgattttagggacgccccacagagctaaagcattttttttaatccgagaggacttttgtaactcatattagttaatcttctagctctgagatagcaacacagctcttagaattctgtaagtagcttgaggcctcctcctctactgtacatgttcttgctttcccaaaattgtaagtttggtttttcctatgaacaagactgtaattgatttttctctccctgaggaaaaaagttcggaataaatgagacatggatatgaaactacttagcacaatgcctggtacatattaggccctcagcaaatgtggctaccgtgtcattatttcatggtgagactcaaggcaaaacaagattcttaatttatgctccgtaaatgctagaggcttgggcaatacggtctgtcctgaaaaacaggactctgtgtctcattgcctctagaatccttaggtagcagtttctgttcactgtcttttcttttttaaaaatatctgctggacacaattacggccattacatgatgcaggtgattctacctattttttaaaaagaacaaaatttcttttatattgtgacagtacattttaataaaggaaaattattttcttccccctactccccctccttttttttttctggtaaagacagggtctcactctgttgccagactggtctcaaactcctggcctcaagtaacccttctgtctcagcctcccaaagtgctgggattacaggtgtgtgccacatgtccggccaggaaaattattttctatcttaaagaaacatagttacattttagaatgtcaattcagttaaatctttctcagtttttacctttagatggctcctggaaaggccagcgttccttttcccctctctgaattgaaagcacttgaccccatgctgcccctgcttccaggcctgtctcagttgtcatatattgtgagtccctggcaccattactgttttctaagccagtcttctaggtcttactttcaggatgctgcttcatggcatgaggatatagtttacagtgttgtagtttttttttttttaaagctttgttctttaaaaatactttttaaaaaaaaatctactggttaaatttattgtctcacaaaaatgtttttagaagattatttttttccacaaatgttttcctttcctcatgctgatgatcaactgatttttgtcctacaggtggttagcttctcacgagtatttttttcatttttagagtctatttaccaaatgaccatttttagtgttaaaaggtactgaggaattgaggtatgtaaatcaggtgacataaacatgaaaattatgtgcctaaatatttttgtaatggtgtaaaataaatactttttcctga

SEQ ID NO: 80116 - DNA, 2233 bp, Homo sapiens
  sig_peptide (1373)...(1508): this location contains the signal peptide sequence, MQAVRKVFLLFWLIKFLRKMFSPFHNLFLSWKKLNMLLPLKNIAF, Run with SignalP
  misc_feature (28)...(1622): similar to gi4240130 in the genepept database release 114, Run with FASTXY 3.3t00, default parameters
ggcacgaggttccttgctgtggttttttgccttattggttatgttccatcagttattctgttcacttatattgcttctttcacctttaagaaaattttaaataccaaagaattttggtcatttatctattctgtggcagcgttggcttgtattgcaatcactgaaataactttctttatgggatacacaattgcaactattcttcattatgccttttgtatcatcattccaatctatccacttctaggttgcctgatttctttcataaagatttcttggaagaatgtacgaaaaaatgtggacacctataatccatgggataggctttcagtagctgttatatcgccttacctgcagtgtgtactgtggattttcctcttacaatactatgagaaaaaatatgggggcagatcaataagaaaagatccctttttcagaaacctttcaacgaagtctaaaaataggaagcttccagaaccaccagacaatgaggatgaagatgaagatgtcaaagctgaaagactaaaggtcaaagagctgatgggttgccagtgttgtgaggagaaaccatccattatggtcagcaatttgcataaagaatatgatgacaagaaagattttcttctttcaagaaaagtaaagaaagtggcaactaaatacatctctttctgtgtgaaaaaaggagagatcttaggactattgggtccaaatggtgctggcaaaagcacaattattaatattctggttggtgatattgaaccaacttcaggccaggtatttttaggagattattcttcagagacaagtgaagatgatgattcactgaagtgtatgggttactgtcctcagataaaccctttgtggccagatactacattgcaggaacattttgaaatttatggagctgtcaaaggaatgagtgcaagtgacatgaaagaagtcataagtcgaataacacatgcacttgatttaaaagaacatcttcagaagactgtaaagaaactacctgcaggaatcaaacgaaagttgtgttttgctctaagtatgctagggaatcctcagattactttgctagatgaaccatctacaggtatggatcccaaagccaaacagcacatgtggtgagcaattcgaactgcatttaaaaacagaaagcgggctgctattctgaccactcactatatggaggaggcagaggctgtctgtgatcgagtagctatcatggtgtctgggcagttaagatgtatcggaacagtacaacatctaaagagtaaatttggaaaaggctactttttggaaattaaattgaaggactggatagaaaacctagaagtagaccgccttcaaagagaaattcagtatattttcccaaatgcaagccgtcaggaaagtttttcttctattttggcttataaaattcctaaggaagatgttcagtccctttcacaatctttttttaagctggaagaagctaaacatgcttttgccattgaagaatatagcttttctcaagcaacattggaacaggtttttgtagaactcactaaagaacaagaggaggaagataatagttgtggaactttaaacagcacactttggtgggaacgaacacaagaagatagagtagtattttgaatttgtattgttcggtctgcttactgggacttctttctttttcacttaattttaactttggtttaaaaagttttttattggaatggtaactggagaaccaagaacgcacttgaaatttttctaagctccttaattgaaatgctgtggttgtgtgttttgctcttctttaaataaaacgtatgtataattaagtgaagctgcatgtttgtattgaagtatattgaactatatagtttgtatgtcatctttttcaccattcaaaaacagtgcttctgaatttgtgatttaaaggaattgtaatagaatagttttatttttaagttatctttaagtttatgccatcttcttaaataagtacgtaatgttccaatctaaataaaaaactaatacataactaatgcatagaaaagatacataaagcaatgggaaagtttcttgcttctcctttttaatttctaaaaaagccactttgaatggaagttgtcatccgtaaaagctgaagtgtaagcactaggaaatctcaatatagagatttgaggaaagttatatccactaggtggcagtcattgatcataataagtgaaatgagcccttgttc

SEQ ID NO: 80117 - DNA, 793 bp, Homo sapiens
  sig_peptide (89)...(224): this location contains the signal peptide sequence, MASSWGGYLNTFLTQGCVWVSLALREGKLSPVFPWSFLSWASSST, Run with SignalP
  misc_feature (45)...(83): similar to gi4662641 in the genepept database release 114, Run with FASTXY 3.3t00, default parameters
ggaaaaaaatgaggttcaagaggccaaatggctcccaggtttccactctgcctaagccccctcttcctcctcccctaggttttccataatggcttcttcctggggtgggtatctgaacacctttctcacccagggctgtgtttgggtatctcttgcccttagggaagggaaactgagcccagttttcccctggagtttcctttcttgggcttcttcctccacctccaccatcttcacttccccttctcactggagggctgaacacatgcagattagggggaaggcagatttgaaggcctcgctggactgtgcatgggatcatggagacccctcagtggagtaagccctgagcagtcagaggtgtttggactctgccacttcctagctgtggaacttcaggcctcagtttccttgtctgtaaaatagggatatcaatacctgctccacctagctcaatgttgtgaagcttcaattaaatgtttgaaaaagtgctttgaaaactgcaaggcaaatgttagctgttaagtttagtgtcagcctgtgccagcctcccgtattcagcctagactaaaatgagttttgtgagtgggtatcacaatgtctgctgtgggctggggggatggaaaatgggggttcccagctaccagttgaacaacatctgggctttcaagggggggcccaagccggggtgggcataattccaagaaaggggggcccgtggcaactcccccacactaagttcccctatatttccccaccgtctttttgagggggcgacagacaaactactacc

SEQ ID NO: 80118 - DNA, 399 bp, Homo sapiens
  sig_peptide (111)...(246): this location contains the signal peptide sequence, MIKAVLLGWFGCELSTRFEMDNQLQLIPGVSGFQISNPPILLVCF, Run with SignalP
  misc_feature (4)...(109): similar to gi1323715 in the genepept database release 114, Run with FASTXY 3.3t00, default parameters
actcacttacgtgacagaagagttgactttgcccactggtgttcccacaataatttgaatgcaggagcaggaggtctggcaggtactttttccatgaaaagcatgcccgtatgattaaagctgtgctgctggggtggtttggctgtgaactcagcaccagatttgagatggataaccaactgcagttaatccctggggttagtggattccaaatttcaaatcctcccattttgttggtctgtttcttacagtttagagatctttaggcaggcagcgattaaagcattgtggagaaaatctattttgctgactggttatctggaatacctgatctagcactgctatggcaaaaataaagcagaatctaagaagccaatggtgacctggaggtgaccatta

SEQ ID NO: 80119 - DNA, 407 bp, Homo sapiens
  sig_peptide (91)...(226): this location contains the signal peptide sequence, MMMPSTVLAYTQLGTFMMLIMCISWAFATFFFQCMCRCLGPQGTC, Run with SignalP
  misc_feature (10)...(275): similar to gi3193163 in the genepept database release 114, Run with FASTXY 3.3t00, default parameters
cccgaccgagaaggcaaagtgatcttctctctgagtcgcgtgggctctgcgatggccatggctgccctgaccaccttcgtggcaggggccatgatgatgccctccacagttctagcttacacccagctgggcaccttcatgatgctcatcatgtgtatcagttgggctttcgccaccttctttttccagtgcatgtgccggtgccttggaccacagggtacctgtggtcagattcctttacctaaaaaactacagtgcagtgccttttcccatgccttgtctacaagtcccagtgacaagggacaaagcaaaacacataccataaatgcttatcatttagatcccaggggcccaaaatctgaactggagcatgagttttatgaattagaacctctggcttcccacag

SEQ ID NO: 80120 - DNA, 389 bp, Homo sapiens
  sig_peptide (136)...(271): this location contains the signal peptide sequence, MLRCLLFYFSSLGKGSFSSTIYLPEVCVGEEARTTPSAMCSCRAA, Run with SignalP
  misc_feature (15)...(165): similar to gi1142588 in the genepept database release 114, Run with FASTXY 3.3t00, default parameters
tttcagcgaaaagtttgctggcaattttcatctgttctatgacaacatttttactagtgagttttcacttgccacttggttttcctggtccttttctcgtttttattttttaattcttgcagagtcttcctgtagatgctgcgctgtttgcttttttatttctcatctttgggcaagggaagtttttcttcaaccatctatttgccagaggtttgtgtgggagaagaagcgaggactacacccagtgccatgtgcagttgtagggctgctcatgtgcagtctggtgattcctctttttgcctgcaagtgtggcttgtctgtgtgattgtctgtgtctgatctgctgcttctgcttcttggtttcaagcttacctgtatctcacatgcca

SEQ ID NO: 80121 - DNA, 384 bp, Homo sapiens
  misc_feature (1)...(384): n = a,t,c or g
  sig_peptide (219)...(354): this location contains the signal peptide sequence, MFTFMFMFMFRALCGLGRLRTRSLTQPQATVLAIHSATSSSRILN, Run with SignalP
  misc_feature (2)...(343): similar to gi1302467 in the genepept database release 114, Run with FASTXY 3.3t00, default parameters
aatacatccctgcatgacactgagcgccactggccatttcccccatatttacacgtgctttgggcggctggcctcatccttcgtatgaagaggtggtccctgcctgacactgagctccatggcccatgttccccattggatgtttggacggccggtatgaagaggtggcggtttacggccatttgcctctttcctccctgacgcagccttttgggttcatgttcacgttcatgttcatgttcatgttcagggctttgtgcgggttaggaaggctgaggactagatccctgacacagccacaggccacagtgctggccatccactcagctacctcaagctccaggatcctgaactccagcagctcgttttggtctctgacgtccn

SEQ ID NO: 80122 - DNA, 393 bp, Homo sapiens
  sig_peptide (208)...(343): this location contains the signal peptide sequence, MLAAKLTLILELLHLLCSLFILILHTVLDSHFQAASLDIVQQSML, Run with SignalP
  misc_feature (12)...(337): similar to gi2992470 in the genepept database release 114, Run with FASTXY 3.3t00, default parameters
ttcgccattcgtgctgttctcctcaactttggcgctgccttccttaccctccatgctgccgtcgctggccaccgtgctgctctctctgacctcctcgctgcccctggcctctacactactctcactggtccccgtgcttccttccttggccttcaggctgccgtccttggcttccattctgccctccttggccttgacctcaccttcatgctggcggcgaaactcactctcatcctggaactcctccatcttctctgctccctcttcatcctcattctccacacagtccttgactcgcacttccaagctgcgtctcttgacattgtacagcagagcatgctgcctccgggctgcacagaacaccacggagtagcaggcaatcatgacaatcag

SEQ ID NO: 80123 - DNA, 410 bp, Homo sapiens
  sig_peptide (20)...(155): this location contains the signal peptide sequence, MHVCLHIWGLGVCVFMHMMCACVGVYVCPFMRYGMQICACIHAHS, Run with SignalP
  misc_feature (3)...(272): similar to gi1333929 in the genepept database release 114, Run with FASTXY 3.3t00, default parameters
aatacagtgtggggtgagtatgcacgtgtgtttacacatatggggtttgggtgtgtgcgtgttcatgcatatgatgtgcgcatgtgtgggcgtatacgtgtgtccatttatgaggtatgggatgcagatatgtgcatgtattcacgcacattcatgtagcgcatgtgtgtgttcgtgcatatggtgtatgcatgggtgttcgtatctgtggggtacaggcatcatgcacgtgtgttcatctgtgtggggtgtgggtatacctggactgtggcctgaggctcccctacaggacactgctccctgccgcctccccaggggataacaggaccctgctcctcttgctaaagccagtttgggagcacccccacccaggcactccacgccagccaggctcgcctctgaccagatgg

SEQ ID NO: 80124 - DNA, 2361 bp, Homo sapiens
  sig_peptide (1432)...(1297): this location contains the signal peptide sequence, MKASVLSPSFLLVLWSCFLSCSCMEPQSGFPRPSCFTVGFLLRRR, Run with SignalP
  misc_feature (21)...(1879): similar to gi4240325 in the genepept database release 114, Run with FASTXY 3.3t00, default parameters
acgcctgcttggacgagccctcgtgccaattgcccttaaaagcttggctggagaacatgccatataacatttacataggagaagctatctgtgaaactcccagtgacttatatggaaggcttttaaaagaaaccaacaaacaagagctatgtcccatgggcaccggcagtgattttgacgtgcgcatcctgcctccatctcagctggaaaatggctacaccactcccaatggtcacactacccaaacatctttacacagattagtaactaaaccaccaaaaacaacaaatccttccaagatctctggaatcgttgcaggcaaagccctctccaaccgcaatctcagtcagattgtgtcttaccaaacaagggtgcctcctctaacaccttgcccggcaccttgcttctgcaaaacacacccttcagatttgggactaagtgtgaactgccaagagaaaaatatacagtctatgtctgaactgataccgaaacctttaaatgcgaagaagctgcacgtcaatggcaatagcatcaaggatgtggacgtatcagacttcactgactttgaaggactggatttgcttcatttaggcagcaatcaaattacagtgattaagggagacgtatttcacaatctcactaatttacgcaggctatatctcaatggcaatcaaattgagagactctatcctgaaatattttcaggtcttcataacctgcagtatctgtatttggaatacaatttgattaaggaaatctcagcaggcacctttgactccatgccaaatttgcagttactgtacttaaacaataatctcctaaagagcctgcctgtttacatcttttctcggagcacccttagctagactgaacctgaggaacaacaaattcatgtacctgcctgtcagtggggtccttgatcagttgcaatctcttacacagattgacttggagggcaacccatgggactgtacttgtgacttggtggcattaaagctgtgggtggagaagttgagcgacgggattttttgtgaaagaactgaaatgtgagacgcctgttcagtttgccaacattgaactgaagtccctcaaaaatgaaatcttatgtcccatacttttaaataagccgtctgcaccattcacaagccctgcacctgccattacattcaccactcctttgggttccatttggaagacatcctggtgggccagcgcctcttgtctattttaatcttaagtatcttagtggtcctcattttaacggtgtttgttgctttttgccttcttgtttttgtcctgcgacgcaacaagaaacccacagtgaagcacgaaggcctggggaatcctgactgtggctccatgcagctgcagctaaggaagcatgaccacaaaaccaataaaaaagatggactgagcacagaagctttcattccacaaactatagaacagatgagcaagagccacacttgtggcttgaaagagtcagaaactgggttcatgttttcagatcctccaggacagaaagttgttatgagaaatgtggccgacaaggagaaagatttattacatgtagataccaggaagagactgagcacaattgatgagctggatgaattattccctagcagggattccaatgtgtttattcagaattttcttgaaagcaaaaaggagtataatagcataggtgtcagtggctttgagatccgctatccagaaaaacaaccagacaaaaaaagtaagaagtcactgataggtggcaaccacagtaaaattgttgtggaacaaaggaagagtgagtattttgaactgaaggcgaaactgcagagttcccctgactacctacaggtccttgaggagcaaacagctttgaacaagatctaggtcatgtaatcttacttcatacagaggacatttatttaatgatgaaagtgccttttgttgacttctaacttccaaatactatattatcaataggcatggaggcaggtgtttccaagggtgtctcattaactgtagctgcaaagatgtgtcaagtagaagagaatttgtttaatagattttactacataaaacctatactgtggagtcctgtggggatactgcaaactctattgccaaagggatgctttatacacataatactgaatttaacctcaagaggcaaatctgttttgtactccaatgcaaaaccttcgtctctttgtgctttgtaaagcaaactcaagaaaactggtacacctgtaccagctgggtcctttatcttgcacgtagattaagttggtggaactggaataatccttttgatttgtggcattgtaacaactccgtgtaaagattatctgaaaagtaaaaaaaaaa

SEQ ID NO: 80125 - DNA, 379 bp, Homo sapiens
  misc_feature (1)...(379): n = a,t,c or g
  sig_peptide (24)...(159): this location contains the signal peptide sequence, MFAXQYWFMLFPIYIFLRDISPNRKIPTSICWFHFIRRVKYFFMS, Run with SignalP
  misc_feature (1)...(120): similar to gi1262708 in the genepept database release 114, Run with FASTXY 3.3t00, default parameters
cattatatttacattccagttctatgtttgccagncaatactggtttatgctttttcctatatacatatttttaagagacatttcacctaacagaaaaattcctacttctatctgctggttccattttatcagaagggtgaaatattttttcatgtcccaccatcatagaagttttccatttgtctgtcaggggttgataagcctggtgcaggaccacccaggattggttcctttcatctcctgggtgctccctcagaagggagcttctgttcttccctaccacttctgaagcctcagcccttcctccttttttgttagtcactgctgaattttctcctgtttcccacaaatccagtcttaaccagtctttaggaacan

SEQ ID NO: 80126 - DNA, 594 bp, Homo sapiens
  sig_peptide (112)...(247): this location contains the signal peptide sequence, MMCKVCFSTKSLATFVTCVTFLSSMNSYGMKGMNYPRKPCHKPYV, Run with SignalP
  misc_feature (591)...(350): similar to gi186774 in the genepept database release 114, Run with FASTXY 3.3t00, default parameters
tgtaaggttctctccagtatgaactctctgatgttgtgcaaggcataaatcatggtggaaaaccttgtcacaacccttacatttgtaagatttccctccagtatgaagtccatgatgtgcaaggtttgcttttctactaaaagccttgccacattcgttacatgtgtaacatttctctccagtatgaactcttacggcatgaaaggcatgaattatcccagaaagccttgtcacaaaccttacgtttgtatggtttttctccagtatgaattctcctgtgtgtttcaagttgtgatcctcaactctaaactttgttgcattcttcacatttgtaatgtttctgtacagtatgaagtctatgatgacactgaagggatgacttctgattgaaggtcttggaacactcattacacttgtaaggtttttccccagtatgaacactatggtgccatgcaaggtattgcttctgatgaaagactttgccacatacatcacatttatactgtttctctcctgaatgggttacgtgatgtctccttaaacgtgagctatgattaaaagctttgccacactcattacattggaaaaaaaaaa

SEQ ID NO: 80127 - DNA, 1691 bp, Homo sapiens; identical to SEQ ID NO: 80061
  sig_peptide (172)...(307): this location contains the signal peptide sequence, MLRWGFLEILFLRSWFHSWICLLPTPQLPPNGASAGSQDEGSRRR, Run with SignalP
  misc_feature (1691)...(1078): similar to gi3002527 in the genepept database release 114, Run with FASTXY 3.3t00, default parameters

SEQ ID NO: 80128 - DNA, 1078 bp, Homo sapiens
  sig_peptide (157)...(292): this location contains the signal peptide sequence, MHMMYVYMPVSVYLYLCLCRSMYVYVCLCLECEGYTPSLWRVFTY, Run with SignalP
  misc_feature (41)...(282): similar to gi1333929 in the genepept database release 114, Run with FASTXY 3.3t00, default parameters
aaatactattgatataaaattttaaaacatacaaagcaacactatatgttgtttatcaatacgtattacctgtttctttgcatatgtatatatatgtgtatacccattataaataatggacatttatatgtatgatacatatgtgtgggttttggcatgcatatgatgtatgtatatatgcctgtatctgtgtatttgtatttgtgtctgtgtaggtctatgtatgtatatgtgtgtttgtgtttggaatgtgaaggctacactcctagcctgtggagagtgttcacctatgtgatggaggagggagaagaatgggatagaagggcttcaactgagtctttaatgttttacatatgtaaatattctcattcagaagtggaaaacgttagtgttaaatctgggtagtgcatatataggctgattgatatcttctgtatttttatggatgtgtgaaacatttcatatttgtgggagaaaacagacctggaccaacagggatcaggcccgctggcatgtgccaagttcgcctttaaattaagtcggaagccccctagcttctttttttgcccttcttggtcggtacctactttggggaatgtcaccctggacgaataacattggatggagggctggcttctttgcctgagactttacgatggcattcttattgctatctatgcaattgtatgcggaacctctctgcaggcactgttatgctcacaccctgcgataaccatggcggcaccctttgcccgtaacgacgatgtttgcgatcacaacctctcgcaaatcttccccccccaaaagaaaatccaattttgtgaactaaaaacacttgcgcacccatgcatctcttattttatcttacgcccgccacgatcccgttttgctcaccccccctctccttctctcgcgttctctgccccatcgctctctgcgaaggtactgttctatgcagagaagcgaagccatctcttatcgttcttatcttcgtctccccgtacacgcttctggttttcttcggttcggtcccccctcacgcactcgcatccattctgcctgctatagcaggactcct

SEQ ID NO: 80129 - DNA, 409 bp, Homo sapiens
  sig_peptide (159)...(294): this location contains the signal peptide sequence, MLAINTLVRMSRLVQKVGSGRWQGGRLLWIWTLPVSLGLNEILNL, Run with SignalP
  misc_feature (412)...(317): similar to gi311518 in the genepept database release 114, Run with FASTXY 3.3t00, default parameters
tttcgtggattgctgagagactgggcaaggggcttttttatgtttttgatgcaaagcaatgagatagttgctctgtgtctgcctgtgtttcaggaaaattctgttattactgaaatctttggtttgaaagccactgttagaactaaatattttgggaaatgttagccattaacaccttagtaagaatgagccgattagtccagaaagtaggatcaggtaggtggcaagggggtagacttctatggatctggaccctcccagtgtccctgggcctcaacgagattttgaacctagaagttcatcttacccaatgctgtgcctctctttactcttgctccagcccttgtgggcccctccctctcaactcaggccctagagtggcctgccttctgctatcgaccactctgag

SEQ ID NO: 80130 - DNA, 680 bp, Homo sapiens
  misc_feature (1)...(680): n = a,t,c or g
  sig_peptide (663)...(528): this location contains the signal peptide sequence, MRSMGFRAQGLPFGIRQTWLRILDLLLTCTLPFGSRDVKWRCCHL, Run with SignalP
  misc_feature (42)...(680): similar to gi1177607 in the genepept database release 114, Run with FASTXY 3.3t00, default parameters
cagtaatatgcccagatagtatccaatagaaagcatntcagcctttcttccccttcctccctccctccctccttttggagcccccagtgtctactattcccatcttttttatttgagacagtgtctcgctctgttgcccaggctggaatgcagtggcacgatcacggcttactgcagcctcaatcttctgggctcaagtgatcctcccaacgaagccttccaagtagtgggactacaggcatgcgccaccacgcccagctacttttcatattttttgtagagactggacctccctatgttgctcaggctggtctcaaactcctgagctcaagcaatccacctgtctcggtctcccaagagctgggattccaggcgtgcaccagtgcctgacttcgttctttatggctacatccaacatcatttcatttagtcctctcagctgttctgaggtcagcactattatctccatttcacagatgaagaaattagtatttgtcatttcaacgaaacttcatggagccctcacaaatgacaacatctccatttcacatcacgagacccaaagggaagggtgcacgtcagaagcaaatccaggatgcgaagccaggtctgtctgatgccaaagggcaagccctgagcccgaaaccccatactgcgcatgcccagcacacctgcgtttc

SEQ ID NO: 80131 - DNA, 400 bp, Homo sapiens
  sig_peptide (95)...(230): this location contains the signal peptide sequence, MPARSCHLPSLSTGLLLWEMGSGGSCLSGSEEDPRQGYLSLLPAW, Run with SignalP
  misc_feature (23)...(377): similar to gi203807 in the genepept database release 114, Run with FASTXY 3.3t00, default parameters
gcagggttgtcagggcctatagggaccaagccaggccattcacagctcatcccagaccactggggctgtcatctgtcaccaccactgaaccaccatgccggctcggtcatgccacctcccctccctgagcactgggctcctcctctgggaaatggggtcaggaggcagctgtctctcagggagtgaggaggatcccagacaaggttacctgagcctcttgccagcctgggaggggtctacatcacagtcccattgtcacatgaggacacttgctcagtctcagccggaagtggcaggccagggactctcacccacacagccaggccccagagcccaagctcagcctggctccaagcacacacacgagaatatggctttagtaggaactgcgggattcata

SEQ ID NO: 80132 - DNA, 728 bp, Homo sapiens
  sig_peptide (263)...(398): this location contains the signal peptide sequence, MFTLLVLLSQLPTVTLGFPHCARGPKASKHAGEEVFTSKEEANFF, Run with SignalP
  misc_feature (2)...(197): similar to gi3298564 in the genepept database release 114, Run with FASTXY 3.3t00, default parameters
gccggccaccccggaccgaggcaggacctcaccccgcgcgtgttccccgggcgcccctctgcgaaccccaggcccttcccaggtttgcgcgcgggggccatccagaccctgcggagagcgaggcccggagcgtcgccgaggtttgagggcgccggagaccgagggcctggcggccgaaggaaccgccccaagaagagcctctggcccgggggctgctggaacatgtgcggggggacacagtttgtttgacagttgccagactatgtttacgcttctggttctactcagccaactgcccacagttaccctggggtttcctcattgcgcaagaggtccaaaggcttctaagcatgcgggagaagaagtgtttacatcaaaagaagaagcaaactttttcatacatagacgccttctgtataatagatttgatctggagctcttcactcccggcaacctagaaagagagtgcaatgaagaactttgcaattatgaggaagccagagagatttttgtggatgaagataaaacgattgcattttggcaggaatattcagctaaaggaccaaccacaaaatcagatggcaacagagagaaaatagatgttatgggccttctgactggattaattgctgctggagtatttttggttatttttggattacttggctactatctttgtatcactaagtgtaataggctacaacatccatgctcttcagccgtctatg

SEQ ID NO: 80133 - DNA, 883 bp, Homo sapiens
  sig_peptide (209)...(344): this location contains the signal peptide sequence, MCQHVQLIFVFFVETGFHHVAQAGLKLLGSSDLPTSASQSAGIKG, Run with SignalP
  misc_feature (56)...(349): similar to gi1710216 in the genepept database release 114, Run with FASTXY 3.3t00, default parameters
ggacggacccgtccgtaattccaggctcgccccacgcgtccggtctgtttgattttttcttatttatttttttgagacacagttccactttgtctttttgtcacccaggatggagttcagtggcacaaacatggctcactgtagcctcgacctccctggctgaagggatcctcccacctcagcctcccaagtaaccgagactacaggcatgtgccagcatgtccagctaatttttgtattttttgtagagacagggtttcaccatgttgcccaggctggtctcaaactcctgggctcaagcgatctgcccacctctgcctcccaaagtgctgggattaaaggcataagccaccatgtccaactgaaattcttaataattaataatttttgagcaagaggcccacactttcattttgcactgggttcccaaacaggtcctgggtaggaaggatggctgaggataaaacaggagttgctttggcctggctgaacatttgaaccaatgatcagagtttcattttatgattgtggtactctgaacagaatggctatttttttccagctacattgagagccccccaaggaaagagcacccctctttttccaggccatctaaccttctcttttttttgggcccacaatcctttctccttgccttacaaaaacccggataaggggccatttctttctggaatcccttgctgtagtacaccccaagacagggcctcagcagttatccttacaccctacgacgtatcccctcgctgaacccgcgacgtggagctccgcagccttttcggcgcgaacaaaataccttctaacacacgtggggacgcggtcccctaatctcgtcacagcacgtcctgatcctgaggcaagcccc

SEQ ID NO: 80134 - DNA, 952 bp, Homo sapiens
  sig_peptide (755)...(620): this location contains the signal peptide sequence, MQLILWLPWYVDQTFCHSVLQCCCPGQLCQSFHSNRNDARLLGAK, Run with SignalP
  misc_feature (126)...(498): similar to gi1872200 in the genepept database release 114, Run with FASTXY 3.3t00, default parameters
ggcacgagactcagatagtaattctccaacattgctcatatgatttagtaaatcactgcatgttctcggtttaaaaggattttccctgtcttataccttctatgaattaaaaagcttttggaccatggatgaatgacataagaatttaactacttttttttttcttttcttttgaggcggattctcactctgtcgcccaggctggagtgcaggggggggatcttggctcactgaaacctcagcctcccgggttcaagggattctcctgcctcagcctcctgagtagctggaactacaggggtgggccaccacacccagctaattttttgtatttttagaaaagacagggtttcaccatgttggtcaggctagtcttgaattcctgacctcaaatgatctaccggcctcggccccccaaagggcagggattacaggtgtgagccaccctgcccagcctactttttctttttaaagaatttattttaattgggtttcgtaaatgcagggatacaaaagctattggatcttgagatagctttgtattttgtagagaatcatcccaggagcacattccctcactgagggttccagccacctcttccgcctcattatactttgcttagcaccgagaagtctggcatcgtttctgttggaatgaaaagattggcagagctgccctggacaacagcactgcaaaacactgtggcagaaggtttggtctacataccaaggcagccaaagtattaattgcattctctgtgatcacaaaataaggcgctgaattattctcttcatgttttaagaatgacaggcttttgctctgccagctccaagcatagtgcatcacatggaaaggagatgctagatttgcacacaaactgattgaggatatggcctgggttgtatcaatttctggtaccactgtctttcttaaaaacatataagggcgagg

SEQ ID NO: 80135 - DNA, 2293 bp, Homo sapiens
  sig_peptide (1387)...(1522): this location contains the signal peptide sequence, MLGLLQFDSGFICLCARVYPSCLEPGQSFITEEDDARSESSTEWD, Run with SignalP
  misc_feature (25)...(1220): similar to gi4650844 in the genepept database release 114, Run with FASTXY 3.3t00, default parameters
atcgcagtgcgctggaattccgcggcctccgacatgctacaggtggaatatgggcgggaagcctgtgcctccttcttagcccgacgtcttgacctgaccaactgcaccgccatcctcaagtttgcagacgccttcgaccatcacaagcttcgatctcaggcccagtcctacatagctcacaacttcaagcagctcagccgaatgggttcaattcgggaggagactctagcagatctaaccctggcccagctgctggctgtcctacgcctggatagtctggacatagagagtgagcggactgtatgccatgtagctgtgcagtggctggaggctgctgccaaagagcggggtcccagtgctgcagaagtcttcaagtgcgtgcgctggatgcacttcactgaagaagatcaggactacttagaagggctgctgaccaagcccatcgtgaagaagtactgcctggacgttattgaaggggccctgcagatgcgctatggtgacctgttgtacaagtctctggtgccagtgccaaacagcagcagcagcagtagcagcagcaactctcttgtatctgcagcagaaaatccaccccagagactgggtatgtgtgccaaggagatggtgatcttctttggacaccccagagatccctttctctgctatgacccttactcgggggacatttacacaatgccatcccctttgaccagctttgctcacactaagactgtcacctcctcagctgtctgtgtgtccccagaccatgacatctatctagctgctcagcccaggaaagacctctgggtgtataaaccagctcagaatagttggcagcaacttgcagatcgcttgctgtgtcgtgagggcatggatgtggcatatctcaatggctacatctacattttggggggacgagaccctattactggagttaagttgaaggaagtggaatgctacagtgttcagagaaaccagtgggcattggtggctcctgtccctcattccttctattcctttgaactcatagtggttcagaactatctttatgctgtcaacagtaagcgcatgctttgctatgatcctagccacaatatgtggctgaactgtgcttctcttaaacgtagtgactttcaggaagcatgtgtcttcaatgatgaaatctattgtatctgtgacatcccagtcatgaaggtctacaacccagctaggggagaatggaggcggattagtaatattcctttggattcagagacccacaactaccagattgtcaatcatgaccaaaagttgcttctcatcacttctacaaccccacaatggaaaaagaaccgagtgacagtgtatgagtatgatactagggaagatcagtggattaatataggtaccatgttaggccttttgcagtttgactctggctttatttgcctttgtgctcgtgtttatccttcctgccttgaacctggtcagagttttattactgaggaagatgatgcacggagtgagtctagtactgaatgggacttagatggattcagtgagctggactctgagtcaggaagttcaagttctttttcagatgatgaagtctgggtgcaagtagcacctcagcgaaatgcacaggatcagcagggttctttgtaaatagtattttgagacactaagatgtttctactgctacggaatgtattttaaacacatatcgtttctttttcttggaaaaaaagttgattaggaccacagatttggtttagaaagggtaatattttgaaatactacaaggtttagacagtccatgaaatcgacctgtttaataatttaccatcctgaaagtccagaattaaaatatggaagcaagaactatataattgattaggatgcttggtaggtttttttcattgttcaaatattcattgcacagtggattgttttgattagttagtatgctttttttttaattaattcagtccttcctgttaatttttaagttttggttagtgcccacaaggaatttaaccttttgatttgtataatagaaaactgaacctaggaattgttagccggggttttgaaggatgtgtacctttcccttcaaaataaagtggtagattttcaaaattttacactagtcagttctttatattactaagttaaatggtagtttggtaaaattattttgggttttccttcctacaaaggaaaaaattggatttatatatataaggttactgcataatgatttcattttgataatgtgcagaatggcctcataagctcacagaaagtaaaaaaaaaa

SEQ ID NO: 80136 - DNA, 2663 bp, Homo sapiens
  sig_peptide (1401)...(1266): this location contains the signal peptide sequence, MQMWWLGAQSAGRCWLRARTATSWWTCSWKRLVRGCCGRKTSSLV, Run with SignalP
  misc_feature (303)...(1901): similar to gi5305335 in the genepept database release 114, Run with FASTXY 3.3t00, default parameters
cattcacctggtggaattctccccacccccccagcatcaataaagtgtcataaacagaatattcttcatttttgtgcatgtcctggggccagccaggcagggactgattcccccccacaactccccagcacagtctggagaatggcatggattcagacaaacacttttatattaaaagctaggggttagcaggactggagtacgcaggctgcccacaagttcctagcttgcaggctctggctctcgaggtcccacacgcctgatgtcaatcacctgaagccgctccagggcagtctggaggatttccaccacggcttcttccttctcgtcaccctcctctggcatttccgactcagggagctggaaggcctggctcatgtaggtgttcactgtctgcttgtccaggctggggtcgatggtcatcaggccccctcgcagcttgggcagagtcacttcctcatggagttctatgccaagctcctgctttagctgctgtaagtactcgtccttctcatccatgtattgttcccagagtttttgcacaaagggctcactctggccctcctcatcctccataaacagtgagcggtagttgagcaagtctgcattgctgctgctgggatgccagccccctgcctccatcagctcctggatttgctcttctgtcttgagagggaaggtactcttgaggacagtgttgaactgctccatggttagtagcccctcgttctgactgtcagcatttgtcatctccttcagcagctgggctactgtctccttctgggtgacatacacattctcactccgctttcccatcaagactgcatagaactgactcataacctcgttggagtggaagatcttgatattttcaaaaatagtataagcccaggccatggcatcactgggcccaaagcgatgctccaggaaattgaagaagaaatctgggaacgtctctttctgctcctcagcaagacgttccttccaggcatccttgaggaggttgaccacgtccttcttgcttggcttcttgttctccacgaggccatcaaaccgaagaaaagcagggatggcttccccatagccctaggagggaggatatcagctcatctctggacccatctgtggccccacccccaatcagggaagatccccagttggttccccaaaagcttgtctgagcagcagggcatggctgttctgactctggcccaagccccactcctggggcctcccctaccagaccagggaagaagtctttctcccgcagcagccccgaaccaatctcttccaggagcacgtccaccagctggtcgctgttcttgccctcagccagcatctgccagcgctctgggcccccagccaccacatctgcatgtggggagagggagctggagtctgggcccacatgtaagcaggacctggggccctgccggctgccctcacctttgcacttggtccagtcaggccgcggcgtggaagtgcgctggatctcctgcagctcagagaagaattggtcccgttccttcagcgtgctcatgtgcagctgcatgaggatctcatgctccttgcgaacctcctcgtagctggctctcagggtgtccagctgtgggcaaggacattggccctggccccccacctgtgagaccccgtcctaccctcctggccctgcctgcctgccagcacctgctcctgaagatccttgttggtcttctcctgcatttcaaagtccctcctggggaccacatctccaaagttggccttcatgttgttgagttccatctgcgtgcgggtcaggtcttgccgggtcatcttaagagccagggttaacttcacagggtcctccccccagatgcctggcgactgggctaatgacatgtcctcccgctggtaccgcagctcattcaggtctgcgatgaggatcttacaggcatctcgctcactgaggtagtgcaggtactcctcagccaagttcttcctcagtttggtcacctcgctctgcaatgaaatcttctcctcattctttttgtcgatgagttttagcaagttcatcttctctttcttgagcagggagatttcatatttctcctcagctctcatggccaggatcctctcattgcagtcctcattcacagtgacaagcttggccttcaggggctccagagcccgaatcttctccctttggtgggcagcgtccttcgtttctgggtggaatctgtgcccaggtccagcaggaggagctccttgcgtaggtagttttccagttcctccaagtactggggcttggcagtgcgaaaggggtgctgctggcagctccagcgtccttcgtttctgaagaagcttgcgattctgggtgctcttgtcttctgtgagaaaggattcgtctatggtcactcctgaaggccgtggctgtaatcgttttgctagcacgtaacgtcttcactgggctaaatcagcccgattctaaccattgactctgtggtgctggagccctagatcaatggtcagaggccagcaggaggtgcagaggtccggatcaagtgccatttccctctctagaagtactcaaaccctcatctctgccctcatccctgccagcgcctacctcgacgcggacgagaagctgtggtaccgcgactgctggcaggccatgacccacgggc

SEQ ID NO: 80137 - DNA, 2121 bp, Homo sapiens
  sig_peptide (1524)...(1659): this location contains the signal peptide sequence, MRNLSQRVTFRMVFAACSRYSRNMQPCCVLIFLKILLCLFYQSVG, Run with SignalP
  misc_feature (74)...(815): similar to gi2960231 in the genepept database release 114, Run with FASTXY 3.3t00, default parameters
gaggcggaattcggtgaccgtctggctgctggagcagaagctgcaggtctgctgcagggtggaggaggtgtggctggcagagctgcagggcccctgtccccaggcaccacccctggagcccggagcccaggccctggcctacaggcccgtctccaggaacatcgatgtcccaaagaggaagtcggacgcagtggaaatggatgagatgatggcggccatggtgctgacgtccctgtcctgcagccctgttgtacagagtcctcccgggaccgaggccaacttctctgcttcccgtgcggcctgcgacccatggaaggagagtggtgacatctcggacagcggcagcagcactaccagcggtcactggagtgggagcagtggtgtctccaccccctcgcccccccacccccaggccagccccaagtatttgggggatgcttttggttctccccaaactgatcatggctttgagaccgatcctgaccctttcctgctggacgaaccagctccacgaaaaagaaagaactctgtgaaggtgatgtacaagtgcctgtggccaaactgtggcaaagttctgcgctccattgtgggcatcaaacgacacgtcaaagccctccatctgggggacacagtggactctgatcagttcaagcgggaggaggatttctactacacagaggtgcagctgaaggaggaatctgctgctgctgctgctgctgctgccgcaggcaccccagtccctgggactcccacctccgagccagctcccacccccagcatgactggcctgcctctgtctgctcttccaccacctctgcacaaagcccagtcctccggcccagaacatcctggcccggagtcctccctgccctcaggggctctcagcaagtcagctcctgggtccttctggcacattcaggcagatcatgcataccaggtatggggcggggctcgctggaggctcatgctcatagctgactcatcacgggccagcttgattacaggctaccgaccaccctgatggaaggctgagccctttggccaaattgctaatctcttctacaaggaaacaaaaggaaaccgaattcactgctcaataaatgtgggaattcctggagttatctacattggcagctgtcatgagtggttactaggaatctagctaaatccctaagtaactgggcgatggatttgggtgggggaattgtcacacctctgcttataagagaggatggagtcgtgtagttgggcttcccacgtgacgtctaggtcctagaattgtgttctgtggacagacagtccagcacgcatgttttgaatacttcctacgggccaagaattggactaagactttcaggttgaagaaggcttagtccctgcccttgtggagggcatggttcagattgagagagaaatgaatatgtaactatggttaattataataaccagtcaaagtactaattactagaggcatgagaaggtgttgtaggtaccagagggaccaacctattttgcccttgtggatgagaaacttatcacagagggtgacatttaggatggtcttcgctgcatgtagtaggtactcaaggaacatgcagccttgctgtgtgctgatatttcttaaaattcttttgtgcctattttatcagtctgtgggccaatttgcaaattagttattaaaaggtattgctttcagtgagaaagctttatgaaatgggccagccctcctccttgttagaatgagtggccgcttagcgatttcatgtttggcccacttggagctgtggctgacctatggggcccagacatgtagctggtgttttcacaaatagccctgaacctggatacccatgagcacactactactctcaagcagttgctggaagatcccatatcttatcccagccatgccccctagacgcagaaggcttggggcctcttttggcacgtgccatggcatgttcttggtaggtgatccagttgagaagttaaatcttctgcggtgattaagtcatgaggctagcacgtagaccagcgctgagggaagggttccaggatgagattggagccttgcaataagggagactactgcaaggcattggatgatactccagtgttgga

SEQ ID NO: 80138 - DNA, 1691 bp, Homo sapiens; identical to SEQ ID NO: 80061
  sig_peptide (172)...(307): this location contains the signal peptide sequence, MLRWGFLEILFLRSWFHSWICLLPTPQLPPNGASAGSQDEGSRRR, Run with SignalP
  misc_feature (1691)...(1078): similar to gi3002527 in the genepept database release 114, Run with FASTXY 3.3t00, default parameters

SEQ ID NO: 80139 - DNA, 1272 bp, Homo sapiens
  sig_peptide (209)...(344): this location contains the signal peptide sequence, MWNVAFLFQWFLSLKKEGRSSVETKDRRSVRDLWGMPKKMVSFGG, Run with SignalP
  misc_feature (1240)...(672): similar to gi3002527 in the genepept database release 114, Run with FASTXY 3.3t00, default parameters
tggaaatgtgcgctgtcgaggggccagacacacatacacagacatgcagagagagaacacttgtataatgacagctatttataaagctgtggccgatggtatacagcgcagagacggagggcactgtcgacgggccacacttaggatatattttctctagtgtaagagaaaagagagagtatggagtacagaggctgataggtgttagatgtggaatgtggcatttctctttcagtggtttctgtcattgaaaaaggaaggaaggtcatcagttgagaccaaagataggagaagtgtcagagatttgtggggaatgcctaagaaaatggttagttttggaggagagtggctaagggaagggcttagggaagtgtgatttgatttctgcacgatgtcaagagcccacttgagttttggttattaaagtaagaccagtttgaatgggtttgggtttttttctaaccatattcaacagcacaggttcaggcatagattaggttgtgagttggatttagatgagagagggtcaaggaaggtgggggcatgtgcacaggagtgattacaatgactggcaatagaattgaaagggagaaggcatgaggcaagtggagaatagtgaaaggtggttggacctgtggagttttccagttccacagacttcactatggaaacagcagtttgcaatatggttttaggtctcagcattggaagttggagtatgtttaagcaagcaatcaaaagaaaattttgttgtgagattcttgtagtgctccaattttaaacaaaatcatagtttgaagaaatgtaatcttaaggtttctcccattttgttgcagctcacaatcattagttaaaactttgattcatgacagggcgtggtggctcacgcctgtaatcccaggactttgggaggctgaggtgggcagatcacctaaggtcaggagttcgaaaccagcctgaccaatatgatgaaaccccgtctctactaaaactacagaaaaaattagccgggcatggtggcatgtaaccccagctgctccggaggctgagacaggagaactgcttaaacccgggaggtggaggttgcggtgagccgagatcacgccattgcactccatcctgggcaacaagagtgaaatgccgtctcaaaacaaaacaaaaaaacaaactttgattcaccttaaagaaataattgagatgatagtaaagagtgttatgtattcctgttatgtaacttgccagtaccagattccagttggctggcatgcaaag

SEQ ID NO: 80140 - DNA, 1999 bp, Homo sapiens; identical to SEQ ID NO: 65836
  sig_peptide (1947)...(1812): this location contains the signal peptide sequence, MPGLVLMWGLGGAWGRVGISLRLGNLRCPSRVPAARFGPRPSWRG, Run with SignalP
  misc_feature (127)...(1415): similar to gi3877186 in the genepept database release 114, Run with FASTXY 3.3t00, default parameters

SEQ ID NO: 80141 - DNA, 982 bp, Homo sapiens
  sig_peptide (203)...(338): this location contains the signal peptide sequence, MSSGELRLPSSAALVSLFAPAAPCSISFLTIYVVSLLAVIMATTL, Run with SignalP
  misc_feature (554)...(851): similar to gi1888540 in the genepept database release 114, Run with FASTXY 3.3t00, default parameters
aagcgccgaggagcttcgcgcaggcttattttcgctcagctggttgacgttatccaggagaatcgcgttggactcagggaagacctgcacaggatccggttgttgctgggtccgagggctgtagggagtggagaaagggccgggaatcgttaagcggggtctgggagaacgacttgcagattcacatttcctccgcccgcggatgtcctccggggaattgaggcttccttcctcagctgcccttgtttctctctttgctcccgctgccccttgttctatttcgtttcttactatttatgtagtctcattgcttgcggttataatggccaccactttattgagcattcactgtacaagcatctcgcagcaggcgctcataagcgtctggcaattcttggccactgctggaagcccaatcattcttttaccatggaagggatttgagagcctacataatcctgtactctaatagccacatggtactcttggggctaggaagataaagtagaaattgaaattgctgttgtattagttttctgaagctgccataaccaagtacctcacactggatagcttaaaacaacagatatattttctcgctttctggagtctggaagtcagaaatcaagatgtcagtgggggtcttgcttccttctgagactctggcacgaaatcctctctgactcttcctaactttcagggggagcccgcattcattggtgtactttcgcttgtagctgcattactccattctcttcctctggtatcaaatgggatactccctgtggggctctggctctgtggggtttataaggacaccagtcctggtaagtaaaaggctcaccttactccaggatgacctggtcatgactaatcacatctggcatggaccttttttccaaataaggccacctttttaggttccaggaaggacatgaaattttggggggaaacccacccccccccgaaccgcgtgtcaaac

SEQ ID NO: 80142 - DNA, 958 bp, Homo sapiens
  sig_peptide (209)...(74): this location contains the signal peptide sequence, MGSQVGWLAWLTWLRWLIWCFGSDCCLGPSLPVYVTSAGAAFPER, Run with SignalP
  misc_feature (17)...(197): similar to gi1345539 in the genepept database release 114, Run with FASTXY 3.3t00, default parameters
aacgatttcgttccgtcccgccccgagcacgcccctcactccgcaccggcctatggcaccgccccgtccgccccgctctgggaacgccgctccagcagatgtgacatagactggaagtgatggacccagacaacaatcagaaccaaagcaccagatgagccacctcagccacgtgagccatgccagccaccctacctgtgaccccatctgtggccccagttatcatggagtagagccctttctctgtctacaaaaccaacttcctcgcccagctcatgggaacacttattctgttgtatagaatgaagtgttgcttgattctagaatcgacaaggctcatcccaggaggatccatgatgctttatgaagacagtcccaacagcccatctctgtcatcctccagacgtgccaaggctgaatcatggagcaaacacagcacaggctcaagctgagaccctgccatgtgacctcctagttctatgagataccctttaacaatgcagaattgacaaaccctcccagaacctgatgtagatacacatatttattatataagggggtcactaaagaaacaattttttggagtgcttaatagcatacttttggatccataagaaggttttaaggaaaggtttctttggtcaagggaattttggaaaaagcctcaatagggatatagattcttgggagacttttgggaaacacattatgggcttttccgaaacccctggcataagatttggccgcaaggaatttatttccaccctttaatcccttaattttttggagaaaggggttttgggcacttgaataaccttttcaaaacccatttttggggaaaaactttttatttatttttggggggcaacacctgggtgtaataaaaagcttctattgggttcgtcgtcccccttctctccagatggggcagttatcgacctgggggacgtgcgtgtcc

SEQ ID NO: 80143 - DNA, 538 bp, Homo sapiens
  sig_peptide (131)...(266): this location contains the signal peptide sequence, MLLATLLLLLLGGALAHPDRIIFPNHACEDPPAVLLEVQGTLQRP, Run with SignalP
  misc_feature (7)...(508): similar to gi6015444 in the genepept database release 114, Run with FASTXY 3.3t00, default parameters
tttcgtcgggccatggagcccccctggggaggcggcaccagggagcctgggcgcccggggctccgccgcgaccccatcgggtagaccacagaagctccgggacccttccggcacctctggacagcccaggatgctgttggccaccctcctcctcctcctccttggaggcgctctggcccatccagaccggattatttttccaaatcatgcttgtgaggaccccccagcagtgctcttagaagtgcagggcaccttacagaggcccctggtccgggacagccgcacctcccctgccaactgcacctggctcatcctgggcagcaaggaacagactgtcaccatcaggttccagaagctacacctggcctgtggctcagagcgcttaaccctacgctcccctctccagccactgatctccctgtgtgaggcacctcccagccctctgcagctgcccgggggcaacgtcaccatcacttacagctatgctggggccaaaagaccccaggggcacgggtttttttgttttttaaaagccaag

SEQ ID NO: 80144 - DNA, 875 bp, Homo sapiens
  sig_peptide (121)...(256): this location contains the signal peptide sequence, MILHFGLGSAGWFCCCPWGSPMWCSWELSCTCIVRGSLGQDCWQQ, Run with SignalP
  misc_feature (92)...(426): similar to gi2289028 in the genepept database release 114, Run with FASTXY 3.3t00, default parameters
gcaattcccgggtcgacgatttcgtggcacagtgacggatgtgctttggagcagtcggctattgctgcataacacagcatcccaaaacagtgggttacagccccagtaactaacctactcatgattctgcactttgggctgggctcagctgggtggttctgctgctgtccctggggctcacccatgtggtgctcatgggagctcagctgcacctgcatagtcagggggtcccttggccaggactgttggcagcaggggtcagattttcctcatggcctctccagcaggccagcccgggtttctcctggtggctgggagccaggagagcggctcccatgcagagtgctggtttcacatttgtgggtggcccatccgttgaggccagtcacgtggccaggcccaggaccagatgggagaggaccgcacaagtgcagcgtgagctgtgggaggtgtggctgaccacgcttagagagtgtggtgccaggaaagatctgatgtgtcaccattctatatctgtgatgggcagacgcaggcaggtcaaaggggccctggggacttaccgagcccctgcctattggccaagcactgtgattgtcctcggggccatgtgccatggaagccctctcaaaggtccaggggaggcaggtggatacagaacctttggaggcctttcaagctgtaacccccaaacccaaaagcaggccgattcattgtggcagtcagagagcattagtgggcactggacccattagggaccgcttatggacccccaggcggaagcctttacgatacctctgcagttgagcctcttccgggacctggtatagcagctaacttttgatgtgggggggggaaccccacgctggtggtcgccc

SEQ ID NO: 80145 - DNA, 1181 bp, Homo sapiens
  sig_peptide (50)...(185): this location contains the signal peptide sequence, MPSQGSTLLGVVLLQQSCSHLLLCVCSPGPEACPAGEAWGGRRAR, Run with SignalP
  misc_feature (42)...(651): similar to gi3879403 in the genepept database release 114, Run with FASTXY 3.3t00, default parameters
tttcgtgagtctgggaaggggcgttgggctggcttgggaagggcattgaatgccaagccaagggagcaccttgctgggagtggtcttgttgcagcaaagctgcagccacctccttttatgtgtctgcagccctgggcctgaggcctgccctgccggagaggcctggggagggaggagagccaggctgtgtggtctaggggccaactccacctctggagtcaagtctggagccaaacctcactgtgtcacctcctccgtgtgcatgctgtccctgtgcaaacccctcaccaagactccgtcttcctcctgtaaaatggggatgtgatcctttctagtggggcacttgggaggctgacagctcagatgttctgtgcacctagcaccatcctggcacagaggaggggaggaggccccgtgtcttgcatagcctccggggcagagagagtcccctaggaaaggggcgcagctaagttcaagcaagggcctgcccagcagccaaggttttcactgagggcattcccctagtccccacatgcatgacctcatccatggtcacgttcactccccttggtgccggaaggaacttggagctggggtgctccatgccaggctgaccctggcatcactggaggcctcagtcagcactgcatctacctgctttggggatagtgaggcacagcaggggtcagagcaggtggaagcagcaggccagccctttgttctccgaggtccagggtggttgggagagagcactgtgatctggagccaagctgactgggctggaatcccagctctgccttttcctttctgagctttccctttctgagcctcggactcggcatctgtagaatggggatgtggatagccgttgcctgctggtgcgttattaagtttttcaaaaaaaaattttggcaccgagccaactccatctttacccgctctggaaggtttaacaaaccacctcccgacacggcggccactctccattgttgtttcctgtcctcctccagacaaacggccataatgcggcgctttgcgcaacttccctccactaattcctggacccctctttaccttgctgcgcttcccaagggagagaaaccccttctcaacctctgcaggctaggccgctacgaaccttcttaatgccggttctattcttatcctcccgccccgacacc

SEQ ID NO: 80146 - DNA, 1510 bp, Homo sapiens
  sig_peptide (893)...(1028): this location contains the signal peptide sequence, MWIYFWTLNSVPVIYMSTLMSIPHYFDYCCFIVSDIMLPEITFST, Run with SignalP
  misc_feature (2)...(231): similar to gi3002527 in the genepept database release 114, Run with FASTXY 3.3t00, default parameters
ttttttttttttgagacggagtctcgctctgtcgcccaggctggagtgcagtggcgggatctcggctcactgcaagctctgcctcccgggttcacgccattctcctgcctcagcctcccaagtagctgggactacaggcgcccgccactacgcccggctaattttttgtatttttagtagagacggggtttcaccgttttagccgggatggtctcgatctcctgacctcgtgatccgcccgcctcggcctcccaaagtgctgggattacaggcgtgagccaccgcgcccggctgcaaataatctttctttttttctgagacagagtctcgctctgttgcccaggctggagtgcagtggcacgatctcggctcacggcacgctccgcctcccgggttcacgccattctcctgcctcagcttcccgagtagctgggactacaggggcccgccaccacgcccggctaactttttgtgtttttagtagagacggggtttcaccgtgttagccaggatggtctcgatctcctgaccttgtgatctgcccgcctcggcctcccaaagtgctgggattacaggcgtgagccaccgcgcccggccagggatgtcattttttataactagccataaactttagctttgaagtaaaactatttctagcaagtgattcttacctgatattttttgttgttcttgcccatattttaattgggttgtgttattatggttctctatgtattctagatttaagtttttgtatatggtgtgaggcaagtgtcaagtttaattttttttctacaaacatcctgttgttccagtaccttttgatgataagactgtcttttcccccattgaattatcttaacgccctcatgaaaagcaattggccatatgtatgtggatctacttttggactctcaattctgttccagtgatttatatgtccacccttatgtcaataccacattattttgattattgctgctttatagtaagtgacatcatgttgcctgaaatcacgttttccacctttattcttctgttgatggttgctttggcaattaggggtcctttgcattttcgtagacattttagaatcaacttatctattgctactaaaaatgcttgattgggattgtggtaaatctagaaactaatttaggaagaatggtcatattaacagtttcaagtttcagatccatgagcatattttcactctccattaggtcttttaaaatttatcctagcagtgttttatggtttttactgtagaggtcttacacattttgttacatttgttgctatgtgtttgaccttttttgatactagtgtaaatggaaattttttcttttatgttctagttgttcattattacactaaatcatctttgggtgactactaaacattctattgaaaatttgtgaatggtgtgaacccgggaggcggagcttgcagtgagccgagatcccgccactgcactccagcctgggcgacagagcgagatccgtctcaa

SEQ ID NO: 80147 - DNA, 3563 bp, Homo sapiens
  sig_peptide (274)...(139): this location contains the signal peptide sequence, MPLHTCLVHVGVSHAARGSPVCPSVLWVWFCVHFQVIHMWAHECV, Run with SignalP
  misc_feature (2857)...(722): similar to gi5832876 in the genepept database release 114, Run with FASTXY 3.3t00, default parameters
gccagataaccccccgccccacataaccagctgcgctcctacacctagcaggccggctcacatcaccctttaacgcacactatattcacacacacacttgtgcacagtcttgaatgtgtgcccacacatctgcctgcacacactcatgtgcccacatgtgaatcacttggaagtgtacacaaaaccaaacccacagcacagatgggcagacaggtgagcctcgtgcagcatgtgacactcccacatgcacaagacatgtgtgcagaggcatatcacacacgcagaagcactcccgagaactgccttctcccttccagcctaggggcccctgttcccccacaaccgggcccagccctggagccccctccagcactcctctcccacccccacgctccccaagagcagcagatgtaggtctcccggctcccaaacctctgagatgctgctctgtctgaaatcatcatataaataatcattttttaatacaagggggtgggggtgtcaggcaagttccatgaaattgtgaattagccgctgctccaaataaatgcctgcttcggcccgagagcagccgcgctgcgcccgctgcgcccccaataatcgtgtgttgggtatctctccattgttccctgggccattagtcaaagggcaaattagaaacaatttcttgacgacaaaaattgactcttaattcttcccaccagaggcgcagggggacaagtccagaggccaggcctgaggctggggctggcggcaggaggggtaggcggagtagaggtggggtagagggtggggatctaagatggttcacagcacagagacctccctcaactggagggcagcagcagctcacccccaccccaaaatcagtgttccagaggacagctgggggcagggggttaggaacaatcccactccctcctggaagaggtcctgaccccccaccccacccatctgcctgtacgggtccctctgctatcgactggggcgagttcttttcatgagggccttgcctggtgcctggagggaacagggtgtgggggaaaggtctgtgtgttcccccctcacctcccctgctcagcggtgtggcctctggctctggggaggatcgggaagccccagggtccgtgccttggagtggggggacagccttttctctgccacagcttctgcctttgggggcttacccttcctaggagcagaactgttgtggaggggaagaggacggtgaaggttccgaagggaagggggctgcccccactgaaaacgaagcttccagtcacagccccttcattatttatcaggacccaggggatgaggtggcaggggagggggctgcatggagggagtgccctcaccctcgtccccagcgcctgccccctcccgaccaggcctgggctgaggcccagggtaagggggctgaggcaggccacagaggagcaagacttgtcaggggccagacctgggtaggaggattgtcctccaggcacacacggcccccagccccccagcctgtcgaactgggctctcccagaaggtccccggctccagcccaagcagggagccaggttgggggtgtgggaaggcagaagtcccagggatcctgggggaggctcaggttgtacctgcaggccacagtctcctcgacagacctcggacgaggttgtaagtgttttaaagaaactagagcagcagagaagagagactcagaagcccgtggcacggctttctcggcgtcccctccagcgagggggtctccattgctgcagttgccggttttgtccaaccaggtcaggaggctgcccggccccctccccactctcaaagttgcttgttaaacacagagtcgtaatttgtggctaaatataactagtgtgttctcacggaaagtataattcagggtgctcattgtatgaggttatcaacaagacccatctgggttaaattaaagtgattttcataaagggcagaagcgcccctttgcctggtttcccctgcctttttattagtgacagtgttattgttgcaattattagaggggatcaaggaaggtgggagttgccagggacccccaggctgaggagggagcctcccagcccccctccactcaccattgtcctgctgcccctccagccccctggtcactgtcacctctgcggctggagggctggagaaaggcccaggagcccagggaacctccaccatgccaggctgccttccctaaaggccggctccttccccccaggcagccagtctgggggtggacctggaggggcagggttctctgggaatctctgggccaagggatgccctttggggatctgctggaataaagagtaatcggttttccttgcaggaggttgacccgaaacagccctccgtcttcctgcccatgaggatgaggacaggaagccagacccgggagagaaagcccagatcagacagatgggggttgggagggcctagtggctgaaactgccctgcttggggacaatgctcaggcaggaccaatccaaacgagggcactgcttatgtggtccttccggagcatcctccaaggcagagcctggcttcgggccctccctgcaaggacacctgcctccactccctgccagaccaggcctggctgcagaggcggaggggcggcagggctgcctgtctccactgtttggcggtgtttacacgtgtcgctgtcagggtgtctggacagtgggggtcgggggcctcccgggcccagacttccccaggcctattctcacactggtgagagggccctaggggaagggtgtgggctgggtggcggggccaggccagctgagacctacaggaccgtggagcatttaggtctcccacccaactccacccggtcctctgagcatcagttacagagcccaggcagcaggagggcagggcccagccccttatcacccatcctcaaggcaggcaggaaccctgaaggcagcttccaccaggggttcccttagcccccaccctccaaaagccccagaccctgccaggcctcaccctgccagcatcgtggccccagctgacggctcccaagggcaggtgctggcaacacaagcaggagccctcggggcatcccgcagggcacacaccaggtcgccctgggctccccaagcacctcccagacccagcccttgggtgggtcctggcccacaaacccccacgccctgcccctgagatgagccccaccgcccacctgccctccagccctggagacctttctcccccttgcccatggctcccatggggaggctgcaggccctccctgggctggaccagaggggacagactgtctctcccctgcgacttctgggggcactggagtccttggcctggttaccttcagcatttatagccctccagtgagttattcctcggagttctcacagagcagcatgcgcctgcggcaaagccctcacctccagcccctggaccacctgactgctgcctcccgcctggcgccaaacacggccaccgcctcttttgttaacaggacagttgatccattaaattaaaaatcattcaatagaaaaaaaaaa

SEQ ID NO: 80148 - DNA, 1545 bp, Homo sapiens
  misc_feature (1)...(1545): n = a,t,c or g
  sig_peptide (26)...(161): this location contains the signal peptide sequence, MWAAAGGLWRSRAGLRALFRSRDAALFPGCERGLHCSAVSCKNWL, Run with SignalP
  misc_feature (1451)...(791): similar to gi1185442 in the genepept database release 114, Run with FASTXY 3.3t00, default parameters
tggtggaattccccggcgccgcgccatgtgggctgcggcgggcgggctgtggcgctcccgcgcgggtctccgggccctgttccgtagccgcgatgctgcgctatttccaggctgcgagcggggacttcactgctctgctgtctcctgcaagaactggctcaagaaatttgcctcgaaaaccaaaaaaaaggtttggtatgaaagtccttccttgggttctcactcgacttacaaaccatccaagttggaattcctcatgaggagcacctcaaagaaaaccaggaaggaagaccatgcgcgcctgagggccctgaacggcctcctctataaggcactgacagacctgctgtgtacccctgaagtgagtcaggagctgtatgaccttaacgtggagctctccaaggtttccctgactccagacttctcagcctgccgagcgtactggaagacaacgctctctgctgagcagaacgcacacatggaggctgtcctgcagagaagtgccgcgcacatgaggcaccttttgatgtcccagcagaccctgaggaatgtgccaccgatagtgtttgttcaagacaagggaaatgcagctctagctgagcttgatcagttactggcagtcgcagactttggaccccgggatgaaagagacaactttgtacaaaatgatttcagggaccctgatgccccacaaccctgcggcaccacagagccgaccacaagctccagtctgtgtgggatcgatcatgaggcgctcaacaagcagattatggagtacaaaaggaggaaagataaagggctcgggggcctggtgtggcaggggcaggtggctgagctgacaacgcagatgcaaaagggaaggaagagggccaagccccgcctggagcaggacagctccctcaagagttacctgtcaggcgaggaggttgaagatgacctggacctggttggtgccccggagtacgaatgctatgccccggacacagaggagttggaggcagagagaggaggtggcagaacagaggatggccacagctgcggagcaagcagggagtagatggagaggctctgcccatcccacatttgcagggaaaagcattggcacgcaacgcagcatgtggcttcattgaggcagttgatggagttaaaccatctgctcttctgctacttcaacattttctagcttttccgtgtatctaaacacaatttgctacacaagtcactgtttttttttccatgcactgtgtgtaatttaaaaattaaatggccatcttatcacagattctcacaaaaagaaaatggtaaaatagtgtctctgagatgctggcatggccacctccacctgcagagccctgccaggtgccagtgagtgcttggcccgaggggtcaggccacagcagtggccggggtgagaactgaacctgcaaacctggggagaacagagggtccccagagcctcccaaccccctggagctgggctccgtcccttgggctgctgggctggcacgnggcgccggggctccatccctgggctgctggtcggcc

SEQ ID NO: 80149 - DNA, 2226 bp, Homo sapiens
  sig_peptide (1271)...(1406): this location contains the signal peptide sequence, MVCGALMWIMLILVGLGFPFIMEALSHFLYVPFLGVCVCGAIYTG, Run with SignalP
  misc_feature (226)...(1475): similar to gi183298 in the genepept database release 114, Run with FASTXY 3.3t00, default parameters
tttcgtcttgggaagaggagttgctagggatgaagtggtgcagtggccctgtcctctcttggtcccaacctgcgtgggagggatcttgatgttcagacccagacttggataggaagaggcacggggcaattgcagactccctgcagggaggtgtgtaggtgggcaggagagcagggtggtaggactctggcaaagaggcatctggcctggcctctcctctgcctccttagggagctcctaggtggccctcaggcctggcccctgctgctggccagctgcctggtgcccggggcgctccagctcgcctccctgcctctgctccctgaaagcccgcgctacctcctcattgactgtggagacaccgaggcctgcctggcagcactacggcagctacggggctccggggacttggcaggggagctggaggagctggaggaggagcgcgctgcctgccagggctgccgtgcccggcgcccatgggagctgttccagcatcgggccctgaggagacaggtgacaagcctcgtggttctgggcagtgccatggagctctgcgggaatgactcggtgtacgcctacgcctcctccgtgttccggaaggcaggagtgccggaagcgaagatccagtacgcgatcatcgggactgggagctgcgagctgctcacggcggttgttagttgtgtggtaatcgagagggtgggtcggcgcgtgctgctcatcggtgggtacagcctgatgacctgctgggggagcatcttcactgtggccctgtgcctgcaggtagctggggtggatgagggctggggggtccaggccgggctgacttccacctcacccccgccccgtccacggcagagctccttcccctggacactctacctggccatggcctgcatctttgccttcatcctcagctttggcattggccctggtgagtgggcccaaggggctctgggcatccgtcatcacatagaaggagtgatgggtgcctgggtgcacagtgggtgggtgtgaatgcaatgtcccctgcaggccctcagagaccacctcatgccggggcttctgggagggaatggcaggaggagagcactgaggggccccccatacagactgggcctgggctcccactcccatgtctgggctggggtcggggagaggcaggcagggaaccctggccagcagccccctgtccctgcccctccttctagccggagtgacggggatcctggccacagagctgtttgaccagatggccaggcctgctgcctgcatggtctgcggggcgctcatgtggatcatgctcatcctggtcggcctgggatttccctttatcatggaggccttgtcccacttcctctatgtccctttccttggtgtctgtgtctgtggggccatctacactggcctgttccttcctgagaccaaaggcaagaccttccaagagatctccaaggaattacacagactcaacttccccaggcgggcccagggccccacgtggaggagcctggaggttatccagtcaacagaactctagtcccaaaggggtggccagagccaaagccagctactgtcctgtcctctgcttcctgccagggccctggtcctcactccctcctgcattcctcatttaaggagtgtttattgagcaccctttgtgtgcagacatggctccaggtgcttagcaatcaatggtgagcgtggtattccaggctaaaggtaattaactgacagaaaatcagtaacaacataattacaggctggttgtggcagctcatgactgtaatcccagcactttgggaggccaaggtgggaggatcaattgaggccagagtttgaaaccagcctaggtaacatagtgagaccccctatctctacaaaaaattttaaacattagctgggcatggtggtatgtgctaacagctctagctactcaggaggctgaggcagcaggatcacttgagtccaagagttcaaggtagcagtaagctacaatcacaccactgcatgccagactgggtgacagagggagacttcatctctttaaaacataataataataattacagactcaggaaatgcagtgaaagaaaaatacaggttggccaggtgaggtggctgatgcctgtaatcccagcactttgggaggccaagatgggaagattgctttgagaccagaagtttgagaccagcctgggccacatagtaagatcctgtttctaccaa

SEQ ID NO: 80150 - DNA, 2473 bp, Homo sapiens
  sig_peptide (328)...(463): this location contains the signal peptide sequence, MVSCIIFFFVVLIVFLTIFSFWWLSYWLEQGSGTNSSRESNGTMA, Run with SignalP
  misc_feature (1)...(2106): similar to gi2554610 in the genepept database release 114, Run with FASTXY 3.3t00, default parameters
tacttagaattttgtggccagatcattttgttggaaaatgggaaaatctgtgaaaatggaactcacagtgagttaatgcagaaaaaggggaaatatgcccaacttatccagaagatgcacaaggaagccacttcggacatgttgcaggacacagcaaagatagcagagaagccaaaggtagaaagtcaggctctggccacctccctggaagagtctctcaacggaaatgctgtgccggagcatcagctcacacaggaggaggagatggaagaaggctccttgagttggagggtctaccaccactacatccaggcagctggaggttacatggtctcttgcataattttcttcttcgtggtgctgatcgtcttcttaacgatcttcagcttctggtggctgagctactggttggagcagggctcggggaccaatagcagccgagagagcaatggaaccatggcagacctgggcaacattgcagacaatcctcaactgtccttctaccagctggtgtacgggctcaacgccctgctcctcatctgtgtgggggtctgctcctcagggattttcaccaaagtcacgaggaaggcatccacggccctgcacaacaagctcttcaacaaggttttccgctgccccatgagtttctttgacaccatcccaataggccggcttttgaactgcttcgcaggggacttggaacagctggaccagctcttgcccatcttttcagagcagttcctggtcctgtccttaatggtgatcgccgtcctgttgattgtcagtgtgctgtctccatatatcctgttaatgggagccataatcatggttatttgcttcatttattatatgatgttcaagaaggccatcggtgtgttcaagagactggagaactatagccggtctcctttattctcccacatcctcaattctctgcaaggcctgagctccatccatgtctatggaaaaactgaagacttcatcagccagtttaagaggctgactgatgcgcagaataactacctgctgttgtttctatcttccacacgatggatggcattgaggctggagatcatgaccaaccttgtgaccttggctgttgccctgttcgtggcttttggcatttcctccaccccctactcctttaaagtcatggctgtcaacatcgtgctgcagctggcgtccagcttccaggccactgcccggattggcttggagacagaggcacagttcacggctgtagagaggatactgcagtacatgaagatgtgtgtctcggaagctcctttacacatggaaggcacaagttgtccccaggggtggccacagcatggggaaatcatatttcaggattatcacatgaaatacagagacaacacacccaccgtgcttcacggcatcaacctgaccatccgcggccacgaagtggtgggcatcgtgggaaggacgggctctgtaggtttttactgagcacctactatgtgcctgggaaccgaaagggaagtcctccttgggcatggctctcttccgcctggtggagcccatggcaggccggattctcattgacggcgtggacatttgcagcatcggcctggaggacttgcggtccaagctctcagtgatccctcaagatccagtgctgctctcaggaaccatcagattcaacctagatccctttgaccgtcacactgaccagcagatctgggatgccttggagaggacattcctgaccaaggccatctcaaagttccccaaaaagctgcatacagatgtggtggaaaacggtggaaacttctctgtgggggagaggcagctgctctgcattgccagggctgtgcttcgcaactccaagatcatccttatcgatgaagccacagcctccattgacatggagacagacaccctgatccagcgcacaatccgtgaagccttccagggctgcaccgtgctcgtcattgcccaccgtgtcaccactgtgctgaactgtgaccacatcctggttatgggcaatgggaaggtggtagaatttgatcggccggaggtactgcggaagaagcctgggtcattgttcgcagccctcatggccacagccacttcttcactgagataaggagatgtggagacttcatggaggctggcagctgagctcagaggttcacacaggtgcagcttcgaggcccacagtctgcgaccttcttgtttggagatgagaacttctcctggaagcaggggtaaatgtagggggggtggggattgctggatggaaaccctggaataggctacttgatggctctcaagaccttagaaccccagaaccatctaagacatgggattcagtgatcatgtggttctccttttaacttacatgctgaataattttataataaggtaaaagcttatagttttctgatctgtgttagaagtgttgcaaatgctgtactgactttgtaaaatataaaactaaggaaaactc

SEQ ID NO: 80151 - DNA, 1225 bp, Homo sapiens
  sig_peptide (888)...(753): this location contains the signal peptide sequence, MFLSSNFPIFSILFFAFPYFCLPVFHFKLLSSPNCFILPLPINLS, Run with SignalP
  misc_feature (1129)...(790): similar to gi5531896 in the genepept database release 114, Run with FASTXY 3.3t00, default parameters
tcttaacagggaagagagagggtgggggagagaatgttttttttctaagattttccacagatgctatagtactattgacaaactgggttagagaaggagtgtaccgctgtgctgttggcacgaacaccttcagggactggagctgcttttatccttggaagagtattcccagttgaagctgaaaagtacagcacagtgcagctttggttcatattcagtcatctcaggagaacttcagaggagcttgaggaaaccgcagataagtttttttctctttgaaagatagagattaatacaactacttaaaaaatatagtcaataggttactaagatattgcttagcgttaagtttttaacgtaattttaatagcttaagattttaagagaaaatatgaagacttagaagagtagcatgaggaaggaaaagataaaaggtttctaaaacatgacggaggttgagatgaagcttcttcatggagtaaaaaatgtatttaaaagaaaattgagagaaaggactacagagccccgaattaataccaatagaagggcaatgcttttagattaaaatgaaggtgacttaaacagcttaaagtttagtttaaaagttgtaggtgattaaaataatttgaaggcgatcttttaaaaagagattaaaccgaaggtgattaaaagaccttgaaatccatgacgcagggagaattgcgtcatttaaagcctagttaacgcatttactaaacgcagacgaaaatggaaagattaattgggagtggtaggatgaaacaatttggagaagatagaagtttgaagtggaaaactggaagacagaagtacgggaaggcgaagaaaagaatagagaagatagggaaattagaagataaaaacatacttttagaagaaaaaagataaatttaaacctgaaaagtaggaagcagaagaaaaaagacaagctaggaaacaaaaagctaagggcaaaatgtacaaacttagaagaaaattggaagatagaaacaagatagaaaatgaaaatattgtcaagagtttcagatagaaaatgaaaaacaagctaagacaagtattggagaagtatagaagatagaaaaatataaagccaaaaattggataaaatagcactgaaaaaatgaggaaattattggtaaccaatttattttaaaagcccttctccctgcactcaataaaccctcaataaatattctcattgtcaatc

SEQ ID NO: 80152 - DNA, 892 bp, Homo sapiens
  misc_feature (1)...(892): n = a,t,c or g
  sig_peptide (234)...(369): this location contains the signal peptide sequence, MPFASEFFPRTWKQNFVLACISFFTGACAFLALVLHALEIKALRM, Run with SignalP
  misc_feature (79)...(105): similar to gi5420389 in the genepept database release 114, Run with FASTXY 3.3t00, default parameters
ggaggagggggntnnntttcgagattcctagtccgtgtggaggaattcccatctttcccttctgggtgcgactgacaaacgaggagtcccacgaagtctttttcagtggcctatttgagaactgcttcaatgccaaatgctggaagcctcgacccttatccatttacatcatcctcggccgggttttcctgctctctgcagttttcttggctttcgtcaccaccttcatcatgatgccctttgcatccgagttcttcccgaggacctggaagcaaaactttgtgttagcctgcatcagcttcttcacaggggcctgtgccttcctggctttggtgctgcatgccctggagatcaaggctctgaggatgaagctcggccccctgcagttctccgtgctgtggccttactacgtgctgggcttcggcatctttctgttcatagtggctggtaccatctgcctcattcaagaaatggtttgcccttgctggcacttgttgtccacttcccagagtatggaggaggaccacgggagcctgtacctggacaatctggagagtttgggaggagaaccgagctcagtacaaaaggagacacaggtgacagcagaaacagtcatctagcccaggacatggcttctttacccttcttcaagccatgtgagtgtacacatgtagctgtttgtagtcctccccaccctctctgccagtatctgtgcctttgaggagcttcttgcgtgtcagatcaactctccacctccccatactcacagtgattctatcttgcttgtatgtgaaatttgctaaaagtcctttcaactcttctgagcttcctaagtgacgtttttgcaggtattttcaataaaaagaagggctactttgttaaaaaaaaaaaa

SEQ ID NO: 80153 - DNA, 396 bp, Homo sapiens
  sig_peptide (257)...(392): this location contains the signal peptide sequence, MKIIIFIIQTRTIFGLKGVLLIICQDSKLELNCPVKPGHRPPTHG, Run with SignalP
  misc_feature (165)...(313): similar to gi1707065 in the genepept database release 114, Run with FASTXY 3.3t00, default parameters
aagagaaccagatattggtgctaatatgctgtcttctctttgctgggcactcagaagactaagtttaccagctaccctagcagtgagttgggccatgtgactagtcctggccagtggcccttaaactgaagtgacagctgttgaatgaggcagtgaaaatccatactacattctttagtttatcttttcctgtccatagagaaaacttcatattgagagagtggggcaggctaaatatttgagtcattccattgatatgaagattataatctttatcatccaaaccaggacgatttttggactgaaaggggtgttgttaataatttgccaggacagtaagcttgagctgaactgtcctgtgaaaccaggacatagaccccctacccatggaagaag

SEQ ID NO: 80154 - DNA, 1026 bp, Homo sapiens
  sig_peptide (464)...(329): this location contains the signal peptide sequence, MTTALSFMVITVLWVLLLHLLANICIPRKCSFVCFYINGILLHAV, Run with SignalP
  misc_feature (1020)...(779): similar to gi5869818 in the genepept database release 114, Run with FASTXY 3.3t00, default parameters
ttttttttttttgaattggcagaatccatcaggaaaagtttttattatcttctagtataagatatacaaaccttttaattcagcaatcccatgccactgtatatactctagaaaaacatacatatgtgcaccaaggtacatatacaagaatgtacagagtagcatttcctagtagttaaaaacaactgaaacatatgtcaacagtaaataaactgcagtatattcatacaatgatttactctatggcaatgacaataaacaaactatatgcaaaacatggatgacccttacaagccttagagcaaaacaatcacaaatcaaaagactgcatgcagtaatattccatttatataaaagcagacaaaactacattttctagggatgcatatattagccaataaatgcagtaataaaacccaaagaacagtgattaccataaaagacaaggcggtggtcatcattagagtggagaaagagaggagtgttttcaaaaagagatacatgaggggcttccaggtggttgttatacagcatttgcttcaatattacactgttcacttatattttacacccctttctacataatattatatttcacaattagaaaaaaatcaccaacaattttaagaaaatataggattataatacaatttgattagtcatatttaaatatgcagttcaaatggaaaggctggtatcatcagtaaatagaaagtgtcatgagacaagcgggactgccccaggagagagcactggacctgggggtaacttcctaacgcaaatccaatcataaacaggatcagaaaatgcacttcaaagctagccttgcaagcccaaaaattcaaagttgagaagaaatgagagtgaatgaatcccatacttaagtcagagtaaaaattaacactttaaaatacattactaccttaaaaaagttacaagtctgtgaaacctgcgaatgttgtttatatataaatccaaccatattacctctctattctgccaagtacaagagataattttaaaatt

SEQ ID NO: 80155 - DNA, 378 bp, Homo sapiens
  sig_peptide (209)...(344): this location contains the signal peptide sequence, MCLLGRPFPVLFMLRLAVTNVTKGRCIFKTTAPPTQMAFTMCQAV, Run with SignalP
  misc_feature (6)...(371): similar to gi3608136 in the genepept database release 114, Run with FASTXY 3.3t00, default parameters
cggcacgagcttcccacagacagctctgcctcctttgtcttccttggtcattgttcactcagatgatgtcctcaggactccagattcatgacacccacactccagttcactcccctgaatctacaaaactgtctctttcaaggtcctctttttattaactcagaaggatgattttatttatttatgttttcattcacaagggtaaaggatgtgtcttctgggcagaccatttccagtgctgtttatgctaaggttagctgttacaaatgtcacaaaagggcgctgcattttcaaaacaacagcacctccaactcagatggcatttaccatgtgccaggcagttttatgtgatttatgtgttgaattctcacaacaacc

SEQ ID NO: 80156 - DNA, 379 bp, Homo sapiens
  sig_peptide (140)...(275): this location contains the signal peptide sequence, MPLTLFLLYFLHVILPEVILFGNCLFFTIGLCPVYHCNPITHIES, Run with SignalP
  misc_feature (20)...(226): similar to gi4160384 in the genepept database release 114, Run with FASTXY 3.3t00, default parameters
tttttcgagcggcacgagaaaactgataaacctgaatgctatcaaaattatcatttgtctacatttgcacattaaatcccactgatgtgtttcttttaaaatattttactttgttgagtttttcttatacagcctatgcatgccactcactctttttctcctttattttcttcatgtaatcctacctgaagttatattatttggtaattgcttattttttaccataggactttgtccagtctaccactgcaaccccatcacccacatagaaagtgtgtacatattagacccttaataatatttgtggaaggagtagaataacacctgatggaataaataagtattcatgaaacaaagaatttttctatcctctgaaacc

SEQ ID NO: 80157 - DNA, 360 bp, Homo sapiens
  sig_peptide (34)...(169): this location contains the signal peptide sequence, MKMVLGSSLVVLFPCLEAYALTSQEFKQAGGRRVLTALKKFTEFQ, Run with SignalP
  misc_feature (19)...(263): similar to gi288191 in the genepept database release 114, Run with FASTXY 3.3t00, default parameters
tttgcgcataatatgaagactcctgctaataggatgaaaatggtacttggctcatcgttggtggtactgtttccatgcttggaagcttacgctctgacatcacaagaattcaaacaagctgggggtagaagagttctcacagccctgaagaagtttactgagtttcaaaattggagaaaagaccaagaggaatgtatggataggttcaattgatggagtacatatactttaaaaaaaaaaaaggcccatccgattaaccttttttttaaaaggcctcttttccccaatttaccctctcaaaataccgggtatataggggaaaaaaacccccggctaataattattaacggaatagttggg

SEQ ID NO: 80158 - DNA, 807 bp, Homo sapiens
  sig_peptide (391)...(526): this location contains the signal peptide sequence, MKNLRLGEVVTLSWVLVVELEVKAKSVFLLAILTTEFSLNQSLKM, Run with SignalP
  misc_feature (808)...(553): similar to gi1177607 in the genepept database release 114, Run with FASTXY 3.3t00, default parameters
cggagcctgggcaacacagcgagactccgtctcaaacaaacaaaaacaaacaaaccaaaactctctatgtgattttttttttttagttggaataatgaaggaaagctgttaaagataattgaaaattgtggtttaaaccaaactaatcaaaatatggttcaaaataaactgaattcaaatttatgattacatccaatattttgaaacacatttgttgtcatctaaaagttcgacagactataaacacagttgttcagaatgtctccgatttatgaagtgtttcttgagcatttattgtatgccaggactgtgctaaatatgctacttgctacctctttcttttcataacaatcatatgtggtaggtgtaacttttatccccattttatggatgaagaacttaaggcttggtgaggttgtcacactctcgtgggttttggtagtagagctggaagtcaaagccaagtcagtctttttattggctatactaaccacagaattttcattaaatcagtctttaaaaatgtttttgggccaggagtggtggttcaccctgtaatcccaacactttgggaggccaaggtgggaggatcacttgagcctgggagttcaagagcagtatggacaatctagtgagaccctgtctctacaaaacattaaaaaaattagccaggtgtggtagtacgtacctgtggtcccagttattccagaggctgaggatttggcttgagcccaggaggtcaagacctcaatgagcttgtgccactgcactccagcctgggcgattgggcaagacccagtcccaaaa

SEQ ID NO: 80159 - DNA, 858 bp, Homo sapiens
  sig_peptide (291)...(426): this location contains the signal peptide sequence, MFGKWFPALGGFKTLIIGIIIVIGTCLLLPCLLPVRLQMIKKLHH, Run with SignalP
  misc_feature (691)...(279): similar to gi1196425 in the genepept database release 114, Run with FASTXY 3.3t00, default parameters
ctcaactagattatacggttaacaagctgtcttagaataatcactaatgagactggcagagctttgactgttttagcccggcaagaaaccctgatgagaaatgctatttatcagaatagattagccctagactacttgctagcagctgaaagaggagtttgtgggaaatttaaccttaccaattgctgtctacacatagatgatcaaaggcaagtagctgaagacatagagatatgacaaaactagcacatgtgcctgtgcaagtgtggcatggatttgatcttggggccatgtttggaaaatggttcccagcgctaggaggatttaaaacccttataataggaattataatagtaataggaacctgcttactactcccttgtttgctacctgtacgccttcaaatgattaaaaagcttcatcactaccttagttcactaaaatgcttcagcacaagtgtactatatgaatcactatcaatctgtcttgcaagaagacatgggtagtgaggatgaaaatgagaactcctactaatgaggaaagttctcaaaggggggaataaggaaggagaccacccctcatataggcttatgcccaatttctgcttccaaaaaaaaaagggcgggcggtttaaaggatccaggcttacgtaccggggcatggcgagttatagcttttccttaggggcgcctaaactcagttccctggccgcggtttgccaaggctggactggggaaacgctgggggtccccaagctgattgggtttgcaggaagcgtccgggtccgaatgtgtgagctgagcatggcctccttccgtgtcggccttctccgccggcggcgggtgtctcgagctggcc

SEQ ID NO: 80160 - DNA, 1083 bp, Homo sapiens
  sig_peptide (34)...(169): this location contains the signal peptide sequence, MWNSSEAFLFFIYFKYHKILLLYIISVNWIYPYTSLLFHCSSFIP, Run with SignalP
  misc_feature (2)...(624): similar to gi340613 in the genepept database release 114, Run with FASTXY 3.3t00, default parameters
tttcgtgtttctgtcattatatatcttaggtggatgtggaactcttctgaggcatttttattcttcatatattttaaataccacaagatattattgctttatataatcagtgttaattggatttacccatatacttcactgcttttccattgttcttcattcattcctgatttctgttttctcttttcctgctaggatttcaattatatgtgtcttagcctttttcactgtgtcccacatgtcacttgcattcttctcattgtttaccttctatcctttttttgactttgtgcttcagtctttttgttttttattgacctgttatcaagcatagcaatctataattcttcagttgtctgatttgctgtttggccttttctaatggttcttaatttcagttaccgtatttttttacttccagaatttccttttaattcttttttatatattccatttattaatggaaattctccagttttgtcttctaagtctttgcatatattaatcagctattcagttttttccaactttatctcttttaaccttttataaatacaccttataaagccctactccttaaacttttccacttgtatcttgtacgaacaaggacatttttctacaataaactaaacgcggaacctctccaaaaaattgacattgaaatgaagggactatccccctgatgcaaatttcctaattgctcaggtaacactccggctttctaaaatctattttcctcggcacgcacctcaagcgacagcctttctttggcccaaagccgcgcgcccggaatttctctccgtctacccggccactcccagccccccacattgtcatcgcccccgctgcgcccgggccagcctgtggacgatggaccgaccacgcggtcttcttgtcctagcgagccgggaaccccgccaggcgcgccccacccacacccctcagagccggaaacgcccgccggcggggcgattcagtccagagaccttgttcccccgccacgcaccacgaaccaacgccccaccacaaggtgcgagcgcgcgcccatccgctgcccacacgaggcgctgagcggccgcg

SEQ ID NO: 80161 - DNA, 1099 bp, Homo sapiens
  sig_peptide (96)...(231): this location contains the signal peptide sequence, MFRLYSFSTVKLGANLAACLLHKNLRGHVYMDFIAACCWKFFCLL, Run with SignalP
  misc_feature (1099)...(958): similar to gi177888 in the genepept database release 114, Run with FASTXY 3.3t00, default parameters
cattcccggatcgacggttcggtcgatacctccacatgacttgattttgaaagttgtcctgcacaggatcaaattagtgcactttaagatggcaaatgtttcgtctatattcattttcaactgttaaattgggtgcaaatttagcagcatgtttacttcataaaaacctcagagggcacgtatatatggacttcatagccgcgtgttgctggaaattcttctgcctgctctggggtcagccatgtggttgactgtgtataagaggctttagaagcatgtgtctccataggaactggattgcccctgtgtccctgctctccgtgggccaggggctgggcaagggaggagctgtgctggtgtaggagaccctattccagcaggagctttgtccacacagccagtggctgccttttctgaaaacccctgaatgaagtatcacttaggattctagaaaaagaggtggaagcccttgctttggtcccagctctgcttgaccagagagcctagtcacctaacctctggaacctcataacccctatttctaaaatgaagctactttttttgacttgggaaggtcacggcgttattgtggtgctgaagcgtcgccgtttatgtgtgcacgctctgtacatcactgggggctttttatcttgataggggcttctggccatttgtagacccaacatccctgcatttaatcggttctgacgcgaatgcgctcaaaactttcaccgtcgcccgttgcgcgtcccttctattctctacggagtaccgcgccgcgccgcaactctaagataaattgtgttttccctaggtccctgtggttcggtttagtaaatcctcgtcgcttccgggcgggtggtaacgcacctcgtgactgcctcccggcgcgcgtgtccaaaacagcaacatctccccggcggcgcggcgtctcccccgacatccattcccccgcccgccctcgcggtcgcttacatatcctttagtggcgcggggctccgccaccgctgattgtcctccagtaatgtccgcctgtcgcggcgcacgaccgcaacaccagcaaccccttcgccgcccgcgggcgaggggggcataaccc

SEQ ID NO: 80162 - DNA, 1380 bp, Homo sapiens
  sig_peptide (792)...(927): this location contains the signal peptide sequence, MPFWLIFVETGFCHVTQAGLKLLGSSDPPGSASQSAGITGVNHCA, Run with SignalP
  misc_feature (32)...(296): similar to gi1872200 in the genepept database release 114, Run with FASTXY 3.3t00, default parameters
ttttttttttatggcagggtctcactctgtcgcccaggctggagtgcagtggcgtgatctcggctcactacaacctcgacctcctgggttcaagtgattctcccaccccagcctcccaagtagctgggattacaggtgtgtgccactacggctggctaatttttgtatttttagtagagacaggtttcaccatattggccaggctggtcttgaactcctgacctcaagtgatccaccttccttgtgctcccaaagtgctgagattacaggcgtgagctatcacacccagcctccccctttttttcctaataggagactcctgtacctttcttcgttttacctatgtgtcgtgtctgcttacatttccttctcccctcaggctttttttgggtggtcctccaacctccaatacccaggcctggcctcttcagagtaccccccattccactttccctgcctccttccttaaatagctgacaatcaaattcatgctatggtgtgaaagactacctttgacttggtattataagctggagttatatatgtatttgaaaacagagtaaatacttaagaggccaaatagatgaatggaagaattttaggaactgtgagagggggacaaggtgaagctttcctggccctgggaggaagctggctgtggtagcgtagcgctctctctctctgtctgtggcaggagccaaagagtagggtgtaattgagtgaaggaatcctgggtagagaccattctcaggtggttgggccaggctaaagactgggagttgggtctatctatgcctttctggctgatttttgtagagacggggttttgccatgttacccaggctggtctcaaactcctgggctcaagcgatcctcctggctcagcctcccaaagtgctgggattacaggcgtgaatcactgcgcctggcttcctcttcctcttgagaaatattcttttcatacagcaagtatgggacagcagtgtcccaggtaaaggacataaatgttacaagtgtctggtcctttctgagggaggctggtgccgctctgcagggtatttgaacctgtggaattggaggaggccatttcactccctgaacccagcctgacaaatcacagtgagaatgttcaccttataggcttgctgtggggctcaggttgaaagtgtggggagtgacactgcctaggcatccagctcagtgtcatccagggcctgtgtccctcccgaacccagggtcaacctgcctgccacaggcactagaaggacgaatctgcctactgcccatgaacggggccctcaagcgtcctgggatctccttctccctcctgtcctgtccttgcccctcaggactgctggaaaataaatcctttaaaatagt

SEQ ID NO: 80163 - DNA, 806 bp, Homo sapiens
  sig_peptide (97)...(232): this location contains the signal peptide sequence, MPELPTWVLALLPHPVVLLIDSGELEAFEQICRSTLKAVWHSVHG, Run with SignalP
  misc_feature (781)...(559): similar to gi3002527 in the genepept database release 114, Run with FASTXY 3.3t00, default parameters
cccgttctgacgatttcgtcctagcgcccatctttatgtggggctccctagaaacccttctcttttatttgccacttcctgttttgtggacactccatgcctgagctgccaacgtgggtgctggcattactgcctcatcctgtggttttgctcattgactctggagaactagaggcctttgagcagatatgcagaagcaccttgaaggcagtgtggcactcagtacatggtgccatgtctgtgtgcttcatctgcttcaccttttgccattaaagcagtttccaggggactgtattccagcatagtgttgttttaaaatcttcttagttaaggtgatttttacaacctctttgctttccttcattgtccagcaagtctttaccatgagaaatatcttattgcagtctagcccaaatgttgtacttttatttattcttgtttcttttaacatgccatagaagagtttaaagctgtctgttaggagatagaattggggccgggcgcagtggctcacgcctgtaatcccagcacttagggcggttgaggtgggaggatcggctgaggtcaggagtttgagaccagcctgaccaacgtggtgggaccccttctctactgaaagtacaaaaattagccgggcatggtggcgggcgcctgtggtcccggctcttcgggaggcctgaggcaggagaaatgcttgaacccgggagtcggcaggttgcagtcagctgaggttgcgccactgcactgtagcctgggcaacagagtgagactccatctctggagacacacacacacacacctgtatt

SEQ ID NO: 80164 - DNA, 2127 bp, Homo sapiens
  sig_peptide (410)...(545): this location contains the signal peptide sequence, MTLRPGTMRLACMFSSILLFGAAGLLLFISLQDPTELAPQQVPGI, Run with SignalP
  misc_feature (385)...(1258): similar to gi5102812 in the genepept database release 114, Run with FASTXY 3.3t00, default parameters
atgctgcctggagccaggcacagggacaggtccccacggccacagggaatcctctgggcagctgaggggagcgtccaggcccagaagcagctgcagccaagcgtgtccttggagccgtccatgcgtctgtccgcctgctgccggtcgccactggaggaggctgcaggaagcgcacccacaccgtggccagcttactcaggggctcgcgacagttgctttccagctggggccttgctggggaccatcgatggcaaggcaggggtggcctcggtggatgacaggaagcagcagtttgtctttagggcagaggccattgcagtgagatctcggcctgatggacgcctggtgtggacgatgagggaagaacgtgccccccacacccaagaggtgacccctgagccagccccggatgaccctgcgacctggaacaatgcggctggcctgcatgttctcttccatcctgctgttcggagctgcaggcctcctcctcttcatcagcctgcaggaccctacggagctcgccccccagcaggtgccaggaataaagttcaacatcaggccaaggcagccccaccacgacctcccaccaggcggctcccaggatggtgacttgaaggaacccacagagagggtcactcgggacttatccagtggggccccgaggggccgcaacctgccagcgcctgaccagcctcaacccccgctgcagaggggaacccgtctgcggctccgccagcgccgtcgccgtctgctcatcaagaaaatgccagctgcggcgaccatcccggccaacagctcggacgcgcccttcatccggccgggacccgggacgctggatggccgctgggtcagcctgcaccggagccagcaggagcgcaagcgggtgatgcaggaggcctgcgccaagtaccgggcgagcagcagccgccgggccgtcacgccccgccacgtgtcccgtatcttcgtggaggaccgccaccgcgtgctctactgcgaggtgcccaaggccggctgctccaattggaagcgggtgctcatggtgctggccggcctggcctcgtccactgccgacatccagcacaacaccgtccactatggcagcgctctcaagcgcctggacaccttcgaccgccagggtatcttgcaccgtctcagcacctacaccaagatgctctttgtccgcgagcccttcgagaggctggtgtccgccttccgcgacaagtttgagcaccccaacagctactatcacccggtcttcggcaaggccatcctggcccggtaccgcgccaatgcctctcgggaggccctgcggaccggctctggggtgcgttttcccgagttcgtccagtacctgctggacgtgcaccggcccgtggggatggacattcactgggaccatgtcagccggctctgcagcccctgcctcatcgactacgatttcgtaggcaagttcgagagcatggaggacgatgccaacttcttcctgagcctcatccgcgcgccgcggaacctgaccttcccccggttcaaggaccggcactcgcaggaggcgcggaccacagcgaggatcgcccaccagtacttcgcccaactctcggccctgcaaaggcagcgcacctacgacttctactacatggattacctgatgttcaactattccaagccctttgcagatctgtactgaggggcgccgcagctggccggggccgccctgccccggtcactcacctgtgctcccgggcatcctcctgtccctggctcctcatcctgggagcaacagggctctgaggacgtgaggagccatcgctgtgggaggcagcaggccccgggtggggggcagaggcgcccagccttggatggggaccccagcccctggcctgtacctgtttcctcattccttggctgagggagaggctgagaactgggcagacacccctggagctcagccgacagttttgatgagcagggaagtctgaggcccagaggacggggggcccagcggtaagggatgtcccgcactcccttagccattgccttggaccaaaccacgtggtttgcagcttttctacaagccaggggggaggttcccttggattaaggttccaaataaagcacatggtttccaga

SEQ ID NO: 80165 - DNA, 909 bp, Homo sapiens
  sig_peptide (320)...(455): this location contains the signal peptide sequence, MSALACLYACLFMCVYACLRLHLSLIALTFLSAITSPLLPLSPIP, Run with SignalP
  misc_feature (32)...(418): similar to gi854065 in the genepept database release 114, Run with FASTXY 3.3t00, default parameters
gtcgcggaattcggacaagggctggtgactcgcctgtcctcacgcatgtctgtgtccgtgtctttatgcatgtctgtgttcacgtgtgtctaggcatgtctgttcacatgtgtctatgcatgtctgttcacatctgtgcatgtctgtttgtgtctttatgcatgtccatgggtgtctaggcatgtgtgttcacgtgtctaggcatgtgttcacatgtgtctttatgcatgtctgttcacgtgtctgtgcatatctgttcatgtgtgtatgcatgtctgttcatgtgtgcctaggcatatctgttcatgtgtctttatgcatgtctgcgctcgcgtgtctttatgcatgtctgttcatgtgtgtctatgcatgcctgcgtttacatctctcgctgattgccctcacgtttctttctgccatcacctctcctcttctccctctttcccctataccactctctccccccctctccttcacactccactctccttctctttacctcctccttctcccccttctcctttccccctccttccctttcccgccttccccctcttcccctattttcctacccccccaccccttccccctcttctccctctccttcttcccctctttctccttctctctcctcgaccgcgcgccctctcctccccgcctcccctccctcactgcatcccctcctccccccctctccctcccctccacttatctccttacctcattttaccactcctttcccatcctcccttcttcttcccctcacctctctctctatcttcaccctcctctttctttcccatccttccattcctctcttcctcttcataccctcgctctctctccccccctactcatttccctcatcacctccccccttctctactaccctcccctcgctctcctccc

SEQ ID NO: 80166 - DNA, 379 bp, Homo sapiens
  sig_peptide (105)...(240): this location contains the signal peptide sequence, MFNLYFYYRFLTILLWSDTRFYMKPIIQHLLRVKLSSTWSVFANV, Run with SignalP
  misc_feature (381)...(16): similar to gi1335196 in the genepept database release 114, Run with FASTXY 3.3t00, default parameters
ttttctgtcagcctaaaaagagggcgcgtattgaatgactgattttgtttttgacccgcaatttatttacaatgtattattttaaaatttactcacatgtgtaaatgtttaatctttatttttattacagatttctaacaattttattgtggtcagacactagattttatatgaaaccaattattcagcatttattgagggttaaattgtctagcacatggtcagttttcgcaaatgttacatgagagcctgggaagaatgtcttgctctatgtgtatctattaagttcagcttattaagtatgttattcagatattttctatcattactaatattttgaatgcttcacttatcaataactgagcaaggtatattaaat

SEQ ID NO: 80167 - DNA, 420 bp, Homo sapiens
  misc_feature (1)...(420): n = a,t,c or g
  sig_peptide (62)...(197): this location contains the signal peptide sequence, MVLVILVDVSSSFPDVCFFFSFFKFFVCLCWISISLYFFLLMDFS, Run with SignalP
  misc_feature (382)...(291): similar to gi404629 in the genepept database release 114, Run with FASTXY 3.3t00, default parameters
caggcacatagtagtaagcatttgctcagtagcagtttctgaaatacttatattaataataatggtcctggttattcttgttgacgtcagttcctcttttcctgatgtgtgcttctttttttccttttttaaattctttgtctgtctttgctggatttctatttccctttatttctttctcttaatggatttttcttctgacttaaggggcctgcataaccctgttaatgatatccacgaataaagaattttctgtcccctaattgctgtggtgcagcgagcagtggggaataattgttatcaaaatgaaactaaaccctataaggattcacagagtcacaatacttttgaccagcattcatgaagaagcccttacttatgggtccgaggggcagngtggaaataattggccagtatata

SEQ ID NO: 80168 - DNA, 2443 bp, Homo sapiens
  sig_peptide (910)...(1045): this location contains the signal peptide sequence, MHCCTLGFLSCSLFLHMSFELKLLLLLLWLAASCSLFLHSHAWLS, Run with SignalP
  misc_feature (1)...(2380): similar to gi202676 in the genepept database release 114, Run with FASTXY 3.3t00, default parameters
gcaggggcttatgctgtggaggacgcaggcatggtgcatcggtacccctaccttcgggagctaggggagcctacctatctggtcatcgatccacgggcagaggaggaggatgagaagggcactgcaggaggcttgctgtcctcgcttgagggcctcaagatgcgtccatcactgctgatgacccgttacctggagtcctggggcgcagccaagccttttgcccacctgagccacggagacagccctgtgtccacctccacccctctcccggagaagaccctggcttccttcagcacccagtggagcctggatcggagccgtaccccccggggactagatgatgaactggacaccggggatgccaagttcttccaggtcattgagcagctcaactcgcagaaacagtggaagcagtcgaaggacttcaacccactgacactgtacttcagagagaaggagatggagaaagagtaccgactctctgcaatccccgccttcaaatactatgaagcctgcaccttcctggtttttctctccaacttcatcatccagatgctagtgacaaacaggcccccagctctggccatcacgtatagcatcaccttcctcctcttcctcctcatcctttttgtctgcttctcagaggacctgatgaggtgtgtcctgaaaggccccaagatgctgcactggctgcctgcactgtctggcctggtggccacacgaccaggactgagaatagccttgggcaccgccaccatcctccttgtctttgccatggccattaccagcctgttcttcttcccaacatcatcagactgccctttccaagctcccaatgtgtcctccatgatttccaacctctcctgggagctccctgggtctctgcctctcatcagtgtcccatactccatgcactgctgcacgctgggcttcctctcctgctccctctttctgcacatgagcttcgagctgaagctgctgctgctcctgctgtggctggcggcatcctgctccctcttcctgcactcccatgcctggctgtcggaatgcctcatcgtccgcctctatctgggccccttggactccaggcccggagtgctgaaggagcccaaactgatgggtgctatctccttcttcatcttcttcttcaccctccttgtcctggctcgccagaatgagtactactgccgcctggacttcctgtggaagaagaagctgaggcaggagagggaggagacagagacgatggagaacctgactcggctgctcttggagaacgtgctccctgcacacgtggccccccagttcattggccagaaccggcgcaacgaggatctctaccaccagtcctatgaatgcgtttgtgtcctcttcgcctcagtcccagacttcaaggagttctactctgaatccaacatcaatcatgagggcctagagtgtctgaggctgctcaatgagataattgctgattttgatgagctgctctccaagcccaagttcagtggggtggagaagatcaagaccatcggcagcacctacatggcagccacaggcttaaatgccacctctggacaggatgcacaacaggatgctgaacggagctgcagccaccttggcactatggtggaatttgccgtggccctggggtctaagctggacgtcatcaacaagcattcattcaacaacttccgcctgcgagtgggtgagagacttcccctgctgcagcagtctggtacctcctcaccttcctgagcttgccccactccaagtcctttgttagctgctcccagttcatcctgaagcccctttcctgactcactccctgggatggggtgtgaaggtgctgggcaaggaggtacgaggctctcccactctttttcttaagctacattcctccagcccttagagacccctcctctcctctagggccccccaggctcttctcccttccttccagttccttgtggcttcctcttcccctcttccttctccaagtctgtcattaccacatccctcattagggttgaaccatggacccgtagtagctggagttattggggcccagaagccgcaatatgacatttggggcaacacagtgaacgtggccagccgcatggagagtacaggagtccttggcaaaatccaagtgagggaaccacattggaggcatagggggagggggactaagaatagggccacctccatattccctcgcccccctccaattgtaggtgactgaggagacagcatgggccctacagtccctgggctacacctgctacagccggggtgtcatcaaggtgaaaggcaaagggcagctctgcacctacttcctgaacacagacttgacacgaactggacctccttcagctaccctaggctgagattgcactcgccttctaagaacctcaataaagagactctggggtgtctggaaaaaaag

SEQ ID NO: 80169 - DNA, 1649 bp, Homo sapiens
  sig_peptide (754)...(889): this location contains the signal peptide sequence, MGHLLLQAKAMQLLYCLKTEHSEDDVQSKQWLTHFLDQFTNIKNS, Run with SignalP
  misc_feature (184)...(877): similar to gi188864 in the genepept database release 114, Run with FASTXY 3.3t00, default parameters
ttttttttttggaagagataaaacttagctttactaagttaaatcagaagagaaaaagacagatctagaagatcctatttccaaaacatgttttctataaactgaaacagaaatgcaagtggccagctttcttttattctttcacctggccaagggggagcaacgtttggtgcagggccactttcaccaccaaggactctgaccgcttctccacctccaggacaagcactgaggccaattccacctccaatctgctggtcttccacattcacacagggccatttcaccaccggctcctactgcttctctgcctccaagaggagcactgaggccaattttcgcctcgattctgaatgtctcccactttggtgtaagggccatttcaccacagaggactctgaccacttctccacctccaggatgagcactgaggccgatatcacctccattctggtggcctcacacagcaactcgctgcttgaacccagacatctttgctgaagtcagttgactggacagtacagtgcaggatctgcgtgtggcacagggaaacgcaagccagctccagtaccagcaggtgtgcgcgaggtacaagatgctctgcgtggtgcccccaacccactcctgtacacctggcaggtggacaaaacgctcgacctggacagcatctccttccccatctataaccatagtggacaccccctctacctgaccagcttcttcagaggacacatctttggggacagcctaggaatgggccacttactcctgcaggccaaagccatgcagctgctgtactgcctgaagaccgagcactctgaggacgatgtgcagagcaagcagtggctcacccatttccttgaccaatttaccaacattaagaacagcctggtcttgaagaaaattgaggtacctggcggtttgggtttacaaggaggccaggagaaggtgggagggacgaggaagatttgcacccagaaccctaacaaaagtactgcatgactacttgatggggcccttgcctcaaagccgggtttgctctgctgtatttggtactcaatccaattttcttaaccctgacagatgctagaaatcgtgaatcctgggtaacattgcagtcgataacgcaaatcctgtgtccaccagatgggccagctcagtacagacactgatcttcacatttaattttggggtttggtttctaatactttgaaattctacttttagttaaagtcttcactggttttggggagcctcctaaaacttgtttggagctcactgggattaaaaaagaaaaacaaacttttaagtaaaagttaatggtgttaaggtaactagctcagcatttttcaagttagatacatatgaagcgcctggcttagtgtgaggtacatatcagctgttcagttattgctgggtcagcaactctactaagacttataaatagaggagcagtggtgttggcagcatcagggcatggcccaggcaggagcagcggccacagcgttcatccatctatggaggaagaggctgccttggcgggtcaactgtgttgctccaagtgacataatgtcatgattttgatagctgaagtgttttgccttgtgtacatactagagtttcttgatgtcttcatttgtgggaattcc

SEQ ID NO: 80170 - DNA, 387 bp, Homo sapiens
  sig_peptide (145)...(280): this location contains the signal peptide sequence, MLSGAPGEVGSVLFSLFWSVQGSLLSWCYLQLKSTDSGAKDLAVD, Run with SignalP
  misc_feature (30)...(239): similar to gi3135037 in the genepept database release 114, Run with FASTXY 3.3t00, default parameters
agctgtttcatgacttttccgtggctatagtttgtttttgctggtgacagctgctgctttagaggatgcccttggctatgctctgtgaatggccttgtcacgaacactttctgtttgtctcctcccttgtagtgcgagctgttaatgctcagtggggccccaggggaggtgggctctgtgctcttctccctgttctggtccgtccaaggcagcctgctatcctggtgctacctgcagctgaagagcacggactctggagccaaagatcttgccgtggaccttattgaaaaatgtgagtttcaatataaaatccatgaaaagagatggcgtttgggttttgactctgagtgttctcttctttagtaactcatgcaatgagtgtgcata

SEQ ID NO: 80171 - DNA, 707 bp, Homo sapiens
  misc_feature (1)...(707): n = a,t,c or g
  sig_peptide (536)...(671): this location contains the signal peptide sequence, MASSPSSGSHSSLLLSPXDMSLLLSLIAWWLLGSELSQACFGNRQ, Run with SignalP
  misc_feature (77)...(263): similar to gi1181245 in the genepept database release 114, Run with FASTXY 3.3t00, default parameters
caactaagcattatatacctctattagaggggttaaagttgatcactggagtcagatgttgttggccttattataaatattcccatcactcttttttttcttcataccctcatctgtgagccaggaactcatcactcttttatttaatagttttaacatcaattgattattgtctacatgtaataatcctttagagatgcaaaatgataattttcttgttctgtaatttcctttctatttgtagttggaagttttcttacagaagagctttccctgatcaactgtttggttatcctaaaatagaatttgtttctcaaggcaggataaatgcttgattgtttctcttcataggtcagttttcagaataaagagttggtaccatagatatctccataaatgtccagtgagttggtaccttagaaatctccataaatgtccagtgaaattgattttatattcttaagaacttatagatgtatatatgtatatgtatatcatctagagctttgcagtcgttagacattttgatgcttaaatggcttcatctccatccagcgggagccattcaagtttgctcctttctcccgntgacatgagcctactcctgtctctgatagcttggtggcttctcggcagtgagctttcacaggcttgttttgggaatagacagcccctagatgtgaaaccacttttataaggaatctcat

SEQ ID NO: 80172 - DNA, 399 bp, Homo sapiens
  sig_peptide (149)...(284): this location contains the signal peptide sequence, MIQAVFMLLFQHTHIIKLCPSEEALPAEVVALSYSVVAAVPLRAL, Run with SignalP
  misc_feature (375)...(233): similar to gi492868 in the genepept database release 114, Run with FASTXY 3.3t00, default parameters
aatgagcattatgtcaccactcaaaacacgttcatattttggagcattttcagtttcaaatttgggatgttcaactcacacctgggttagaactggttcttattccagctggcccaagaaataatgaaactcaatcatctcaaaagtcatgattcaagcggtctttatgttacttttccaacacacacacattattaaattgtgtccttctgaggaggcccttccagcagaggtggtggccctatcgtattctgtcgttgccgccgtccccctgcgtgccctttggctcacattacaaagcaagttggcagagcaggggatggtctcaacatggtacagcgtcgcactctcactgggaggaatcacaaggcctctcagacaccactgcattgagatcct

SEQ ID NO: 80173 - DNA, 1418 bp, Homo sapiens
  sig_peptide (447)...(582): this location contains the signal peptide sequence, MVFINVVGVVVTFLVLLIFSYNVVFLFVGTASLGLFLSSTFPSML, Run with SignalP
  misc_feature (300)...(952): similar to gi3880556 in the genepept database release 114, Run with FASTXY 3.3t00, default parameters
tgacctcattacgccaagcttggcacgaggtgctgctgtccaaggagcggctgctgacctgctgtccccagaggaggcccctgcttctgtctgctgatgagcttgccttggagacacagcctcctgagaaggaagatgcctcctcactgcccccaaagtttcagtcacacctagggcatgaggacctgttcagctgctgccaaaggaagaacctcagaggagccccttattccttctttgccatccacatcacgggcgccctggtactgttcatgacggatgggttgacgggtgcctattccgccttcgtgtacagctatgctgtggagaagcccctgtctgtgggacacaaggtggctggctacctccccagcctcttctggggcttcatcacactgggccggctcctctccattcccatatcctcaagaatgaagccggccaccatggttttcatcaacgtggttggcgtggtggtgacgttcctggtgctgcttattttctcctacaacgtcgtcttcctgttcgtggggacggcaagcctgggcctgtttctcagcagcaccttccccagcatgctggcctacacggaggactcgctgcagtacaaaggctgtgcaaccacagtgctggtgacaggggcaggagttggcgagatggtgctgcagatgctggttggttcgatattccaggctcagggcagctatagtttcctggtctgtggcgtgatctttggttgtctggcttttaccttctatatcttgctcctgtttttccacaggatgcaccctggactcccatcagttcctacccaagacagatcaattggaatggaaaactctgagtgctaccagaggtaaaactgggtgaagaaggcaagagaagactttcagcctcttgatcaccagcacgaccatactgtttcagaaagctgggtggtggtggaggcgctctctcaatggctattcaagtcttctccactaaaacttggttgggtagaggaaattaaattgagtcctggtacctggtcaaaatcattagaagtttacctggcttctcaagttatcttcttccctggttcagactgttggtaagagctgtccagatacccagatgggaaggaaggagacagccgcgcgcttcactccatttgtcacctcatgcatggaccatactctgggtttgagatcattaccacacgcttctcagttacacaagtaggactttcttcctcatcttcctttcaggaatttggacatttcagaatcctgtggaatcaccctgttcccagattttcctctgctacttgtatatggaaatctaacccatcaggcacatcggattcattcaaatgcaatcatgttgaatgtctgtttcttcgttcctcggttctctcattccacaagtgcataggttat

SEQ ID NO: 80174 - DNA, 1759 bp, Homo sapiens
  sig_peptide (967)...(1102): this location contains the signal peptide sequence, MVCFLFITPLAAISGWLCLRGAQDHLRLHSQLEAVGLIALTIALF, Run with SignalP
  misc_feature (201)...(499): similar to gi1177607 in the genepept database release 114, Run with FASTXY 3.3t00, default parameters
cttgcttatctggcctgcagaggcctgactatgatgctcagaagaacatgtgaggccaggaaggctgctggctgagctgtttagagggcatttatccagcagggaactgtcctagcgcaagagttagtaattgctcccctgttccttcacctccccactttggagctcagatttgtttttttgtttgtttgtttgcttgctttcttttgttctgttttagagactggagactgggtcttgctctgttacccaggctggagtgcagtggtgtgatcatagctcactacagccttgaactcctgggctcaagaggttgaggctccctcctcagcctcccaagtagctgggactacaggctttcagcaccatgcctggctaattcaaaaaaaccttcagagagatagggtctctctatgttgccctagctcgtctcaaactcctggcctcaagtgatcctcctgcttggacctcccaaagcgctgggattacaggctcctggaaccatgggcctcaggccctgaggatacggggctcccggtggccatgacgacgggtgactgctgccacctccccggctccctgtgtgactgctccggcagccctgccttctccaaggtcgtggaggctacgggcctcggaccgccccagtatgtggcacaggtgacttcaagggatggccggctcctctccaccgtcatccgtaccttggacacaccgagtgatggtcctttctgccggatctgccatgagggagcgaacggggagtgcttgctgtccccgtgtggctgcaccggcacgctgggtgccgtgcataagagctgtctggagaagtggctttcctcatctaacaccagctactgcgagctgtgccacacggagtttgcagtggagaaacggcctcgacccctcacagagtggctgaaggacccggggccgcggacggagaagcggacactgtgctgcgacatggtgtgtttcctgttcatcacaccgctggccgccatctcaggctggttgtgcctgcgcggggcccaggaccacctccggctccacagccagctggaggccgtgggtctcattgccctcaccatcgccctcttcaccatctatgtcctctggacgctggtctccttccgctaccactgccagctgtactccgagtggagaaagaccaaccagaaagttcgcctgaagatccgggaggcggacagccccgagggcccccagcattctccactggcagctggactcctgaagaaggtggcagaggagacaccagtatgaatgctgggctctccggaccctgcagcagagaggccagaggtagctggtgataccctgtcctgtggaaggacttccacttcaacacttccacttcaacagttcccgcacggcctgaacgcttcttaggccaagagacaccatgcggagcctagtctgtgatcctgtgtgaagatattttcagggtttttttgtttttttttttgcatatggaggacagggggacatggtcctgagctctggacggagcaggcaccctgatctcattctgaggtccacatggcaccttttgggccagcagctggggccggggtatcaagggcgcccttaaagctggaacattccagcaagctttttgcgcttctctgcacccggcaggcccactttcctggcaccctcgactttatataaaagttgcactgcgtttcaaaaacccacccctgaatgaataaaaggagccctggctggaaaaaaaaaa

SEQ ID NO: 80175 - DNA, 2202 bp, Homo sapiens
  misc_feature (1)...(2202): n = a,t,c or g
  sig_peptide (397)...(532): this location contains the signal peptide sequence, MMNVSKISFFAMFLMYLLAALFGYLTFYEHVESELLHTYSSILGT, Run with SignalP
  misc_feature (1)...(904): similar to gi1840045 in the genepept database release 114, Run with FASTXY 3.3t00, default parameters
ctgaacgggaactatttggttctgttggtgtcattggtggtcattcttcctttgtcgctgtttagaaatttaggatatttgggatgtaccagtggcctttccttgttgtgtatggtgttctttctgattgtggtcatttgcaagaaatttcaggttccgtgtcctgtggaagctgctttgataattaacgaaacaataaacaccaccttaacacagccaacagctcttgtacctgctttgtcacataacgtgactgaaaatgactcttgcagacctcactattttattttcaactcacagactgtctatgctgtgccaattctgatcttttcatttgtctgtcatcctgctgttcttcccatctatgaagaactgaaagaccgcagccgtagaagaatgatgaatgtgtccaagatttcattttttgctatgtttctcatgtatctgcttgccgccctctttggatacctaacattttacgaacatgttgagtcagaattgcttcatacctactcttctatcttgggaactgatattcttcttctcattgtccgtctggctgtgttaatggctgtgaccctgacagtaccagtagttattttcccaatccggagttctgtaactcacttgttgtgtgcatcaaaagatttcagttggtggcgtcatagtctcattacagtgtctatcttggcatttaccaatttacttgtcatctttgtcccaactattagggatatctttggttttattggtgcatctgcagcttctatgttgatttttattcttccttctgccttctatatcaagttggtgaagaaagaacctatgaaatctgtacaaaagattggggctttgttcttcctgttaagtggtgtactggtgatgaccggaagcatgggccttgattgttttgggattggggtacacaatgcacctggaggtgggccattaattggcaccactcaaactcaaactcagtccatctgatgccagtgttgagtaaactcaactactatgaaatttcacctaatgttttcagtttcacttccttttgaagtgcagattcctcgctggttcttctgagtgcagaataagtgaactattttgttttgttttgtttttttaagaaacttatctgtatgttagaaatgggatatgaacaacaaagccacgagtctcgggttaagggaagtgacaattttattccattccagagaatggacaaactcttaacttttatcaagccacatgcttggctgtgtcattgtttaacttggatattttatgattttacttgaatgtgcctaatggaaccatttgatgtgagaaacaattctttttaatttacagcaaaatattgaataaccattgacaaaaacactattattttttgtaccaaaaatacttaaagacctcagaagcactcttttacttttaagaaattgcttttttgaactttattcagaagcagttatcaataaattccataaaataatgtcattggtatttaaaaatgaatattaatataatgaaatggtttgcctttttgtaggcataataagccaaatacttttttacccaaaataatttttagagaaaatgatgtaatgaaaaattgtaccatgaattaggagcatagttttttccatttaaacgtcaccattacttaaaagatgattgattattgctataccaaatcagatgaactctgttcatcacttttcttctctgtccccaaacaatttggttcattcagactgaaatgtttgtgtcttcaacttattagaatggaagataatgcagatatttctgtgggaaataaaataactaattttgaggtaccaaatagtgcaattgggtaaaacagggtttattcagttgcatctgtctccagtgttgtattgacagctctggggtctttttttggggccagcccttttttggacattgcttccagcagtggaaaatgggcattgatggcaataggccaaattattgtgtccgagagtacactttttcaaatgctcacctactggaagtgtgaattacttgacatgtatggcttagttgtgtcatgttttgtcacagtagaggtcaatccacaggttacaccatgttgatatgatataagtcnctttgcgnagccactgggttcncagcagtagcttataaaaccattgcacngactgcacncatctgtca

SEQ ID NO: 80176 - DNA, 1033 bp, Homo sapiens
  misc_feature (1)...(1033): n = a,t,c or g
  sig_peptide (554)...(689): this location contains the signal peptide sequence, MVLPFICNLLRRHPACRVLVHRPHGPELDADPYDPGEEDPAQSRA, Run with SignalP
  misc_feature (305)...(889): similar to gi4007758 in the genepept database release 114, Run with FASTXY 3.3t00, default parameters
cagtccannnnccggaattcgcgagccgcagtgaggccaacgccgtgttcgacatcctggccgtgctgcagtctgaggaccaggaggagatccaggaagcagtccgcacgtgcagccgtcttttcggggccttgctggagcggggagagctgtttgtgggccagctgccctctgaggagatggtcatgacagggtcccagggagccacacggaagtacaaggtgtggatgagacaccgctatcacagctgctgcaatcgcttgggagagctcctgggccacccctcctttcaggtcaagggggggccctcagcctcttggccttgaacgggctgttcatcttgattcacaaacacaacctggagtaccctgacttctaccggaagctctacggcctcttggacccctctgtctttcacgtcaagtaccgcgcccgcttcttccacctggctgacctcttcctgtcctcctcccacctccccgcctacctggtggccgccttcgccaagcggctggcccgcctggccctgacggctccccctgaggccctgctcatggtcctgcctttcatctgtaacctgctgcgccggcaccctgcctgccgggtcctcgtgcaccgtccacacggccctgagttggacgccgacccctacgaccctggagaggaggacccagcccagagccgggccttggagagctccctgtgggagcttcaggccctccagcgccactaccaccctgaggtgtccaaagccgccagcgtcatcaaccaggccctgtccatgcctgaggtcagcatcgcgccactgctggagctcacggcctacgagatctttgagcgggacctgaagaagaaggggcccgagccggtgcccactggagttttatcccagcccagggcctgctgggacggccgggtgaaactctgtgcccagcacttccacgctcagctgaccctggcccacctgtgaataaatcttcagctgaccccagcccacctgtgaataaatgttttttgcaggaaaaaaaaaaaa

SEQ ID NO: 80177 - DNA, 1702 bp, Homo sapiens
  sig_peptide (684)...(549): this location contains the signal peptide sequence, MQLMGLWLLRVVNRVVGLGIGLGGNPLLLTKLCKDGEKHCFPIPR, Run with SignalP
  misc_feature (8)...(490): similar to gi3599478 in the genepept database release 114, Run with FASTXY 3.3t00, default parameters
cagattctcggtggcggcgcacggcggcggccctggactgcggggaatgggaatcctaggtccctgactgagcacctcccccgcctccctgcccccgacatggctcaggagaagatggagctagacctggagctgcctccgggtacgggcgggagcccggcggagggcggtggcagcggcggcggcgggggcctcaggaggtctaacagcgcccccctgatccacggcctcagtgacacttcgccggtgttccaggccgaggcgccgagcgccaggcggaacagcacaacgttcccgagccgccacggcctgctgctgccggcctcccctgtccgcatgcacagcagccgcttgcaccagatcaaacaagaagagggcatggacttgatcaaccgagagacggtccacgaacgggaggtgcagaccgcaatgcagataagccactcctgggaggaaagtttcagcctgagtgacaacgacgtggagaaatccgcctcccccaagcgcatcgatttcattcctgtgtcaccagcaccgtcacccactcggggaattgggaagcagtgtttttcgccatccttgcaaagttttgtaagtagcaacggattgcctccaagccctattcccagcccaacgacccgatttaccacccggagaagccagagccccatcaattgcattagaccaagtgttcttggaccattgaaaagaaaatgtgaaatggaaactgaatatcagccaaagagatttttccagggcatcaccaacatgctttcttctgacgttgcacagctgtcagatcctggtgtgtgtgtatcttcggatacccttgatggaaacagcagcagtgccggatcttcttgtaactcaccagcgaaagtcagcactaccaccgactctcctgtgtcacctgcccaagcggcttctccatttattccactagatgaactttcgtctaagtgattcactcatcctgagactttctttttgcagtggagagagagaataatctagttggggcaaacactgaactttgtcaattaatttgaggctatttcctatttgaccccttttcttttttgaaattccctgaaatgatgttattctagagaacttctatgtcaggttcctttggatacccttgaattcagtgtagtaatattttcagacgtttcccccaataagtgtgttgaagcatacatctttacgctgctaatatgtctaaatacatatgttatcccttgatttttttaaataactgagagctctatttatttatgggattattaagttctgatgaaaatataaatgttgacttaatcagcatagtaaactgatgtttaaaattccatacttcatgcccacactaatttttaatgttattttcagtggttgccgatttccatttgatgaagaactatacagcttaaaaaaatacgttagttatatctatctagtgggtgtctgttttacccaggaattcttggatatttacttttctgggtactgaagtggatgggagggggaatgattaaagaacaaattataaaagtttgaacaaatcttttcaaattaagtatataaaagtaaacttttaagaaaaacatttttaatgagattttaatagtaattctagtcagtcatacaactataactactatagagaaaataaaatttttcccttttttttttaaaaaaaaaa

SEQ ID NO: 80178 - DNA, 401 bp, Homo sapiens
  sig_peptide (8)...(143): this location contains the signal peptide sequence, MAAPWRRWPTGLLAVLRPLLTCRPLQGTTLQRDGLLFEHDRGRFF, Run with SignalP
  misc_feature (4)...(116): similar to gi11073 in the genepept database release 114, Run with FASTXY 3.3t00, default parameters
gctggccatggcggcgccttggaggcgatggcccacggggctgctagccgtgctgcggcccctgctcacctgccggcccctgcaaggcacgacgctgcaacgggatgggctgctctttgagcatgatcggggccgcttcttcaccatcctggggctggtctgcgcgggccagggcggcttctgggcttccatggctggggcaggcgcgctgcggaccccgggtcccctgcaaggtatgaatgtggaacggcatgagctgctcttttagcatgagcgctgccgcttcttcaccatcctctggctggtctgctcgggccacgacggattcctgggctttcatgggtggggcagcccgtgtcccggccccccgttccggtgcaacactctggatgcggagggcg

SEQ ID NO: 80179 - DNA, 432 bp, Homo sapiens
  sig_peptide (345)...(210): this location contains the signal peptide sequence, MTYFSGLLVILAFAAWVALAEGLGVAEYAPAALPCAACATILLSS, Run with SignalP
  misc_feature (17)...(94): similar to gi4455041 in the genepept database release 114, Run with FASTXY 3.3t00, default parameters
cggaaagtagagcggggctagagcagggctgcgatcgagggggagggggcgggacacgaaagaaagatcggaccgccggtcgtcgctggaactagcaggcgaagcagagaaacgcgatcggctactgaagccagacgaggtgacgagactgtacacggacgactacgtgttcgcgtggggatccaggagatcggcgtgctaggccaccgaggataagaggatggtggcacaagcagcacacggcagcgcagccggtgcgtactcggccacacccagtccctccgccagcgccacccaggcggcaaaggccaggatcaccaggaggcctgagaagtaggtcatgttcctcccaatgcacttgttgatgggcttcatgaggaaggaggacaagaagccgctgaggtacatcaccaggggaatggtcgcgatgaa

SEQ ID NO: 80180 - DNA, 386 bp, Homo sapiens
  sig_peptide (161)...(296): this location contains the signal peptide sequence, MLCLYRLALKFLKSHFFLLLVPVNFSSRHSCVVPYFYLNWVLLRI, Run with SignalP
  misc_feature (162)...(286): similar to gi1061247 in the genepept database release 114, Run with FASTXY 3.3t00, default parameters
ggcacgagctaactggttggttgtatttaagaagggtgctgatttggtatatattaattttctaatcattaatgaattctgtaattattttccaggagttttttatgttgtttctcttaggttttccagaaatagaattgtgttatccaaaaaaacagtgatgctttgcctttatagattagccttgaagtttttaaaatctcatttctttcttttgttagttccagttaatttctccagtagacattcctgtgttgttccttacttttatttgaattgggtacttttgagaatcatttttcaaatgccctaaagcagttaatttatcatatattacttttaaatatctcagtttgcatgttcactttagaagttacagtgtaatg

SEQ ID NO: 80181 - DNA, 450 bp, Homo sapiens
  sig_peptide (211)...(346): this location contains the signal peptide sequence, MWSLIQTLQILPGSLSILLCSSAGWKDCQSALWLNHVFRRAWWLL, Run with SignalP
  misc_feature (327)...(74): similar to gi4583652 in the genepept database release 114, Run with FASTXY 3.3t00, default parameters
ggcacgaggcaaaacaatgcttgaacattcagttctactaaaatacaatatttgagtagatcccatcacttttacccattgtttgctatgttggaccctaaaacaggctgctgacagatcggacaagtgaaattctctgagagccattggtcagtacaatgaatatgaaattcatgcctgcaaggtaattgcctgagcttgtttccagttatgtggtcactgatacaaacactacagattttacctggttcactatcaatactgttatgctctagcgctgggtggaaagattgtcagtctgctctttggttaaatcatgtattcaggcgggcgtggtggctcttgcctgtaatcctagcactttgggaggccgaggcaggcggatcacctgaggtcaggagttgaagaccagcctggccaacatggtgaaacccatgtctactaaaatac

SEQ ID NO: 80182 - DNA, 1321 bp, Homo sapiens
  misc_feature (1)...(1321): n = a,t,c or g
  sig_peptide (628)...(493): this location contains the signal peptide sequence, MSYVRHVLSCLGGGLALWRAGQWLWAQRLGHCHTYWAVSEELLPN, Run with SignalP
  misc_feature (1232)...(93): similar to gi1107689 in the genepept database release 114, Run with FASTXY 3.3t00, default parameters
ttttttttttttcatagcaggaaccagtttattggttgaggtgggggggaacaggggggttggagggcacaccatgaggagcgagggtctcagctctccccagggaccctgggaaatccatgaccctccaccaagtcctgcaggtaggnccttgtactcggtcggaggtgagggagagtgggtggctgttggaaatgtgcaggtccacagtattctccagggaggagggcaccccctacccgggccatttctaccaaggccctgaggcacgtgggcacaaccttgaccatcacgagcctcttggtccacggctggtcctggggccatgactcccccacacagaaccagagggcatagcgtggtgagcgtccgcttccttccgtgaaggtaatcagatctgggggccccagaagcctacaatgaagggccccaggtcaaacacgcctccttccttgtccttggggacctcgccatcaggcccatgcccgctgttggggagcagctcctcgctcactgcccagtatgtgtggcagtgccccagccgctgggcccagagccactgcccggcccgccagagagccagtcccccacccaggcagctcagcacatgcctcacgtagctcatcactcccctgtctgtcagggacatgccagggtctggcagtgtgactggccatccaggcagcgtcctgtctcccacttcggaccccaccagccgcaggccctccgggcaggagatggtctgctggaagacttggcggccccggtagaaggctgtcacctcgaactcccactcttcccccggcaccaacagccgcttcagtgggttctcagagggccccaggtttgggaagggagtgggattgtccaagctggggctccgcaggggctgagggcagggctcaggggctacagccaggcttgggggtcccggatctgggagtggggccaacaccatgttacccagtaactcatccagaatgtcttcctgggtatcagaagtactgcctccaccattggtgtccggagaggtgtctggctgggaaaagtccccaactcctgagttcacaaactcgtagattttatgtgggtcgtgagggtccttgctccggtcctctgctaaacgcaacccttctttgcggttgagggcagagcggaaattcctcttccaggttggcaggtctggcttatccctcccgggaacatatgcaccagtggcctcggcccaggccggctttcccggttttattcccgtaaccctgcagctccaaccctgcttgcgccccaccatcagtcagccctcgtgccaagcttggcgtaa

SEQ ID NO: 80183 - DNA, 1190 bp, Homo sapiens
  sig_peptide (148)...(283): this location contains the signal peptide sequence, MIGTIFLWIFWPSFNAALTALGAGQHRTALNTYYSLAASTLGTFA, Run with SignalP
  misc_feature (13)...(799): similar to gi5911316 in the genepept database release 114, Run with FASTXY 3.3t00, default parameters
cccacgcgtccggatgccggaggctccatgactatccacacctttggtgcctacttcgggctcgtccttgcgcgggttctgggcaggcccgagctggagaagagcaagcaccgccagggctccgtctaccattcagacctcttcgccatgattgggaccatcttcctgtggatcttctggcctagcttcaatgctgcactcacagcgctgggggctgggcagcatcggacggccctcaacacatactactccctggctgccagcacccttggcacctttgccttgtcagcccttgtaggggaagatgggaggcttgacatggtccacatccaaaatgcagcgctggctggaggggttgtggtggggacctcaagtgaaatgatgctgacaccctttggggctctggcagctggcttcttggctgggactgtctccacgctggggtacaagttcttcacgcccatccttgaatcaaaattcaaagtccaagacacatgtggagtccacaacctccatgggatgccgggggtcctgggggccctcctgggggtccttgtggctggacttgccacccatgaagcttacggagatggcctggagagtgtgtttccactcatagccgagggccagcgcagtgccacgtcacaggccatgcaccagctcttcgggctgtttgtcacactgatgtttgcctctgtgggcgggggccttggagggctcctgctgaagctaccctttctggactccccccccagactcccagcactacgaggaccaagttcactggcaggtgcctggcgagcatgaggataaagcccagagacctctgagggtggaggaggcagacactcaggcctaacccactgccagcccctgagaggacacgctccttttcgaagatgctgactggctgcctactaggaagttctttttgagctccccattccctcccagctgcaagaagggagcccatgagcccagaaggaggcccctttccacaggcagcgtctccacagggagaggggcaacaggaggctgggaaatggtggggagtggggccgtaactgggtaccatagggggaaacctcaacaaatgcccaacccgactgggcctaaccagcctgcacatggggtaaaaaaaggccaaattgagggcacccaagtgaatccactggcccccacgtcaacat

SEQ ID NO: 80184 - DNA, 1205 bp, Homo sapiens
  sig_peptide (484)...(619): this location contains the signal peptide sequence, MFSAVFPAVSCQISLLSTCNSLQHFPYAGVLCFRPVLCLCPGQDF, Run with SignalP
  misc_feature (1161)...(924): similar to gi1710216 in the genepept database release 114, Run with FASTXY 3.3t00, default parameters
cggacgcgtgggttttcctattctgtatccttaccttggtcatgttaatgactttggagttattcagttaatgaccctttaattctcacaaccaaccagtcatgttgcttgaagccatttatagacgagcttcaaagcaactttaaaagattcttctgtagaagtatgagttcatcctctcttatatcagggaatgtccctcctcatgaagtgttcaagaagactaccggacgcgtgggtccgttctttcccactaatatgaaactcaaacttactgtgagccaggccctggtctgtcaagtttacctttctagtctcctgccgtaactcaatgaagcagattgataatattcccattcacagcaagaaaaccgaagcacaaagaggtgtcgtttcttgcgtgacatttcacagcttggatggggcagagcctggctggaaatattgcagatttatttaataaccagcccccttatttgtaatatgttttcagcagtttttcctgcagtttcttgccaaatctcccttttgtccacctgtaacagcctgcagcactttccctatgctggagttctatgttttaggcctgttctctgcctctgccctggccaagacttctgtggcaatgtcagatgccagtggaggctgctggcaggcgtggacgtctcagatgtctgatccttcaggagccccctccacggggccctggctaggcagtgaccaggatgtttctgaatccccttaagttaatggtggccacttaggcagcggaagtgtcatgaaagactcttctgtccccatggctgggccaaaccagggaagacgctgacatcaagcacaattgagaacaagcagcagtaggcaatgttctggggctattaattcatcctgggggaaaaaacctcacagtggattaaattggtttatgtaaagtgctgagaagagcccagcctgggcaacatgatgaaatcttgtatctacaaaaaatacaaaaattggctgggcatggtggcatgcacctgtggtcccagttactcgagaggctgaggtgggaggatcacctgagcctgggaaggtcaaggctgcagtgagccgtgattgtgccactgcactccagcctgggcagcagagtgagaccccgtcttaaaaaaataaaaaagaggggggccgtttaaaaggtcaatgtttatatcccgggcttggac

SEQ ID NO: 80185 - DNA, 489 bp, Homo sapiens
  misc_feature (1)...(489): n = a,t,c or g
  sig_peptide (331)...(466): this location contains the signal peptide sequence, MTCPLHTTPFPFSLPCLPTFFLDFPSCSLSSCLPICFPFLSLXQI, Run with SignalP
  misc_feature (489)...(266): similar to gi5802907 in the genepept database release 114, Run with FASTXY 3.3t00, default parameters
ctttgacgccctcgtagtaggccctaagaaccggancgacccacgcgtccgcggacgcgtgggcggacgcgtgggtgctacaaagtgcacacctggcgttgatacgcagtctcttgctgcctgttaactaacccaccagccgacaagttctgcccactggcaggagcaaggacttataaaaaatagtgcctccctcccaagggcttatgagctggttaagtgcagaggacaaatagaatgaaagaaaaggcaatctcggcatagtatttagttaattcttctctctctcttgatccctctctctcctttctctcttcctccctcctttctatgacttgtcctctccacacaactccttttccgttttccctcccctgcctccccaccttctttcttgacttcccatcttgctccctttcttcctgcctgcccatctgctttcctttcttatctctggngcaaattctgcatatagtcgctctcctcatt

SEQ ID NO: 80186 - DNA, 3807 bp, Homo sapiens
  sig_peptide (1569)...(1434): this location contains the signal peptide sequence, MGFSFRFPVLYMLAGLFTAFCLTWPLPGDLTRLFTPSVVGDTSAD, Run with SignalP
  misc_feature (7)...(2401): similar to gi3043558 in the genepept database release 114, Run with FASTXY 3.3t00, default parameters
tttcgtgcgggctgcggggagctaagtccccagattggaggaggctggctctggtcttcgatgcacaggagtggccgttatggaacgcagcagcagcgtgcagggtcaaagacagccggccccccatgtcagtggtctaggatggccagtgaaggcaccaacatcccaagtcctgtggtgcgccagattgacaagcagtttctgatttgcagtatatgcctggaacggtacaagaatcccaaggttctcccctgtctgcacactttctgcgagaggtgcctgcagaactacattcctgcccacagtttaaccctctcctgcccagtgtgccgccagacctccatcctgcccgagaaaggggtggccgcgctccagaacaatttcttcatcacaaacctgatggacgtgctgcagcgaactccaggcagcaacgctgaggagtcttccatcctggagacagtcactgctgtggctgcgggaaagccttctctcttgcccaaaccacgatgggaatgtgatggaattttactgccagtcctgtgagactgccatgtgtcgggagtgcacggagggggagcacgcagagcaccccacagttccactcaaggatgtggtggaacagcacaaggcctcgctccaggtccagctggatgctgtcaacaaaaggtgggggaccctccccaaacccccaactggctgcctgtacttgaggcctggcctcatggcctcttgtctagttaaccaaccaaaaggccagcatcgtggatgacattcattccacctttgatgagctccagaagcctttaaatgtgcgcaagagtgtgctgcttatggaattggaggtcaactatggcctcaaacacaaagtcctccagtcgcagctggatactcctgctccaggggcaggagagcattaagagctgcagcaacttcacagcgcaggccctcaaccatggcacggagaccgaggtcctactggtgaagaagcagatgagcgagaagctgaacgagctggccgaccaggacttccccttgcacccgcgggagaacgaccagctggatttcatcgtggaaaccgaggggctgaagaagtccatccacaacctcgggacaatcttaaccaccaacgccgttgcctcagagacagtggccacgggcgaggggctgcggcagaccatcatcgggcagcccatgtccgtcaccatcaccaccaaggacaaagacggtgagctgtgcaaaaccggcaacgcctacctcaccgccgaactgagcacccccgacgggagcgtggcagacggggagatcctggacaacaagaacggcacctatgagtttttgtacactgtccagaaggaaggggactttaccctgtctctgagactctatgaccagcacatccgaggcagcccgtttaagctgaaagtgatccgatccgctgatgtgtctcccaccacagaaggcgtgaagaggcgcgttaagtccccggggagcggccacgtcaagcagaaagctgtgaaaagacccgcaagcatgtacagcactggaaaacgaaaagagaatcccatcgaagacgatttgatctttcgagtgggtaccaaaggaagaaataaaggagagtttacaaatcttcagggggtagctgcatctacaaatggaaagatattaattgcagacagtaacaaccaatgtgtgcagatattttccaatgatggccagttcaaaagtcgttttggcatacggggacgctctccggggcagctgcagcggcccacaggagtggctgtacatcccagtggggacataatcattgccgattatgataataaatgggtcagcattttctcctccgatgggaaatttaagacaaaaattggatcaggaaagctgatgggacccaaaggagtttctgtggaccgcaatgggcacattattgttgtggacaacaaggcgtgctgcgtgtttatcttccagccaaacgggaaaatagtcaccaggtttggtagccgaggaaatggggacaggcagtttgcaggtccccattttgcagctgtaaatagcaataatgagattattattacagatttccataatcattctgtcaaggtgtttaatcaggaaggagaattcatgttgaagtttggctcaaatggagaaggaaatgggcagtttaatgctccaacaggtgtagcagtggattcaaatggaaacatcattgtggcccgactggggaaacagcaggatccaggttttttgatggtagtggatcatttttgtcctacattaacacatctgcttgacccactcctatggcccccaaggccttgggccctaacttcagatggtcatgttgtggttgcagactctggaaatcactgtttcaaagtctatcgatacttacagtaatggggggcagggggatacccgcttccatggtcttgcactataaactggaatggatttctcaatgcgggaccagattatgactagagtttttatgccagaaggaatcattggtgaactttccaaggttatttctgaatgtaacaatttccttaaaaatgacttatccaatttctgtatttcacctttagggttaaaaaaaactcttctactgaatctataaaaactgcagttttacatctgtgaactatggcttaagggacaggatttatgtagctaaactaattttgcaaatcaaacagacacttaaaaaaactagcatatgtaaaggtattcgttaatcctgtgaatggtagcttttgcacagaacttccaaaagcaaaacaaaaacaaaatctattgtagttatatacttcatttaacctaggtcacaagacccagggaatcttctaacctcacttttacagtaggtattactcttgtgacatttttttggttatcaacaactaaatataaattactttggaaaaagtaaggctgtcttgcaaaatgatcccagctctgattagcagccctctggagttcagaacttaagtatcagtgcaaatttctcaacctttctgggttagacaaagatccttttttgtgtgttcttttcaccacccctttggctcaccttgtatcagcaaacaaagtacttcttcagggaaacctgaaatttctaatgccttgaaaagcatattacaaaagtaatgctaccttttgggaaacaaactgccccgttaactccagatcattgcactggaatgtaatcaagaaagttagtcatgttttatgtaccatgttttcacacgtgtctcttctcttcgacttcctgaaagcgaaagctttacctcctgcaaatgtcagcacatgtagtaggacaccagtatcctaggacagagagccataagtagccctttggaggactgatggtgtcaaccaaaggcatgtgattgattaatgattcccccttagaaaagccaagtgtttacccaaagttgtgttatccttgaaagcatttacaggttaagggcatgttatggttatttatcattgtttaatgaatagtagaggtgtccaagggacctatgtatacatgattagggtaagatagaatgtattatatatatatatatatatacacacaccacatatatatagctgaatctttggtgtattgaaataggcagcactctgaaagacagaagcttcgtccagccactcttcagcacattcctttactaagcagtttaaagccgtcctagtggagcaagccctaaagcagatttaatttttgccattttccaagaatgacggtggtggcttttagtcagaaaatggccttctgtgctttcaaaaaaaaaa

SEQ ID NO: 80187 - DNA, 1239 bp, Homo sapiens
  sig_peptide (433)...(568): this location contains the signal peptide sequence, MSMAFLTCCLLKCVKKSKRRRSNRSAQLWSQLKDEDLETVQAAYL, Run with SignalP
  misc_feature (961)...(514): similar to gi537524 in the genepept database release 114, Run with FASTXY 3.3t00, default parameters
agacacatgcctcttatcagatacatgatttgcaagttttttctccctattgacggtactcacccttcttgcgatgatgtgagatgataaaatgcctacatgatgagatgaagtgagatgaaaaacataggccttgtgatggaatgggaaattccagagataatttgcacgtgcgctaagctgcggctacccccgcaagcaaccttccaagtccttcgtggcaatggtgcttccgtggggaccgtgctcatgttccgctgcccctccaaccaccagatggtggggtctgggctcctcacctgcacctggaaggggagcatcgctgagtggtcttcagggtccccagtgtgcaaactggtgccaccacacgagacctttggcttcaaggtggccgtgatcgcctccattgtgagctgtgccatcatcctgctcatgtccatggccttcctcacctgctgcctcctcaagtgcgtgaagaagagcaagcggcggcgctccaacaggtcagcccagctgtggtcccagctgaaagatgaggacttggagacggtgcaggccgcataccttggcctcaagcacttcaacaaacccgtgagcgggcccagccaggcgcacgacaaccacagcttcaccacagaccatggtgagagcaccagcaagctggccagtgtgacccgcagcgtggacaaggaccctgggatccccagagctttaagcctcagtggctcctccagctcaccccaagcccaggtgatggtgcacatggcaaaccccagacagcccctgcctgcctctgggctggccacaggaatgccacaacagcccgcagcatatgccctagggtgaccacgcagtgaggctggtgcccatgctccacactgggaggccaggctgaccccaccagccagtcagctacaactccacatcaactccacatgcgcccagctcgagactgatgagtggaatcagcttccaggtgtagggaccccttgaggggccgagctgacatccaaggctgaggaccccagtggggagtgttctgttccggcatatcctggccgtaacgatttttatagttatggactacttgaaaccactactgagggtaattttactagctgtggcctcccacttaactagcattcctttaaaagagactggggaaatggttttaagcaaatctagttttgtataataaaataagaaaatagcaataaacttcttttcagcaactacaaa

SEQ ID NO: 80188 - DNA, 6497 bp, Homo sapiens
  sig_peptide (3865)...(4000): this location contains the signal peptide sequence, MVFSPGSVSVISDSLLTLPAIVSIAAGGSLLLIIVIIVLIAYKRK, Run with SignalP
  misc_feature (3)...(5887): similar to gi3413888 in the genepept database release 114, Run with FASTXY 3.3t00, default parameters
gtggatttggtcgtctccctgattccgagctgcgggcagggagaggggcctcgcgccgccctcagcagccggcggcggccgaggtagaccgagcggggacggaaggacagaccgacgtcgccgagctggaatcatgtgagggccaaccggggaaggtggagcagatgagcacacacaggagccgtctcctcaccgccgcccctctcagcatggaacagaggcagccctggccccgggccctggaggtggacagccgctctgtggtcctgctctcagtggtctgggtgctgctggcccccccagcagccggcatgcctcagttcagcaccttccactctgagaatcgtgactggaccttcaaccacttgaccgtccaccaagggacgggggccgtctatgtgggggccatcaaccgggtctataagctgacaggcaacctgaccatccaggtggctcataagacagggccagaagaggacaacaagtcttgttacccgcccctcatcgtgcagccctgcagcgaagtgctcaccctcaccaacaatgtcaacaagctgctcatcattgactactctgagaaccgcctgctggcctgtgggagcctctaccagggggtctgcaagctgctgcggctggatgacctcttcatcctggtggagccatcccacaagaaggagcactacctgtccagtgtcaacaagacgggcaccatgtacggggtgattgtgcgctctgagggtgaggatggcaagctcttcatcggcacggctgtggatgggaagcaggattacttcccgaccctgtccagacggaagcctgccccgagaccctgagtcctcagccatgctcgactatgagctacacagcgattttggctcctctctcattaagatcccttcagacaccctggccctggtctcccactttgacatcttctacatctacggctttgctagtgggggctttgtctactttctcactggccagcccgagacccctgagggtgtggccatcaactccgctggagacctcttctacacctcacgcatcgtgcggctctgcaaggatgaccccaagttccactcatacgtgtccctgcccttcggctgcacccgggccggggtggaataccgcctcctgcaggctgcttacctggccaagcctggggactcactggcccaggccttcaatatcaccagccaggacgatgtactctttgccatcttctccaaagggcagaagcagtatcaccacccgcccgatgactctgccctgtgtgccttccctatccgggccatcaacttgcagatcaaggggcgcctacagtcctgctaccagggcgagggcaacctggagctcaactggctgctggggaaggacgtccagtgcaccaaggcgcctgtccccatcgatgataacttctgtggactggacatcaaccagcccctgggaggctcaactccagtggagggcctgaccctgtacaccaccagcagggaccgcatgacctctgtggcctcctacgtttacaacggctacagcgtggtttttgtggggactaagagtggcaagctgaaaaagattcgggccgacggtcccccccatggtggggtccagtacgagatggtctctgtgctcaaggacggaagccccatcctccgggacatggccttctccattgatcagcgctacctgtacgtcatgtctgagagacaggtcaccagggtccccgtggagtcatgtgagcagtatacgacttgtggggagtgcctgagctctggggaccctcactgtggctggtgtgccctgcacaacatgtgctcccgcagggacaaatgccaacaggcctgggaacctaatcgatttgctgccagcatcagccagtgtgtgagccttgcagtgcatcccagcagcatctcagtatctgagcacagccggttgcttagcctggtagtgagtgatgctcctgatctatctgcgggtatcgcctgtgcctttgggaacctgacagaggtggaggggcaggtgtccgggagccaggtcatctgcatctcacctgggcccaaggatgtccctgtcatcccgctggatcaagactggtttgggctggagctacagctgaggtccaaggagacagggaagatatttgtcagcaccgagttcaagttttacaactgcagtgcccaccaactgtgcctgtcctgtgtcaacagcgccttccgctgccattggtgcaagtaccgcaacctctgcactcatgaccccaccacctgctccttccaggagggccggatcaatatttcagaggactgtccccagctggtgcccacagaggagatcttgattccagtcggggaggtaaagccaatcacccttaaggcgcgaaatctgccccagccgcagtccggccagcgaggctatgagtgtgtcctcaacatacaaggagccatccaccgggtccccgctctgcgcttcaacagctccagcgttcagtgtcagaacagctcgtaccagtatgatggcatggacatcagcaatctggccgtggatttcgctgtggtgtggaacggcaatttcatcattgacaaccctcaggacctgaaagtccatctctacaagtgtgcagcccagcgggagagctgcggcctctgcctcaaggccgaccggaagtttgagtgtggctggtgcagcggcgagcgcaggtgcaccctccaccagcactgtaccagcccttccagcccctggctcgactggtccagccacaatgtcaagtgctccaaccctcaaatcaccgagattttgacggtgtctggaccgccggaaggagggacgcgagtgaccatccatggcgtgaacctgggtctggacttctccgagatcgcccaccatgtgcaggtggctggggtgccctgcacgcccctcccaggggaatacatcatcgctgagcagattgtctgtgagatgggccatgccctcgtgggaaccacctccgggccagtacgcctgtgtattggcgagtgtaagccagagttcatgacgaagtcccatcagcagtacaccttcgtgaacccttctgtgctgtcactcaacccaatccgaggtcccgagtcaggaggcactatggtgaccattaccggccattaccttggggctgggagcagcgtggcagtctacctgggcaaccagacctgcgagttctacgggaggtcaatgagtgagatcgtgtgtgtctcacccccatcatccaatggccttggcccggtccctgtttctgtgagtgtcgaccgagcccatgtggatagcaacctgcagtttgagtacatagatgaccctcgggtccagcgcatcgagccagagtggagcattgccagtggccacacacccctgaccatcacaggcttcaacctggatgtcattcaggagccaaggatccgagtcaaattcaatggcaaagaatctgtcaatgtgtgtaaagttgtgaacacaaccaccctcacctgcctggcaccctctctgaccacggactaccgccctggcctggacactgtggaacgcccagatgagtttggatttgtctttaacaatgtccaatccttgctaatttacaacgacaccaagtttatctactaccccaacccgacctttgaactgcttagccctactggagtcttggatcaaaagccaggatcgcccatcattctgaagggcaaaaacctctgccctcctgcctctggaggggccaaactcaactacactgtgctcatcggagagaccccttgtgctgtcaccgtatctgagacccagcttctctgcgagcctcccaacctcaccgggcagcacaaggtcttggttcacgtgggcgggatggtgttctcgcctggctcggtgagtgtcatctcagacagcttgctgaccctgccagccatcgtcagcatcgcggccggcggcagcctcctcctcatcatcgtcatcatcgtcctcattgcctacaagcgcaagtctcgagaaaatgacctcactctcaagcggctgcaaatgcagatggacaatctggagtcccgtgtggccttggagtgcaaggaagcttttgctgagctccagacggatatcaatgagttgaccagtgacctggaccgctcaggaatcccttacctggactatcgtacctacgctatgcgagtcctgttcccgggcatcgaggaccaccccgtcctgcgggagctggaggtacaaggaaacgggcagcagcacgtggagaaggccctgaagctctttgcccagctcatcaacaacaaggtgttcctgctgaccttcatccgcaccctggagctgcagcgcagtttctccatgcgcgaccggggcaacgtggcttcgctcatcatgaccggcctgcagggccgcctggaatatgccactgatgtcctcaagcagctgctctctgacctcatcgataagaacctggagaacaagaaccaccccaagctgctactccggaggacagagtctgtggctgaaaagatgctgaccaattggttcgccttcctcctgcacaagttcctaaaggagtgcgcaggggagccactcttcatgctatactgtgccatcaagcagcagatggagaagggccccattgatgccatcacgggcgaggcccgctactccctgagcgaggacaagctcatccggcagcagatcgagtacaagaccctgatcctgaactgcgtcaaccctgacaacgagaacagtccagagatcccagtgaaggtgttaaactgtgacaccatcacacaggtcaaggagaagattcttgatgccgtgtataagaatgtgccctattcccagcggccgagggcagtggacatggacttggagtggcgccaaggccggatcgcccgggtcgtgctgcaagatgaggacatcaccaccaagattgagggtgactggaagcggctcaacacactgatgcattatcaggtgtcagacaggtcggtggtggctctggtccccaaacagacctcctcctacaacatccctgcctctgccagcatctcccggacgtccatcagcagatatgactcctccttcaggtatacgggcagccccgacagcctgcggtcccgggccccgatgatcaccccagacctggaaagtggggtcaaggtgtggcatctggtgaagaaccatgaccacggtgaccagaaggagggtgaccggggcagcaagatggtgtccgagatctacctgacccggctactggccaccaagggcaccctgcagaagtttgtggacgacttgtttgagaccttgttcagcactgtgcaccggggcagcgctctccccctggccatcaagtacatgtttgatttcctagatgagcaggcagacaggcacagcatccatgacacagatgtgcggcacacctggaaaagcaactgcctccctctgcgcttctgggtgaacgtgattaagaacccccagttcgtgtttgacatccacaagggcagcatcacggacgcctgcctctctgtggtggcccagaccttcatggactcttgttcaacgtcagagcaccggctgggcaaggactccccctccaacaagctgcttctatgccaaggacatccccagcttacaagagctgggtggagagatactacgcagacatcgccaagcttccagcccatcagttgaccagggacatgaatgcttacctcgccgagcagtcccgcctgcacgccgtgggagttcaacatgctgagtgccctcaatgagatctactcctatggtcagcaagtatagtgaggagctcatcgggcccctagagcaggatgagcaggcacggcggcagcggctggctataaaggtggagcagctcattaatgcccatgtcccattgagagctgagaggaggagcctcgcattccctgggaagagggacctgtcccaagctgtcacactgggagtcctcagatggaaggacaagtgatggggatcaggcccccagagcttgctgtcccctgaagaccccatccctggggagaggggaggactcctctccctacgccagccaagtttcgtcatagccagttccagctgggagagacagtgggcgtcgtccatcctcagtgagaacaccagagaacccggggcccgggagaagggggtccttcaaagccgagagggcacgagctgggggaaagtctgccctctgtgactgctgctttgcatgaaaactcatttgatgtatattggggaaataatgagaactttatttaatttttttaagaaaaagggaaaaaaacagaaataaaacaaaaagccgccctgttaatcccgtccaacttttgtttaattctgatttctgtctcccttccttcttttctcccattcctccttctttatataatgcctatttccaaatgccagagaaagcagagatgctgagagacattggagagaaaatgactgtctccttttccttgaaattaaaaaaaaaa

SEQ ID NO: 80189 - DNA, 6497 bp, Homo sapiens; identical to SEQ ID NO: 80188
  sig_peptide (3865)...(4000): this location contains the signal peptide sequence, MVFSPGSVSVISDSLLTLPAIVSIAAGGSLLLIIVIIVLIAYKRK, Run with SignalP
  misc_feature (3)...(5887): similar to gi3413888 in the genepept database release 114, Run with FASTXY 3.3t00, default parameters

SEQ ID NO: 80190 - DNA, 8383 bp, Homo sapiens
  sig_peptide (5915)...(6050): this location contains the signal peptide sequence, MKGCGFPFYFFTFPFLWVFLSFLYAVDAFFLLQFWTMWSYMEKLH, Run with SignalP
  misc_feature (1)...(5726): similar to gi2224539 in the genepept database release 114, Run with FASTXY 3.3t00, default parameters
gacctgcgaagggcagctactgtctggtcacctgactcaggatcaggtgcgggaggttaagcggcacatcaccgtgcgcctggactggggtaatgaacatttgggcctggacctggtgcctcggaaggactttgaagtagtggactcggaccagattagtgtctcagatctctataagatgcatttatctagccggcagagtgtacagcaaagcacatcccaggtagatacaatgcgcccacgtcatggggaaacatgtcggatgccagtgccacatcacttcttcctcagcctgaagagtttcacttacaatactattggggaagataccgatgtcttcttttccttatatgacatgagggaaggcaagcagatcagtgagcggtttctggtaagactgaacaagaatggtgggccgaggaacccagagaagatagaacgaatgtgtgccctttttacagatctgagcagcaaagatatgaagagagatttgtatatcgttgcccatgtgatccgaataggccggatgctcctgaacgactcaaagaaaggtcctcctcacctgcactacaggcgaccatatggctgtgcggtcctaagcatcttggatgtcctacagtcactcacagaagtaaaggaagaaaaggattttgttcttaaggtttacacgtgcaacaacgagagtgagtggtcccagatccacgagaacatcatccgaaagtccagtgccaagtactctgcccccagcgccagccatggtcttatcatttctctgcagcttcttcgtggagacatggaacagattcggagagaaaatcccatgatatttaataggggattggcaattacaagaaaattgggatttcctgatgtcattatgccaggtgatatccgcaatgacctgtacctaaccctggagaagggggatttcgagagaggaggaaagagtgtacaaaagaatattgaagtgaccatgtatgtgctttatgcagatggagaaatcttgaaggattgcatcagcttgggttcaggagagccaaataggagttcctaccactcctttgtcctctaccacagtaatagtcctcgctggggagaaattatcaaattgcctatccccattgaccggttccggggctcccacctgcgctttgagttcagacattgttccacaaaggacaaaggggaaaagaaactctttggctttgcattctcaaccctgatgcgtgatgatggcaccaccctctcagatgatattcacgagctttatgtgtacaagtgtgatgagaatagcacgtttaataaccatgctctgtacctgggcctgccctgctgcaaagaggactacaatggctgccctaatattccttctagcctcatcttccagcgcagcaccaaagagtctttcttcatctccactcagctctcctctaccaaactcacccagaatgtggacctcctagctctgctgaagtggaaagccttccccgaccggatcatggatgtactagggcggctgcggcatgtcagtggggaggaaattgttaagtttctgcaggacatcttagatacactctttgtgattttggatgataatacagagaagtacggcctgttggtttttcagtctctggtgttcatcatcaacctgctccgagacatcaagtattttcactttcgacctgtgatggacacgtatatccagaagcactttgctggagctctggcatacaaggagctcatccgctgtttgaagtggtatatggactgctcagcagaactgattcgacaggaccacattcaagaagctatgcgggccttggagtaccttttcaagttcattgtacagtcacggatcctgtactcacgagccacttgtggaatggaagaggaacaattcagatccagtatccaagaacttttccagtccatccggtttgtgctcagtctggacagccgaaactcagaaacactcctttttactcaggctgcactcctcaattctttcccaaccatctttgatgagcttctgcaaatgttcaccgtgcaagaggtggcagagtttgtgagagggacactggggagcatgcccagcactgtgcacattgggcagtcaatggacgtggtcaagctgcagtccattgccaggacagtggatagccgcctgttttctttctcagaatcccgccgcatcctgcttcctgtggttctccatcacattcaccttcacctgaggcagcagaaagagctgctaatttgctcagggattcttggcagcatcttctccatcgtcaagaccagctctctggaggcagatgtcatggaggaagtagagatgatggtggagagcctcctggacgtgctcttgcagactctgctcaccatcatgagcaaatcgcacgctcaggaggcggtaagagggcagcggtgcccgcagtgcacagccgagatcactggcgagtatgtgtcctgccttctctcactgctccgccagatgtgtgacacccatttccagcacctcctggacaacttccagagcaaagatgaactcaaggaatttctgctgaagattttttgcgtgttccggaacctgatgaagatgagtgtcttccctcgggactggatggtaatgagactgctcacaagcaatattatagtcactactgtccagtacctgtcctctgcactgcacaagaatttcacagagactgactttgactttaaggtgtggaattccttactttaccctggcagttcctattcataaatcagccaagccttcagctagaaattatcacctcagccaaaaggaagaagattctagataagtatggggacatgcgtgtaatgatggcctatgaactgttcagcatgtggcagaatttgggtgaacataagatccactttattccgggaatgattggtccttttctgggtgtgacactggtcccacagccagaagtacggaatatcatgattcccatctttcatgacatgatggactgggagcagagaaaaaatggcaacttcaaacaggtggaggccgagttgattgacaagctggacagcatggtgtcagaagggaaaggtgacgagagctacagggagctcttcagcctactaacccagctgtttgggccctaccccagcctgctggagaaggttgaacaagaaacatggcgcgagaccggcatttcctttgtgacctcagtcacccgcctcatggaacgtcttcttgactacagggactgcatgaaaggagaggaaacagagaataagaagataggctgcactgttaacctgatgaatttttacaaatctgagattaacaaggaagaaatgtatatccgctacatccataagctttgtgacatgcacttgcaggccgaaaactacacagaggccgcatttaccctgctcctttactgtgagctgctgcagtgggaggaccggccactacgggaattcctccactacccatcgcagacagagtggcagcggaaggagggactgtgccggaagatcattcactacttcaacaaaggcaagagctgggagtttgggatcccactgtgcagggagctggcgtgtcagtacgagagcctctatgattaccagagcctcagctggattcggaaaatggaggccagctactatgacaacattatggagcagcaacgcctggagcctgagttctttcgggtcggcttctatggcaggaagtttcctttctttcttcggaacaaagaatacgtgtgccgtggccatgactacgagaggctggaggccttccagcagaggatgctcagtgagtttccgcaggctgtcgccatgcagcaccccaaccatcctgatgacgccatcctacagtgcgatgcccagtacttgcagatctatgcagtgacgcccattccagattatgtggatgttctgcagatggatagggtaccagatcgagtcaagagcttctatcgcgtcaacaatgtgaggaagttccggtatgacaggccttttcacaaaggccccaaggacaaggagaatgaattcaagagcctgtggattgaacgtaccacactgaccctgacccacagcttgcctggcatctctcggtggtttgaagtggagaggagggaactggtggaggtgagccctctggagaatgccatccaagtggttgagaataagaaccaggagctacgctccctgatcagccagtatcaacacaagcaggtgcatggcaacattaacctgctaagcatgtgcctgaatggtgtcattgatgcagctgtcaatggaggcattgcacgctatcaggaggccttctttgataaagattacatcaacaagcacccaggagatgctgagaagatcacccagctcaaggagcttatgcaggagcaggttcatgtccttggagttgggctagcagttcatgagaagtttgtgcacccagaaatgcggcctctgcataagaagctaattgatcagttccagatgatgcgggccagtctctaccatgagtttccaggtttggataagctaagtcctgcatgttcaggcaccagcaccccacggggaaatgttctggcatcccatagccccatgagtccggagagcatcaagatgacccaccggcacagccccatgaacttgatgggcacaggccgccattcatcatcctctctctcctcacatgcgtctagtgaagcaggaaacatggtgatgctgggtgacggctccatgggtgatgctcctgaggacctgtaccaccacatgcagctcgcgtatcccaaccccaggtaccaaggctcagtcaccaacgtctctgttctgtcctcgtcccaggcaagcccttcttcctccagcctgagttccactcactcagcaccatcccagatgattacctctgccccttccagtgcccgaggctctccctctctgccagataagtaccgccatgcccgtgaaatgatgttgttgctgcccacataccgggaccgcccaagcagtgccatgtatccagcagccatcctggagaacggacagccgccgaatttccagcgagccctgttccagcaagtggtcggagcctgcaaaccctgcagtgatcccaatctgtctgtggctgaaaaaggtcattactccctacactttgacgccttccaccaccctctgggtgatacccccccagccctccctgcccggaccctgcgcaagtctcctctccaccctatcccagcctcccccacaagcccccagtcaggtctggacggcagcaactctacgctgtccggcagtgccagcagcggcgtgtcctccttgagtgagagtaactttgggcactcctcggaggccccacctcgcactgacaccatggactccatgccaagtcaggcctggaatgctgacgaagatcttgagccaccctacctccctgtccactacagcctctctgagtctgccgtcctggactccatcaaggcccagccatgccgaagccactcagccccagggtgcgtcatccctcaggaccccatggacccgcctgcgctgccgcccaagccctaccacccccgcctgccggccctggagcacgatgagggggtgctgctgcgtgaagagactgagaggcctcgaggcctgcaccgcaaggctccattgcctcctgggagcgctaaggaggagcaggcccgcatggcctgggagcacggccgaggggagcagtgaggggcaacgaggcggctgggatgccgccctcagtaagcagcttgccaatcactccaggtctgaaaagcaagtcccccagccccaccccagggagccagagaggcttgcactcaggagagaaccacccccaagtctccgttctactgccgtgaactcatgtgttgccatgtacagaggccacagcagcatgaagggttgtggcttccctttttatttttttacatttccatttctatgggttttcctttctttcctttatgcagtagatgctttcttcctcctgcagttctggaccatgtggagctacatggagaaattgcacagacagaatcactttgccacactgcagggcccaggagtgggagcccaggccctccctccagggtagagatgcaccgaatggaaattgcactaaggacctcttcctttgctgtatggacagaagagttcatggttgcattcagggattgcaaggaccatatagacatgtcacaggtggaaaaagggccacaagccgttttgcacaaatgcctgcccacctgcccctcttccatccaggagtgtgctactgaggggctggctggaccaacctgctggctcaggcatgtgactggcctaactgcatgcccagggcactgccagggttcaatgggccagccgtctcctactccaccttggatttttctctccatcacatcatttctgaccatttgctcccttccattcttgaaacacctcatgccccacaggagccccagtggtgactggatctgcaagggttatctcccgccctctggggtttgagtggaggtatggagccagagaggctatcctagctaccttcctcctagggggagctggtccccttcctatgtggtagagagactggtgtaagagtgtggggtgtggcaggcgccggaaatcctcaaagctttcagaagcatccagaatgcctaccatcagctcctgaatcagggattttcagcactacctctgagccatggggttggctgcccagccaggcttccaggccctgaggacatgtggtcaggttcagcaggctcctgggtaaagagggtgggagggggcttctccttttggaagcagatagccatgcaggtagaattgtcatctcccaagtgggccacatacagcaacccactccaggccatggggaccaccactcagggttcggggctggcaggagggtagtttctccagtctccccagtctgttggtgtctttataggaaactataaagcagagcagtggtgtctttagaggaaactcattcaagtcagggcactgattttcctctcagtttattatttggggggatagggtcaggtgggtatagtagtactttaccagggtgcttttaagttactttaaaaaaagcctacaaaatattttttttcttttatttgctcgagttcacattaatgatggtcacaaggctgccttgttgggcaggcgtattgcccccagttcctcttctgctggcctgtatgacctccacagccaggccctgggcccaagccccttgtcccttctccactgcccctctttccagacagtaaaggccatggtcagtgtgtttttctcttgtaaacaaaccccagcttgtttaacagaaatgctaataacctactgggaaagatggaggtctaaattacctccagggtttttctgggggtttatcaccagtgtgggtcccttctgataccaccaggttcactccaggcagagtggggcggaaggctgctgaggatatgggtcagttacagcagccctcacctcaaagggctggcctgcttctcagcctacattcatttgcaagcttcaatctctggaccatctggtgttcacaggtgttagagggttaggggttaggggctagttttggatttgattcataggtaggagggcttagattttaaggcacttctgaaagtcaatccctggacaaggcagtcatcacataagaacagctaccttctccacttggtggcacaagaggtagggaggggagtatgggttcatttggcttcgcattatggcaaggtgaaaccgtttgttttccctctccattttccctaactaaatgaaaaggacacattctgaaatcccttttgttggagaataagtcagtctgaggggaaatgggaggccagagatgagaaccctttgaaaagattgtaaaatactgattttcattctttcaagcttatttgtaaatacctatttgaatgctgtgtatttgtacaggaatttgagcaaaaaatgtatagagtgtgatgtccaattggtattcagcactataaatgtgtttttaacctcccgcattctgtgcttatttaaaacaaggaaacttctaaccatttcttttgtgtattcatgtttaaagaaaaaaagtgatttaaaaatgatcttacctgtaccagaaaagcaaagttaaaggaaacaaaatttgtaccgattgtcccaagaggtattttactgtatatattgtggtagcatgttcaaaatccaacaagtaatgtgaattttagatgtaaatatctgccacttgattttttttccccctttccccacttcctttaaaaatctgctgatgaattaaagataaatacgtgatactgaaaaaaaaaaaaaa

SEQ ID NO: 80191 - DNA, 1172 bp, Homo sapiens
  sig_peptide (210)...(345): this location contains the signal peptide sequence, MPSVHRLLGPQPVPSRRLRLALALLLSLQVVVFFLVVLGQGRLLQ, Run with SignalP
  misc_feature (859)...(268): similar to gi6010695 in the genepept database release 114, Run with FASTXY 3.3t00, default parameters
ttttttttttttgcgcacaaccaacagcgctcccgcccctttttatttgaattcggagaaccagaggcgcctgcagattctggaggggtctcgcctgcccatcgctggcagcccgagatcctggggaggggatgccatactgctagagatgagggaagagagccccaagcaggaaaacattgatttgctgtacactcaaagggcatctcatgccttcagtccaccgcctcctcgggccacagcccgtgccctcgcgccggctcagactagctctggccctgctgctgtcgctgcaggttgtcgtattcttcctggtggtcctcgggcaggggcggctcctccagccctgcagaggatgtctggagctcccgggtggacccggcgaggcggaagaccacggggatctgggccagggttgggttggtctcctgcaggccctggatccacttagccatcgtcgcctggtcatgagcacccgccatgcacatggcgaagacagggccttcctccacttcattgatgtcaaactcgtagttgtcccagccactcctcacatactccaggtccagctgcatcgggtagtagaggttccactcctccggcgtctcttccacttccctctcctccgggggcagcaagtcagctctgaggatgtggtaatacacacacttgttgcggagccacagggagaaggggccctcaacaaagacaggccgggctggattgtggcgggccagggcggcctgctgatcgggactctggattcctggtgtggagacatacatgccctgtgccctacgatgtggggctgggggggatctgctgcacctgttgagtctttgggcaaaggaacctctggggagggagacgggcggcgtcaggggcagcgcacggggcctgggtagaagcagaggactcgtcactgtgtgcttttacatgctgtttggctttttagtgcattgctttgcaaaatgaagaaatgaactaaaaacaaccctcccccccacattctgctgctggtctcaagccatctctcacctggacccacgaccctggtcccctagcccctctccccatccaacagcatccacacggctgccaggagacacgtttccaattgcagattcttccagaaacatgattccaacccgattccttcttctctcgtgccg

SEQ ID NO: 80192 - DNA, 563 bp, Homo sapiens
  sig_peptide (109)...(244): this location contains the signal peptide sequence, MVKFAWVQYVSILLIFLWVFERIKIFVFQNQGVTTIPVTVTPRGD, Run with SignalP
  misc_feature (23)...(204): similar to gi1166610 in the genepept database release 114, Run with FASTXY 3.3t00, default parameters
cccaaccccatctggctggtgggcagggccgcaaatgctccatttgggattaatgctatcatccgataccctgtggaagtcatttcttatcagccaggattctgggagatggtaaagttcgcctgggtgcagtatgtcagcatcctgcttatcttcctctgggtgtttgaaagaatcaagatcttcgtgtttcaaaatcagggggtgaccaccattcctgtgacagtgacgccccggggagacttgtgtaaggagcacttatcctagaaaggccgtttctgaagactcaggcaggaccgtggctgcctcattgtcatcttctgggaacatcttaggaccttttgaaagagcccagcggacacctgcgggcttgtgtgctttttccctcaggaggacaacggttctttccggtttttgctcttacacagttccgtattctttcagagctcctgcagaattgttcaggggattagttttgttgggaaaggtcttgaggatttccggggagctataattagctttttggggttttccttctttgccttagcgttgaatttcaggag

SEQ ID NO: 80193 - DNA, 910 bp, Homo sapiens
  misc_feature (1)...(910): n = a,t,c or g
  sig_peptide (167)...(302): this location contains the signal peptide sequence, MLFIFPLSLPWRPSCWKESCSTGQRQAGRSREDSVTPPPSSPWPT, Run with SignalP
  misc_feature (233)...(674): similar to gi1911492 in the genepept database release 114, Run with FASTXY 3.3t00, default parameters
tttcgtcccgctctgaccaggaccccagcgttggggatgcggccaagtcagccagctgtgggccctgccaaccctccctctcttctaggactgggtttttccagccggagtctcactccctctacagcaatctcgggaaattggagactgacgcggctgctcctgcatgttatttatttttcctctttccctcccgtggagaccctcctgttggaaagagagctgcagcacgggacagagacaggcaggaagaagcagagaggactcggtgacgcccccaccgagcagcccctggcccactcctccagcaggggccatgagcaccaagcaggaggccaggagagatgagggagaagccaggacgagggggcaggaggcacagcttcgagaccgagcccacctgagccagcagcgccggctcaaacaggccacccagttcctgcacaaggactcggccgacctgctcccgctggacagcctcaagaggctcggcacctccaaggacttggtgaggcatcacccctcccctgccagcgtcccctggccttttccttccacttcccagatcctgagcaggaggcaggaccagaaagtgcagaccctcagctttcaggtcccgctcccttgctgagatggggagaggtcatcctgccaactcaaggctcttcaccggggatgttcccatggtttggtggctctgagggttcctattctctcattgcttggcttccctttttcctctaatggccccaaacttgagggtggtgaggagctaggctgtttagaagtgggggcttacaggaacacaggaaccctctagagtggtcacttacaaccaggagggcctggaggactggccagtttagggttgtgacttcctgcttccnccgaacgaattccaccacactga

SEQ ID NO: 80194 - DNA, 858 bp, Homo sapiens
  misc_feature (1)...(858): n = a,t,c or g
  sig_peptide (591)...(456): this location contains the signal peptide sequence, MKTVSFFILPWLGTCCSLGYSQSSNDCFLTTQLRCHFLDEDLSSY, Run with SignalP
  misc_feature (6)...(210): similar to gi4731216 in the genepept database release 114, Run with FASTXY 3.3t00, default parameters
cagtattacatctgtcccaaccagtagtttgttcttttattattattttttttcatgatctgaacatgttccagtacttagtatctttacaagcctcaattcattttaggattcagcttcctgtatgccattctctcagttttataagacatttgtatttgtgtcccaaccttttcttacttacgagaatcatttttgcttatatggcatttcactttaaggaactccacacacttcattcattcaatgaatgttttaccgattgccatctatatgcaattcaccaaactagagtaaagaatacaaagatgcctgagatctatctagtcgctgtcttcaaggaatctagacagaaatatagactgctaggtggaattgtaggcttctatattcccaagataaaaataagtgctgtgtgagcagagtacagagcaactagctcaagcatgaaatagctgcttaagtcttcatcaaggaaatgacatctgagttgagtcgtgaggaagcagtcattagaagactgggagtatcctagggaacagcatgtgccaagccatggcaatataaaaaaggacactgttttcatgcagcgatgattgggcttcatgcagctagcattttaaggtggcatgaaggggtaatttccaagagataaccttaaaaaatatgggggtcagttaataaaaaaaggcctttgtaatggtaaggtcaccccatacattaagaataaggtcgccccgggcccgggaattcccaggactatggaaaccggaggtacctgaaaaaacccccgcccagttcacctttcaaacttgggcaacgggcacccaatctttaaattttnttttcatataatat

SEQ ID NO: 80195 - DNA, 1286 bp, Homo sapiens
  sig_peptide (162)...(297): this location contains the signal peptide sequence, MGCAIIAGFLHYLFLACFFWMLVEAVILFLMVRNLKVVNYFSSRN, Run with SignalP
  misc_feature (3)...(837): similar to gi784994 in the genepept database release 114, Run with FASTXY 3.3t00, default parameters
gcattatcatctccttggtgtgcctcgtcttggccatcgccacctttctgctgtgtcgctccatccgaaatcacaacacctacctccacctgcacctctgcgtgtgtctcctcttggcgaagactctcttcctcgccggtatacacaagactgacaacaagatgggctgcgccatcatcgcgggcttcctgcactaccttttccttgcctgcttcttctggatgctggtggaggctgtgatactgttcttgatggtcagaaacctgaaggtggtgaattacttcagctctcgcaacatcaagatgctgcacatctgtgcctttggttatgggctgccgatgctggtggtggtgatctctgccagtgtgcagccacagggctatggaatgcataatcgctgctggctgaatacagagacagggttcatctggagtttcttggggccagtttgcacagttatagtgatcaactcccttctcctgacctggaccttgtggatcctgaggcagaggctttccagtgttaatgccgaagtctcaacgctaaaagacaccaggttactgaccttcaaggcctttgcccagctcttcatcctgggctgctcctgggtgctgggcatttttcagattggacctgtggcaggtgtcatggcttacctgtttcaccatcatcaacagcctgcagggggccttcatcttcctcatccactgtctgctcaacggccaggtacgagaagaatacaagaggtggatcactgggaagacgaagcccagctcccagtcccagacctcaaggatcttgctgtcctccatgccatccgcttccaagacgggttaaagtcctttcttgctttcaaatatgctatggagcccacagttggagggacaagtagttttccctgcagggagccctacccctgaaaatctccttcctcagcttaaacatgggaaatgagggatccccacccagcccccagaaccctctgggggaaggaatgttggggggccgtcttcctgtgggttgtattgcactgatggaggaaatcaggtgtttctgctccaaacggaccattttatcttcgtgctctgcaacttcttcaattccagagtttctgagaacagacccaaattcaatggcatgaccaagaacacctggctaccattttgttttctcctgcccttgttggtgcatggttctaagcgtgcccctccagcgcctatcatacgcctgacacagagaacctctcaataaatgatttgtcgcctgtctgactgatttaccctaaa

SEQ ID NO: 80196 - DNA, 430 bp, Homo sapiens
  sig_peptide (212)...(347): this location contains the signal peptide sequence, MGAFNRRKRNSIYVTVTLLIVSVLILTVGLAATTRTQNVTVGGYY, Run with SignalP
  misc_feature (78)...(305): similar to gi1870452 in the genepept database release 114, Run with FASTXY 3.3t00, default parameters
tttcgtcttgggctgcagctcgcaaccagaggcagtgtctctcagctctcggaaggaccgagagaggcaaccgcggagtaggatgctctgcggggcgcccagagccgggggcgcttgaagcagcttcggggactggggcaaccgggcagttttcaccatgcatcagtccctgactcagcagcggtccagcgacatgtccctgcccgattccatgggagcattcaatcggaggaaacgaaactccatctatgtcaccgtgactttgcttattgtgtccgtgttaattctcacagtgggccttgctgcaaccaccaggacccagaatgtgactgtaggaggttattaccccggagttattctcggctttggatcgttccttggaatcattggatcaaaccttattgagaacaaaaggcagatgctggtggct

SEQ ID NO: 80197 - DNA, 4326 bp, Homo sapiens
  misc_feature (1)...(4326): n = a,t,c or g
  sig_peptide (1120)...(1255): this location contains the signal peptide sequence, MLHILIHTFIQILPFLKPFCFLIYILCFTDLARKKMSVFWCTFLK, Run with SignalP
  misc_feature (219)...(1090): similar to gi4589584 in the genepept database release 114, Run with FASTXY 3.3t00, default parameters
attttgctttaataatggttaaaaagcgtttagcattctttggaaggaggtcatcagataggagacattttctaggatttatttctacctgcatatgtggaaatgtgtactactttagatttatttaatggcagctaactcagaggcatcaaaatgtgctaatggtgtaatatggcctttgtcttgctgttctgttttgtaggccttcaatcaagcaggggcagggcccgtacagtgaacttgtcctttgccagacgccagcgtctgcccctgaccccgtctccactctctgtgtcctggaggaggagccccttgatgcctaccctgattcaccttctgcgtgccttgtactgaactgggaagagccgtgcaataacggatctgaaatccttgcttacaccattgatctaggagacactagcattaccgtgggcaacaccaccatgcatgttatgaaagatctccttccagaaanccactaccggtttatttcaatctacagaggacccagccacacctacaaggtccagagactgacggaattcacatgctactccttcagaatccaggcagcaagcgaggctggagaagggcccttctcagaaacctataccttcagcacaaccaaaagtgtcccccccaccatcaaagcacctcgagtaacacagttagaaggaaattcatgtgaaattttatgggagacggtaccatcaatgaaaggtgacccctgttaactacattctgcaggtattggttggaagagaatctgagtacaaacaggtgtacaagggagaagaagccacattccaaatctcaggcctccagaccaacacagactacaggttccgcgtatgtgcgtgtcgtcgctgtttagacacctctcaggagctaagcggagccttcagcccctctgcggcttttgtattacaacgaagtgaggtcatgcttacaggggacatggggagcttagatgatcccaaaatgaagagcatgatgcctactgatgaacagtttgcagccatcattgtgcttggctttgcaactttgtccattttatttgcctttatattacagtacttcttaatgaagtaaacccaacaaaactagaggtatgaattaatgctacacattttaatacacacatttattcagatactcccctttttaaagcccttttgttttttgatttatatactctgttttacagatttagctagaaaaaaaatgtcagtgttttggtgcacctttttgaaatgcaaaactaggaaaaggttaaactggattttttttttaaaaaaaagaaaaaaaaagaagaaaagtataccagataccaaaagctagctttcttatgttttcctttaaattttcagatttaccttcattctgttttcactgatgtcttttgcaagcctttgatttttttttttttgttacagtttagtaatttatattcaccagtcacttcttatgtcttgaacatctgtatctgtaaacatgaatcaccgtgtgtgtacttacagggctaggatttcagtgttgtcagagtattaccacacagcaacagcaacatacagaagatatgttcactcagataagactgccctaaacaaccattttgtcactcagttatttaactgtgtttagctcatttaaatcaaaatgtgtactttaatctaaaatgttttaataatctgtatttcttataattttaacactatgagctgcctgtataagaaatcaagtaaccagaatgcacctataaattatggagcattgtagattttaccacatcaattcatagcagtaactttaagagggcattgtgcaatagttagttgttttcttgttcagctattttaaaggctgctttaacttgtttgtttgtctttgtatataactacttctaatctaatcactagagttattatattctgttatgtttgaccagaattatatgacaagaactggtgacagtttagtgcctctgcccattgtccatgatttacactaattgtgagcagtcttcttatgtgtcagctcattatttttgaaacatttgcctttaggctgttctttgaggtatcaatgaagtgattgaatttcaataccttaattcagtgcacataatactaatgtaacagcagatgaaaattgataaaacccaaaagagagtcatctaaatttgtagttcctatttctgtgggtttgcctggccatggttggagagggaatggtgtttgatggtaaacacagggtgtttggggatcaaggagcctagattctctccctggatctgtcactaacttgctgcgtgacctgaacacgtcactttacctctctgtgcctcagttttcccatgcatgaaaaataaaataaaataaaacggggattctaatgtttgtaagtgctttgagatctttgaccaacaggtgctattggagtgcaaagtgttactcttacgtgtttattttgagtcatgagataatcaattttaacccaaagtcattggattatttatatgaagtccataatgttcgagtacctcagggacatttaagagttggaggtgcaaatatattccaaaagggtgcaacagacacagtgtatccccctgcttctgtttttgtatatttttgctacttggtttttcttgatcatagctattttgtgcttgatctttattgtctaagatgcagtatcctgtactagcttataatattcccataccaaagtcatggggaaacaaacattattttgtttttgggttatttatactatattctgcatacagtactttaaatgccaattacagtgcaatctttatttattgtaaaattttttaagtgtacttatgtactaattttcccttgtagcatgttatatttttgtgttttatacttttgtaattttaggtcagtcttgttccttggcaacatctgtagtattattaatcttctgacattttcttatgtttttaaaaagataagagcatctagtgcattaaatgccaaaaaaaaaatacattatcagtgattgaaacgtttacatgtacccaaaaaccataatcatctcttggaagaaaatgctgagatcaatgaattattctgtgtgcctatattgacgtagtgagtactaaagagttctgtattttattattgactataataattagtttaattagctttgcaaactgatggcatcaaggtaaatatatttttgccaaagttctggccttccaaaactcacccccttatttaaatgtgtgctatgacccactatgacacagcatctgcattttctaaaaaattccatgcaggtgttttggggagaggtattttttaagcaatgaaaattcaactgagtacaaagccccctcttggggggttggggaagtctcttttttgaaacacttcagaactgctgctataaagaaattctctaattggttgaatttttttttaagtaaatagtactttaggccaaaatttatatgaatatttgatcttcttgagattttcatactatcatttaaccaccaggaagctgaagtgtgtgaagtacaaagctgacagcactttattttattgctctccattatttggtattcattatattccttcagtcagaaaattattactctctatggcactgttttttatcacaaatatgtatatgtgatattgatatataactatatatattgccatcacacacgaacaataaaataaagtgttctattaacctgatctctttgcccttttgctatgtgaggagtgaatgagtggccttctgatgctctgactcttctctgtatgtcaaactcatccctggcacaagaaattccagtcatgtgaagcaaactgccctttgtcctcaaagaaattgttgaaaaagaaaactttttaaagagattttttgcatattctctgccttgttcttatcaacttgaaatgttggcattttctaaccttgttttgttggctacaataattcagtattcatgtcaaaattgagaagtgccctaattgaatgtgtttgaatgttatccttgcacaattctttaaattgaaagataaaatgttttacctcactgttggacatacattccaagcttttcaactctaggagaaaaagaaaatcatgttttcctgtattggaaattttaagactatttccatatacattgtattaaaactgccatatcaattttaatgtatagattttgcaaatattatgctatatgtaatacctaactgtatctgtagtgtatatgtaatatatttatgcccaataaatgttttaattctttctgacttaaaaaaaaaa

SEQ ID NO: 80198 - DNA, 1189 bp, Homo sapiens
  sig_peptide (606)...(741): this location contains the signal peptide sequence, MLFYWGLWGMGGKGLFEYFLKGKQYQGDQPYLDLGIVLGQRKLRS, Run with SignalP
  misc_feature (3)...(531): similar to gi5420389 in the genepept database release 114, Run with FASTXY 3.3t00, default parameters
acagcccccattctcatccaggctcagctgcccccagctcctctgtcctgtgttttaccgagaactcagaccacccaactgcctcaacggtgaacagcccatcctacttgaacagtgggcccctggtctattatcaagtggagcagaggccagtcttgggagtgaaaggagagcctggtacggaagaaggctcagcctctttcccaaaggagaaggatctgaatgtcttctctctccctgttacctcactcgtggcttgtagctccacagacccagctgccctctgtaaatcagaggtggggaaaacacccaccctagaagctctattgcccgaagattgtaaccctgaggagcctgaaaatgaagacttccacccttcctggtccccctcaagcctccccttccgcacggacaatgaagagggctgtgggatggtgaagacctcccagcagaatgaggatcggccccctgaagattcttccttagaactccctctggcagtgtgacaggcgctagaggtcctgcctcttacccattctctatttattcccttattttatctaacaccatttcaaaacaaaactgtagaagcagctgctgctcccatgttattttattggggtctttggggaatgggtgggaaaggattgtttgagtattttttaaaagggaaacagtaccaaggagaccagccctaccttgatctggggatagtcttggggcaaagaaagctgcgtagtgctgaacattaagctttctgggccactggaacaaagaactaggatctcacaggaaaagctgggtaactcaagcagctattctttctgtagggaccagaacacgagaatttgaagagcatggcaaagccctctctctcccaagccccaggcagagtacaagctcatttttctcggtggttattctgatatcccattttggtgtgtcataatacttcaaactggaaagtcacctggtcgagtctagggaggagggagtggaagggtctctgcttctgtacaaaatctccaggatttacaaaaatgtaacctgccttccttcaatcccatatttggtaaataagttaatatttgacatgtttggtgttctctgacctgttccccacactggggatatcctggtctgtaacttgaattgtttcttccacatgttcttaagtactagagttaaa

SEQ ID NO: 80199 - DNA, 720 bp, Homo sapiens
  sig_peptide (205)...(340): this location contains the signal peptide sequence, MDCVFFSTLFSLKLKWLALVVAGISLQAANLYGYILCKMGGNSDI, Run with SignalP
  misc_feature (8)...(322): similar to gi4929765 in the genepept database release 114, Run with FASTXY 3.3t00, default parameters
ctagtaattgttatggaattccttctggtctgtgaagaatgtaaccggaagactcctggtgggccttcgatggtggaaccagatagatgaagatgggaagagccactggatctttgaagccaggaaggtctctccgaatagcattgctgccacagaagctgaagcacgaatcttctggctgggcctcataatctgccccatgatatggattgtgttttttttagcaccttattttccttgaagctaaagtggctggctctggtggttgctgggatctctctccaagctgcaaacctgtatggctacatcctttgtaagatgggaggcaacagtgacattggcaaggtcacagccagtttcctgtcccagacagtgttccagacggcctgcccaggtgactttcagaagcctggcctcgaggggctggagattcaccagcattagagtggagggaaaacaggaatttactcttctcccacgtggtctcagatcctgtgtgtctcaaacagagcaagcacctcatggcaaagaagatgatcgtagagtttacatctgtccctcttttttatataattaaaaaacctgaaagttgaaaaaaaaaaaaccaaacaaaataaaccaaaccccacccccccccccccgccgcccccgacggcccccggcggcgccccctcgcgatcggtcttccgctgcggggctcgcctcctaagcgcccccccc

SEQ ID NO: 80200 - DNA, 2898 bp, Homo sapiens
  sig_peptide (763)...(898): this location contains the signal peptide sequence, MLRVLPAGLFAHTPCLVGLSLTHNQLETVAEGTFAHLSNLRSLML, Run with SignalP
  misc_feature (1)...(1620): similar to gi179936 in the genepept database release 114, Run with FASTXY 3.3t00, default parameters
cagccgatggggtgcgactgcttcgtccaggaggtgttctgctcagatgaggagcttgccaccgtcccgctggacatcccgccatatacgaaaaacatcatctttgtggagacctcgttcaccacattggaaaccagagcttttggcagtaaccccaacttgaccaaggtggtcttcctcaacactcagctctgccagtttaggccggatgcctttggggggctgcccaggctggaggacctggaggtcacaggcagtagcttcttgaacctcagcaccaacatcttctccaacctgacctcgctgggcaagctcaccctcaacttcaacatgctggaggctctgcccgagggtcttttccagcacctggctgccctggagtccctccacctgcaggggaaccagctccaggccctgcccaggaggctcttccagcctctgacccatctgaagacactcaacctggcccagaacctcctggcccagctcccggaggagctgttccacccactcaccagcctgcagaccctgaagctgagcaacaacgcgctctctggtctcccccagggtgtgtttggcaaactgggcagcctgcaggagctcttcctggacagcaacaacatctcggagctgccccctcaggtgttctcccagctcttctgcctagagaggctgtggctgcaacgcaacgccatcacgcacctgccgctctccatctttgcctccctgggtaatctgacctttctgagcttgcagtggaacatgcttcgggtcctgcctgccggcctctttgcccacaccccatgcctggttggcctgtctctgacccataaccagctggagactgtcgctgagggcacctttgcccacctgtccaacctgcgttccctcatgctctcatacaatgccattacccacctcccagctggcatcttcagagacctggaggagttggtcaaactctacctgggcagcaacaaccttacggcgctgcacccagccctcttccagaacctgtccaagctggagctgctcagcctctccaagaaccagctgaccacacttccggagggcatcttcgacaccaactacaacctgttcaacctggccctgcacggtaacccctggcagtgcgactgccacctggcctacctcttcaactggctgcagcagtacaccgatcggctcctgaacatccagacctactgcgctggccctgcctacctcaaaggccaggtggtgcccgccttgaatgagaagcagctggtgtgtcccgtcacccgggaccacttgggcttccaggtcacgtggccggacgaaagcaaggcagggggcagctgggatctggctgtgcaggaaagggcagcccggagccagtgcacctacagcaaccccgagggcaccgtggtgctcgcctgtgaccaggcccagtgtcgctggctgaacgtccagctctctccttggcagggctccctgggactgcagtacaatgctagtcaggagtgggacctgaggtcgagctgcggttctctgcggctcaccgtgtctatcgaggctcgggcagcagggccctagtagcagcgcatacaggagctggggaagggggcctctggggcctgaccaggcgacaggtaggggcggaggggagctgagtctccgaagccttggcttttcacatgcaagggacagggttacatccccaaggtgagggggtggagtctggtctgctccactaaccagggtctcctcctcctcttccttcatcgcttctcctggagtgtgcggcctaacaaggccatccttatgctttgcaaagcaccctcaaaagctgcaccacagcctggagaataaaatatcctcagccctgatgcctccccattatgtaacacccaaccgctctcacctacaccctgaggtctattcactgcatcccagtgatacaaagtggaggccactgccttctgacatctggctcaaaagcccagtgtctgtttccatttatttccctggaatttcatttaaaattggtatagagaaaaaaaggatgtgacagaagcagagatgaccagaaagcacaggggcagggttctgactggcgtgtgggagaccctgtggccggcacccacctccacacgaggactaagctctgatttttttatcttgcccaaattcctacctaaggggtctagggagtcgcgccttacaaatcataaattctcatcagatgggttttatttgaccctgtatatcatgacttatttttaatctgactatggcataacattacaagacgaggcaaaaatatttaacccccaaatatatttctttgccctaccttgaacttgccctgcagagtctcttgtgaggagaatccacatcctataaagaagcccctttcccctttgttttccttcctttctttccagtccaggagatcatcaactaagagccaggcaccccttttaagtcgataagaaacagtttacaacctgctctctctctctctgaagtctgctgagagcttcccctgcacaataaaacttggcctccacaatcctttatcttaacctgaacattcctttccattgatcccaggtcttcagctaagctcaaccaattgtcaaccagaaaatgtttaaaattttaacctacagcctgggaaagcacttcaacccccgctggctttcgaagttggtcctggccttttctggaactcaaccaatgtatttcttaaatgtatttgattgatgcctcattcctccctaaaatgtataaaaccaagctgtacctcgaccaccttgggcacatgttcccaggccctcctgaggtctgtgtcaacggccatggccactcatatttggctcagaataaatctcttcaaatattttaaaaaaaaaa

SEQ ID NO: 80201 - DNA, 785 bp, Homo sapiens
  misc_feature (1)...(785): n = a,t,c or g
  sig_peptide (223)...(358): this location contains the signal peptide sequence, MLYTTLWCPLPHSLPALSPHSVPTRPVCATHLPFSSQSSSWGALP, Run with SignalP
  misc_feature (34)...(360): similar to gi551324 in the genepept database release 114, Run with FASTXY 3.3t00, default parameters
cgtaccactgtggagtaattccacactgcagtgcccactccccactctctccatgctttataccacactgcagtgcccactcgcccactctctccatgctttataccacactgcagtgcccactccccactctctccatgctttataccacactgcagtgcccactcccctattctctccctgctttataccacactgcagtccccactccccactctccccatgctttataccacactgtggtgcccgctcccccattctctccctgctttatcaccacactcagtgcccactcgtcctgtgtgtgccacacacttacctttcagctctcagtcctcgtcctggggtgccctgcccttgctcaggggcctagtggctctgctctacctttagaaggctctaagccgagtgacttccccatgctcccactggatgggctcccagctctggtacagcgtctgccacagctccgcatataggtgtcgacctccccactcaccatttgtgcctgattgcaggggctgcgcttcctttgtccttgtgttcatagcatgtggccttgtgctcctggcagagctggcactcagcatgcatgttatgaatgaagaagcgcactgcctgcctcggaaatcactttatgaggtgtttgggattttcccatctctaaattccccctccagaaggacctaaaaacttgtgatggcgccgcgctcacacgggtttgtttggnctgggggcgcctcccggcctttgggtaaggcccccccccccccaaagggggggga

SEQ ID NO: 80202 - DNA, 2874 bp, Homo sapiens
  sig_peptide (723)...(858): this location contains the signal peptide sequence, MVTCFIIGLLFPVFSVCYLIAPKSPLGLFIRKPFIKFICHTASYL, Run with SignalP
  misc_feature (2)...(2670): similar to gi5802615 in the genepept database release 114, Run with FASTXY 3.3t00, default parameters
cttaagctttaatgtctatgttggagatgctctattacatgctatcagaaaagaagtcgtcggagctgttgagctgttattgaaccacaaaaaacctagtggagaaaaacaggtgcctcctatactccttgataagcagttctctgaattcactccagacattacaccaatcattttggcagcccatacaaataattatgagataataaaactcttggttcagaaaggagtctcagtgcctcgaccccacgaggtccgctgtaactgtgtggaatgcgtgtccagttcagatgtggacagcctccgtcactcacgctccagagctcaacatttacaaggccttggccagtccctctctcattgcactgtcaagcgaagatccttttctcacagcctttcagttaagttgggaacttcaggaactgagcaaggtggaaaatgaattcaagtcggagtatgaagagctgtcacggcagtgcaaacaatttgctaaggacctactggatcagacgagaagttccagagaactggaaatcattcttaattaccgagatgacaatagtctcatagaagaacaaagtggaaatgatcttgcaagactaaaattggccattaagtaccgtcaaaaagagtttgttgcccagcccaattgtcaacagctgctggcatctcgctggtacgatgagtttccaggctggaggagaagacactgggcagtgaagatggtgacatgtttcataataggacttctttttcctgtcttctctgtgtgctacctgatagctcccaaaagcccacttggactgttcatcaggaagccatttatcaagtttatctgccacacagcctcctatttgacttttttgttcctgctgctgcttgcctctcagcacatcgacaggtcagacttgaacaggcaaggtccaccaccaaccatcgtcgagtggatgatattaccgtgggtcctgggcttcatatggggagaaattaaacagatgtgggatggcggacttcaggactacatccatgattggtggaatctaatggactttgtaatgaactccttatatttagcaacaatctccttgaaaattgttgcatttgtaaagtacagtgcccttaatccacgagaatcatgggacatgtggcatcccactctggtggcagaggctttatttgctattgcaaacatcttcagttctctgcgtctgatctcactgtttactgcaaattctcacctgggacctctgcaaatatctctgggaagaatgctcctggacattttgaagtttctattcatatactgccttgtgttgctagcatttgcaaatggcctaaatcaattgtacttctattatgaagaaacgaaagggttaacctgcaaaggcataagatgtgaaaagcagaataatgcattttcaacgttatttgagacactgcagtccctgttttggtcaatatttgggctcatcaatttatatgtgaccaatgtcaaagcacagcatgaatttactgagtttgttggtgccaccatgtttgggacatacaatgacatctctctggttgttctactcaacatgttaatagctatgatgaataattcttaccaactgattgctgaccatgcagatatagaatggaaatttgcacgaacaaagctttggatgagttattttgaagaaggaggtactctgcctactcccttcaatgtcatcccgagccccaagtctctctggtacctgatcaaatggatctggactcacttgtgcaagaaaaagatgagaagaaagccagaaagttttggaacaatagggaggcgagctgctgataacttgagaagacatcaccaataccaagaagttatgaggaacctggtgaagcgatacgttgctgcaatgattagagatgctaaaactgaagaaggcctgaccgaagagaactttaaggaactaaagcaagacatttctagtttccgctttgaagtcctgggattactaagaggaagcaaactttccacaatacaatctgcgaatgcctcgaaggagtcttcaaattcggcagactcagatgaaaagagtgatagcgaaggtaatagcaaggacaagaaaaagaatttcagcctttttgatttaaccaccctgattcatccgagatcagcagcaattgcctctgaaagacataacataagcaatggctctgccctggtggttcaggagccgcccagggagaagcagagaaaagtgaattttgtgaccgatatcaaaaactttgggttatttcatagacgatcaaaacaaaatgctgctgagcaaaatgcaaaccaaatcttctctgtttcagaagaagttgctcgtcaacaggctgcaggaccacttgagagaaatattcaactggaatctcgaggattagcttcacggggtgacctgagcattcccggtctcagtgaacaatgtgtgttagtagaccatagagaaaggaatacggacacactggggttacaggtaggaaagagagtgtgtccattcaagtcagagaaggtggtggtggaggacacggttcctataataccaaaggagaaacatgcaaaagaagaggactctagtatagactatgatctaaacctcccagacacagtcacccacgaagattacgtgaccacaagattgtgatacttgaaggaggaagcgtttaccatacacatacgtattttccgtagtgctctgggtgggggaaaatgtttaaattgtattagcaaatgctaacttacactttatagcgtttatcagctgtggcatattacctgtaacatgtttaaataaggcaaaggcaatcaaaaacctttttgttttgtagcctgcttttgctttcacaatt

SEQ ID NO: 80203 - DNA, 1139 bp, Homo sapiens
  sig_peptide (965)...(830): this location contains the signal peptide sequence, MTGTHQYAWVIFVFLSTYRISPCWPGWFQTPGLRWSACLGLPGCW, Run with SignalP
  misc_feature (3)...(281): similar to gi1710216 in the genepept database release 114, Run with FASTXY 3.3t00, default parameters
ttttttttttaattattgagacggagccttgcgctgtcaccgaggctggagtgcactggcactgtcctggctcactgcaacctccgccccccgggttcaagcgattctcctgcctcagcctcccaagcagccgggatcacaggcatgtgccaccatgcccagctaatttttgtatttttagtagaggtgaggtttcagcatgttggccaggctggtcttgaactcctgaccttgtcatcctcccaccttggcctcccaaagtgctgggcttacaggcgtgagccaccacggccggctgttatgctcatcatggcacttaagagatgcttaacaaacctttcctacaatgttcctcagattttcagagcttatttgatctagcatctggttcctaaattctgagtcacatcagaagccaaacttgaatgcttttggaaagagctagcctcataccacttcagttgggaaggggagtactgaggtgtaccttggcaggacagtggaatgattgctggttcttctagtttgctctataccaagaactgctataacatgtttctaaaccagggctatgcaaagcactagagttcctgaccagcaatgcaaaccagtggcatacaaattcaaaatactgtatccaggccctgactccagcccaaaccaaggctggagggcatccagggggatgtggttccccacggggtagcatcttggttatgtgagatcaccaagacaccaagcctgttttatgagctgaatcctcagcttgttgctggatttgtggctgataaaaaatacaggcagggcccagtggctcacgcctgcaatcccaacaccctgggaggccgaggcaggcagaccacctgaggccaggagtttgaaaccagcctggccaacatggtgaaatcctgtatgtacttaaaaatacaaaaattacccaggcatattggtgagtgcctgtcatcccagctactcggaaggctgaagcaggagaatcgcttgaatccaggaggctgcaggttgcagtgagccgagaaggcgccactgcaccccagcctgggagacgaaatctcactctgtcagtcccacctccatcaaaaaaatagagcgcagctatgttggagttcgaattgcccgct

SEQ ID NO: 80204 - DNA, 1321 bp, Homo sapiens
  sig_peptide (324)...(459): this location contains the signal peptide sequence, MARDPSFLMGAARCLPLAAAVRDTVSASLQQARARSLVFSILLAR, Run with SignalP
  misc_feature (78)...(1152): similar to gi3928166 in the genepept database release 114, Run with FASTXY 3.3t00, default parameters
cgttgctgtcgggcacattgtttccttctgatggacagagtatggagagagctgagagccccacaccaggaatggcccagggaatggagccagatggctacaaggtagtattcgtgcgccggagcccgctggtgctagtggcggtggctcgtacgcggcagtcggcacaagagctggcgcaggagctgctctacatctactaccagatcctaagccttcttaccggtgcgcagctgagccacatcttccagcagaagcagaactatgatttgcggcgcctactctcgggctcagagcgcatcaccgacaacctgctgcagctcatggcacgagaccccagcttcctgatgggggcggcacggtgcctgcccctggcggcggccgtgcgcgacactgtgagcgccagcctgcagcaggcgcgtgcgcgcagcctggtcttctccatcctgctggcccgcaaccagctcgtggcactcgtgcgccgaaaggaccaatttctgcaccccatcgacctgcacctgctcttcaacctcattagttcctcctcgtcctttcgcgagggcgaggcctggacgcccgtgtgcctgcccaaattcaacgcagccggcttcttccacgcacacatctcttacctagagcctgacactgacctctgcctgctgcttgtctccactgaccgtgaggacttctttgcagtctctgactgccgccgccgcttccaggagcgccttcgcaagcgcggagcccacctggccctgcgagaggcactgcgcacaccctactacagcgttgcccaagtgggcatccctgacctgcgtcacttcctctataagtcaaagagctcgggactcttcaccagccctgagattgaggccccatacaccagtgaagaggagcaggagcggctgctgggcctctaccagtacttgcacagtcgtgcccacaatgcctctcgccccactcaagaccaatttactacacgggcccgcaacgagaacctccctggcctgggtgacaggcgcctttgagctctacatgtgttacgagccccctggggaccaaggcgtcagccgtcagtgccatccataagctgatgcgctggatccgcaaagaggaagaccgcctcttcattctcacgcccctcacctattgatgggaatgtgtgcgggctcagccttcctggacacactaggtgtgggaagccataggagcctccagatgggggctggcctctcttgcccagccagcgggcagggactgtgggttggtgaatgcattaaagtgctttgggaaaaaaaaaaaagcataacaagctaaaaaa

SEQ ID NO: 80205 - DNA, 1354 bp, Homo sapiens
  sig_peptide (1112)...(1247): this location contains the signal peptide sequence, MFCRVRNLAGLVSYTALIFVMLPLMSALMGVNTGDPRQSKKGGRW, Run with SignalP
  misc_feature (3)...(309): similar to gi1872200 in the genepept database release 114, Run with FASTXY 3.3t00, default parameters
ttttttttttgagacagagtttcgctcttgttgcccaggctggagtgcaatggtgcgatctcagctcactgcaacctccacctcccgggttcaagcgattctcctgcctcagcctcctgagtagctggaactacaggcgtgcgccaccatgcccagctaattttttatatttttagtagcgatggggtttcaccatgttggccaggctggtctcaaactcccgacctcaggtgatccacccgcctcagcctcccaaagtgctgggattacaggcgtgagccacggtgcccagccatcatgtgcttatttttaaagcgaggtggatgacaccattcccccagagctgtgttcctcgttggcaacaaaacaaaaccaaaaaaccctaggacttgactcattagaagtgttaatcgatttttaccacgctgaaatgaaggtataaagtcagtctgtgctgtcgtgaaattccaaggagatttggaagtaagatcattatttactggtcctttagaatagaccaaaaaaaaaaaaaaaaagacttaaaaaacgagggctgtcccctgcagactctggcaggaccctgggctgctctgggggacacaggccaggggcagttcaccgacttgattcacagtgattctggtttgcctgtttctccatgtggccacgagtcggggacgtgtccagcagtgggcatgcctacaccttgtagttaagctcagcgttcatctgggtgtacatctcgtagatgacatcgatggtcgccgtgtagttgactaggaagaggcggatcttctccaggcactcctcctccgtaacattctgccccttggagagcgctttcaggaagtcagacttatagggtgctgcgtacagtgctgcctggaagatcttctgcacgatccagccatggtacttcttgagggccatctcgtaggccttggtggcgttgacacggatgaggttggggtggttctcgtcccgctccccgtcgcagatgctctggaggaagacctggatgaagcggaggcctcttttcagccacatcagcgccagtgtggcccctactttgggccactctgctccatacatttctttctccacctccaggatgttctgcagggtccggaacttggctgggttggtgtcgtacacagctttgattttcgtgatgttgccgcttatgtctgccttgatgggagtaaacactggggacccaaggcaatcgaagaagggcggcaggtgggacaccgcctcgaggaagggcccggtctcgatctgcttgtccgcgggcagcggcttcagcaagtgttcggccagcagcgccatttcggggtcgaggcccgcgacgaaa

SEQ ID NO: 80206 - DNA, 2311 bp, Homo sapiens
  sig_peptide (1121)...(1256): this location contains the signal peptide sequence, MFSCFFSTSLATSVSLEAQSCFAWPLIVSFPQGSLLSPFLLMSYN, Run with SignalP
  misc_feature (80)...(341): similar to gi1872200 in the genepept database release 114, Run with FASTXY 3.3t00, default parameters
gcccagcctttttttcctttctttctttctttctttcttttttttttttgagctggagtttcagtctgtcacccaggctggagtccaatggcacgatctcggctcactgcaacctccacctctcaggttcaagcaattctcctgcctcagcctcccaagtagctgggattataggcgtgggctaccacgcctggccgattttttgtatttttagtagagacggggtttcaccatattggccaggctggcctcgaactcctgacctcaagtgatccacccacctcaacatcccaaagtgctgggattacaggcgtgagccactgtatccggccaccttttcaaaaaatattgttattactattttctgtctccaggcttcaacagtttaatctattatttacagctcctcaagtgtcaccaacaaaaatatactcttgttttcaatttctcttggcactcagagatgaatctgtgtgagcacggagagctagagatctcagagcagccaggaactgagatgcaaatcatttcacctttgtgtggtctgctcattctgtagtctttgtcttacccttaaagtgggaaactctttgacagggaaatgccatgtttgaactgaagaagcctactttatagttttttctctcttgcctaatgttttcagtagcgtactatgttgggtgttttagtatgccacatggtctctattctctgaagctgtatgatgaaacaagtacctaactttaacaggagataattaatgtcttaagggaagtactaacagaattgctttagagtctgggattttttttttattgcaagaactatttttcatggtggaaaggagaatttatattaaagaaccagtgggctcctgggcccaccatggcacatttagccttcactgggaagtagaactaaatgaaagccatcagcagccaacacagcttcacttcagctcattgtatctgaatccagtgttcccaaggacatcagtgactttatttttttgaaaactgtaatgctttaaaacttactttattggatctctttgcagcttttgacacagtgaaccactttcctttcctgaaatgctttcctctcttggctttctgatgccatgttctcctgtttcttctctacttctctggccacttctgtctccttagaagctcagtcttgctttgcctggcccttgattgttagttttccccagggctcacttcttagcccctttctcctcatgtcttataatttgagtcatctcatctactctggggagttgaatggtcgcttgtatgctgaaaactcccaaatttgtatctgtagcccagcttttcctactaagctctacttacatatctttgcagacctcattacttcttgactaacttactggctccttaaatatctaaaattgaatccatgttctacctccccatacaaaaagttcctcctccttccctaccacagttaacagttaccattactctggccattactatcctggtctctctgcctcctgatgggagtcagctcctcctgtcaagttggcctccacagtggctttcacatgtctaccttccactctgctaatttctgagcagttaccacattcttgctcaacagtaggtaccagtcacctggattgcttattaaatagttgaattatggagccccaggaatgtagaaaatttactaagctacccaggtgattctaatttgtatggccttagcaagtaccacactgcactgtaagctccattagcaaaggaagggttatcctgcaagtgcagtatctaaggattatcattggttaacttataggaaattgtcttcatctgaccatttttgatcaataaggtaatcttaacaattcagtcaaataactgctcaattaaatatctatcaaatgaatgaatgactcctattccacacacttcatgataacagggctctgctgtttcaggctcaatttatttaccttgtcacctggcccataagtaagaagactgtcatccatggccattgttttctagttcttctgaggacttttctcctctctttgtcagtttaaagcctccctaatcaaccaagtttgtttctaggcacatgcactcttccctcctctcatgtgctcagcccttgggtaagagtccatccttctgtggtctcattagaaatttcacattcttgcccgggcacggtgggttcacacctggtaatccccaacacttttgggaagcccaggccggccataatggagggtcgggaaaatcaagaaacttcctgggcttacaccgggtgaaaa

SEQ ID NO: 80207 - DNA, 3984 bp, Homo sapiens
  sig_peptide (2326)...(2191): this location contains the signal peptide sequence, MMALRWSTAFWSSLSFLIWSSMVWMSVLSSRRWSCSNSSSVSPSQ, Run with SignalP
  misc_feature (124)...(3221): similar to gi3882313 in the genepept database release 114, Run with FASTXY 3.3t00, default parameters
aaacagtgggctaaaaagatgtatgactatcattcattttagtcctagcttatttgctattttccttggagtgtggacttctctctgaaaatcattttgcctattctcccattttaaacttttcagctctccttaaggcggcggcaaataggtgaaagattgaatgaatgggcagtcttcagtgaaaagaacaaggaactctgtgagtggttgactcaaatggaaagcaaagtttctcagaatggagacattctcattgaagaaatgatagagaagctcaagaaggattatcaagaggaaattgctattgctcaagagaacaaaatacagctccaacaaatgggagaacgacttgctaaagccagccatgaaagcaaagcatctgagattgaatacaagctgggaaaggtcaacgaccggtggcagcatctcctggacctcattgcagccagggtgaagaagctgaaggagaccctggtagccgtgcagcagcttgataagaacatgagcagcctgaggacctggctcgctcacatcgagtcagagctggccaagccaatagtctacgattcctgtaactcggaagaaatacagagaaagcttaatgagcagcaggagcttcagagagacatagagaagcacagtacaggtgttgcatctgtcctcaacctgtgtgaagtcctgctgcacgactgtgacgcctgtgccactgatgccgagtgtgactctatacagcaggctacgagaaacctggaccggcggtggagaaacatttgtgctatgtccatggaaaggaggctgaaaatcgaagagacgtggcgattgtggcagaaatttctggatgactattcacgactttgaagattggctgaagtcttcagaaaggacagctgcttttcccagctcttctggggtgatctatacagttgccaaggaagaactaaagaaatttgaggctttccagcgacaggtccacgagtgcctgacgcagctggaactgatcaacaagcagtaccgccgcctggccagggagaaccgcactgattcagcatgtagcctcaaacagatggttcacgaaggcaaccagagatgggacaacctgcaaaagcgtgtcacctccatcttgcgcagactcaagcattttattggccagcgtgaggagtttgagactgcgcgggacagcattctggtctggctcacagagatggatctgcagctcactaatattgaacatttttctgagtgtgatgttcaagctaaaataaagcaactcaaggccttccagcaggaaatttcactgaaccacaataagattgagcagataattgcccaaggagaacagctgatagaaaagagtgagcccttggatgcagcgatcatcgaggaggaactagatgagctccgacggtactgccaggaggccttcgggcgtgtggaaagataccataagaaactgatccgcctgcctctcccagacgatgagcacgacctctcggacagggagctggagctggaagactctgcagctctgtcggacctgcactggcacgaccgctctgcagacagcctgctttctccacagccttcctccaatctctccctctcgctcgctcagcccctccggagcgagcggtcaggacgagacaccccggctagtgtggactccatccccctggagtgggatcacgactatgacctcagtcgggacctggagtctgcaatgtccagagctctgccctctgaggatgaagaaggtcaggatgacaaagatttctacctccggggagctgttggcttatcaggggaccacagtgccctagagtcacagatccgacaactgggcaaagccctggatgatagccgttttcagatacagcaaaccgaaaatatcattcgcagcaaaactcccacggggccggagctagacaccagctacaaaggctacatgaaactgctgggcgaatgcagtagcagtatagactccgtgaagagactggagcacaaactgaaggaggaagaggagagccttcctggctttgttaacctgcatagtaccgaaacccaaacggctggtgtgattgaccgatgggagcttctccaggcccaggcattgagcaaggagttgaggatgaagcagaacctccagaagtggcagcagtttaactcagacttgaacagcatctgggcctggctgggggacacggaggaggagttggaacagctccagcgtctggaactcagcactgacatccagaccatcgagctccagatcaaaaagctcaaggagctccagaaagctgtggaccaccgcaaagccatcatcctctccatcaatctctgcagccctgagttcacccaggctgacagcaaggagagccgggacctgcaggatcgcttgtcgcagatgaatgggcgctgggaccgagtgtgctctctgctggaggagtggcggggcctgctgcaggatgccctgatgcagtgccagggtttccatgaaatgagccatggtttgcttcttatgctggagaacattgacagaaggaaaaatgaaattgtccctattgattctaaccttgatgcagagatacttcaggaccatcacaaacagcttatgcaaataaagcatgagctgttggaatcccaactcagagtagcctctttgcaagacatgtcttgccaactactggtgaatgctgaaggaacagactgtttagaagccaaagaaaaagtccatgttattggaaatcggctcaaacttctcttgaaggaggtcagtcgtcatatcaaggaactggagaagttattagacgtgtcaagtagtcagcaggatttgtcttcctggtcttctgctgatgaactggacacctcagggtctgtgagtcccacatcaggaaggagcaccccaaacagacagaaaacgccacgaggcaagtgtagtctctcacagcctggaccctctgtcagcagtccacatagcaggtccacaaaaggtggctccgattcctccctttctgagccagggccaggtcggtccggccgcggcttcatgttcagagtcctccgagcagctcttccccttcagcttctcctgctcctcctcatcgggcttgcctgccttgtaccaatgtcagaggaagactacagctgtgccctctccaacaactttgcccggtcattccaccccatgctcagatacacgaatggccctcctccactctgaactaagcagatgccatctgcagaagtgctggtagcataaggaggatcgggtcataagcaatcccaaactaccaacaagaggaccttgatcttggcgaaagccctcggtgtggcagctttagccctcctccagatcacatgtgtgcaaattatggcttcagaggtggaagataaacagtgacgggggaacaaacagacaacaagaaggtttggaagaaatctggtttgagactctgaaccttagcactaaggagattgagtaaggacctccaaagttccccggactcatgaattctgggcccttggcccattctgtgcacagccaaggacttcagtagaccatctgggcagctttcccatggtgctgctccaaccatcagataaatgaccctcccaagcaccatgtcagtgtcgtacaatctaccaaccaaccagtgctgaagagattttagaaccttgtaacatacaatttttaagagcttatatggcagcttcctttttaccttgttttcctttggggcatgatgttttaacctttgctttagaagcacaagctgtaaatctaaaaggcacttttttttagaggtataaagaaaaactagatgtaataaataagatcatggaaggctttatgtgaaaaaagttgaatgttatagtaaaaaaaaaaagatatttatgtatgtacagtttgctaaagccaagttttggtttggtaattgatttctttgcatttattatagatattataaaataaaaaaaaaaaag

SEQ ID NO: 80208 - DNA, 476 bp, Homo sapiens
  misc_feature (1)...(476): n = a,t,c or g
  sig_peptide (182)...(317): this location contains the signal peptide sequence, MTYILVYKLGSILLSFFLICFEEFSSENSGPGIFFVERVLILNLI, Run with SignalP
  misc_feature (475)...(270): similar to gi160379 in the genepept database release 114, Run with FASTXY 3.3t00, default parameters
nattgagaccatcgagaactgtcgcggaannctgcantcattatcttattatgttgctggtatgatctgctaatatcttctgaaggatttttcatttacgttcatgaataatattagtctataattgtatttgccatgtctttgtccagttttggtattactctatacatatgtattatatatgacatatatactagtttataaattgggaagtattctcctctcctttttccttatatgcttcgaagaattctccagtgaaaactctgggcctggaattttctttgtggaaagagttttgatactgaatttaatttctttaatataaattgtgttagcattaagtagcatttttcaaggattttgtccatttctctaagttgataaatctgttggcatanaattgttcataataatctactgttcttttaatatctgtaggatctgaatggaaaacccttttttcatgcttgaag

SEQ ID NO: 80209 - DNA, 1246 bp, Homo sapiens
  misc_feature (1)...(1246): n = a,t,c or g
  sig_peptide (785)...(920): this location contains the signal peptide sequence, MCVAACFSLVAWSILQWGKRKYPEGNSSWQIKEKVWRFSTAFCSV, Run with SignalP
  misc_feature (379)...(1053): similar to gi2435528 in the genepept database release 114, Run with FASTXY 3.3t00, default parameters
gcgatgcggcagcggcgacccacgcgtgcgaattcatgttggtctaaaccaaaggaagataaagcagtagatacatcagatttggaagttgcagaagatcctatgggcctccaaggaatagatctgatcacagcagcattgcttttttgtctaggagattctccaggagggaggggtatatctgatagccgcatggctgatatttatcacattgacgttgggactcagactttttcacttccatctgcaatattagctacaagtacaatggttggggagatagcttcagcttcagcttgtgatcatgccaatccacagctttcaaatccaagtccgtttcagacacttgggctggatttagtattggaatgtgtcgctaggtaccaacccaagcagcgttcaatgtttacctttgtgtgtggacagttatttagaaggaaagaattttcttcccactttaagaatgtgcatggtgacattcatgctggactcaatggctggatggaacagaggtgccctttagcttactatggttgtacctattctcagcgtagattttgtccatcaatacaaggagcaaagattatacatgnccgccaattgaggtcatttggagttcagccatgtgtatctacagtattagtggagcctgctagaaactgtgtgttgggattacataatgaccatctaagtagtcttccttttgaggtcctgcagcatattgcaggctttctcgatggcttcagcttatgtcagctctcatgtgtatccaagttaatgagggatgtgtgtggcagcctgcttcagtctcgtggcatggtccatactgcagtgggggaaaaggaagtatccagaaggaaattcatcatggcagataaaagaaaaggtatggcgatttagtactgcattttgttctgttaatgaatggaaatttgctgacatcctaagcatggcagaccacttgaagaaatgcagttacaatgttgtcgagaaacgggaggaagcaatccctttgccatgtatgtgtgtgacacgagaactcactaaagaaggacgttcactacgctcagttttaaaacctgtactttaaaagttgtaatattactagcacatatatgcaagcacctagtataattcctttgtaatatgtgaaactttattaatgtattaaatattacaactagctaaatttattgtcactgtgtatataatgttttgaagtgacatctatttttataaagtactg

SEQ ID NO: 80210 - DNA, 1337 bp, Homo sapiens
  sig_peptide (1336)...(1201): this location contains the signal peptide sequence, MEAPAQLLFLLLLWLPDTTGEIVLTQSPATLSLSPGERATLSCRA, Run with SignalP
  misc_feature (1338)...(249): similar to gi184848 in the genepept database release 114, Run with FASTXY 3.3t00, default parameters
ttttttttttttcacaggtgcaaagattcacaaattatttattcaattctcctcccaacattaggcataattaaagaccaaggaggaggaaggggggtgaaggtgaaaagatgagctggaggaccgcaaataggggtaaggtccccctgtggaaaaaagggtcaaaaggcccaaaaggaatgggaagggggtccaggctggaactgaaggagcaaggtgggggccacttttcccccttaacactctccccctgttgaagctcttttgtaacgggcgatgctcaggcccctgatgggttgactttcgcaggccgtaggagtttggtagtttctcgtagttctgcttttgctcaagcgttcaagggtgctgcttgaggcttttaagggggctgtccttttgctgtccctgctctgttgacacttctcctgggggagtttacccccatttggaagggcgttaatccacccttccacttgtactttttggcctactctggggattagaagttttttcaagcagggcacacaagcagaaggcagttcccagattttcaactgcttcatcagatgggccgggaagatgaagacagatggtgcagccacagttcgtttgatctccagcttggtcccctggccaaaagtgaacaggggaggccagttggtacgctgctgacagtaataaactgcaaaatcttcaggctctaggctgctgatggtgagagtgaagtctgtcccagacccactgccactgaacctggctgggatgccagtggccctgttggatgcatcatagatgaggagcctgggagcctggccaggtttctgttggtaccaggctaagtagctgctgctaacactctgactggccctgcaggagagggtggctctttcccctggagacaaagacagggtggctggagactgtgtcaacacaatttctccggtggtatgtttgatctccaccttggtccctccgccgaaagtggcccccggaggccaattgtcacggtgttgacagtaataaactgcaaaatcttcaggctctaggctgctgatggtgagagtgaagtctgtcccagacccactgccactgaacctggctgggatgccagtggccctgttggatgcatcatagatgaggggcctgggagcctggccaggtttctgttggtaccaggctaagtagctgccaacactctgactggccctgcaggagagggtggctctttcccctggagacaaagacagggtggctggagactgtgtcaacacaatttctccggtggtatctgggagccagagtagcaggaggaagagaagctgagctggggcttccat

SEQ ID NO: 80211 - DNA, 2033 bp, Homo sapiens
  sig_peptide (916)...(781): this location contains the signal peptide sequence, MQLLSMVWVTWTCFLPWMCKDLFPPGIILMGLRTSVEKQQKLRQF, Run with SignalP
  misc_feature (3)...(531): similar to gi2460119 in the genepept database release 114, Run with FASTXY 3.3t00, default parameters
gcggccgcttcctgcgcatccgccaaacggtcaaccgcggctggtggcggcttcggcgcgggccccgggccgggcggcttgcagagcggcgcagaccactcgcgctgcgctgcgtcagggcctcagtcgagttccgcgacgcgctggcgaagctcatacacgactacggaggcgaggacgacgagctggcaggcggcccgggaggcggcgccgggggcccagggggcggcctgtatggagagctcccggagggcacctcccatcaccgtggactccaagcgcttccttcttcgatgtgggctgcaaacaaataacggggtgtttctgcgagtgagcgaggtgaagccgtcctaccgcaatgccatcaccgtacccttcaaagcctggggcaagttcggaggcgccttttgccggtatgcggatgagatgaaagaaatccaggaacgacagagggataagctttatgagcgacgtggtgggggcagcggcggcggcgaagagtcagagggtgaggaggtggatgaggattgaaacgggcagcttcccctacaggcctccacccaaccaccatccccttggctagagaattccctttcctgctcatccccagtgagctagtggagagggagcaagggaggccgcagaggaaaaaaacaaaacgtaacacagttaagagaaataatcgtaagagaacagtgacggacaacttgagaaaagcagtcaagttccaaggaactgacagcaacctgcaaagaggaaaacagcatctcctcacctgcgtaaaattgtctcagcttctgttgtttctcaactgaggttcgtaaacccatcaggataatccctggagggaatagatccttgcacatccagggcaagaaacatgtccaagttacccagaccattgataacagttgcatttaggttgcacctgggtaatctggcataaaagatctctctaggcctcactgttgcggtgtctatcccttcacctccattgaaatcagcattttggatctaggtcttcatggaatccttgagaagagaggcctttacaattacccagttctgagggttcaggttcacgaaaagaaatgcaacttgggataatcatgaacaggttaaagataagatttcaagaagccatctaagaatacagaaccaaattggatccatttttttaaaaaaatggttttgcatggaacctggaccaaggcaaatgtcttttcttcgcagaattgttttccaggatgccagtggattcagatagcaatgcttggagtagaatccgttactaaaatagtttcaaagttgacaaaaaattttcaaagataaaagcagttttacattgggggttgctgaggtaggcacaagaaaaagtcaggcataaagcacaaggcagactgtttgagtggattggttgctgctcactaaagttgttcccctgatctctaaatatggaggtcattaccaagaaatgctttggtatgaatgagagccagatctccactgtgtgagccagtgaattatggctaattcggctgttacagccactggttggctggattttaaaccataaaacttgaagattaccctacaaaagtaacagtgtggctataagcctgagcctttaatggatatacatccctccacagaaaagttggaaataccccaaaactgaagtccttaatttacccttcagtttaatcctgtggatttgttcaaatacctaaagatccctcaggtcccagaattcccagcatcatttattctttttaaaatttttaagaactttgatccattgtatcagtacctcacaatcagagttggcaaatgatggatgagtgattcaagcagtgcacccgggtggaagctgaaatccatctgtgaatggaactgaagtgaacgtgaatatgctgactatatcctggaagcatttttataccatcttgaaatttcaacacaactggcttttgccagttaatccagctgtctttcaagaataaaagttggggttttcaaaaaaaaaagattaa

SEQ ID NO: 80212 - DNA, 3586 bp, Homo sapiens
  sig_peptide (1843)...(1978): this location contains the signal peptide sequence, MHVHFWLVTASFSSSVAWTTAEITGGVSGVAAGVGSWEGGSERGD, Run with SignalP
  misc_feature (3543)...(531): similar to gi3435157 in the genepept database release 114, Run with FASTXY 3.3t00, default parameters
ttttttttttttgccaagatccaaagaaaaaattttatttacaatagagaattttatttgaaacatgcatttcttgtttttttaaaaacaaatcagcaaatgcagatcaagtttacactccttaaggccaagagtccccctatgcacgctgtacatgttccatattaaatcccaaaagctgactcacccctggggaacttgtgttacaaaggggcaaggcccaaggtcagcaatggtgtcttttatttggaggaatcagacaatctccctggatacaggaactctgagggtcaacttgctatgaattatactagggggaaatgcaaacccaataggccaggaaattctggataggtctcccttaggtacctggcatacaatcaaatcaattttatttaggaaagggaaatacagtaggtgcatacgaaaaagtgaaaacagaacctggtccatggaactggaggaacagcagtgtgccgacggtcatattgcacgcaacagttaagtccaaaacattcggttcagagttagcttttccccattttggcaatcagttcgtcacaaatcttggtgagttcttctatttctttattcttctgctccagcgtcctttccagggcgtccaactcggcagctgctcctttccgcaaggctggcctggtgggcggcttgctcctgctgggccttgcctcgaacctgagcaatcttcagcattggccctgtccagtttctcctccagcgtgcaccttcagggcctggtacctctgctcctccttcttcacccgggacaggtactcctgcgcacatctcttcaacacctcttcattcttgcggaagccttctaggacctccttcatcttctcatatcttctgaagaggtcggccagagactttctccacggagttcaggtcggccaggggcttgctccttctccagaaccagctgctgcaccgtctggtggggagactgacttctctctctgttcgtcctctatcatctgagcgatggtcttctcatactcggccactattttcctcatttccatcacttcccgcctgctttcttcatatttatctttccattctgagacctctctctccttggttatgatctctgctctggcgatctggagggcagagtccaggtcgggctgctggaacagaaggcctgcaggtttctccacctcagcggtcccgatgcgggagtacaaggctgttttggagatggagacgtctgttgggtgagcagcctctctctggagtttctgagcgaatagtggggggttcttttctgctaagtcgggctccagatagtcaagtgcaccacagagagagacggggtgagctagcctgctgaggagggcgtcagcagaggcaaaggagccctcgggagctgtaatttcaatcgcttctgaaggggtgcccaagcccatggcctccagctccttctgggaggatttctctggcacctgcaagtgtgactcttggttaggggccagtcctcgtgggacaggatgctggtttttcgcagcagtgttcacaagggcttcagtctcttcaaaacttgaccctgaacacggcgtcggggactctgacatgcggacgggagatgacttgacagggctctcctgagaagtgtcaaacataaggtacaaggcctgcttcttcggggcatcgtcgtcctgaggtaaggaggagccaattttctccatatattcaatttcataggagtttctgtaatccaactcctcagtgggtgaactgaatttggtctcgtttacaaaggtggacaggtccgagggctgcgggtagtcctgtttgtcagcctctaggtccactgtcatgcacgtccacttctggttggtgaccgccagcttttcctcatctgtggcgtggaccaccgcagagatcactggtggtgtttctggtgtagcagctggggtggggtcctgggaaggtggatcagagagaggagaccgttttggcgactttttcaccctaaatgtgtcagtctttaggggcgtcttcttcttcttggcgggcttgtttagcccatccccgtccactccattggcttccatagcactggctgggatctcaaaggaggctggggatttagaaggtgagctgggggtcttagaggatgtcttaaaggggtcaacggactcatcacaggtgtctgggtcaaagttgtatgattgttggggcagtttgggagactcctgcatttttgaggtggaagaaaaagggttaaaattggggtcatcccacttgtcaatatcaaaggtgtaagtacctttagcaatggggatgtcattgggttcagcaggggatctgggaggtgaggcaggagtgttgtcaagtttctcgggtgtctttttcatctttggcctcctcaggggcattttggcaactggctttttgcctatctttttggtaggaggggggttttcctgctggttgtcccaactactcttgtcctcagaatagtcaaactccagccttacggagtgccctttggctggagagtcctcttgccccccgctatccgatggggttacctcccctgcctccggggccgtggtaagaggcagcgttttcctcccgacagggggtgagttctgcactctgccacctccagaagccggggggacaaccccttctacactctctgagtccagagggcaggcagctttgggccccgcagcgggctcaaggggcgtctcctccaataaggctgggctaggaccttccgtcttggcagattccgttttcgtctcagatgctagattctccccactggggacaaggctctcttcatctggctcctgttgcgtctccttcactgggggggtctctgtgggtttcttggtggtctgtttcttttttaaggaaggcggcctcggttttttagttcgcttaagggtactagaagcactgctggaacccgtgctatatgcatctggggcaagggccacggcctcgggattgcctgaggaagaagcaccatcaaagtcactggcttgcaggctgagcgaccgggacagtgtagacttagagatggggacggaatccgtggacttcctccgtgtgttcactttgccctcctgattcttagcgtctgaggcacgaggctccaaggtctgaaaggtatccacaagctcaatgttgtcaaagtccaagttgtaagtcccactgctggctatcggcttgtcttcatcgaagacggcagagaaggagtgtgacgggggacggaagggacttccttccaccgagtcgctccgtgggccatcagggacagggactgtctcagaaccacatcctggttcttccgggggtggctgtgtgctgaccttcgggttctgggatgacttcggggggtggtgggggtggagctggcggagctttgacaggggtcgttgactccggggtctcaaatgcctcttcagaatcggaactcattgcctcggaagcctccaggttcaggtcgctggctggggctggctgcagggactgcgaccctcccatcctcgctgtgccctggcgtgcaagctagccgcgagcggggccagcgtcctggcgcgat

SEQ ID NO: 80213 - DNA, 679 bp, Homo sapiens
  sig_peptide (58)...(193): this location contains the signal peptide sequence, MFGSRGLLCMCVFFFNILASQCKVISSGGMLCCRTPTLLDYLRQH, Run with SignalP
  misc_feature (10)...(126): similar to gi333217 in the genepept database release 114, Run with FASTXY 3.3t00, default parameters
agatttgcaaaatattgtgatagtatctatgtcttattgctcaagatctaaactcttatgtttgggagtaggggcttgctgtgtatgtgtgtatttttttttaacatcttggcctcacagtgtaaagtgataagctcaggaggaatgttgtgctgcagaacgcctacattactagattacttacggcaacactttctttaatgaggatctctgtgaaaccatctttttttccacttacagtttcaataagaggagatcagttatgaaattaagtaggagagaacaatagagagagagagagttcagcattcctcttcaagctagctaatatttttaaaatgtcgacactgttccaggaactctgctttttaggccaaagattctgccctggtcttcgtcctctccacacccccaggatcttgggggctgacacatcaacagggtttgagaaagacaccccatccgtcacacgccctgacacccccccgggagacacccccaggggcgccccgccccgccggccctggttctttttttaaagaaaaactccccccagcccctcattttcccaggccctctacccccccccgtccccccccccttatgaaatgcccccctcttcgcccctaaatgccttacccactgccagccacctctgccccctccccttgtcgccccc

SEQ ID NO: 80214 - DNA, 2378 bp, Homo sapiens
  sig_peptide (1006)...(871): this location contains the signal peptide sequence, MWPLSLCTPWALFQLFARTLHWALVALSHCSLTLLLVPWVAYFRR, Run with SignalP
  misc_feature (2379)...(809): similar to gi4240149 in the genepept database release 114, Run with FASTXY 3.3t00, default parameters
ttttttttttttcccccggagaggactgtattataccattcaaggggccaaaaaaaaaaagaaaagaaaactttgcccttcaattcaaactctgttatgccacatttggcataaaatgcttaccattacctaaaaatgattttttaaaaaatgcttatcattacctaaaagaaaaatgtagcaaaattcaactttggaggaaaatgaaaactgtacatatccttgagaaccacggaaagctaagagatatagaaaattgtacattcccacaaagttatttcaacaaagaggcattatctgcattccaccaaggtcagtcgagttgaggagaaagagaagcaaatgccaagaaattggctgcatattttttttttaatctgttttgccttaaatcacaaagagcaatgggaagaacaagctccctttctccttttctcagacacctttggtctaaagttgttctttttctagttcttccctcccctgtaatttttaattatcagaaataaataccagtgcatttcaggtggtcgtctgtgttagagtgcataactgaagttattagtggcttgggagtttgcacatataactggaggtaaacagcagattactacacctaatctcaccctgagcatttctcctctgtcaagtctaaattctgccatcttcttttgcaaaaacaagcagacatccccaccaaaggccaaaatataatgataactgacagtgaacagaaacccattgtaaagacaaactattccagctttcaaattcactgtgactggatactattagttttttgagtttataactccccagaaattgtcaaaagtaaccttgtagccaatccgcttgcagactctaaaaacctcctgaaataggccacccagggtaccaaaagcagtgtcaaagagcagtgagacagtgccaccaaggcccagtgcaatgtccttgcaaacaattggaatagcgcccatggtgtacacagggaaagtggccacatccacaaggacacggacagggatgctcagaactcggcaaatggccttcagcagacaacaaaggatccggaggagagccctgatgactttggccacgaccttgagcaccttccagggaatgctcaccaactcttccccaatggccatgaagtatgagatggtggctgagcccaggcggtaaaggcaactttctatgccattaatcacctgcttggtaacacaccacaggaaatagacaatgttcttcaggattgctaccacaaggtaataaattaattgaaaaagcttgatgaatggggtagcaatgaagcccatgagttttcccaaaaagctactacttccctcagatgcctctggaggcaacagagtagacctcttgctcctggtgctagaaaggggactagaactcttttgagattgtaccattcgttcttcatcctggatttggttaaccacttccaggatttttttcattttctctgtgtcttgctcagtttcaccacagttgttctgaaacagctgagggttaaatggaagcagtttctgaagatcttttaccatcacatcttctatgatgtcactgtcccgggtgtgcttgacaaagcccatggcccagcctcctccagggacagcacaacaggctgccagccaaacaaactcagggactgccactttgtctttaactctgtagtctgagggcactgtgcctgtgaggatatataggtcttccccactgccacactgtggggtcaaagcccggtccattaggctgtggagattcacataccaccgttcctggaaggactgagtcattggggctgaatttgtgagagtaaatgtggccacctggacatcactgctaagggagaatgggtaaagctgtcctctttggtaatcagaatcaaggtaatctgtattcaaggcttgcttgcttcccaggctgttcacagaggtgatggcctctgcctcattaatcgcctcctcaaggttgctgttggggtcatcgatctgcggctccaccagccatcgctgctcggcgccgccgggcgcagggcgcggggcgcggaacgcggagtacacggggatgcggtcccgggtgctgtagagggtggcgaagcgctcagcaccctccgcgcgctgacagatcttcacgtgggaatcggccgccagccccgcaggcggggtcccggcgtagaagaacttgtcacattcgccaaagccggcttcctcctcgcccacgagccggccttccagcagcccagccagggcgaagaggctgcccagcgcgagccagcgcgcggtgcccatggcggcctctgcgagcgcggcggggccgagcggctgggctgccgcggcgcgagctctgcaggctgggcg

SEQ ID NO: 80215 - DNA, 782 bp, Homo sapiens
  misc_feature (1)...(782): n = a,t,c or g
  sig_peptide (150)...(285): this location contains the signal peptide sequence, MLIFTVLELLLAAYSSVFWWKQLYSNNPGVSMLTCRLIPAVSQVQ, Run with SignalP
  misc_feature (782)...(389): similar to gi299471 in the genepept database release 114, Run with FASTXY 3.3t00, default parameters
cagaaaagaggattaagcaattttccctgtctccttttctctgcattgctggagcctcatcgccctgtctcctcttagccaggcacaagggctagcttgtcttgggtaccagccattcatgtcctgatttgcagggtgtcctagtggtgatgctcatcttcactgtgctggagctcttattagctgcatacagttctgtcttttggtggaaacagctctactccaacaaccctggggtgagtatgctgacatgtcgcctgatacctgctgtgtctcaggtccaggctacaataatccaacctcaaaaagtggcaaaaagaagaatcaattattgttcatgaggtgcatgtggaaggccacttttataattaaaaaaatgagtttaacagtgaaaccccatctctactaaaaatatgaaaaactagccaggtgcagtggcacacgcctgtagtcccagctagttgggaggctgaggcaggagaattgcttgaacccaggaagtggaggttgcagtgagctgagatcacaccactgcactgcagcctgggtgacagagtgagactcagtctcaaaanaaaaaaagagtttgtataaatgggctccttctggaggacactctggtcatctngggatcagctnggtgtctactggggnagcagaccagttaggagaattgcttaaatatgaaagcttagttggtttttagaaattcacataggcccanccccntcatgtaaaggnaccacgggnttgggttnaatttacnttggaaaattattgtc

SEQ ID NO: 80216 - DNA, 6503 bp, Homo sapiens
  sig_peptide (3871)...(4006): this location contains the signal peptide sequence, MVFSPGSVSVISDSLLTLPAIVSIAAGGSLLLIIVIIVLIAYKRK, Run with SignalP
  misc_feature (3)...(5893): similar to gi3413888 in the genepept database release 114, Run with FASTXY 3.3t00, default parameters
gtggatttggtcgtctccctgattccgagctgcgggcagggagaggggcctcgcgccgccctcagcagccggcggcggccgaggtagaccgagcggggacggaaggacagaccgacgtcgccgagctggaatcatgtgagggccaaccggggaaggtggagcagatgagcacacacaggagccgtctcctcaccgccgcccctctcagcatggaacagaggcagccctggccccgggccctggaggtggacagccgctctgtggtcctgctctcagtggtctgggtgctgctggcccccccagcagccggcatgcctcagttcagcaccttccactctgagaatcgtgactggaccttcaaccacttgaccgtccaccaagggacgggggccgtctatgtgggggccatcaaccgggtctataagctgacaggcaacctgaccatccaggtggctcataagacagggccagaagaggacaacaagtcttgttacccgcccctcatcgtgcagccctgcagcgaagtgctcaccctcaccaacaatgtcaacaagctgctcatcattgactactctgagaaccgcctgctggcctgtgggagcctctaccagggggtctgcaagctgctgcggctggatgacctcttcatcctggtggagccatcccacaagaaggagcactacctgtccagtgtcaacaagacgggcaccatgtacggggtgattgtgcgctctgagggtgaggatggcaagctcttcatcggcacggctgtggatgggaagcaggattacttcccgaccctgtccagacggaagcctgccccgagaccctgagtcctcagccatgctcgactatgagctacacagcgattttggctcctctctcattaagatcccttcagacaccctggccctggtctcccactttgacatcttctacatctacggctttgctagtgggggctttgtctactttctcactggccagcccgagacccctgagggtgtggccatcaactccgctggagacctcttctacacctcacgcatcgtgcggctctgcaaggatgaccccaagttccactcatacgtgtccctgcccttcggctgcacccgggccggggtggaataccgcctcctgcaggctgcttacctggccaagcctggggactcactggcccaggccttcaatatcaccagccaggacgatgtactctttgccatcttctccaaagggcagaagcagtatcaccacccgcccgatgactctgccctgtgtgccttccctatccgggccatcaacttgcagatcaaggggcgcctacagtcctgctaccagggcgagggcaacctggagctcaactggctgctggggaaggacgtccagtgcaccaaggcgcctgtcccccatcgatgataacttctgtggactggacatcaaccagccccctgggaggctcaaccccagtggagggcctgaccctgtacacccaccagcagggacccgcatgacctctgtggcctccctacgtttacaacggctacagccgtggtttttgtggggactaagagtggcaagctgaaaaagattcgggccgacggtcccccccatggtggggtccagtacgagatggtctctgtgctcaaggacggaagccccatcctccgggacatggccttctccattgatcagcgctacctgtacgtcatgtctgagagacaggtcaccagggtccccgtggagtcatgtgagcagtatacgacttgtggggagtgcctgagctctggggaccctcactgtggctggtgtgccctgcacaacatgtgctcccgcagggacaaatgccaacaggcctgggaacctaatcgatttgctgccagcatcagccagtgtgtgagccttgcagtgcatcccagcagcatctcagtatctgagcacagccggttgcttagcctggtagtgagtgatgctcctgatctatctgcgggtatcgcctgtgcctttgggaacctgacagaggtggaggggcaggtgtccgggagccaggtcatctgcatctcacctgggcccaaggatgtccctgtcatcccgctggatcaagactggtttgggctggagctacagctgaggtccaaggagacagggaagatatttgtcagcaccgagttcaagttttacaactgcagtgcccaccaactgtgcctgtcctgtgtcaacagcgccttccgctgccattggtgcaagtaccgcaacctctgcactcatgaccccaccacctgctccttccaggagggccggatcaatatttcagaggactgtccccagctggtgcccacagaggagatcttgattccagtcggggaggtaaagccaatcacccttaaggcgcgaaatctgccccagccgcagtccggccagcgaggctatgagtgtgtcctcaacatacaaggagccatccaccgggtccccgctctgcgcttcaacagctccagcgttcagtgtcagaacagctcgtaccagtatgatggcatggacatcagcaatctggccgtggatttcgctgtggtgtggaacggcaatttcatcattgacaaccctcaggacctgaaagtccatctctacaagtgtgcagcccagcgggagagctgcggcctctgcctcaaggccgaccggaagtttgagtgtggctggtgcagcggcgagcgcaggtgcaccctccaccagcactgtaccagcccttccagcccctggctcgactggtccagccacaatgtcaagtgctccaaccctcaaatcaccgagattttgacggtgtctggaccgccggaaggagggacgcgagtgaccatccatggcgtgaacctgggtctggacttctccgagatcgcccaccatgtgcaggtggctggggtgccctgcacgcccctcccaggggaatacatcatcgctgagcagattgtctgtgagatgggccatgccctcgtgggaaccacctccgggccagtacgcctgtgtattggcgagtgtaagccagagttcatgacgaagtcccatcagcagtacaccttcgtgaacccttctgtgctgtcactcaacccaatccgaggtcccgagtcaggaggcactatggtgaccattaccggccattaccttggggctgggagcagcgtggcagtctacctgggcaaccagacctgcgagttctacgggaggtcaatgagtgagatcgtgtgtgtctcacccccatcatccaatggccttggcccggtccctgtttctgtgagtgtcgaccgagcccatgtggatagcaacctgcagtttgagtacatagatgaccctcgggtccagcgcatcgagccagagtggagcattgccagtggccacacacccctgaccatcacaggcttcaacctggatgtcattcaggagccaaggatccgagtcaaattcaatggcaaagaatctgtcaatgtgtgtaaagttgtgaacacaaccaccctcacctgcctggcaccctctctgaccacggactaccgccctggcctggacactgtggaacgcccagatgagtttggatttgtctttaacaatgtccaatccttgctaatttacaacgacaccaagtttatctactaccccaacccgacctttgaactgcttagccctactggagtcttggatcaaaagccaggatcgcccatcattctgaagggcaaaaacctctgccctcctgcctctggaggggccaaactcaactacactgtgctcatcggagagaccccttgtgctgtcaccgtatctgagacccagcttctctgcgagcctcccaacctcaccgggcagcacaaggtcttggttcacgtgggcgggatggtgttctcgcctggctcggtgagtgtcatctcagacagcttgctgaccctgccagccatcgtcagcatcgcggccggcggcagcctcctcctcatcatcgtcatcatcgtcctcattgcctacaagcgcaagtctcgagaaaatgacctcactctcaagcggctgcaaatgcagatggacaatctggagtcccgtgtggccttggagtgcaaggaagcttttgctgagctccagacggatatcaatgagttgaccagtgacctggaccgctcaggaatcccttacctggactatcgtacctacgctatgcgagtcctgttcccgggcatcgaggaccaccccgtcctgcgggagctggaggtacaaggaaacgggcagcagcacgtggagaaggccctgaagctctttgcccagctcatcaacaacaaggtgttcctgctgaccttcatccgcaccctggagctgcagcgcagtttctccatgcgcgaccggggcaacgtggcttcgctcatcatgaccggcctgcagggccgcctggaatatgccactgatgtcctcaagcagctgctctctgacctcatcgataagaacctggagaacaagaaccaccccaagctgctactccggaggacagagtctgtggctgaaaagatgctgaccaattggttcgccttcctcctgcacaagttcctaaaggagtgcgcaggggagccactcttcatgctatactgtgccatcaagcagcagatggagaagggccccattgatgccatcacgggcgaggcccgctactccctgagcgaggacaagctcatccggcagcagatcgagtacaagaccctgatcctgaactgcgtcaaccctgacaacgagaacagtccagagatcccagtgaaggtgttaaactgtgacaccatcacacaggtcaaggagaagattcttgatgccgtgtataagaatgtgccctattcccagcggccgagggcagtggacatggacttggagtggcgccaaggccggatcgcccgggtcgtgctgcaagatgaggacatcaccaccaagattgagggtgactggaagcggctcaacacactgatgcattatcaggtgtcagacaggtcggtggtggctctggtccccaaacagacctcctcctacaacatccctgcctctgccagcatctcccggacgtccatcagcagatatgactcctccttcaggtatacgggcagccccgacagcctgcggtcccgggccccgatgatcaccccagacctggaaagtggggtcaaggtgtggcatctggtgaagaaccatgaccacggtgaccagaaggagggtgaccggggcagcaagatggtgtccgagatctacctgacccggctactggccaccaagggcaccctgcagaagtttgtggacgacttgtttgagaccttgttcagcactgtgcaccggggcagcgctctccccctggccatcaagtacatgtttgatttcctagatgagcaggcagacaggcacagcatccatgacacagatgtgcggcacacctggaaaagcaactgcctccctctgcgcttctgggtgaacgtgattaagaacccccagttcgtgtttgacatccacaagggcagcatcacggacgcctgcctctctgtggtggcccagaccttcatggactcttgttcaacgtcagagcaccggctgggcaaggactccccctccaacaagctgcttctatgccaaggacatccccagcttacaagagctgggtggagagatactacgcagacatcgccaagcttccagcccatcagttgaccagggacatgaatgcttacctcgccgagcagtcccgcctgcacgccgtgggagttcaacatgctgagtgccctcaatgagatctactcctatggtcagcaagtatagtgaggagctcatcgggcccctagagcaggatgagcaggcacggcggcagcggctggctataaaggtggagcagctcattaatgcccatgtcccattgagagctgagaggaggagcctcgcattccctgggaagagggacctgtcccaagctgtcacactgggagtcctcagatggaaggacaagtgatggggatcaggcccccagagcttgctgtcccctgaagaccccatccctggggagaggggaggactcctctccctacgccagccaagtttcgtcatagccagttccagctgggagagacagtgggcgtcgtccatcctcagtgagaacaccagagaacccggggcccgggagaagggggtccttcaaagccgagagggcacgagctgggggaaagtctgccctctgtgactgctgctttgcatgaaaactcatttgatgtatattggggaaataatgagaactttatttaatttttttaagaaaaagggaaaaaaacagaaataaaacaaaaagccgccctgttaatcccgtccaacttttgtttaattctgatttctgtctcccttccttcttttctcccattcctccttctttatataatgcctatttccaaatgccagagaaagcagagatgctgagagacattggagagaaaatgactgtctccttttccttgaaattaaaaaaaaaa

SEQ ID NO: 80217 - DNA, 1231 bp, Homo sapiens
  misc_feature (1)...(1231): n = a,t,c or g
  sig_peptide (37)...(172): this location contains the signal peptide sequence, MPAGCWKTLLRWLPVFLQTMLTAISMSAIATNGVVPGKGCPPAAA, Run with SignalP
  misc_feature (18)...(155): similar to gi3925714 in the genepept database release 114, Run with FASTXY 3.3t00, default parameters
gagccgggtcatagaccctgacttgggagtgttgcgatgccggcaggctgttggaaaactctcctcagatggctgcctgtctttttgcagacaatgctgaccgccatttccatgagtgcgatcgctaccaacggtgtggtcccaggtaaggggtgcccgccagccgcggccctgagtcctgttagaggagtctgtgttttgccgcacggcaaccgcgaggaggccgcttggcgaggccgggccgggggctgcctgggggtctcagccgggccttctgcgtgttctccactggctcctctggcgtttgagccgtgaggtcacggctgtttggttttcttccccattttgctgcgtggtgaccgtctcttgccagggtaggcagtgcccaccaggcagcgggctggggagggggaggcacgggcgattccagtggctcctgtagcccagcgtgtgccataggctgagttcttggaacctgtatctcacgagggaaggtgaagacaaaacactgccctgaccttgttaattagtaataagttaattaccatacctaataactaaatacctagggaaccgagatgatattaattagaaataaggtaattacaatacgaattacctagtaaactgagatgatactgtgaattagtattaaacgatttacgatacgaaaaaaaaagaagagggcgccccccttaagagggatccagctatggcccccgtgcttgtcgagcttatagttttttttttggggaccccaaattaaaatgtcccttggcctcgctttaaaccacgtactatcatgggggaagaccttcgcatcactcgctcttgcatggaaaagtgtgatggtacgaacgtatgactacggctaattggctcgcattacaccgacgatagtatgagttcgcgctatagcggacgcactgattcatcgaaccgatggtaatacatgtaaggatcgtaaacgaactcttcgtatggatacgacacgtatggtaacgaatcgcgacctacgtgacgcaatcggtatgtgaaactaatatacgctgacgacacgcaacgtacacctcagtgtattgatcgtataggctacgcatatctcatgcatacgaatcggcgacttatgactgatatgaatgggtcaatgcacgctataangatatcgtagacttatcgcataccgacaacgactacgataacgacatggacgcccgactgtatgagtctt

SEQ ID NO: 80218 - DNA, 1734 bp, Homo sapiens
  misc_feature (1)...(1734): n = a,t,c or g
  sig_peptide (130)...(265): this location contains the signal peptide sequence, MTRMLNMLIVFRFLRIIPSMKPMAVVASTVLGLVQNMRAFGGILV, Run with SignalP
  misc_feature (9)...(610): similar to gi4263043 in the genepept database release 114, Run with FASTXY 3.3t00, default parameters
ggcacgagctcaaggtctttgccctgggcctgcgagggtacctgtcctaccccagcaacgtgtttgacgggctcctcaccgttgtcctgctggaggccggagatggtgggcctgctgtcgctgtgggacatgacccgcatgctgaacatgctcatcgtgttccgcttcctgcgtatcatccccagcatgaagccgatggccgtggtggccagtaccgtcctgggcctggtgcagaacatgcgtgcttttggcgggatcctggtggtggtctactacgtatttgccatcattgggatcaacttgtttagaggcgtcattgtggctcttcctggaaacagcagcctggcccctgccaatggctcggcgccctgtgggagcttcgagcagctggagtactgggccaacaacttcgatgactttncggctgccctggtcactctgtggaacttgatggtggtgaacaactggcaggtgtttctggatgcatatcggcgctactcaggcccgtggtccaagatctattttgtattgtggtggctggtgtcgtctgtcatctgggtcaacctgtttctggccctgattctggagaacttccttcacaagtgggacccccgcagccacctgcagccccttgctgggaccccagaggccacctaccagatgactgtggagctcctgttcagggatattctggaggagcccggggaggatgagctcacagagaggctgagccagcacccgcacctgtggctgtgcaggtgacgtccgggctgccgtcccagcaggggcggcaggagagagaggctggcctacacaggtgcccgtcatggaagaggcggccatgctgtggccagccaggcaggaagagacctttcctctgacggaccactaagctggggacaggaaccaagtcctttgcgtgtggcccaacaaccatctacagaacagctgctggtgcttcagggaggcgccgtgccctccgctttcttttatagctgcttcagtgagaattccctcgtcgactccacagggacctttcagacaaaaatgcaagaagcagcggcctcccctgtcccctgcagcttccgtggtgcctttgctgccggcagcccttggggaccacaggcctgaccagggcctgcacaggttaaccgtcagacttccggggcattcaggtggggatgctggtggtttgacatggagagaaccttgactgtgttttattatttcatggcttgtatgagtgtgactgggtgtgtttctttagggttctgattgccagttattttcatcaataagtcttgcaaagaatgggattgtcattcttcacttcagcacagttctagtcctgcttctctggagtagggttgttgagtaaggttgcttgggttgtgcattgcacaagggcacatggctgtaaggtgtatcctggcggggggctgtctacctgcagtgaggggcaccttttctgttttgctcaaaggcatgtataaaccaatgggcgaccttatttcctgtgtcttcaggcgtgtgacagggggcctggggtggtgaggtggggccagcgatcaatgtgtggaaagccttgttgtcacctgaagcacgccaggtacagattgaccaatggttttctcacttcaggggccaacccacgccccctttctgctgaagtttgggtgccatctactggtgggatgggacttggttgactacatttaaggtaaggcggaccca

SEQ ID NO: 80219 - DNA, 1098 bp, Homo sapiens
  sig_peptide (449)...(314): this location contains the signal peptide sequence, MIQYAVFVLCGFLYLCFMLFFFSSVTQAGVSEPRSSHCTPAWATE, Run with SignalP
  misc_feature (23)...(259): similar to gi1710216 in the genepept database release 114, Run with FASTXY 3.3t00, default parameters
tgagagtcttgctttgccccctaggttggagtgcagcagcacaatcttggcttactgcaacctccgcctcccaggttcaagtgattcttgtgcctcagcctctcaagtagctgggattacaggcatgggccatcatgcctggctaatttttatatttttaatggagacatggtttcactatgttggccaggttggtcttgaactcctgaccttgtgatctgcctgccttggcctcctaaagtgctgggattacaagcatgagccactgcatccagactctccttgttgccttatttatttgagacgcagtctcgctctgtcgcccaggctggagtgcagtggcttgatctcggctcactgactccagcctgggtgacagaactgaaaaaaaataacataaaacatagatacagaaaaccacaaaggacaaacacagcatattgaatcatcacaaggcagccaccccttcatagccacacctggcccctggccaccactgacctgtgctccatcgcgcagaattccgttgtctcaggaatgttcgatgaatggaatcctgtgtggcctgagatgagtgtctttcatgccacgtaacaatcttgaggcccgtgaaagctgttggtatgtcaacagttagctgcttctcattgctgagtggcgattggtcctgtcatggtttattcagccatgtggtggatggctacttgtcttctaagccacttgccttctgattgctggactgactctctcgccctctcttggtgcagccctcgggaggctcagtcacactctccgagagcacagccatcatctcccacgacatcacaggcctggtcacatgagatgctgccctctacctggcagaatgggccatcgagaacccggcagccttctctcataggtgacctcggggcgcacggcaggacaccgaggcaggctcaccctggtgcagtcacagacatggtcccctttcctcccgccaggactgtcctagagcttggcagtggcgccagcctcacaggcctggccatctgcaagatgtgccgcctccaggcatacatcttcagcgactgtcacagccaggtcctcgacccggga

SEQ ID NO: 80220 - DNA, 5353 bp, Homo sapiens
  sig_peptide (1669)...(1804): this location contains the signal peptide sequence, MLGIYASIFLLLLITVLICAVYSCGSLFPKALQRLSRSIVRSRAH, Run with SignalP
  misc_feature (3)...(2946): similar to gi2887419 in the genepept database release 114, Run with FASTXY 3.3t00, default parameters
agcggtacttcttccagatgaaccagagcagcctgacgctgctgatggcggtgctggtgctgctcacagcggtgctgctggctttccacgccgcacccgcccgccctcagcctgcctatgtggcactgttggcctgtgccgccgccctgttcgtggggctcatggtggtgtgtaaccggcatagcttccgccaggactccatgtgggtggtgagctacgtggtgctgggcatcctggcggcagtgcaggtcgggggcgctctcgcagcagacccgcgcagcccctctgcgggcctctggtgccctgtgttctttgtctacatcgcctacacgctcctccccatccgcatgcgggctgccgtcctcagcggcctgggcctctccaccttgcatttgatcttggcctggcaacttaaccgtggtgatgccttcctcttggaggcagctcggtsccaatgtgctgctgttcctctgcaccaccgtcattggcatctgcacacactatccagcagaggtgtctcagcgccaggcctttcaggagacccgcggttacatccaggcccggctccacctgcagcatgagaatcggcagcaggagcggctgctgctgtcggtattgccccagcacgttgccatggagatgaaagaagacatcaacacaaaaaaagaagacatgatgttccacaagatctacatacagaagcatgacaatgtcagcatcctgtttgcagacattgagggcttcaccagcctggcatcccagtgcactgcgcaggagctggtcatgaccctgaatgagctctttgcccggtttgacaagctggctgcggagaatcactgcctgaggatcaagatcttgggggactgttactactgtgtgtcagggctgccggaggcccgggccgaccatgcccactgctgtgtggagatgggggtagacatgattgaggccatctcgctggtacgtgaggtgacaggtgtgaatgtgaacatgcgcgtgggcatccacagcgggcgcgtgcactgcggcgtccttggcttgcggaaatggcagttcgatgtgtggtccaatgatgtgaccctggccaaccacatggaggcaggaggccgggctggccgcatccacatcactcgggcaacactgcagtacctgaacggggactacgaggtggagccaggccgtggtggcgagcgcaacgcgtacctcaaggagcagcacattgagactttcctcatcctgggcgccagccagaaacggaaagaggagaaggccatgctggccaagctgcagcggactcgggccaactccatggaagggctgatgccgcgctgggttcctgatcgtgccttctcccggaccaaggactccaaggccttccgccagatgggcattgatgattccagcaaagacaaccggggcacccaagatgccctgaaccctgaggatgaggtggatgagttcctgagccgtgccatcgatgcccgcagcattgatcagctgcggaaggaccatgtgcgccggtttctgctcaccttccagagagaggatcttgagaagaagtactcccggaaggtggatccccgcttcggagcctacgttgcctgtgccctgttggtcttctgcttcatctgcttcatccagcttctcatcttcccacactccaccctgatgcttgggatctatgccagcatcttcctgctgctgctaatcaccgtgctgatctgtgctgtgtactcctgtggttctctgttccctaaggccctgcaacgtctgtcccgcagcattgtccgctcacgggcacatagcaccgcagttggcatcttttccgtcctgcttgtgtttacttctgccattgccaacatgtacttcatcgggaacatgctgctgagtctcttggccagctctgtcttcctgcacatcagcagcatcgggaagttggccatgatctttgtcttggggctcatctatttggtgctgcttctgctgggtcccccagccaccatctttgacaactatgacctactgcttggcgtccatggcttggcttcttccaatgagacctttgatgggctggactgtccagctgcagggagggtggccctcaaatatatgacccctgtgattctgctggtgtttgcgctggcgctgtatctgcatgctcagcaggtggagtcgactgcccgcctagacttcctctggaaactacaggcaacaggggagaaggaggagatggaggagctacaggcatacaaccggaggctgctgcataacattctgcccaaggacgtggcggcccacttcctggcccgggagcgccgcaatgatgaactctactatcagtcgtgtgagtgtgtggctgttatgtttgcctccattgccaacttctctgagttctatgtggagctggaggcaaacaatgagggtgtcgagtgcctgcggctgctcaacgagatcatcgctgactttgatgaggtctccttgtgttgttcagattatcagcgaggagcggttccggcagctggaaaagatcaagacgattggtagcacctacatggctgcctcagggctgaacgccagcacctacgatcaggtgggccgctcccacatcactgccctggctgactacgccatgcggctcatggagcagatgaagcacatcaatgagcactccttcaacaatttccagatgaagattgggctgaacatgggcccagtcgtggcaggtgtcatcggggctcggaagccacagtatgacatctgggggaacacagtgaatgtctctagtcgtatggacagcacgggggtccccgaccgaatccaggtgaccacggacctgtaccaggttctagctgccaagggctaccagctggagtgtcgaggggtggtcaaggtgaagggcaagggggagatgaccacctacttcctcaatgggggccccagcagttaacagggcccagccacaaattcagctgaagggaccaaggtgggcattgagtggactctgtgctcactgggtggagctgtggcagggggcactgagcctccagaccctgctaaccacaaaagggaacatcccagcaggctgtgcttggatcatgctcgtctgccctcaagctggaaaacaaggggctacctaccgagaggattatgcaagtgactttctttcttacttggggtagggctgttccctctccaatcttccagcctttgggagcaggggaggggtcagtagcagaagcagagggaggcctcttgcctgagggattaaaatggcagcttgccatgcctacccttccctgtctgtctgggcagcaggttcagggctgagcccttcttttccctcttttttcctgggaatattttgtacaatattttgtacaaagacaggcatgaggagtgcctattccatgcttgcctttgcaatacctgcatccccagcactggtcctgggcacttccccaccccagccaggtgtccctcctatgcacagagcagaggagggagaagctctggggagccagctttggccatatttcaggagaatgtttccatgtgccaaatcttagtcccatgatctgtccccaaaggggaacaaagggacctctgacagcttagatttagccccagttcctgcacgctccagggaacggggtgtctggcctcactggtactgtgaaaaatgctcagagagcaagcctgtgtgtggggatgtcaggtcaggagctggaagttcacctgcaggtgccaaagagcaggccggccagggctggggcagtgccagactctgatctgaggaccccgtcggggtccagatcaggtcactctgccccagtgctctcttgctgtctgctgacaagggggcatggagcatctcttcctcttctgttgccaaatagaaaagggtcagggcatggagaaaggtgaccctgatcccaaacctgccctcccaagtctctggtgttggggagggcccgtgtgtttgtgtaactgtgtgtgcatgttggtctttgtgtgcatatctgttttccaggtctatgtgagtccttgtgctcctgctcctcagctctccaccccaggttgcctctctcctgtgggcctctgtcttctgggaataaagcagggtttcctacttcaggggatgtagagagatgcccaggttgcacaggagtgggatggggtgtggtagcaaaaggagggagaggagtcctttttgtgccaaatccctaagtgccgttcgggggccatgtgtgcagcatgactctccctgtctgtggcagggacccaagcgcttgcttaagccccagtgctccatgccagcacttgaactgtctggggtttgatggacagaggctgaggaatttcctggcttccccagatagtgtcctgggacatggtatgctttggggctggggtagcatggaatccctctgaggacctggatactggtactacggggtggggaagaggaaccttaaacttggctttccccagccttcagcctgagtctagcatgtttctagctccccagtcccttgtgaagccttgagggctggcagaagggttaggaggttgaactctagattcccttcctgtctttgccttccttttacccctttccctgcaacctccttgactctggcctgaatttgttggtgcctcagtttctctgtctgtacctatttaagccaaaggcactagcctgaattttgcttgaagatcactttgtcttggaaatgactagagaggcagaggagaagggtttccaggagttgctaggtttgggagtggaaggggcaggcagtgcacttgcccctcctcatggccccttcttgacaccagctccctgtggaggcctggtttctgggtaatgcctcccttgggcatcttcatgcatcaaccaaatgggccatcaggtacttcattagtcatggcagaaggaggggaaaagacttgttttccagacagaaaatctactcccctgtccccagccatatccctggataggaagggataggaagagactacttggtgccatggggtaggggtgagggtataagtagatcagagtgggaagacctcagccttgggtggcttgtctctgcttcttgccaggtgggagggcctgtccacaccctggatccccgtaccacagtgccagccatgcccttcccctgggctaccattgtccctttcctcacccagttggtagaggagtcaggaggtgggaggccgtgggctttggttttataatgtaaccactgtgggggtgggggaggatggtgaaccatgtatttcagtgaaatatttaatatatttaaatatcaataaaatcaaactctttgtaaaaaaaaaa

SEQ ID NO: 80221 - DNA, 422 bp, Homo sapiens
  sig_peptide (175)...(310): this location contains the signal peptide sequence, MGVTTATLIAPALRTLRTSAVCSTTAETSFSACTFVSTSCSKKGT, Run with SignalP
  misc_feature (1)...(299): similar to gi1958 in the genepept database release 114, Run with FASTXY 3.3t00, default parameters
ctcgctgagaaagtacttgctgggaaatctacgattgaggactactttcctgaatgatgctcgctgcactactcctgaggaggctactcccgagcccggagaggactccacgcgtgacccgggccaaggacttcattcgagaggagtttctgtggatcagcactgccagtggagatgggcgtcactactgctaccctcatagcacctgcgctgaggacactgagaacatccgccgtgtgttcaacgactgccgagacatcattcagcgcatgcaccttcgtcagtacgagctgctctaaaaagggaacccccagatttagttaaagccttaggcacaattagttaaaagtgaaacgtaattgtacaagcagttaatcacccaccatagggcatgagtaacaaagcaacctttcccttacccg

SEQ ID NO: 80222 - DNA, 366 bp, Homo sapiens
  sig_peptide (76)...(211): this location contains the signal peptide sequence, MVGDVTGAQAYAFTAKCLNIWALILGIFMTILLIIIPVLVCQAQR, Run with SignalP
  misc_feature (3)...(321): similar to gi1335108 in the genepept database release 114, Run with FASTXY 3.3t00, default parameters
aacaccctcttcatgaacacctgctgcctgggcttcatagcattcgcgtactccgtgaaggctagggacaggaagatggttggcgacgtgaccggggcccaggcctatgccttcaccgccaagtgcctgaacatctgggccctgattttgggcatcttcatgaccattctgctcatcatcatcccagtgttggtctgtcaggcccagcgatagatcatgaggcatcattgaggccaggagctctgcccgtgacctgtatcccacgtactctatcttccattcctcgccctgcccccagaggccaggagctctgcccttgacctgtattccacttactccaccttccattcctcgccctgtccccag

SEQ ID NO: 80223 - DNA, 4917 bp, Homo sapiens
  sig_peptide (4411)...(4546): this location contains the signal peptide sequence, MHYCSLLLFYAFILANMKFCEKKPFDLKKKKPPPPSVAGNKLLVL, Run with SignalP
  misc_feature (1)...(4917): similar to gi1136426 in the genepept database release 114, Run with FASTXY 3.3t00, default parameters
gactacatcgagaagcactgcccgagcgccgtggtgccggtggagctgcagaagctggcccggggcagcctggtgggcggcgggcggcagcggcccccgcagaccccgctgcgcctgctggtggacgccgacaactgcctgcaccgcctctacggcggcttctacaccgactgggtcagcggcggccagtggaaccacatgcttggctacctggcggcgctggccaaggcctgcttcggcggcaacatcgagctcttcgtcttcttcaacggcgcgctcgagaaggcccggctgcacgagtgggtcaagcggcagggcaacgagcgccagacggcacagcagatcgtcagccatgtccagaacaagggcaccccgccgccaaaggtctggttcctgccgcccgtctgcatggcccactgcatccgcctggcgctcatccgcttccacgtcaaggttgcacagagcattgaggatcaccatcaggaagtgattggtttctgcagagagaatggtttccatggcttggttgcgtatgactctgattatgcactgtgcaacatcccctactatttcagtgcccatgccctaaaactgagccggaacgggaaaagttctcaccacaagccaatatctgatgcatgaagttgccaagcaactggacctgaatccaaatcgttttcctatttttgctgctctcttaggaaatcacattctgcctgatgaagatctggcttcctttcactggagtttacttggtccagaacatccactagcctcactaaaggtccgggcccaccagctggtcttgccaccttgcgacgtagtgatcaaagccgttgctgactatgtacgcaacattcaggacacctctgacttggatgccatagctaaagatgttttccagcattcacagtctagaacagatgacaaagttattcgatttaagagagcaattggatattattcagcgactagtaagcctatgtcatttcatccaccacattacttagcagccagacccggtccgtttggaatgcctgggatggtgccgccgcatgttcctcctcagatgctcaacattccgcagacctctctgcaagcaaagcccgtggccccacaggtgcccagcccagggggcgccccgggccagggtccatacccgtacagcctctctgagccagcacctctcactttggacacgagcgggaagaatctgacggagcagaacagctacagcaacattcctcacgaagggaagcacacgccgctgtatgagcggtcctcgcccatcaacccggcccagagcggcagccccaaccacgtggattccgcctacttccctggctcttctacatcgtcatcttccgacaacgacgagggcagcggaggggcgacaaaccatatcagcgggaacaagattggctgggagaagacgggaagccactcagagcctcaggcacgaggagacccaggagaccaaacaaaggcagaaggctcgtccactgcctcttcaggaagccaactagccgaaggcaagggaagccagatgggcactgtccagccaatcccgtgcctcctgtcgatgcccaccaggaaccacatggacatcaccacacctcccctgccccccgtcgcacctgaggtgctgagagtggccgagcacaggcacaagaaggggctgatgtacccctacatcttccatgtcctgacgaagggtgaaatcaaaattgctgtttctattgaagatgaagccaacaaggacctgcctccggccgctctgctctataggccagttcgtcagtatgtttacggagtcctgtttagtttggcagaaagcagaaagaaaactgagagacttgcttttagaaagaacagacttccaccagaattttcaccagtgatcattaaagaatgggcagcttacaaaggaaagtctcctcaaaccccggaactggttgaagctcttgccttcagggagtggacctgccccaacctgaagaggctgtggttgggtaaggcggtagaggacaagaaccgcaggatgagggccttcctggcctgcatgaggtcggacaccccagccatgctcaaccctgccaacgtgcccactcacctcatggtgctctgctgcgtcttacggtacatggtgcagtggccgggagcacgcatccttcggcgtcaggagctagatgccttcctggctcaggcgctgtcccccaaactctacgagcctgatcagctccaggagctcaagattgagaacctagatccccgaggaattcagctatcagctctcttcatgagtggagtagacatggccttgtttgcaaatgatgcatgcggacagccaatcccctgggaacactgttgtccttggatgtattttgatgggaagctcttccaatccaaactcctcaaagccagccgggaaaagaccccactcattgacctctgtgatggtcaggctgatcaggctgccaaggtagagaagatgcgccagagcgtcctcgaggggctcagcttctccaggcagagccacacgctccctttcccgccgccacctgccctgcccttctaccctgcctctgcgtacccccggcactttgggcctgtcccaccctctcagggcaggggcagaggctttgcaggcgtctgtggctttggaggcccctatggggaaacggtagcaacaggcccttaccgtgccttccgtgtggcggcagcatcgggacactgcggagccttctcaggcagtgacagcagcaggactagcaagtcccagggcggagtccaacctataccttctcagggaggcaaactaaaaatagctggcactgtggttggccattgggctgggagcaggcggggccgtgggggccgggggcctttccccctgcaggtggtttctgtcggaggaccagctagagggcgtccaagaggagttatttccaccccagtgattagaacatttggaagaggtggaaggtactatggcagaggttacaaaaaccaggcagcaattcagggcagacctccttatgctgcttcagcagaagaagtggccaaagaacttaagtcaaaatctggggaatcgaagtcctctgctatgtcttcagacgggtccctggctgaaaacggagtgatggccgaggagaagccggctccccagatgaacgggagcacgggtgacgccagggcccccagccactctgaaagtgccttgaataatgactctaaaacgtgcaatacaaatcctcatttaaatgcactaagtacagacagcgcttgccgcagagaagctgctctggaggcagctgtcttaaataaagaagagtaaacttattttttatagagggtgaaggatgctggaagggtaaggatttaggaatatctggagagaaagagagcctgcagttatgtacattttgtcctttccgtaagagaaaaatgaggactttggaaattcagatccctctttgatatcagagatttaaacaacacatttttagttttaaccagttgtagtcaaaatgctacaataaaacaaaaaagagaaagaaaatgaagagcatttgactcccgcacttaaaatgaagtacacataaagtttaaactggttatgacaaaagcctatagttgtgtttcttgaactataaagaaaacaaattttggcagtctttaagtatatatagcttaaaatataatttttagcatttggcaccatatgtatgccattatatttgattttgcattactgtttcacaatgaagctttctttaaggctttgatttttatgattatgaaagaaataaggcacaaccacagtttttctttcttaaatttcatcactgttgatgtggttcttttgtgttaaaaaaaaaaagtgcaactatcaaaactaaaaaattatagagtaatattgccgttctgctgattttaaatatacaatacatcatacatactttacaagcaagttaaatggagataaagttgaaatcatagaagatgcaaatgacctttcaaaatcaacacaatgtgttctgaaactttcgtgactaataccatgcatctgtgatcaatgaactatgtggttttgaatcggatgtagaccattagtactactacttgagctaaacttctgcatggttcataatttttaaagtgtgtagttaatatgcatgttatcgtcctttcttccattcttaacagtatgtgcccatttgcaaaacaaaaatgctaataatcagtaatagtcctataaaagatgttaactctgtttagtcattgactgatcttgctctaaccttaaaattttgtgattattgacctctgttgcatttattctaaagccccccaaaaattatctagccgtttcgaatatcaacattaccctggtgtattcactgctgtatgcattattgttctttgttgctgttttatgccttcatattagcaaatatgaaattctgtgaaaaaaaaccctttgatcttaaaaaaaaaaaaccaccccccccttctgtagcaggaaacaaattgcttgttcttgagaactttcccatcaagaatttagtagaagcaggtatacttctatcattttgatgtttttgttaatgtttccaaacaatgtactttgaaatcagaatcacttcttatcgttttcatatacttctgatgctcttcatcacattagtgatcagaaatgaggtgtaattccccaacccctgcccgcaagagctaagtaggatcttactgtaagttgaagggagttttgccctaactcatggattgtgcaagaatgaactgctgttgggtttgattgactgtcgatggattgtggtgtggtgtatctgaaggctattgaatgcaacttacaatgcttaataaaaatctttattcttttagtataaaaaaaaaaaa

SEQ ID NO: 80224 - DNA, 6390 bp, Homo sapiens
  sig_peptide (4274)...(4409): this location contains the signal peptide sequence, MSMLWRWLLIFLNIQISNPVTKFRLLWVLLKLVLITWAQVSSWAS, Run with SignalP
  misc_feature (1)...(5875): similar to gi5689555 in the genepept database release 114, Run with FASTXY 3.3t00, default parameters
cttccccctgttaccatgtcagggaaatatataatggaagaacatgatagttattcggatcaggtgtggagtatagatgaactgccttctaaacaaggttactatttacagggaaattatctgcgttgtgtggcagaagttggttcctttgaacataatcttacaactgatcttctaaaccacttggtatttgtacagaaagtgttcatgaaggaagttaatgaagtaatacaaaaagtttctggtggggagcagcctattcctctctggaacgaacatgatggaacagcagatggagataaacctaaaattctcctctattccctaaacttgcagttcaagggtattcaagtaacggccactactccatcaatgagagctgtaagatttgaaactggattgattgaactggaactttctaaccgacttcaaaccaaagcttcaccaggaagtagcagctatctgaaactgtttggcaaatgccaggtggatttaaatctggcattaggacaaattgtcaaacatcaggtttatgaggaagctggttctgattttcatcaagttgcctattttaaaaccagaattggattaagaaatgccctccgagaagaaatcagtggttcttcagatagggaagctgtgcttattactttgaatagaccaattgtttatgcacagcctgtggcctttgatagagctgtgctgttttggctgaattataagggccgcctatgacaactggaatgaacaacgaatggctttacataaggatattcatatggctacaaaggaagtagtagatatgctacctggtatccagcaaacatcagcccaggcctttgggactccttttctccagctcactgtcaatgatctgggaatttgcctacctatcacaaatactgcacagtctaatcatactggagaccttgacactggttctgctttggtattaaccattgaaagtactctcatcactgcatgctcttcagagtctctggttagcaaagggcatttcaaaaacttttgtatccgttttgctgatggatttgagacatcatgggatgactggaaaccagaaattcatggggatttagtgatgaatgcctgtgtagttccagatggcacctatgaagtatgttcaagaactacaggacaagcagcagctgaaagcagtagtgctggaacctggacactcaacgtattgtggaaaatgtgtgggattgatgttcacatggatcctaacattggcaaaaggcttaatgctctgggcaatactcttacaacactgacaggagaggaagacatagatgacattgctgacttaaattcagtgaacatagctgacctgtcagatgaggatgaagttgatactatgtctcccactatccatactgaagccacagattatcgaagacaggcagcatctgctagccagccgggagaacttagaggaagaaaaattatgaagcgtatagtggatatcagagaactgaatgaacaggccaaagtaatagatgatctgaaaaaattaggtgcaagtgaaggaaccataaaccaggaaattcaacgttaccaacagttagaatctgtggctgtgaatgacattagaagagatgttcgtaaaaaattacggaggtccagtatgcgggctgcttccctaaaggataagtggggtttgagttacaaaccaagttacagccgatcaaaaagcatttctgcttctggaagaccacctcttaagcgaatggaaagggcaagttctcgagtaggagaaactgaagagctcccagaaatccgtgtggatgcagcatctcctggacctagagtaacttttaatatccaggatacatttccagaggagacagaactggaccttttgtcagtaaccattgaaggtccatcccattattcatcaaatagtgaaggatcatgttctgtgttcagttctcccaaaactccaggaggcttttcaccaggcattcctttccaaactgaagagggccgacgggatgacagtttgtcttctaccagtgaagattccgagaaggatgaaaaagatgaagaccatgagagggaaaggttttatatttacaggaaaccctcacatacgtctcgtaaaaaagcaacaggctttgctgctgttcatcagctatttacagaacgctggccaacaacaccagtcaatagaagtcttagtggcacagctacagagagaaatattgactttgaacttgatatacgggttgaaattgatagtggaaaatgtgtactccacccaaccacccttctacaagaacatgatgatataagtttgagaaggagttatgatcgaagttccaggagcttagatcaagattcaccttcaaaaaagaagaagtttcaaactaattatgcttctaccacccatttaatgaccggcaagaaagtgccatcatctctacagacaaagcctagtgacttagaaacaacagtattttacattcccggagttgatgtaaagttgcattacaattccaagacgctaaagactgaatcacctaatgcctccaggggatcttccttgccaagaacactgtccaaagagtccaagctgtatggtatgaaagatagtgcaacatctcctccttctcctcctttaccttccactgtccagagcaagactaacaccttacttcctccccagcccccacctattcctgcagccaaaggaaaaggaagtggaggagtaaaaacagccaagttatatgcctgggtagcacttcagtcattgccagaagaaatggttattagtccctgcctattagactttctggaaaaagctctggaaactatcccaattacaccagttgaaaggaattatacagctgtcagctcacaagatgaagatatgggacattttgaaataccagatcctatggaagaatccaacaacatcactagtgtccgtcttcaacatctgcttactcttccttccctgtagatgttgtggtttatgtacgagttcagccctcacagatcaaatttagctgtttaccagtatcaagagtagaatgcatgttaaagctgccatccctggatttggtgttttcttcaaaccgaggagaactggagactttagggactacatatcctgcagagactttatcccctggaggtaatgctactcagagtggaacaaagacttctgctagcaaaactggaataccaggttcatcgggattaggcagccctcttggccgaagtcgacatagtagtagtcagtcagacctgaccagttccagcagtagttcatctggcttgagcttcactgcatgcatgtctgacttttccctttatgtatttcatccatatggagcagggaaacaaataactgctgtttctggcctcacacctggatcaggaggattagggaatgtggatgaggagcccacttcagtcactggtcgaaaagattcactcagtataaaccttgagtttgtaaaagtgagtttgtcacggatcaggcgttcaggaggtgcctcattttttgaaagtcagtctgtaagcaagtctgcaagcaaaatggatactacgttaataaatatatctgctgtttgtgatatagggtctgcctcctttaaatatgatatgcgccgactcagtgaaattctggcatttccaagagcatggtatagaagaagtattgcaagacgtctattccttggagaccaaactataaatttgccaacatctggcccagggacacctgattccattgaaggggtaagccaacacctttcccctgaatcatcaagaaaagcttactgcaagacctgggagcagccaagtcagtcagcctccttcacccacatgcctcagtcacctaatgtgttcaatgagcatatgacaaacagcaccatgtcaccagggacagtaggacagagcctaaaatccccagcttccataagatcaaggagtgtatctgattcttcagttcctcgaagagattcactttcaaaaacatcaactccttttaacaaatcaaacaaagcagcaagccaacaagggaccccatgggaaacacttgtcgtgtttgctatcaacttgaagcaattaaacgttcaaatgaatatgagtaatgtaatgggaaatacaacttggacaactagtggtttgaagagccagggccgtctgtcagtaggaagtaatcgtgatcgagagatcagcatgtctgttggtctgggaagatcacaattagattctaaaggaggagtagttggagggaccatagatgtcaatgctttggagatggttgctcatatttctgaacatccaaatcagcaacccagtcacaaaattcagattactatgggttctactgaagctcgtgttgattacatgggctcaagtatcctcatgggcatcttcagtaatgctgatcttaagcttcaggatgaatggaaagtaaacttgtataatacattggattcaagcataactgataaaagtgagattttcgtccatggagatttgaagtgggatattttccaagtaatgatatcaaggtcaaccacaccagatctgataaaaataggaatgaagctccaggaatttttcacacaacaatttgataccagcaaacgagctctgtctacctggggaccagttccttaccttccgccaaagacaatgactagcaacctagaaaaaagttcacaagaacaattacttgatgcagcacatcatcgacactggcctggagtattgaaggtggtatcaggatgccacatatccttatttcagattccattaccagaagatggaatgcaatttggaggatcaatgagcttacatggaaatcatatgacactggcatgttttcatggtccaaattttcgttcaaaatcttgggccctttttcatttagaagaaccaaatattgctttttggactgaagctcagaaaatctgggaagatggctccagtgatcattctacatatattgtacaaacactagattttcacctgggtcataatactatggttaccaaaccatgtggtgctttggaaagtcctatggcaacaataaccaagataacaaggcgtcgccatgaaaatccaccccatggagtagcaagtgtgaaagaatggttcaattatgttacagctacaaggaatgaagagctaaatctgcttcgtaatgttgatgctaacaacactgagaatagcactactgtgaagaattctagtttgttgagtggattcagaggaggttctagctacaaccatgaaacagagactatctttgcattaccaaggatgcagcttgactttaaatccattcatgttcaagaaccacaggagccttcattacaggatgccagcctgaagccaaaagtagaatgtagtgtggtgacagagttcactgaccacatttgtgtgactatggatgctgagctcatcatgtttcttcatgatttagtatcagcttatcttaaagaaaaagaaaaagccatctttccacctcggattttatctactcgaccaggacaaaaaagtccaattattatacatgacgacaattcctctgataaagatagagaagatagcatcacttatactactgtggactggagagattttatgtgcaatacatggcatctagaacctactcttagattaatttcttggactggaagaaagattgatccagtaggtgttgattatattcttcaaaaattgggctttcatcatgctaggactactattcctaaatggcttcaaagaggagtcatggatccactggacaaggttctgtcagttcttatcaaaaagctcggtactgcactacaggatgaaaaggaaaagaaaggcaaagacaaagaagaacactaaaaaagtaatttgatctgtgaacaaattatgattgtgtctgttttattacactggagtgtttttttagtataataatttgaaatataactttaaaataattctaaatttgtggctataattaaaagtttgtaagttaacctgttctagttccatcattctgtgtacagtgaagtattgcatgataatgtaaattttgtgaaaaactagattaaaatatataactgcttgttatggtttataattatataatgtgcaatacaattcctgcatctttaaaatgtctgcagaataactgtgaatttttttgttattggattggccgtaacttttagaaaaaaatcttgttgatgataatgtgattttggggaggtcattaattgctttttcttttttaaatgtagacttatataaatacctgtttgtatatagcttgagtaattgtgatatgattgtataccactaaaatattgttaactattataataaagtcacagtaatggtttaaaaaaaaaa

SEQ ID NO: 80225 - DNA, 1446 bp, Homo sapiens
  sig_peptide (73)...(208): this location contains the signal peptide sequence, MALYELFSHPVERSYRAGLCSKAALFLLLAAALTYIPPLLVAFRS, Run with SignalP
  misc_feature (1160)...(861): similar to gi1872200 in the genepept database release 114, Run with FASTXY 3.3t00, default parameters
ccgggtcgacgatttcgtcaggagaagccaaacttggtcccccggctcgcggagtgcctgcgagcggtgctcatggcgctctatgagctcttctctcacccggtcgagcgcagttaccgcgcggggctctgctccaaagccgcgctgttcctgctgctggccgctgcgctcacgtacatcccgccgctgctggtggccttccggagccacgggttttggctgaagcggagcagctacgaggagcagccgaccgtgcgcttccaacaccaggtgctgctcgtggccctgctcggacccgaaagcgacgggttcctcgcctggagcacgttccccgccttcaaccggcagcaaggggatcgcctgcgcgtcccgctcgtttcgtggaggagataatgcctgttgtgtacagcaagacagtgggtcattgtgtatgtacagaagtgatgtggattcctcccagactcattagtgaccagggctgctgggcctgtttgggtttcctagactagagaagaagacaggaaccaggatgggaagacggacatgttacattttaagctggagcttcccctgcagtccacggagcacgttctcggtgtgcagctcatcctgactttctcctatcgattacacaggatggcgaccctcgtgatgcagagcatggcgtttctccagtcctcctttcctgtcccgggatcccagttatacgtgaacggagacctgaggctgcagcagaagcagccgctgagctgtggtggcctagatgcccgatacaacgtaagagcgcttctcattgtccagctcctttgtttctctgtgttactgttcattaagttctttaaagaggggaatgaaaagtagaaatgtcaggccaggcgcagtggctcatgcctgtaatcccagcactttgggaggcggaggtgggtggatcacttgaggtcaggagtttgagaccagcctggccaacatggtgaaaccctgtctctactacaaaatacaaaaaaattagctgggcatggtgatgggcgcctgtaatcccagctacttgggaggctgaggcaggagaatcgcttgaacccaggaggcagaagttgcagtgagccaagatcatgccactgcactccagcctgggcaacagggtaggactccatccacacacacacacacacacaaaattgaaaagtgaagacattttaatggagatttaatagtgcttccagactaatgaactaatggagttttggctccactcatgagtgtatttgaaatgtaagtaaccagctacaaagaataatgtcacttcatttgattatgactaccaatcaagagaaggaggaatacatttctgaggagtgatacttaaaccatttgagcttaaatgagtacctgattttgcagccattaaaaatgtgttcattaactatgtggggaattattggaaaattt

SEQ ID NO: 80226 - DNA, 420 bp, Homo sapiens
  sig_peptide (278)...(413): this location contains the signal peptide sequence, MCLLICVLTLIVDLGFSYLRGRPTGSAPGHEGKETACTNDEIVDP, Run with SignalP
  misc_feature (158)...(340): similar to gi1943794 in the genepept database release 114, Run with FASTXY 3.3t00, default parameters
ttataaactccatagctgtccattggcatgggtgggaagtagcagaatttcagtcctggatggaagagttctctatggttggaaggagtaggaatggcagtgctctctgagtctctaaaaccaggcaggtttggcttcaaacaactgccaagcccaagcaaggggaacaaagccaccctcctgtgtaagctccattggccaagctctgctcctgccgcgccgtctgccctaacagaagcaaggggccaggaccctgagttttattgggccttgactaatgtgcctcctcatctgtgtcctcaccctcattgtggacttaggtttcagttatctcagaggcagacccacaggatctgctccaggccatgaaggtaaggaaacagcttgcacgaatgacgaaatcgtcgacccgagaagtcc

SEQ ID NO: 80227 - DNA, 1495 bp, Homo sapiens
  sig_peptide (423)...(558): this location contains the signal peptide sequence, MVTVAMACSGALTALCCLFVAMGVLRVPWHCPLLLVTEGLLDMLI, Run with SignalP
  misc_feature (1324)...(1055): similar to gi1872200 in the genepept database release 114, Run with FASTXY 3.3t00, default parameters
agtttggaaaaaccgcgccctgggaagccccggagccgccgcagccgcagaggaagggagaccccgggcgccgcagacccgaaagtgaacccccttcggagagatatctgccctcgacccccaggcctggacgagaggaggtggaatattaccagtcagaggcggaaggactcctggaatgccacaaatgcaaatacttgtgcactgggagagcctgctgccaaatgctggaggttctcctgaacttgctgatcctggcctgcagctctgtgtcttacagttccacagggggctacacgggcatcaccagcttggggggcatttactacaatcagttcggaggggcttacagtggctttgatggtgctgacggggagaaggcccagcaactggatgtccagttctaccagctaaagctgcccatggtcactgtggcaatggcctgtagtggagccctcacagccctctgctgcctcttcgttgccatgggtgtcctgcgggtcccgtggcattgtccactgttgctggtgaccgaaggcttgttggacatgctcatcgcgggggggtacatcccggccttgtacttctacttccactacctctctgctgcctatggctctcctgtgtgtaaagagaggcaggcgctgtaccaaagcaaaggctacagcggtttcggctgcagtttccacggagcagatataggagctggaatctttgctgccctgggcattgtggtctttgccctgggggcggtcctggccataaagggctaccgaaaagttaggaagctaaaagagaagccagcagaaatgtttgaattttaagggtttctaaaacgctctgacagatgcaagtggtggtggaaggtagtctgagccactgcctttcccaagaatcccttgttgtggaagtttccaatgctggaaaagcagcgagccagcgttggtgtggtgggcggagctcccagtcgcatggagcggtgttcatggatgcaacagaccctggcttctggagtcctctgtgagtgagggaccaatcaaaattatttttcaaaaagcaaaaaaatggccggcctcggcggctcacacctgtaaccccagcactttgggaggctgaggtgggtggatcacttgaggtcaggagctcgagaccagcttggccaacatggtgagcccccgtctctactaaaatacaaaaaaattagccgggcgtgggggcgggcgcctgtaatcccagctacttgggaggctgaggcaggagaatcgcttgaatctgggaggcggagattgcagtgagccgagatcccgccactgcactccagcccaggtgacagagcgagactccatctcaaaaaaaaaaaaagggggggcccgttaaaaagaaccaagtttataggccgggggggggaagaggaattttttttttttggggcccccaaaataaatttccgggccggggtttaaaaaacgcggggagggaaaaaccccgggcttcc

SEQ ID NO: 80228 - DNA, 999 bp, Homo sapiens
  sig_peptide (225)...(90): this location contains the signal peptide sequence, MTLRMLVPRLLLTRQLVWFFSAATERDPEMMNGIPRKLMSFPPSS, Run with SignalP
  misc_feature (89)...(258): similar to gi204117 in the genepept database release 114, Run with FASTXY 3.3t00, default parameters
atccactattccgtgtggtggaattcgcaagctataagctctgcaagtggtgaccccgacgtgatcgccttgaagttacgcttgaaggaggaaaactcatcaattttcggggaatcccgttcatcatctccggatccctctcagtggcagccgagaagaaccacaccagttgcctggtgaggagcagcctgggcaccaacatcctcagcgtcatggcggcctttgctgggacagccattctgctcatggattttggtgttaccaaccgggatgtggacaggggctatctggccgtgcttactatcttcactgtcctggagttcttcacagcggtcattgccatgcacttcgggtgccaagccatccatgcccaggccagtgcacctgtgatcttcctgccaaacgccttcagcgcagacttcaacatccccagcccggcagcctctgcgccccctgcctatgacaatgtggcatatgcccaaggagtcgtctgagtagcagatgtggcacctgcgggtggagtccagccttttccctctgggcccagcctctccccacccccaccttgttcatcaggggccagccccatcccagctgccctccctcaccacatctacacatactccggcatctgagtgaagtgtccccagggacatctctcccacactttccccagtgctttctttctaaaagacaccgggctgacgtcaggggtgtgtgtccttcagctccctgagccctgtcacccttccaggacacccaccttgtgcatctaagcatttctctgctcattggggaaatcctggcctcattggagactcaggttcgaggcctgccctgaccctcgggcctcgggaaggtcagagagcccggaatcctccagaatggaagagtcttgactctggctttccacaaaaaggggcccataacaagggcccaaggggctctcaacaaaggggggtaaggggcccgtgggcccaaaaagtcctcgctgggccc

SEQ ID NO: 80229 - DNA, 865 bp, Homo sapiens
  sig_peptide (120)...(255): this location contains the signal peptide sequence, MLTALPKSFVFKVVGEWWWLFICLVLAFADGKRHKYSYDANVFLQ, Run with SignalP
  misc_feature (72)...(209): similar to gi403068 in the genepept database release 114, Run with FASTXY 3.3t00, default parameters
agttaacaggtacacatgatacatatttcaaatggtttgaaagtgaatacaatgaaagcaagcaggaagacttgattggaagcaattttttcttggtttgtttcaagcagtattttttcatgttgactgcactgccaaaatcatttgtgttcaaggtggtgggtgaatggtggtggctttttatttgcttggttttggcttttgctgatggaaaaagacacaagtatagttatgatgcaaatgtttttcttcaagttaattatattacttggccagatagtttttcaccagtgccctcccttcccccaatcctgtgagctgtagccttctgtgcttttgtgttcttataagaacctcactggagctggcagtggtggtgtgtgctggtaatcccagctacacgggaggatcccttgagcccaggggttcttggctatccaggacaacatagcaagacactcttttctctaaaaataaaataaaaaagaccctcactggtaataagcaggtgtacttgtgactaaaaatatagaaaacacagtttaataaagaatctcacatagattacaaatagaatgaagaaatgatgtgttagaaacagttatatatgttaagggcgcataaaacacaccattgttacaacattttggctacaattgcagctttctcaatctgctggccttttttaaataagaaagctttttaaaaaaatgaaccaaacagctcagatttagcggaggacctgaaaattttaacctcccattctacaggcagcgtctggacctttttaaacatggcgacgctttaaattttctggaactgtttcgccccaaagctcccgagcctgccaacattacgagggaac

SEQ ID NO: 80230 - DNA, 630 bp, Homo sapiens
  sig_peptide (212)...(347): this location contains the signal peptide sequence, MDTPRSTVFSLWFGIHKAAGIFQVLVQLLLLLTPYPRYPSPSPLP, Run with SignalP
  misc_feature (26)...(204): similar to gi1872200 in the genepept database release 114, Run with FASTXY 3.3t00, default parameters
ttccagcgtggcggaattcctgaatagctgggattacaaggcgtgcaccaccacgcctggctaattttgtgtttttagtagagacggggtttctccatgttgaggctgggctcgaactcctgacctcaggtgatctgcccgccttggcctcccagagtgctgggattaccggcgtgagctaccgtgcccggccggaacattggtttttcccatggacactccaaggtcaactgttttctccttatggtttggcatccacaaagcagcaggaatcttccaagtactggttcaactactgcttttactaactccttacccacgttatccttccccgtctcctctccctccctactcatacccttgatatcacttactatgggacatttgcagctctcattcaaagccatcctttagataagacctgaacatgcttaaatttgtttcagaggatctgttgaggatctttccaccagggaatccagagactgatgtgggcaggagaaggaggacagtttgattcaaatctctaaagactacttgggaaattatccaggccaaagttgtcctcctcaagggggcaaatctcaactgaagagtgcgtaacatttatttgtattgcccacctgtatt

SEQ ID NO: 80231 - DNA, 916 bp, Homo sapiens
  sig_peptide (4)...(139): this location contains the signal peptide sequence, MFFNTLSFCFHSILSIISGWPSTWVKPASYLFLYKLAKNSFNIFK, Run with SignalP
  misc_feature (23)...(143): similar to gi3335323 in the genepept database release 114, Run with FASTXY 3.3t00, default parameters
accatgttcttcaataccctgtctttttgttttcattctatcctatctattatttctggctggccaagtacatgggttaagcctgcgtcttacctatttttgtacaaactagctaagaatagttttaatatttttaaatggttcaaaaaaataaaattcaaacacatgaaaattatttgaaattcctatttcagcacccataagtaaagttttactggaacatagcaatatttatgcatcatctaataaccattttcatgctttaccagcacagtggagtggtcgtgaccaaacccatatggtatgcaaagctttaaatattcaacagccttttgtacagaagacatttgtcaactcacactctaaaaattttccacatatagtcactgtgcatttaaaatgtgactagtttgagatcagctatattcaaagctgacttgagatcagctatatttcaaaaacaatataaagaaaagaatgcaaaaattctcattagtaagttccatattgactacattttgcaatattttggatatgagctaaataaaatattcaaattaatttcacctattttttaatttttaaaaatgtgattactaaataactgcaaattatatgggacatattatacatatttctatcgactagtccttttctaaatgagctattggccagctaagaggtgaccaggcaaatttggataaaaaagattgtcaataatgaatttgcttaactgtggaattgagttaaaatgtggggtcaattttgatacactaatgctttctaggtttcccaacttatttatattataggtttcaaacatgaaaggtccccgcccccctttaagagtacgggagtgccatattttttaaaaactctttggggttttaaaaaaaaaaaaaagggttgcgccccc

SEQ ID NO: 80232 - DNA, 581 bp, Homo sapiens
  misc_feature (1)...(581): n = a,t,c or g
  sig_peptide (500)...(365): this location contains the signal peptide sequence, MKTRAALLFLHSYVLSAQNSAWHSVNIKRMEEVLTKCLAFCGHLS, Run with SignalP
  misc_feature (23)...(276): similar to gi1872200 in the genepept database release 114, Run with FASTXY 3.3t00, default parameters
gagatggagttttgctcttgttgcccaggctggagtgcaatggcacaatctcgactcactgcaacctccgcctcctgggttcaagcgattctcctgcctcagcctcccgagtagctgggattacagccatgcactaccatgcccggctgattttttgtattttnagtagagacagggtttctccatgttggtcgggctggtctcgaactcctgatctcaggtgatccacccggcttggcctcccaaagtgctgggattacaggcgtgagccacttgaacccagcctggaggggggaggcatttttcagcctacccacacatagaaaggggaaaagccttccaggttcttgcttctttgagtccagctcagatggccacagaaagccaggcacttggtcagcacctcttccatccgtttaatgttcactgagtgccaggcactgttctgggcactgaggacataggagtgaagaaacaagagcgcagcccttgtcttcatggagctttacgggtacgtgctattaaagagcaacgcatgcaagtggaaaaataaagccagagaggaacggggtgctttttga

SEQ ID NO: 80233 - DNA, 379 bp, Homo sapiens
  sig_peptide (215)...(350): this location contains the signal peptide sequence, MHVLVLFARGLLLLGKMWLDHGLFEQSVNLSLNPSSAIYLSVIWA, Run with SignalP
  misc_feature (379)...(143): similar to gi5690422 in the genepept database release 114, Run with FASTXY 3.3t00, default parameters
gtggttttgtttaacaccatgctcagccgactcatgggatgggtttgtgaccatcaggcatttgttgttgatatgtgaggtcaccacagtaggggtgtttgtcaaccaaattaaacttcctcttaatgacctaaaataattgatttggaaggccgttaaatgggccagggcaatgtgtaagcaagccgaaatccggcattttctgcacaaattaatgcatgttcttgttctgtttgctcgtggattgcttttgttggggaaaatgtggctggaccatgggctttttgagcagtcagtgaacctgagcttgaatcccagctctgccatttatctatctgtaatttgggcaagtcgctgagcttctgtgggaggagccttg

SEQ ID NO: 80234 - DNA, 7559 bp, Homo sapiens
  sig_peptide (1981)...(2116): this location contains the signal peptide sequence, MSSGGILRQCLRLVCAVAVRNCLECQQHSQLKTRGDKALKPMHSL, Run with SignalP
  misc_feature (3)...(5763): similar to gi1580781 in the genepept database release 114, Run with FASTXY 3.3t00, default parameters
ttcagacaaatttaatcacaatgaccacatataatgtgctgtttgagattcttatagaacagattggtactcaggtgatacataaacagcatccagatcctgattcttcagtgaagatacaaaaccctcagatactaaaagtaattgcgaccctacttcgaaattctccccagtgcccagagagcatggaggttcgcagagcctttctttctgacatgattaaactttttaataacagtagagaaaacaggaggagcttgctacaatgctctgtgtggcaagaatggatgctttctctctgctattttaatcctaagaattcagatgagcaaaagataacagaaatggtatacgccatattcagaatcctgctttaccatgcagtcaaatatgagtggggtggctggcgtgtatgggtagacactttatcaatcactcattcaaaggtcacttttgaaatacacaaagaaaaccttgccaatatatttagggaacagcaaggaaaaagaaaatgaagaaatagggctgtgttcttcaacttcagttcaagcagcctctggcattagaagggatattaatgtttcagtaggatcccagcaaccagatacgaaggattctcctgtctgtcctcatttcaccacaaatcgcaatgaaaattcaagtatagagaagacaagttcactagaaccgccatcgaatactaaactacaaaccactaacaaaccggaccaagaaatgaaagctgagcaagaaaatcaggagttaccagatgaaggcactttggaagaaacactgacaaatgagacaaggaatgcagatgatttagaagtatcttctgacataatagaagctgtggctatttcctctaattcttttataacaactggcaaagattcaatgactgtcagtgaagtaactgcttctataagttctccttcagaagaggatgcctcagagatgccagaattcttggataaatctatagtagaggaagaggaagatgatgattatgtggaactgaaagtagaaggcagtcctactgaggaagctaatctacccacagagctccaagataacagtttgtctccagctgcatctgaagccggtgaaaaactggacatgtttggtaatgatgacaaattaatatttcaagaaggaaaacctgttactgaaaagcaaactgatactgaaactcaagattctaaagattctggaattcagactatgacagcatcagggtcttcagctatgtcaccagaaactactgtttcccaaatagctgtagaatcagaccttggtcagatgctggaggaagggaagaaagcaactaacctcactagagaaaccaaattaattaatgattgtcatggtagtgtctctgaggcttcttctgagcaaaagattgcgaagttggatgtttccaatgttgctacagatactgagaggctggagttgaaggccagtcccaacgtggaagcacctcaacctcatcgacatgtgcttgagatatcaaggcaacatgagcagccagggcaaggaatagcaccagatgcagttaatggacaaaggagggattccagatctactgtgtttcgtattcctgagttcaactggtctcagatgcatcaacgtttgctcactgatctattattttcaatagaaacagatatacagatgtggagaagccattcaacaaagacagttatggacttcgtgaatagcagtgataatgtcatctttgtacacaacacaattcatctcatctctcaagtgatggacaatatggtcatggcttgtgggggtatactgccattgctttcagctgctacatcggctacacatgagctggaaaatattgaacctactcaaggcctttcaatagaagcctctgtgacatttttgcagaggctaattagccttgtggatgtgcttatatttgcaagttctcttggctttactgaaattgaagctgaaaaaagtatgtcatctggaggaattttgcggcagtgtctccgactagtttgtgcagtcgcagtaaggaattgcttggagtgtcaacagcattcacaactgaaaactaggggagataaagccttgaaaccaatgcatagccttattcctttagggaaatctgcagcgaagagcccagtggacattgtgactggcggtatatctccagtaagagatcttgacaggcttctacaggacatggatattaatcggcttagggcagttgttttcagagacatagaggatagcaaacaagctcaatttttagccttggcagtagtatactttatctctgttcttatgggctccaagtacagagacattttggaaccccaaaatgaaaggcatagccagtcatgtacagaaactggcagtgaaaatgagaatgtatcactttctgaaatcacaccagcagcattcagcactttaactacggcatcagtggaagaatctgaaagcacatcatctgctcgaaggagggactcaagcattggggaagaaacagcccctggtttaagaaagcctgtggaaagtaactcctcacacagcacctcctggtggcagtgcaggccccgaggccatcaacgaggtgctatctactctttctttagaagtcaataagtctccggaaaccaaaaatgatagaggaaatgacttggacactaaggctacaccgtcagtttcagtttcaaaaaacgtcaatgtgaaagacattctccgaagcttggttaacataccagcagatggagtcacagtggatcctgcccttctgccaccagcctgccttggagcccttggtgatctatctgtggaacaacccgtgcagttcagatcttttgacagaagtgtcattgttgcagcaaaaaagtcagcagtctcaccttccacctttaatacaagcatacctaccaatgctgtcagtgtggtttcctcagtagattcagcccaagcctcagatatgggaggagaatcaccaggcagtagatcatctaatgcaaaattgccctcagttccaacagttgattcagtttcacaagatccggtttcaaatatgagtattacagagaggcttgaacacgctttggaaaaggcagctcctctccttcgtgagatttttgtggattttgcaccttttctttctcggacacttttgggtagccatggacaagaactgcttatagaaggaacaagtctggtttgcatgaagtcgagtagttcagttgtggaattggttatgctactgtgttctcaggagtggcaaaattctattcagaagaatgcaggccttgcttttatcgaacttgtcaatgaaggaaggttgcttagccagacaatgaaggatcatctagtaagagtagcaaatgaagctgaatttatcctgagcaggcagagagcagaagatattcacagacatgcggaatttgagtcactgtgtgcccagtattctgcagacaaacgagaagatgagaagatgtgtgatcatttgataagagcagcaaaatatcgtgaccacgtgacagcaactcaactaatccagaaaattatcaacattctcacagacaagcatggagcctggggaaattctgcagtgagtcgtcctcttgagttctggcgccttgactactgggaagatgacttgcggcgccggcgacgatttgtgcgtaaccctctaggatcgacacatcctgaagcgacactaaaaacagccgtggaacatgtgtgcatttttaaattgagagagaacagcaaagccacagatgaagatatccttgctaaaggaaaacagtccatcaggagtcaggctttaggaaatcagaactcagaaaacgagatcctcctggaaggcgatgatgatactctgtcatccgtggatgagaaagatttagagaatcttgccggtcctgttagcctgagcacaaccaactcaacttgtggccccctctgttgtagtaaagggcactctttctgtcacctcctccgaactctattttgaggtggatgaagaggatcctaacttcaaaaaaatcgaccccaagatcttggcatatacagaagggctgcatggaaaatggctgttcacagagatacgatcaatcttttctcgtcgttatcttttgcaaaatacagccctggagatctttatggcaaacagagttgctgtgatgttcaacttcccagaccctgcaacagtaaagaaagtggttaactttctacctcgtgttggcgttggaacaagttttggattgcctcaaaccagacgtatttcattagctagtccacgtcagctttttaaggcttctaatatgacccagcgatggcaacacagagagatatctaattttgagtacttgatgtttctcaacacgatagcaggacggagttataatgacttaaatcagtatccagtgtttccttgggtcatcactaattatgaatcagaagaactggatcttaccttgcccaccaacttcagagatttgtccaagccaataggagctctgaacccaaaaagagcagcattcttcgctgagcgttatgaatcatgggaagatgatcaagttccaaagtttcactatggtactcattactcaactgcaagttttgttcttgcatggctgctaagaatagaaccctttacaacttatttcctaaatttgcaaggaggcaaatttgatcatgcagatcgaactttttcatcaatttccagagcttggcgaaacagtcagcgtgatacctctgatattaaggagttgatccctgaattttattatctccctgagatgtttgtcaacttcaataattataatcttggagtgatggatgatgggacagtagtgtctgatgtcgaacttcctccttgggccaaaacctcagaagaatttgttcacataaacagattggccctggagagtgaatttgtttcctgccagcttcaccaatggattgatctcatttttggctataaacagcaaggaccagaagctgtccgagccctcaatgtgttctattacttgacctatgaaggagctgtcaatctgaattcaataactgatcctgtgttgagagaggctgttgaagctcaaatccgaagttttggacagactccttctcaactactcatagagccccatcctcccagaggttctgccatgcaagtgagtccattgatgttcacagacaaagcccagcaggatgttatcatggtcctcaagtttccctccaactcccctgttactcacgtggcagccaacacccagcctggtttggcaactcccgctgtgatcacagtcactgctaacaggttatttgcggtgaacaaatggcacaaccttcctgctcatcaaggtgctgtacaagaccagccataccagctgccagtggaaatcgatcctctcatagccagcaatacaggaatgcacaggaggcaaatcactgaccttttagaccaaagtattcaagtgcattcccagtgctttgtcatcacttcagacaaccgctatattctcgtctgtggcttctgggataaaagtttcagagtctattctacagacacaggaagattgatccaagtggtgtttggccattgggatgtcgtcacttgccttgctcgttctgagtcatatattgggggaaattgctacattctctcagggtcacgtgatgcaactcttttgctgtggtattggaatggaaaatgcagtgggattggagataacccaggcagtgagactgctgctcctcgggccattttgaccggccatgactatgaggtcacatgtgctgcggtgtgtgcggagctaggcctggtgttgagtggttcacaagaaggaccatgtctcatacattccatgaatggagacttgttgaggaccttggagggtcctgaaaactgcctgaaaccaaaactcattcaggcttcaagagagggtcattgtgtcatattctatgaaaacggcctcttctgtacattcagtgtgaatggaaaactccaggccacgatggaaacagatgataacataagagccatccagctgagccgagatgggcagtacctgctcacaggaggagacagaggagtggtcgtggtccggcaggtgtcggacctcaagcagctctttgcctatccaggatgtgacgctggaatccgggccatggcgctgtcttacgaccagaggtgcatcatttctggcatggcttcaggaagcattgtgctattttacaacgactttaaccggtggcatcatgaataccaaacccgctactgatggtgacagctgtacatcaactctgcccctaggatgagcagaagtacctggagcatcattctcttctaccacatctgaatgtaacttaaatttgctcaaagaagcaaaatattttttaaagttattaataattgctatttttgtagtctttgcttgacttttttgggggggattagcaaagcagaaaactggctgctgggttctgtagttttaaaaaatctatatttttagtcataatgagaagtctattttcaccaattatggaaacatacagtggagcaagtaaaccacttattccagctataatattatgaagaacatttcccatgcatctacaagcttgagaaataggattttcacagtggggaagtgggttacaatattggaataggaaaatttgatgctgtaatttgggtcctgtatttttccaaacaactgtgcttcttcagcactaatatttctgggatttaaatagtaatgtttaaattatggtaaatgtaatttaaaacatctcaattaagtctgtctatcaatattgttcttcaagcatgttttagacctagaaaagtatggtttgggggaggctattttattgtgtggttagcacaaggaatctaatttatagcaagtgtgaaatagttaccattttttcctgatctgtcatcttcatagcacaacaaaacgaaatgatggaaatgctcttgagctcacaacatttgtttttcttttaaagtaaatgcaagtaccaaagctcactactgcggtttgcctgtgcctggacaatgaggcggagccactgttgttggggcacccccttccctccccgggtttgcaaatagaggctaccgggtgctgtattcagcaacacctgttttactatttgttattaaactatcatctccaccttccttttgattagcaatttgtactaagaaacgaaacaatgttatttggtggtgtataattctacttttctagtagattactgtgtggaattctgtgaaaaatatttgagaaaaggcctgtattgcataaataaattctttgtatgttgtgaactttgatctctatttctcttgcaacagacttcaagtggtccctctttttttcctacacactcagctcttctctaaaagcaaggatttggaatgaacaattcagtttgacagaaaaagctgaataaaatggcatctgtaattgaattgttggaaatgcctgttttgctcctaaattttaaacatcatcattaataaaataatgattcacaaagaaagaaaaaaaaaa

SEQ ID NO: 80235 - DNA, 542 bp, Homo sapiens
  sig_peptide (74)...(209): this location contains the signal peptide sequence, MHNNYTALLGVWIYGFFVLMLLVLDLLYYSAMNYDICKVYLARWG, Run with SignalP
  misc_feature (28)...(542): similar to gi537433 in the genepept database release 114, Run with FASTXY 3.3t00, default parameters
aaaatactgctgcaacgagacggagttccaggcggtgatgcaggcgaacctcacggccagctccgagggttacatgcacaacaattacaccgccctgttgggagtgtggatctatggatttttcgtgttgatgctgctggttctggaccttttgtattactcggcaatgaactacgacatctgcaaggtctacctggcacggtggggcatccaaggacgatggatgaaacaggacccccggcggtgggggaaccccgctcgggcccctcggccgggtcagcgggccccacagccgcagcctcccccaggcccgctgccacaagccccacaggccgtgcacacattgcggggagatgctcacagcccaccgctgatgaccttccagagttcgtctgcctgggagggtgccagccaacagcaagaaattccagaaaatgaggagactgaaaagggagatgaccaaatatcttctttccttggcgtaacatcaaataccaaggaggcttctgtgattggaattcagaagacagttgatgtcctga

SEQ ID NO: 80236 - DNA, 1060 bp, Homo sapiens
  sig_peptide (421)...(556): this location contains the signal peptide sequence, MYVLTPVKFYIIKFLLAISCCFEIDSISSLNNVITSGWIFTPAQK, Run with SignalP
  misc_feature (1021)...(761): similar to gi1872200 in the genepept database release 114, Run with FASTXY 3.3t00, default parameters
ggtactgtgcggaggaactcacgccggctgagaatttagcctgttccattgaaaaagcatattcagtaataacttccttctataatgtaatgtactgaaagtaaaataaaatcttgttagctggtgggaatattcaaaagatagagaatattgtagggaatacgggtttttaaaaagattgagatctgtggttataatagttaacaccattagttacagaaaataatatttctagctgagtagtctaagataattaagtgatattatttgatatattctcatacagatctacaggtcttccccctaccttatttttacctttttttttaactcaccactatactaacaaggattcccttctttttaaaacaatgtatctacatttcttagaaacatttttaaatgcaacaaattttataaatgtatgtgttgactccagtgaaattttatattataaaatttttgttggcaataagttgttgttttgaaattgatagtatttcttcattaaataatgtaattaccagtggctggatctttacaccagctcaaaaagccatgaggtacctgatatgaccttgaagtataataaaaaggaaaaaagactgtaaaagtcataaggtacctgagcagttattgtgctggtaaaaatgtttcatgggacagtgaattctgaatttcagtttagggtaccagaaatatatctgttcctgttatggtagtaatgagggatcccctttcttaaacctgcaaaaaagtagaacattttggttgggcgtggtggctcacacctgtaatcccagcactttgggaagccgaggcaggcggatcacctggggtcaggagtttgagaccagcctggccaacatggtgaaaccccgtctctactaaaaatacaaaaatagccaggcatgttggtgcacacctgtattcccagctacttaggaggctgaagcaggagaatcgcttgaacccgggaggtagaagttgcagtgagccgaattgagccactgcactctagccctgggtgacagagcgagactctgtctcaaaaaaaaaa

SEQ ID NO: 80237 - DNA, 876 bp, Homo sapiens
  sig_peptide (263)...(398): this location contains the signal peptide sequence, MEAETPCTIFTFSPSLKYRFWLLLLFSMASSEPMPQYFLSCTLSE, Run with SignalP
  misc_feature (879)...(100): similar to gi392948 in the genepept database release 114, Run with FASTXY 3.3t00, default parameters
acatcatacgccagcttggacgaggggagagaggttgtgcccgaaggtggacactggggtatgctccctccaccacctcatcctccactgctatcctcagtacagctgcttctggtaagcgtgcaggccatggacgccaccctcgatctgggctgacatggtccacttctcaaatttgagctctcctgagtacatcatggagccatgctggttactcgctatgaggtagggcacaaacttctgaatggaccctttgtcctggatggaggccgagacaccctgcacaatattcaccttttccccctcgctgaagtatcgtttctggctgctgctgctcttctccatggcatctagcgagcccatgccccagtacttcttgagctgcaccctgtctgagaagaagtactcgccgctgggcctccgtggtggtggccagcagggagcccatcatcactgtggaggctccaagggccagggccttgaccacgtgccccacggtctggatgccacatcggctatgatggacacaccaaagtgctgagcgtacttggccaccttgtacacagcagtgccctggggctgaccgcaggccatcacttcctgggtgatgcagatagagctgcagcccataactacatgcagtccatccacaccagtgtcaatcaggttcttagcctgggctgctgtcaccacattcctcccaatcacctggaggtggaggaacttttgtttgatggaatgcaccatggtgatttgatacaccgagttcccttgggaggagtccaaaactatgacgttgatgcctacccaggtggaacaggtccaggcagaatttgtcatcctcatgggtggccacagctgccctgcacaacaagt

SEQ ID NO: 80238 - DNA, 2870 bp, Homo sapiens
  sig_peptide (1665)...(1530): this location contains the signal peptide sequence, MRLIRIWFSGKFFPAGLHSQSLPSISAAIGLLMLFTNLFTCSKCF, Run with SignalP
  misc_feature (1)...(1984): similar to gi3818572 in the genepept database release 114, Run with FASTXY 3.3t00, default parameters
cttcctcttctccacgcaggcttcaacaggagatttatggagaatagcagcataattgcttgctataatgaactgattcaaatagaacatggggaagttcgctcccagttcaaattacgggcctgtaattcagtgtttacagcattagatcactgtcatgaagccatagaaataacaagcgatgaccacgtgattcagtatgtcaacccagccttcgaaaggatgatgggctaccacaaaggtgagctcctgggaaaagaactcgctgatctgcccaaaagcgataagaaccgggcagaccttctcgacaccatcaatacatgcatcaagaagggaaaggagtggcagggggtttactatgccagacggaaatccggggacagcatccaacagcacgtgaagatcaccccagtgattggccaaggagggaaaattaggcattttgtctcgctcaagaaactgtgttgtaccactgacaataataagcagattcacaagattcatcgtgattcaggagataattctcagacagagcctcattcattcagatataagaacaggaggaaagagtccattgacgtgaaatcgatatcatctcgaggcagtgatgcaccaagcctgcagaatcgtcgctatccgtccatggcgaggatccactccatgaccatcgaggctcccatcacaaaggttataaatataatcaatgcagcccaagaaaacagcccagtcacagtagcggaagccttggacagagttctagagattttacggaccacagaactgtactcccctcagctgggtaccaaagatgaagatccccacaccagtgatcttgttggaggcctgatgactgacggcttgagaagactgtcaggaaacgagtatgtgtttactaagaatgtgcaccagagtcacagtcaccttgcaatgccaataaccatcaatgatgttcccccttgtatctctcaattacttgataatgaggagagttgggacttcaacatctttgaattggaagccattacgcataaaaggccattggtttatctgggcttaaaggtcttctctcggtttggagtatgtgagtttttaaactgttctgaaaccactcttcgggcctggttccaagtgatcgaagccaactaccactcttccaatgcctaccacaactccacccatgctgccgacgtcctgcacgccaccgctttctttcttggaaaggaaagagtaaagggaagcctcgatcagttggatgaggtggcagccctcattgctgccacagtccatgacgtggatcacccgggaaggaccaactctttcctcctgcaatgcaggcagtgagcttgctgtgctctacaatgacacctgctgttcctggagagtcaccacaccgccctggccttccagcctcacggtcaaggacaccaaaatgcaacattttcaagaatattgacaagggaaccattatcgaacgctgcgccaggctattattgacatggttttggcaacagagatgacaaaacactttgaacatgtgaataagtttgtgaacagcatcaacaagccaatggcagctgagattgaaggcagcgactgtgaatgcaaccctgctgggaagaacttccctgaaaaccaaatcctgatcaaacgcatgatgattaagtgtgctgacgtggccaacccatgccgccccttggacctgtgcattgaatgggctgggaggatctctgaggagtattttgcacagactgatgaagagaagagacagggactacctgtggtgatgccagtgtttgaccggaatacctgtagcatccccaagtctcagatctctttcattgactacttcataacagacatgtttgatgcttgggatgcctttgcacatctaccagccctgatgcaacatttggctgacaactacaaacactggaagacactagatgacctaaagtgcaaaagtttgaggcttccatctgacaggctaaagccaagccacagagggggcctcttgaccgacaaaggacactgtgaatcacagtagcgtaaacaagaggccttcctttctaatgacaatgacaggtattggtgaaggagctaatgtttaatatttgaccttgaatccattccaagtcccccaaatttccattccttagaaagttatgttcccatgaagaaaaatatatgttccttttgaatacttaaatgacagaacaaatacttgggcaaactccctttgctctgcctgtcatccctgtgtacccttgtcaatcccatgggggctggttcactgtaactagcaggccacagggaaggcaaagccttgggtgcctgtgagctcatctcccgggatgggtgactaagtaggcttaggctaggtgatcagctcatcctttaccataaaagtcatcattgctgtttagcttgactgttttcctcaagaacatcgatctggaagggattcataagggagcttatctgggcagatttatctaagaaaaaaaaaaaaacgacataaaataagtgaagcaactaggaccaaattacagataaactagttagcttcacagcctctatggctacatggttcttctggccgatggtatgacacctaagttagaacacagccttggctggtgggtgccctctctagactggtatcagcagcctgtgtaacccctttcctgtaaaaggggttcatcttaacaaagtcatccatgatgagggaaaaagtggcatttcatttttggggaatccatgagcttcctttatttctggctcacagaggcagccacgaggcactacaccaagtattatataaaagccattaaatttgaatgcccttggacaagcttttcttaaaaaaaaaa

SEQ ID NO: 80239 - DNA, 6798 bp, Homo sapiens
  sig_peptide (185)...(320): this location contains the signal peptide sequence, MPSVCLLLLLFLAVGGALGNRPFRAFVVTDTTLTHLAVHRVTGEV, Run with SignalP
  misc_feature (185)...(5830): similar to gi1200235 in the genepept database release 114, Run with FASTXY 3.3t00, default parameters
gtcatttaaaagtgtgtggtggctgcggcggcggctgcgcgcgtggggcccggggcgcggggcgaggccgtggggacgtgcgagcggggccgcggtggggctcgggggcgcgtccacgtggccagagggcggccacccggagccagcggagggacaggcctgtccccaggcgcggctgccggccatgccctctgtctgcctcctcctgctgctcttccttgccgtggggggggccctgggcaacaggcccttccgtgccttcgtggtgacagacaccacgcttacccacctggctgtgcaccgggtgactggggaggtgttcgtgggcgcagtgaaccgagtctttaagctggcccccaacctgactgagctgcgggcccatgtcacggggcccgtcgaggacaacgctcgctgctacccgccccccagcatgcgcgtgtgtgcccaccgcctggcccccgtggacaacatcaacaagctgctgctcatagactatgcggcccgccgcctggtggcctgcggcagcatctggcagggcatctgccagttcctgcgtctggacgacctcttcaagctgggtgagccgcaccaccgcaaggagcactacctgtccagcgtgcaggaggcaggcagcatggcgggcgtgctcattgccgggccaccgggccagggccaggccaagctcttcgtgggcacacccatcgatggcaagtccgagtacttccccacactgtccagccgtcggctcatggccaacgaggaggatgccgacatgttcggcttcgtgtaccaggatgagtttgtgtcatcacagctcaagatcccttcggacacgctgtccaagttcccggcctttgacatctactatgtgtacagcttccgcagcgagcagtttgtctactacctcacgctgcagctagacacacagctgacctcgcctgatgccgccggcgagcacttcttcacgtccaagatcgtgcggctctgtgtggacgaccccaaattctactcgtacgttgagttccccattggctgcgagcaagcgcggcgtggagtaccgcctggtgcaggatgcctacctgagccggcccggccgtgccctggcccaccagctgggcctggctgaggacgaggacgtgctgttcaccgtgtttgcccagggccagaagaaccgcgtgaagccaccaaaggagtcagcactgtgcctgttcacgctcagggccatcaaggagaagattaaggagcgcatccagtcctgctaccgtggtgagggcaagctctccctgccgtggctgctcaacaaggagctgggctgcatcaactcgcccctgcagatcgatgacgacttccgcgggcaggacttcaaccagcccctggggggcacagtcaccattgaggggacgcccctgttcgtggacaaggatgatggcctgaccgccgtggctgcctatgactatcggggccgcactgtggtattcgccggcacgcgaagtggccgcatccgcaagattctggtggacctctcaaaccccggtggccggcctgccctggcctacgagagcgtcgtggcccaggagggcagccccatcctgcgagacctgctcttcagcccggaccaccggcacatctatctcctgagtgagaagcaggtgagccagctcccggtggagacctgtgagcagtaccagagctgcgcagctgtgtctgggctccggggacccgcactgtggttggtgtgtgctgcgacagcatctgctgccgcgaaggggcctgtctgggcgcctctgccccacacggctttgctgaggagctgagcaagtgtgtccaggtgcgggtccggcccaacaatgtgtcagtgacgtcacctggggtgcagctgaccgtcaccctgcacaacgtgccagacctcagtgcgggcgtgagctgcgccttcgaggcggcggcggagaacgaggcggtcctgctgccctccggtgaactgctctgcccctcaccctccctccaggagctccgagctcttaccagggggcatggggccacccgcactgtgcggctgcagcttctctccaaggagacaggcgtgaggtttgccggtgctgactttgtcttctacaactgcagcgtcctccagtcgtgcatgtcctgtgttggcagcccttacccctgccactggtgtaagtaccgccacacgtgtaccagccgcccccacgagtgctccttccaggagggcagggtccacagccctgagggctgccctgagatcctgcccagtggggacctcctgatccccgttggggtcatgcagcctcttaccttgcgggctaagaacctacctcagccgcagtcgggccagaagaactatgagtgcgtggtgcgggtgcaggggcggcagcagcgggtgcctgccgtgcgcttcaacagcagcagtgtgcagtgccagaacgcctcgtactcctatgaaggtgatgagcatggtgacaccgagctggacttctccgtggtctgggatggagacttccccatagacaagcctcccagcttccgagccctcctgtacaagtgctgggcgcagcggcccagctgtggcctctgcctcaaggccgacccgcgcttcgagtgcggatggtgcgtggccgagcgccgctgctccctgcgacaccactgcgctgccgacacacctgcatcgtggatgcacgcgcgtcacggcagcagtcgctgcaccgaccccaagatcctcaagctgtcccccgagacgggcccgaggcagggcggcacgcggctcactatcacaggcgagaacctgggcctgcgattcgaagacgtgcgtctgggcgtgcgcgtgggcaaggtgctgtgcagccctgtggagagcgagtacatcagtgcggagcagatcgtctgtgagatcggggacgccagctccgtgcgtgcccatgacgccctggtggaggtgtgtgtgcgggactgctcaccacactaccgcgccctgtcacccaagcgcttcaccttcgtgacaccaaccttctaccgtgtgagcccctcccgtgggcctctgtcagggggcacacggcttaccatctcaggcagctctctggatgctggcagcagggtcacagtgactgtragggacagcgagtgccagtttgtaaggagagatgccaaggcgatcgtgtgcatctcacctctctccaccctgggccccagccaggcccccatcacacttgccattgaccgggctaacatctccagccccgggctcatctacacctacactcaggaccccaccgtcacccgccttgagcccacctggagcatcatcaatggaagcactgccatcactgtgagtgggacccacctgctgacggtccaggagccccgggtccgtgccaagtaccgcggcattgagaccaccaatacatgccaagtgatcaacgacactgccatgctgtgtaaggcccccggcatctttcttgggcggccccagcccaccagagctgggggagcaccctgatgagtttggcttcctgctggaccacgtgcaaacggcccgctccctcaaccgctcctcctttacctactaccctgatcccagctttgagccgctggggccctctggcgtgctggacgtcaaaccgggctcccacgtggtgctgaagggcaagaacctgattcccgcggcagccggcagctcccgcctcaactacactgtgctgataggaggccagccgtgttcgctcactgtctcggacacacaactcctgtgcgactcacccagccagactggccggcagcctgtcatggtgctggtgggtggcctggagttctggctgggcaccctgcacatctcggcagagcgggcgctgaccctaccggccatgatgggcattggcggcggggggtgggctcctgctgctggccatcacagccgtgctggtggcgtacaagcgcaagactcaggacgcggaccgtaccctcaagcgtctgcagctgcagatggacaacctggagtcccgtgtggccctggagtgcaaggaagcttttgcagagctgcagacggacatcaatgagctgactaaccacatggacgaggtgcagatccccttcctggactaccggacttacgccgtgcgcgtgctcttcccgggcatcgaggcccacccggtgctcaaggagctggatacgccacccaacgtggagaaggccctgcgcctcttcgggcagctgctgcacagccgcgcgttcgtgcttaccttcatccacacgctggaggcccagagcagcttctccatgcgcgaccgcggcaccgtggcctcgctcaccatggtggccctgcagagccggctcgactatgccacggggctgctcaagcaactgctggccgacctcatcgagaagaacctcgagaggaagaaccaccccaagctgctactgcgccggactgagtcggtggcagagaagatgctaactaactggttcaccttcctcttgtataagttcctcaaggagagcgctggggagccgctgttcatgctgtactgcgccatcaagcaccagatggagaagggccccattgacgccatcacgggtgaggcacgctactccctgagtgaggacaagctcattcggcacctgattgactacaagacactgaccctgaactgtgtgaaccctgagaatgaaaatgcacctgaggtgccggtgaaggggctggactgtgacagcatcacccaggccaaagataagctgctggacactgtgtacaagggcattccgtactcccagcgtcccaaagctgaggacatggacctggagtggcgccagggccgcatgactcgcatcatcctccaggatgaggatgtcaccaccaagatcgagtgtgactggaagaggctcaactcactggcccactaccaggtgacagacggttccttggtggcattggtgcccaaacaagtgtctgcctataacatggccaactccttcaccttcacccgctccctcagccgctacgagagcttgctccgcacggccagcagccctgatagcctccgctcacgggcacccatgattacgcctgaccaggagacaggcaccaaattgtggcacctggtgaaaaaccacgaccatgccgaccatcgcgagggggaccgtggcagcaagatggtctccgagatctacctgacacggctgctggccaccaagggcacactgcagaagttcgtggatgacctctttgagacagtgttcagcacagcccaccggggctcggccctgcccctggccatcaagtacatgttcgacttcctggatgagcaggcggaccagcgccagatcagcgaccccgatgtgcgccacacctggaagagcaactgcctgccgctgcgcttctgggtgaatgtgatcaagaacccgcagttcgtgttcgacatccacaagaacagcatcacggatgcctgcctgtcggtggtagcccagaccttcatggactcctgctctacatccgagcaccgcctggggaaggactcgccctccaacaaactgctctacgccaaggacatccccaactacaagagctgggtggagaggtattatcgagacattgcaaagatggcatccatcagcgaccaggacatggatgcctacctggtggagcagtcccgcctccacgccagcgacttcagcgtcctgagtgcgctcaacgagctgtatttctatgtcaccaagtaccgccaggagattctcacggctctggaccgagatgcctcttgtcggaagcataagttgcggcagaaactggaacagatcatcagcctcgtgtccagcgacagctaaggtggtggaatcggtgaggagggggcttctcagtcctgtgccgtcctcccatccaggggagtggctggctcaagcctgggtccccgggctgagccctggattgggtatcgtggggcaggtcaccctggccacgatgcccccggcacacccaggcccccttcattagtgccttgctttgggccctgcagggggaggggtgacagggcgagcccccaccccagcagcagcaatacccccaccctcctgccctgtgcccaggtgttgggacagtcccaccctccctgctatttatatccctctgcctatttattgaatcgaacttcgcctctgtctccatctgtaaatatgtgtccccccaccggatgtcgccaccctcactcacctgcctcttcttgagctgtcctgggccctgccacccgtctgggctcctttgtgtagcattatcagcctcggtctggcctctggcacctcacccttgccatggctgaccccacccattccaaggcggggtcacggtaccagcagcacttggggtgaggcctccaaagcttcctcagaattgtggctgtgccacgctggaccacagggtccccctcaagcatctcggggccctattctctctgagcacctggagggctggactcaggcttgtgccagggcctgacttgggcctgggggccctagaacactcctcctcctgagcctactgccaaacgtcctcagtgttgtctgcacctgctccgactccttcagccgccccattcagcgcccgctccgtccagtgcccgccctgtggggccaaggcggccgtgccttactactctgtgtcttctgcctcctctgaggaatctggccctgtctgacagtcccagaccccccgttctctcctctttagttgcatgagtttttctttgttcatggaatgttttttcctgattaaatgttggggaaatgccaaaaaaaaaa

SEQ ID NO: 80240 - DNA, 2659 bp, Homo sapiens
  sig_peptide (1964)...(2099): this location contains the signal peptide sequence, MFHRCGIMALVAAYLNFVSQMIAVPAFCQHVSKVIEIRTMEAPYF, Run with SignalP
  misc_feature (2)...(2661): similar to gi1469868 in the genepept database release 114, Run with FASTXY 3.3t00, default parameters
ggctggcggcggtagctgtcgcccgcttggttgcgtgaccgcggggtccgcgtccgctccctccacccttcgcccttcgcccttcgcctcgtcccggcctccgcggcccagcaacggccgtcatggtgccgtcggcgctccctgcgcggccccgctgagcctcggtgcggcggcgagcgcggtcgagatcgccatgcctacccgagtatgctgctgctgttccgctttgcgtcctcgctacaaacgcctggtggacaacatattccctgaagatccaaaagatggccttgtgaaaactgatatggagaaattgacattttatgcagtatctgctccagagaaactggatcgaattggttcttacctggcagaaaggttgagcagggatgttgtcagacatcgttctgggtatgttttgattgctatggaggcactggaccaacttctcatggcttgccattctcaaagcattaagccatttgtagaaagctttcttcatatggtggcaaagctgctggaatcgggggaaccaaagcttcaagttcttggaacaaattcttttgtcaaatttgcaaatattgaagaagacacaccatcctatcacagacgttatgacttttttgtgtctcgattcagtgccatgtgccattcctgtcatagtgatccagaaatacgaacagagatacgaattgctggaattagaggtattcaaggtgtggttcgcaaaacagtcaacgatgaacttcgggccaccatttgggaacctcagcatatggataagattgttccatccctcctgtttaacatgcaaaagatagaagaagttgacagtcgcataggccctccttcttctccttctgcaactgacaaagaagagaatcctgctgtgctggctgaaaactgtttcagagaactgctgggtcgagcaacttttgggaatatgaataatgctgttagaccagtttttgcgcatttagatcatcacaaactgtgggatcccaatgaatttgcagttcactgctttaaaattataatgtattccattcaggctcagtattctcaccatgtgatccaggagattctaggacaccttgatgctcgtaaaaaagatgctccccgggttcgagcaggtattattcaggttctgttagaggctgttgccattgctgctaaaggttccataggtccgacagtgctggaagtcttcaatacccttttgaaacatctgcgtctcagcgttgaattcgaagcaaatgatttacaggggggatctgtaggcagtgtcaacttaaatacaagttccaaagacaatgatgagaagattgtgcagaatgctatcatccaaacaataggattttttggaagtaacctaccagattatcagaggtcagaaatcatgatgttcattatggggaaagtacctgtctttggaacatctacccatactttggatatcagtcaactaggggatttgggaaccaggagaattcagataatgttgctgagatctttgcttatggtgacctctggatataaagcgaagacgattgttactgcactgccagggtctttcctggatcctttgttatcaccatctctcatggaggactacgaactgagacagttggtcttggaagtaatgcataatctcatggatcgtcatgacaatagggcaaagcttcgagggatcagaataataccggatgtagctgacctaaagataaaaagagaaaaaatttgcagacaagacacaagtttcatgaaaaagaatgggcaacagctgtatcggcacatatatttgggttgtaaagaggaagacaacgttcagaaaaactatgaactactttatacttctcttgctcttataactattgaactggctaatgaagaagtagttattgatctcattcgactggccattgctttacaggacagtgcaattatcaatgaggataatttgccaatgttccatcgttgtggaatcatggcactggttgcagcatacctcaactttgtaagtcagatgatagctgtccctgcattttgccagcatgttagcaaggttattgaaattcgaactatggaagccccttattttctaccagagcatatcttcagagataagtgcatgcttccaaaatctttagagaagcatgaaaaagatttgtactttctgaccaacaagattgcagagtcgctaggtgggaagtgggatatagtgttgagagattgtcagttccgtatgttaccacaagtaacagatgaagatcgactttctagaagaaaaagcattgtggacaccgtatccattcaggtggatattttatccaacaatgttccttctgatgatgtggttagtaacactgaagaaatcacttttgaagcattgaagaaagcaattgataccagtggaatggaagaacaggaaaaggaaaagaggcgtcttgtgatagagaaatttcagaaagcaccttttgaagaaatagcagcacagtgtgaatccaaagcaaatttgcttcatgatagacttgcccaaatattggaactcaccatacgtcctcctcccagtccatcaggaacactgaccattacttctgggcatgcccaataccaatctgtcccagtctatgagatgaagtttccagatctgtgtgtgtac

SEQ ID NO: 80241 - DNA, 1505 bp, Homo sapiens
  sig_peptide (598)...(733): this location contains the signal peptide sequence, MNLSLPFLCLFLLSFSFKLALQLRKVSLLSLRLWGQSICCLEKEG, Run with SignalP
  misc_feature (835)...(1093): similar to gi3002527 in the genepept database release 114, Run with FASTXY 3.3t00, default parameters
cctaaaagctggagacacagatgtccagagtgattggagaatgtcctgggggaatgaagttccttccacaaacacagctcagttcttagcaacaaactgtttgtttttctacttgctccatctgcagcctacgctgccctggcctcctgcagacagatagtggggttacctggcaaggcctggtgagagccagtgaacctaagctttgactgggtggcctcgtctttctggggaggagggaatgtacattcagggagtagccttttgcggaaaaattctctagggctacagacagtcatgtgtgacttctctctgctgtgaaaactcccagagtctctttagggattttccctaaggtgtaccaccaggcacacctcagtcttcttgacccagagcctgaaaactgttttcactgggttccaccagtcccagcaaaatcctctttgtatttattttgctaagttattggtggttttgcttacatctcatgattgatataataccaaagttctatagccttctcttgcagtatttggatttgcttgaaaccgggaaaactgttcccattaggcttgttaatgtcagagtgacactattatgaatctttctctccctttcctctgcctgtttcttctctctttctccttcaaacttgctctgcagctaaggaaggtgagtctactttccctgaggctttggggtcagagtatatgttgtttggagaaagagggcaatcaggactcttctgggacccagatgagttcttcactagcccttctgaaccccttgctccataattggtcttttatcctggctctgaatgaccctgcaggtcatcatggttttctttttttattggttttttttttttctgagacagagtctcactctgtcacccaggctggagtgcagtggcgcgatctcagctcactgcaacctctgcctcccggatttaagcgattcttctgcctcagcctcccgagtagctgggactacaggtgtgccaccacgcctggctgatttttgtatttttagtagagatggggtttcaccatactggctaggctggtctcgaattcctgacctcaggtgatccacccacctcggcttcccaaagtgctaggattataggcttgagctactgtgcccggcccatggtgtttttctttagggctcttcctacagccttgagaagtagataggcatcagagtatggtactataggaatcagaaaaattcaaaacaaatgtggattaagtgtttaggctctatgtggctcacgcagccagaatccttaagtctgtgtgtttctgtgtctcaagactgggctcacattctggctttgtccataacaatgctctgggatttcagggagttccctcatttgtaaaatgagggggtcagagcaggtgatatccatgtttcttccctttctgatattgttgtctgtggcatattctttgtatggcgaatttaataaattatattaatgtgtaaaaaaaaaa

SEQ ID NO: 80242 - DNA, 426 bp, Homo sapiens
  sig_peptide (91)...(226): this location contains the signal peptide sequence, MVGDVTGAQAYASTAKCLNIWALILGIFMTILLIIIPVLVAQAQR, Run with SignalP
  misc_feature (5)...(336): similar to gi1335108 in the genepept database release 114, Run with FASTXY 3.3t00, default parameters
tcgtctggtccctgttaacaccctcttatgaacacctgctgcctgggcttcatagcattcgcctactccgtgaagtctagggacaggaagatggttggcgacgtgaccggtgcccaggcctatgcctccaccgccaagtgcctgaacatctgggccctgattttgggcatcttcatgaccattctgctcatcatcatcccagtgttggtcgcccaggcccagcgatagatcaggaggcatcattgaggccaggagctctgtccgtgacctgtatcccacgtactctatcttccattcctcgccctgcccccataggccaggagctctgcccttgacctggattccacttactccaccttccattcctcggcctgtccccacagccgagttctgcataatccctttattcctacacgcttttctaag

SEQ ID NO: 80243 - DNA, 1020 bp, Homo sapiens
  sig_peptide (319)...(454): this location contains the signal peptide sequence, MSYISGSFMTGLLLLFYFPFQIFSVQCTLGSHADGLSGKGSMGRD, Run with SignalP
  misc_feature (241)...(292): similar to gi717058 in the genepept database release 114, Run with FASTXY 3.3t00, default parameters
cgcagatagatatacaaaagtgtcttcatgttccaagttttccaagaatatcttgagaagcttctcttgcatctcaagggcttttgcttctctctgctctatccagtgggaaagagtacgcagggcagcagcccgtgttggaatttgagggtcataagctgacaaaagaacctcttggagctgttctgtggttacgcttccagatttctgacttgtagtagtgctgggctcattgactccttgaggaatgattggagcatttgactgcaggcctgtctggggggctgtctcatggctctgctgttgttcaaggtggctatgagctacatcagtgggtctttcatgactggtttgttgctgctcttctattttcccttccagatcttttctgttcagtgtactttgggcagccatgctgacggcctcagtggcaaaggctccatgggtagagatggtgatgcggagatcaacagcgagttcttggatgaccggatcagggtatgtgttggataccttctccaacagaggcaacaactgcttcagaacagcaaaatcacttgacttcaactgaacagctcctcctagcatgacagccaccagccccatggacatgctcagcgtctgtgattccacggtgctctctgcctgatgggccaggcttgcacaggctctctgcaatgttgctgctacaaagtccaccacctgagtgacgtttgtgaatatctgctcagacattctctcgcacagaacagccatcagctgcaggacaagcagcttccgctcttggccttccacaagaagagtctgatgttgctctaattccaagaggctcttgctggagaagggctcagtttttaactctgtttcattttccgaggccacatgagtcaactctttcaaacagaagatgaagaagtctcctgccaaaccgcattcctggcagtgggacagcaagtccccgagatgctccacccggccctgctcagaggataccttctggtacagggcttcatcttcatc

SEQ ID NO: 80244 - DNA, 1576 bp, Homo sapiens
  sig_peptide (58)...(193): this location contains the signal peptide sequence, MISVSAMAIAFLTLGYFFKIKEIKSPEMAEDWNTFLLRFNDLDLC, Run with SignalP
  misc_feature (104)...(681): similar to gi3153821 in the genepept database release 114, Run with FASTXY 3.3t00, default parameters
ggcacgagggagaacctgaaggtgtacatcagcagtcggcctcccctggtggtcttcatgatcagcgtaagcgccatggccatagctttcctgaccctgggctacttcttcaaaatcaaggagattaaatccccagaaatggcagaggattggaatacttttctgctacggttcaatgatttggacttgtgtgtatcagagaatgaaaccctcaagcatctcacaaacgacaccacaactccggaaagtacaatgaccagcgggcaggcccgagcttccacccagtccccccaggccctggaggactcgggcccggtgaatatctcagtctcaatcaccctaaccctggacccactgaaacccttcggagggtattcccgcaacgtcacccatctgtactcaaccatcttagggcatcagattggactttcaggcagggaagcccacgaggagataaacatcaccttcaccctgcctacagcgtggagctcagatgactgcgccctccacggtcactgtgagcaggtggtattcacagcctgcatgaccctcacggccagccctggggtgttccccgtcactgtacagccaccgcactgtgttcctgacacgtacagcaacgccacgctctggtacaagatcttcacaactgccagagatgccaacacaaaatacgcccaagattacaatcctttctggtgttataagggggccattggaaaagtctatcatgctttaaatcccaagcttacagtgattgttccagatgatgaccgttcattaataaatttgcatctcatgcacaccagttacttcctctttgtgatggtgataacaatgttttgctatgctgttatcaagggcagacctagcaaattgcgtcagagcaatcctgaattttgtcccgagaaggtggctttggctgaagcctaattccacagctccttgttttttgagagagactgagagaaccataatccttgcctgctgaacccagcctgggcctggatgctctgtgaatacattatcttgcgatgttgggttattccagccaaagacatttcaagtgcctgtaactgatttgtacatatttataaaaatctattcagaaattggtccaataatgcacgtgctttgccctgggtacagccagagcccttcaaccccaccttggacttgaggacctacctgatgggacgtttccacgtgtctctagagaaggattcctggatctagctggtcacgacgatgttttcaccaaggtcacaggagcattgcgtcgctgatggggttgaagtttggtttggttcttgtttcagcccaatatgtagagaacatttgaaacagtctgcacctttgatacggtattgcatttccaaagccaccaatccattttgtggattttatgtgtctgtggcttaataatcatagtaacaacaataatacctttttctccattttgcttgcaggaaacataccttaagttttttttgttttgtttttgtttttttgtttatttgttttcctttatgaagaaaaaataaaatagtcacattttaatactaaaaaaaaaaaa

SEQ ID NO: 80245 - DNA, 427 bp, Homo sapiens
  sig_peptide (159)...(24): this location contains the signal peptide sequence, MVAASSRSEKYLEMVVWKAYTLVLTAFTLSSTLSWIATGSSFPSS, Run with SignalP
  misc_feature (1)...(185): similar to gi1008915 in the genepept database release 114, Run with FASTXY 3.3t00, default parameters
atccaacacgggatccccaagattgaagatggaaatgaggatccggtagcaatccaggacaaggtgctggagagggtgaatgccgtcaagaccaaagtgtaagctttccagacaaccatttccaagtacttctcagaacgtgacgatgctgcgaccatggcctccaaggagactgatgtactgagtggatagtccaccagccttttagctgggtgcgggaccaggaggtgcggaggaagaagtcctccttgtctcgtttgtgactttcccaatgtggacaatattaagctaaaagcattacctagaaaaactggtttgggcttcaacaaccttgaccctttgcatatgctcagcctttgggagcctatgtcttggtgctaacatgggggccattctcaagttaacctatttcctataagaggaaacc

SEQ ID NO: 80246 - DNA, 416 bp, Homo sapiens
  misc_feature (1)...(416): n = a,t,c or g
  sig_peptide (139)...(4): this location contains the signal peptide sequence, MLILTFLWPFSLNCLVGSSEEKEHVAPSLEAGALLXKVNSYSYFK, Run with SignalP
  misc_feature (53)...(172): similar to gi1335579 in the genepept database release 114, Run with FASTXY 3.3t00, default parameters
ggtgtcttgaagtatgagtaagagttcactttntgcagcagtgctccagcctccaatgagggtgccacatgctccttctcctcgctactccccaccaagcagttgagggaaaagggccagaggaaggtcaaaatcagcatgagtcttttcctgcactgatagctctttttcacacaggtcagtttccagtccttcaacctcaatggggtttttgactgggactattatctaggatgttactcaagccagctacccatcttgaggtttctgaatctcccaggatcaaagctagtcttggctgtaggaatcaactgaaagagatgtcctttacctaaaaactacatgtgaaaatcaattcctagttctatatttgaatctttgggtcacgaagtcttctgttgatcgtgatacagtcc

SEQ ID NO: 80247 - DNA, 385 bp, Homo sapiens
  sig_peptide (158)...(293): this location contains the signal peptide sequence, MKIVCILNVHVGMGMFLNLVIGGIFSFVIGPLAYDLCISIRSSSR, Run with SignalP
  misc_feature (369)...(284): similar to gi551927 in the genepept database release 114, Run with FASTXY 3.3t00, default parameters
ctggaggatacattttaaagggtaaattttggggaagatgaattgtatctcagcaaatgctgttacaaaataaatagttggtgggtgcatagattagcccagtctctatcatcgccgccatgatgctaaacgatatatgtgattggagagtttagtaatgaaaatcgtttgcattctaaatgtgcatgtagggatgggaatgtttttgaacctggttatcggaggtatctttagtttcgttattggtccactggcttacgacctctgtatctctataaggtcctcgtctaggaccgatattctctttaatgtcttttgatctatgtactgtcattgtggatgtaactttattttcttctgaatgattgttactctgctatttccc

SEQ ID NO: 80248 - DNA, 381 bp, Homo sapiens
  sig_peptide (208)...(343): this location contains the signal peptide sequence, MLCAPVQTNLIFHCFFLLTLISGLTGMPSFQSYFLAWECAFLCSQ, Run with SignalP
  misc_feature (27)...(183): similar to gi4650850 in the genepept database release 114, Run with FASTXY 3.3t00, default parameters
ctatctttgcccaaggttacctaaggagtgagcagtgcagcctgtgtttgcattcctgcttctgtgggtctcaagctgcgtgtttttccgtcgtgccctgagtttggcagccccaagttcactgctcattctgctagatccagggcctagaacctcttgatttattttccgagatctctacttctaggttaagttccttgagtagctatgctctgtgcaccggttcaaacaaatttgatttttcattgttttttcctattgactctcatctctggtctaacaggcatgccttcttttcaatcatatttcctggcctgggaatgtgctttcctctgttcccaattatcctgactctgccatacaattctaacaataaaatta

SEQ ID NO: 80249 - DNA, 390 bp, Homo sapiens
  sig_peptide (121)...(256): this location contains the signal peptide sequence, MAWDHLAGLRCFSVLQWLWNEQGSSGSYCYRKHNTGPYGCRSVQR, Run with SignalP
  misc_feature (83)...(194): similar to gi4756890 in the genepept database release 114, Run with FASTXY 3.3t00, default parameters
aggaacgagagaaagaagatctccaggttaaagaatacgcgattttttaaaagagacttttatcacattatgggtaatgaggggttgggcggcgctttaattccatgcagataatgctggatggcttgggaccacttggcaggccttcgctgcttttctgtgctgcaatggctatggaatgagcaaggctcctcagggagctattgctataggaagcacaatactggaccgtatggctgccgaagcgtacagagggttaacgcggataggaaaccttcacccgttcaccttcagctgtctgacatatctacctataggcattccgctgtggcttggatacctcttcccagaacataagcatatactagcacgtacacgccaggcacaggg

SEQ ID NO: 80250 - DNA, 361 bp, Homo sapiens
  sig_peptide (14)...(149): this location contains the signal peptide sequence, MQNANRGKDSESIVGFWLALALILHLFQPSSFLSWGKPKHNCHQA, Run with SignalP
  misc_feature (350)...(217): similar to gi765179 in the genepept database release 114, Run with FASTXY 3.3t00, default parameters
cccattttataacatgcagaatgccaacaggggaaaagattcagaatctatagtaggattttggcttgctttggcattgatattgcacctgtttcagccaagctctttcttgtcctggggaaaacctaagcataactgccaccaggccagcaatttctatattcttttgacttggagctggagagggaaaactacagtgatgtccagctcctgctttgggaggcgtggcttctgctgggttggagccattcttatttgacccagaatggagccaagcctgtatggcagcagagaacggtcagtggtatttggtatctgggggaacaacaggtctgaggatataagaaacccaccgaggagg

SEQ ID NO: 80251 - DNA, 342 bp, Homo sapiens
  sig_peptide (88)...(223): this location contains the signal peptide sequence, MQMVVPRLLSVPQLLNTAPLFLPWEKTVKTQYSGIIFKFKSRIET, Run with SignalP
  misc_feature (232)...(94): similar to gi1591362 in the genepept database release 114, Run with FASTXY 3.3t00, default parameters
tttccctgtatatagaaaacggatttaaagacaactgtttaagtacctctttaatatcaaaacactaaatttacaaattgcacatttatgcaaatggttgtaccaaggcttctctctgtaccccaattgctcaacacagctccactgttcttaccatgggagaaaaccgtaaaaactcagtattctggaataatctttaaattcaaaagtagaatagaaacagcagagaaaagtataggggataccaaagagagaattcagccaagtcaaatatagaatacactgtcttcctgcttttcctacctaaaccacattattgccctattcttaatccccccaaaa

SEQ ID NO: 80252 - DNA, 238 bp, Homo sapiens
  sig_peptide (2)...(137): this location contains the signal peptide sequence, MHAKRIFVFFFMQVVTSPTQHSASCFIHLTIYLRDLAMSVHNKHP, Run with SignalP
  misc_feature (36)...(175): similar to gi829125 in the genepept database release 114, Run with FASTXY 3.3t00, default parameters
tatgcatgccaaaagaatatttgttttcttttttatgcaagtggtgacatcccctacacagcattctgcatcatgtttcatccacttaacaatttatcttagagatcttgccatgtcagtacataataagcacccttattcttttcttaataccacatagaattccattgtgtagctgaatcataattaattagacaagttctctcctgaaggccatccaggttaccataatgagtaa

SEQ ID NO: 80253 - DNA, 279 bp, Homo sapiens
  sig_peptide (100)...(235): this location contains the signal peptide sequence, MFLRFINVVCINPSLLMLSSIPVYEQITVYLSIFLLVDSWTLSNL, Run with SignalP
  misc_feature (282)...(126): similar to gi1196431 in the genepept database release 114, Run with FASTXY 3.3t00, default parameters
tggttttgttcaccatttatctttctttttacagtttcaagtttcatatgaatggaatcatgcaatgcatgctcctgtataaggcttcttgcattcagcatgttcttgagattcattaatgttgtatgtatcaatccttctttgttgatgcttagtagtattccagtgtatgagcagatcacagtttatttatccattttccttttagtggactcctggacactttccaatctgaggctagtattaataaagctgctatgaatagtcttgtacaggtat

SEQ ID NO: 80254 - DNA, 380 bp, Homo sapiens
  sig_peptide (82)...(217): this location contains the signal peptide sequence, MAFLIQWLLLIIMTTCILEVYVEEGECCFSSDTISEKVCDCLLHT, Run with SignalP
  misc_feature (19)...(228): similar to gi387148 in the genepept database release 114, Run with FASTXY 3.3t00, default parameters
ggggaagtaaggtacaaatttgagaatgtatttaatgatacaaagagtaaatggatgatgtggtagctgatgtgtacccagatggcttttttaatacaatggttacttttaatcataatgacaacatgcatattggaagtatatgtggaagagggagagtgttgtttctcttcagacacaatatcagagaaagtttgtgactgcttattacatacacacgggtatacatgcgggttgttgctataccttggtagtgcttctcaagctgtgttaagggaccatatctgtccccacccccactcccttgtaaaatgcaatgagaatgatgtaggggaaaaaataaggtatgagcttgtattttgccctagtcgacgcggccg

SEQ ID NO: 80255 - DNA, 324 bp, Homo sapiens; identical to SEQ ID NO: 24819
  sig_peptide (95)...(230): this location contains the signal peptide sequence, MFYLGLLKRLVILIPPYFQASTLLPVTKKAHFKYILSLKITVGAI, Run with SignalP
  misc_feature (2)...(140): similar to gi606881 in the genepept database release 114, Run with FASTXY 3.3t00, default parameters

SEQ ID NO: 80256 - DNA, 592 bp, Homo sapiens
  misc_feature (1)...(592): n = a,t,c or g
  sig_peptide (38)...(173): this location contains the signal peptide sequence, MAGFCVAHLFLPLSFPAFSLLGSHHPTPQIAFSLSTEGRVGLRCS, Run with SignalP
  misc_feature (50)...(321): similar to gi3211803 in the genepept database release 114, Run with FASTXY 3.3t00, default parameters
ctcaaaggaatctcattattgcatccctgtttgtcagatggcaggcttctgtgtagcccacctatttctgcctctgtcatttcctgctttcagccttctaggaagtcaccatcccactcctcagatagctttctctttgtcaactgaaggcagggttggcctcagatgttccctggctgagtttagaggcatgggccctaggctgtgtgtttttgctcaggctccagctgtaggccagatcttttatataacaagtctgggcttcttgccacagcaagacagaggtcagcgatgagcctccgtgggtctggcaaggccaagccatgcagctttcctctttccctgggatgggctccagccctcgaggaactcttagcaacctgtcaatattgtggccgcagtcaggaggtggagaatgctgatcaacctaggcatccaaaccaaaatatgcactctacccatctttcattcctgggcttctgggaatttgctgcttctaggttttgggctccattcaaattcctgcttaagcccccgggcctggtccaagctaccctcttcaacactggtattacactgtncgacgcggccg

SEQ ID NO: 80257 - DNA, 363 bp, Homo sapiens
  sig_peptide (61)...(196): this location contains the signal peptide sequence, MFFCLTRQSLLCTLLLMLKRCIFFSYCVICRAKSFELFTSEITFP, Run with SignalP
  misc_feature (307)...(142): similar to gi3193069 in the genepept database release 114, Run with FASTXY 3.3t00, default parameters
gttaatttctgattctgtgaaggccagatcatacagctggaaatgattgaaaagaaaagcatgttcttttgtttaacaagacaaagcctattgtgtactctgcttctgatgcttaaaagatgtatttttttttcttactgcgtaatatgtagggctaaaagttttgaactcttcacttcagaaattacttttccagacaaaagagcaaaacaatgtttgtttaaattgttctctggaacatgactgatagtgtttacaacatttctatgacattttgatcctgtggggagtacttggagaggtatttaaagtgcttttcactaaatcagatgctttgtagtgtttgaaccttttttaaaaaaa

SEQ ID NO: 80258 - DNA, 881 bp, Homo sapiens
  misc_feature (1)...(881): n = a,t,c or g
  sig_peptide (159)...(294): this location contains the signal peptide sequence, MCPLLVYKIILVFAAMFFFSQGSQVEIRSHEGEHCVGTVHLLSHF, Run with SignalP
  misc_feature (42)...(155): similar to gi1698686 in the genepept database release 114, Run with FASTXY 3.3t00, default parameters
atgaagctgtgtgaaccaaatcctctttaggattagagaagggtacatttccttatgggaaggtgagagactgaggagccctcattctcccttactgtgactgcattgtggagcaaacctcagttcaggtacctgcttaggccctatataatttcttgatgtgcccattgctggtatacaagatcatacttgtttttgctgccatgtttttcttctcacagggaagccaagttgagatcagatcccatgagggtgaacactgtgtgggaacagtacatcttcttagtcattttctgtattctaaaaataacccagtattctataagggaaataccagttttatatttgaaacaatggaggaggattcactttcttctttggctgagcgcagtggctcgtgtatgtaatcccagcccttttggaggctgaggcaggaggggtgcttgagtccaggagtttgagaccagcctggcaacataaggagactgttgctatggattaccaaaaaaaaaaggtaaaaattaaaaactttaaaaaaagatttacttttcttcccttaagncccctataaaggatcctagcaggattgatgaaaatggataacaaatttaaaaaattggcccaattaggcctttgaaattatttttggaaagaagaaaatgtccggcgccggccggcgaatttccagaaactatggaattggtaaggtacttggaaaaacccccggcaaggtccaccttacaacttgggccatcgggggcaccaaaattaaaatttcttttcaatttaaaccatgcggggttgccctttccttttaatgcaacctaatacctccccctaaaaggtcaaaatctttgggccaagggaaaccctcttggata

SEQ ID NO: 80259 - DNA, 1694 bp, Homo sapiens
  sig_peptide (222)...(357): this location contains the signal peptide sequence, MAGPRPRWRDQLLFMSIIVLVIVVICLMLYALLWEAGNLTDLPNL, Run with SignalP
  misc_feature (332)...(700): similar to gi1814029 in the genepept database release 114, Run with FASTXY 3.3t00, default parameters
cggtatgcgtccgaattcccgggtcgacgatttcgtggcaccagctcaggactgcatctgcctgccatttcccttccactcctcctttctggagtctgacattagaaagccagcgagaaggaagattcaaacaaccaaccctgatttcctgcttctccttttcatgagtgttcctgtggtctctgcacctcctttctgtcccccggcagagggcagtagagatggccggcccaaggcctcggtggcgcgaccagctgctgttcatgagcatcatagtcctcgtgattgtggtcatctgcctgatgttatacgctcttctctgggaggctggcaacctcactgacctgcccaacctgagaatcggcttctataacttctgcctgtggaatgaggacaccagcaccctacagtgtcaccagttccctgagctggaagccctgggggtgcctcgggttggcctgggcctggccaggcttggcgtgtacgggtccctggtcctcaccctctttgccccccagcctctcctcctagcccagtgcaacagtgatgagagagcgtggcggctggcagtgggcttcctggctgtgtcctctgtgctgctggcaggcggcctgggcctcttcctctcctatgtgtggaagtgggtcaggctctccctcccggggcctgggtttctagctctgggcagcgcccaggccttactcatcctcttgcttatagccatggctgtgttccctctgagggctgagagggctgagagcaagcttgagagctgctaaaggcttacgtgattgcaagggttcagttccaaccatggtcagaggtggcacatctgctcagccatctcattttacagctaacgctgatctccagctccagcgatggaacccactacagaggaggtggggcccctgtgtcaaagaggccgaggggcagcaagggcagccagggcacctgtgacttcttagtacaagattgtctgtccttcaggacttccaaggctcccaaagactccctaaaccatgcagctcattgtcacaccaattcctgctttaattaatggatctgagcaaatcttcctctagcttcaggagggtggggagggagtgattgctgtcatggggccagacttccaggctgatttgccaaatgccaaaatgaaacctagcaaagaacttacggcaacaaacgaggacattaaaagagcgagcacctcagtgtctctggggacatggttaaggagcttccactcagcccaccatagtgagtgggccgccataagccatcactggaactccaaccccagaggtccaggagtgatctctgagtgactcaacaaagacaggacacatggggtacaaagacaaggcttgactgcttcaaagcttccctggacctgaagccagacagggcagaggcgtccgctgacaaatcactcccatgatgagaccctggaggactccaaatcctcgctgtgaacaggactggacggttgcgcacaaacaaacgctgccaccctccacttcccaacccagaacttggaaagacattagcacaacttacgcattggggaattgtgtgtattttctagcacttgtgtattggaaaacctgtatggcagtgatttattcatatattcctgtccaaagccacactgaaaacagaggcagagacatgtaaaaaaaaaaaaaagg

SEQ ID NO: 80260 - DNA, 590 bp, Homo sapiens
  sig_peptide (280)...(415): this location contains the signal peptide sequence, MKTLLILHGVPHAGLASVFLRYSRLLYRLAVVARTCKLSTLGGLG, Run with SignalP
  misc_feature (593)...(369): similar to gi5902972 in the genepept database release 114, Run with FASTXY 3.3t00, default parameters
ggcacgagcccacaacaggtcattgtaaaaaataagtcattcatttagttaagcagtaactcaaagttttcaaaaactaaaagccaaaacctttcactctttgagacttgctttcccaaacaataagagctaataaagacagcatgaagccaatcaaatctttctcagatattatagacaaatctaataaattttaatcatcttgaccataagatacaacttttgtaaaccttttcataatctttcataatttttttaataagaatgggttaatgatccatgaaaacattgttaatcttacatggggtcccacatgctggtcttgcatcagtgttccttagatattcacgtttactttataggctggctgtggtggctcgcacctgtaaactcagcactttgggcggtctaggcaggcagactgcttgagctcaggagtttgagaccagcctgggcaacatggcgaaacacggtgtctacaaaaaatacaaaaattagccatgcgtgttggtgcacatctgtggtcccagcttcttagggggctgaggtggtaggatcacttgagcctgggaggtggaggttgcagtgag

SEQ ID NO: 80261 - DNA, 2203 bp, Homo sapiens
  sig_peptide (2021)...(2156): this location contains the signal peptide sequence, MFNLKEIPLILYVLLSVVCFSFSYGVEPPKSWSQGKKGVVTGDSL, Run with SignalP
  misc_feature (1959)...(1646): similar to gi1872200 in the genepept database release 114, Run with FASTXY 3.3t00, default parameters
cccacgcgtccggtgaccgtgacgtagaaggtggagaccgcttcaccctgatcagggagtatcggctgcgggtgcgcaaggcgtccaggagtgacctggggctgtggagagcgacccgtggccttgtgtttcagagtttaccacctaggatgacttcagtgactagatcagagatcatagatgaaaaaggaccagtgatgtctaagactcatgatcatcaattggaatcaagtctcagtcctgtggaagtgtttgctaaaacatctgcctccctggagatgaatcaaggcgtttcagaggaaagaattcaccttggctctagccctaaaaaagggggaaattgtgatctcagccaccaggaaagacttcagtcgaagtcccttcatttgtctcctcaagaacaatctgccagttatcaagacaggaggcaatcctggcggcgagcaagtatgaaagaaacgaaccggcggaagtcgctgcatcccattcaccagggcatcacagagctcagccggtctatcagtgtcgatttagcagaaagcaaacggcttggctgtctcctgctttccagtttccagttctctattcagaaacttgaacctttcctaagggacactaagggcttcagtcttgaaagttttagagccaaagcatcttctctttctgaagaattgaaacattttgcagacggactggaaactgatggaactctacaaaaatgttttgaagattcaaatggaaaagcatcagatttttctttggaagcatctgtggctgagatgaaggaatacataacaaagttttctttagaacgtcagacttgggatcagctcttgcttcactaccagcaggaggctaaagagatattgtccagaggatcaactgaggccaaaattactgaggtcaaagtggaacctatgacatatcttgggtcttctcagaatgaagttcttaatacaaaacctgactaccagaaaatattacagaaccagagcaaagtctttgactgtatggagttggtgatggatgaactgcaaggatcagtgaaacagctgcaggcctttatggatgaaagtacccagtgcttccagaaggtgtcagtacagctcggaaagagaagcatgcaacaattagatccctcaccagctcgaaaactgttgaagcttcagctacagaacccacctgccatacatggatctggatctggatcttgtcagtgactttatgagagtttctgccacaaggtgcccaagaggagaggaatgggaagagtgccccagcacgtggtgactgcgtgatttctgctcgttgcctttgaagataactggcaggactgactgtagaacactttgacttttttcaaaaagtgatggaatttgtacatccaaatgaatattgtatagacaattttcccaggaatgtgcaaaatgcttgaaagttcaaacttcttttttgaaatgatcttcagatccagtggcccattcttttatctttatcctgtgaaggtgtttttcaggttttgaaacaatccaaaaatcatttaggaccaagtctaaggaaacattttagtggccaagttggattccgattgtaaaggaatgatactaattttctagcatggctctgaaggtgattttaggtagaagagttttgaggctgggcgcaatggctcacgcctgtaatcctagcattttgggtgactgaggcgggtggattgcttgagcccagaagttgaagaccagcctgagaaataaggtgaaaccctgtctacaaaaaatacaaaaagttagctgggtgtggtggcgtgtgcctgtagtgctagctactcagaaggctgaggtgggaggattgcttgagcccaggaggttgaggctgcagtgagttctaattgcgccactgcactccagcctgagcgacagagtgagacactgtcttaaaaaaaattaaaaattgtaaaaaaatgaaaaaaaaagttttgagcattatttgcatcattgggatacatatgtcacttcacaagatgttcaatttgaaggaaataccactcattctctatgtcctgttgtctgtagtgtgcttcagtttttcatatggggttgagcctcctaaatcgtggagtcagggcaagaaaggagtagtgactggtgattcattgttgtagtggttgggaatctgtattgtagagttggggataattaaaagc

SEQ ID NO: 80262 - DNA, 396 bp, Homo sapiens
  sig_peptide (189)...(324): this location contains the signal peptide sequence, MTLPCAIQMFIAAVQVLSVTYLDLQPHLNESLLTVSLIFRFIFNL, Run with SignalP
  misc_feature (10)...(133): similar to gi736716 in the genepept database release 114, Run with FASTXY 3.3t00, default parameters
ggcacgagctcctggacctgccccctgagctgctagacgccccctttgtgcgcctgcaggggaaccccctgggtgaggcctcggctgacgccccgagttcaccattggcagccctcattccagaaatgcccaaactgttcctgacctcacatttggacagtcttgctgtgacccccttaggctgatgcatgaccctgccctgtgctatccaaatgttcatagcagctgttcaggttcttagtgtcacttacctagatttacagcctcacttgaatgagtcactactcacagtctctttaatcttcagatttatctttaatctcctcttttatcttggactgacatttagcgtaactaagtgaaaaggtcatagctgagattcctggttcgggtgtt

SEQ ID NO: 80263 - DNA, 399 bp, Homo sapiens
  sig_peptide (243)...(378): this location contains the signal peptide sequence, MEEPTPEPVYVDVDKGLTLACFVFLCLFLVVMIIRCAKVIMDPYS, Run with SignalP
  misc_feature (6)...(156): similar to gi3043521 in the genepept database release 114, Run with FASTXY 3.3t00, default parameters
ggcacgaggggacgggcctcgccagtcacactccagcgcccccacgagccagcacagtgcctgctctcagtgaaaggccactgttctccttgggtgacccccatgatgcctgaccgctcctcgtgcctcctggaacagccagggtccttatgaagtggtgaccactccagtcagcaggggtggaaaatggtaccagtcaaacccgaggcggaggaggagcagcccgcagtcgctgccgcgagatggaggagcccacgcccgagcccgtctatgtcgacgtagacaaagggctgaccttggcctgcttcgtcttcctctgcctcttccttgtcgtgatgatcatccgctgtgccaaggtcatcatggacccttacagcgccatccccacatccacctggg

SEQ ID NO: 80264 - DNA, 917 bp, Homo sapiens
  sig_peptide (331)...(466): this location contains the signal peptide sequence, MRRQMSISTFMAFSWILVSSSDRLLLMSPLKTTSSAFNCSTFSAS, Run with SignalP
  misc_feature (8)...(688): similar to gi2429362 in the genepept database release 114, Run with FASTXY 3.3t00, default parameters
agcagcagggtctcctcagtctcctcccaagtcaggctgtcacagtcgtcctcaaaatcatactccctcagctggttgagcatgcgctgcatctcctcgttgatgctgagggctgtgctctcctcctcatccccatcgggctggcggggcccctcactctccgacagggaggtgtcctcctcgacggcagccttgcgctcccgcttccgcccccccatggatgggaccttaatgggagacaagtgcagagacagcttcttctggaacatctggatcatgtcctcgcagttgcgctgctgagccacatcgcagagcttggcggtgatgtcgatgcggcggcagatgtccatatccaccttcatggctttctcctggatcttggtgtccagctccgacaggttgttactcatgagccccttgaagaccaccagctcagccttcaactgttccaccttcagtgccagctcctcctggcaggcatcagcctcctgggcttcctcctggagctcatttacacggtcttgcagctggatccgcaccgtgtactcctcttcccacctgacagacatgggaagggcggagagagcttaggtacagagtccttccctgcccccatggctccctgtccccacctctctggctcaggcctcagaccccagttctggttccctggatggggaggagcagggcacaggaatgcctggccagccagctggtgaccaactgcagctgtcacgcggctctgtgcttcctgatgggcgtcgagctcgccagctgccttcccggaacctccgggctgtgcccaggagctctgtttgggcaagtgctgaggctccggtcctccgtgataaccatccatgatcaggccccagctcagccagctgtccggctggccaggaaattgtcgagcaagtaag

SEQ ID NO: 80265 - DNA, 339 bp, Homo sapiens
  sig_peptide (185)...(320): this location contains the signal peptide sequence, MCNTRRFATQILLLVKTSTSPSCGSMNRKSSPSRLAWTSDSDLSQ, Run with SignalP
  misc_feature (52)...(151): similar to gi895615 in the genepept database release 114, Run with FASTXY 3.3t00, default parameters
aatcaatgtttggattgagtccatggggcagattgaaaggtaggccactagtgcaaatactgtgggttctttttctagaaaagaagggttagttgagaagatattttatgcagcagactgtcatatatttaaaaatcatttcaaggtataaaatcataaaaaataaatttgggatcagtggttaatgtgtaacacacggagatttgccacccagatcctcctattagttaagacttctacaagtcccagctgtgggagtatgaacaggaagtcatctccttcaaggttggcctggacttcagatagtgacctgtcccagggtcccacttttgctcagcg

SEQ ID NO: 80266 - DNA, 351 bp, Homo sapiens
  misc_feature (1)...(351): n = a,t,c or g
  sig_peptide (204)...(339): this location contains the signal peptide sequence, MIALYIFTSIWFTCILIYNDCSDEAFSNRQNSFTHTLQPLCTPTS, Run with SignalP
  misc_feature (3)...(75): similar to gi578701 in the genepept database release 114, Run with FASTXY 3.3t00, default parameters
catatatgccctagatgcccaagagccatactataaccaacgatgaattaaatgccatgctactgaaatatgcctatactggtcatgttttagaaaatactctgaactccaacagccactacatcatctgataactaaacactcactctgatccaagcaaactgaaacttgaataattttttaaagctaggcattattaaagaatgattgccctctatatattcacatctatatggtttacatgtatattaatatataatgattgctcagacgaagcctttagcaatagacagaactctttcacccacacgcttcaacctctttgcactcccacgtctctggtgagtactn

SEQ ID NO: 80267 - DNA, 357 bp, Homo sapiens
  sig_peptide (55)...(190): this location contains the signal peptide sequence, MCVFFPSFFPLPFSSSSSFYITTLTSSSSSTPLPKINKPVTPKVP, Run with SignalP
  misc_feature (13)...(232): similar to gi975227 in the genepept database release 114, Run with FASTXY 3.3t00, default parameters
ggcacgagggcaatgcaggcttctagaaggtgatgtgagatctctgagcagaccatgtgtgtgttcttcccatccttttttcccctccctttctcttcctcctcctctttctatatcaccaccctcaccagcagcagcagcagcactcccctccctaaaataaataaaccagtcactccaaaggttccaagcacattagtcacatatcccagaagtttaatacagaattattttgacagcgagaacaagaagtgttttctagttgaacgcacagaacttgcttattccaactgggctttctgccgcacagacagatgatacgttttttagatggattggccgcacagcgcaggagac

SEQ ID NO: 80268 - DNA, 368 bp, Homo sapiens
  sig_peptide (67)...(202): this location contains the signal peptide sequence, MIWVLLAVPLVLNCWFQLTVVDLWHDSCKFNSSGSGQEYSTGPIL, Run with SignalP
  misc_feature (371)...(27): similar to gi1196424 in the genepept database release 114, Run with FASTXY 3.3t00, default parameters
ggcacgaggagcagggctgtcgtcctcagcagcagcttggtctcatctcaggatcggctgagttggatgatctgggtcttgctggctgttccacttgtcctgaactgctggtttcagctgactgtggtggacctatggcatgattcctgcaaatttaacagcagtgggagtggacaagaatacagtacagggcccatcctatatgagtcctagagaagttggattctactttttaacctaaacagagtctccatgttgaaaggggtgtacttgatctgtcagacttataggcattctttcttgtattcagttatggacttcttgcatggctgttcttaaagcctgcatttgcttgcttaaagttaatt

SEQ ID NO: 80269 - DNA, 2172 bp, Homo sapiens
  sig_peptide (1167)...(1032): this location contains the signal peptide sequence, MVRWKREIHELLWPLWFCSWPRVFEKQRSMTDFTCSAFSAFCLFC, Run with SignalP
  misc_feature (2140)...(1945): similar to gi4156106 in the genepept database release 114, Run with FASTXY 3.3t00, default parameters
ttttttttttataagtcaaagcattgtttatttatgacatatttacatatttacaaaactgattttactcaatacatcatcctgcgtaatatcataaaatgaacaccatatcctgggaataaaaatccatatttcttaataatttatgtatagcccaacttttagaacatagaatattatcaatttggcttcccaaactacaaagtcctgtttataattttttctagccaaggaacagagtagattcaacagcatattaaagtaatttagttaaccctgagtaattactaacttgcataattttgaatggatgtatataacacactttcatctgcacttagatacttatactatcacactacctttttgtatttatccacctcaattttcaacttcattaatcttcagaagaaagaggaataaagaataggaaagtaataacagaatcattacgaggaaattactagcactgcctaaacattcagaagtctgtgacacagtttaggtctagggttgtctcaaaaacctaacaaaaggaggatcccgaattgaataatctgagcaccttgtcaactgaggttgatattaaattatttttcctgcattctttgtttcctttcacactaattaaatattgtgtacaagcttataaaattcaataatttgtattaaaatacaaaatccaataacaaccaggagttcttcggaagaaaaaaaaaatcaccaaaacaaccccaacagtggtgaagaactatattaaagatggcttttcctaagacagagggagaacaaaagcaaatagcactctccctccgccaaggctagagcaggaggttcaaggaaatgggcaggaagagaacagaacactcaagctggacgattagtgaaggaaactgtggcctgagactgatgatcagcatatcttatgcctaaacaccaccactaagactacctggctaagctgccatggtgtgttagagatgatgagttacttttcttgccccttttacaacagggaaatctaaggacaacaaaataaacaaaaggctgagaaagctgagcatgtgaagtcagtcatgctccgctgcttttcaaaaactctgggccaagaacagaaccagagaggccagagcagttcatgtatttctctcttccatctgaccatctctcatcttcctcacccactcacacggttccgagcaggaggcttaccaggtcaccaggggcaggaaaatttctagcttcaaccaagccatggactgccactgctctttggggattctaggaaaataatcatctaatgaaatgtcagtatttgtgattctatgagaacaattctcaaaacatcaaaaagacatttgtgacttggtaaaataaaaatcaaagaaaaattaaggtatttttagaatctgtaagatttccttataataggagggaaagtagcagaactattttaagtaaggacatgcttcccttcagtctgtaatgaaagactgttgttgtcatcatgccattgccatgataaaatactactagaaaaggatagcttttaaaataaagtgtagacgcaaatggtagagaaagccttcttgtacttgaaggaaagaaagaaagtattctgtccctgttactcctggacaaaagtacaccaaggcaacctataacctctctgtgctgtctctcatgacttttaatgacacggaagtctgatattcactgaacagtcattatacagtgcttggaaagtaacatatatttaatattcaaatttaatattcattcttcttatcctcaggtaaaaaaatagcagaaaccaaataatgacttgaagtggcattaacacaaagcaaacctgatacctatgatacctaaagacagtgcaggacaagagcttcaacagcttttataaaactgccagagattgtgctaattcttttacatctaaagaactgtatagaagagtaaaaaaattaaattacatttatataagaaactatcttcgaaaaagttatttgaacttgtatatacaaagtccaacagtattaagaaaaaaatttatttaattatcatttatataagtccaaaaatgatataatatattatttgaggggaaaaggcttcccaccgaaatagaaatacagtagactaaataaactagattgaatataaaat

SEQ ID NO: 80270 - DNA, 489 bp, Homo sapiens
  sig_peptide (216)...(351): this location contains the signal peptide sequence, MFTGLGCSVFLLSAADSFFPLLFQCRWFLLNLTPFSCAQCGNKSS, Run with SignalP
  misc_feature (47)...(233): similar to gi5714471 in the genepept database release 114, Run with FASTXY 3.3t00, default parameters
cgaggccaagaattcggcacgaggtgtgtttgtgatgcaccaagtttggttgtctttgtatgtatcttacttgggattcactgagcattttttatctatggtttggtgtcatcagcttggaaaaattgttggccattgtcttttcaaaaatatccttgcttcatttttctcttctttttttgagactctagttgtacccatagtgaacatctgatatgttcacaggcctcggatgctctgtttttctcctctctgccgccgactctttttttcctctcctatttcagtgtagatggtttcttttgaacctgactcctttctcttgtgcccagtgtggcaataagtccagtgaaagaattcatctttgatatcctgtttttcatttccacttccatttggcttttaaaaatgtatagcttccatttctctgctgaaatttcctggcttttcacagatatttatcacagttattttaaatcttcatctgag

SEQ ID NO: 80271 - DNA, 2309 bp, Homo sapiens
  sig_peptide (1436)...(1571): this location contains the signal peptide sequence, MLFMVAVAIFTEGLYLNVTLALWNYIVIPNQVILNIFMLSCLNVL, Run with SignalP
  misc_feature (1)...(1173): similar to gi3551523 in the genepept database release 114, Run with FASTXY 3.3t00, default parameters
ctatcaaagatcacgatgccagttatatgtaatgagcctctgagcttcatacagcgcctaactgaatacatgtagcatacttacttcatccacaggccaagttcactctctgatcctgtggacaggatgcagtgtgtagctgcgtttgctgtatctgctgttgcttctcagtgggaacggactggaaaacctttcaacccactgctgggagagacttatgaattagtgcgagatgaccttggatttagactcatctccgaacaggtcagccatcacccaccaatcagtgcatttcatgctgaaggattaaacaatgacttcatctttcatggctctatctatcccaaactgaaattctgggggaagagtgtagaagcagaacccaaaggaaccatcaccttggagctccttgaacacaatgaggcatatacatggacaaatcccacctgctgtgtgcataatatcattgtgggtaaactgtggatcgaacagtatggcaatgtggaaattataaaccacaagactggggacaaatgtgtgttgaattttaagccatgtggcctttttggtaaggaattacacaaagttgaaggctacattcaagataaaagcaaaaagaagctctgtgccctctatgggaagtggactgaatgtttatacagtgttgaccctgccacgtttgacgcttacaaaaaaaatgataagaaaaatacagaagagaagaagaacagcaaacagatgagcacctctgaggagttggatgaaatgccagtgccggattctgaaagtgtattcattatccctggaagcgttcttctatggcgaatagccccacggcctccaaattctgcccagatgtataattttactagttttgcaatggttttgaatgaagtagacaaagacatggagagtgtgattcccaagacagactgcaggttacggcctgacatcagagccatggaaaatggagagatagatcaagctagtgaagaaaaaaaacgacttgaggaaaaacaaagagcagcccgcaaaaacaggtccaagtcagaagaggactggaagacgaggtggttccatcaaggtcctaatccctacaatggagcacaggactggatttactctggcagctactgggacagaaattacttcaatttgcctgacatttattaaaatgcatacaagtcagggtgtttggctaatctacaaataagtcttaaacctatgtttttaaatttttttcccttggtttctacttatcttttaaaaaaaaaatgaaaaaacactcatgagataactgcatttcacccaacaaaagcagggtataaggcgatattggtgatgaaagtcttaggaaaaatgcataattttgctataaaatgtacttatttggaatactattttatatagaggtaagagaacactgctggggaatatgctttttatggttgctgttgccatatttactgaaggtttatacctaaatgtaactttagctttatggaactatatagtaatcccaaatcaagttattttgaatatttttatgctgtcatgcttgaatgttttagatgtaacctttgacatatttagaactctcctcctatacaatgtttattctcagatatagaggttatgtcattttataaagacttcattgataagatggcttttattcatactaatcctcccaatgttaccccttccatcttccaagaagaaaaaaaatgcctgaatattcagaatagatatttctgatttgaaaattctaaagaattaaactggaaaagtatttcatttacttagtgctctgaatttacttttacagttttctgcagtcagtatcattaaaatggttaagtttacatttgaactgaaaatatgtataaaatctagcaattcacaaaaatgccctagaaatatagattttaatcaccattacataatgacaaaccttgttaaatgcttccacttccagtggcaaatgccactagggaaagtaagttgcactcatgtaagtatcaaactatataaaaggaggccttgtgcatttcaagtttgcaaagtacctgtgtacttaaaatatgtgtggagacctactgtacagtagttttgcccctttaattggggcacattcatcttaaatcttatagtatttatccacccaaaccccagactgagatactgctcccaggggcctaggtagctgccagtccgtgattttaattgctgtcttgaagttaacaagtgttataatgaaataatctacctgatgctaaataaaggctttagaatgttcaaaaaaaaaa

SEQ ID NO: 80272 - DNA, 327 bp, Homo sapiens
  sig_peptide (37)...(172): this location contains the signal peptide sequence, MSMRTQIVSSFYILKLNLVTVCLWKCQYCTIDHSLVGPFRVDRSV, Run with SignalP
  misc_feature (322)...(232): similar to gi5360847 in the genepept database release 114, Run with FASTXY 3.3t00, default parameters
cccacgcgtccgatttgattttgagtggggttggagatgagcatgagaactcaaattgtatctagtttttacattttaaaattgaatttagtcacagtatgtttatggaaatgccagtattgtaccattgaccatagtctagtgggtccatttagagtggataggagtgtagaattagattcacctacttgaaaatcactaatctataaagaagtgaggttttgcaatagaacagtgcctgtggtgttttttcaggttagcatactgatttcagttcatgtaagaaatgaaagcatgtttcacatccttttgctctttgaggtatcc

SEQ ID NO: 80273 - DNA, 356 bp, Homo sapiens
  sig_peptide (29)...(164): this location contains the signal peptide sequence, MFLSRVGMTCPILGELLVCAGGLPPLDDDLLRIAERFINLSALGL, Run with SignalP
  misc_feature (308)...(114): similar to gi2636417 in the genepept database release 114, Run with FASTXY 3.3t00, default parameters
ctgtactttgggatatcagtaagcatagatgttcttgtctcgtgtgggaatgacatgccctatactgggtgaactactagtgtgtgctgggggattacctccacttgatgatgacttacttcgcattgcagaacgtttcataaatttgtcagctcttggactatgggaatgtgaagtctaatgtaatgcctttgctgaatttgagaagatgttagatgaccgcctatctgaattatccattatacgaagaagtactaattcctgaccaaaagtatagcctggagctgattcactgagaagtgtccatacctctcggtagatagaggatacacgacatgatgcccactaggtaaaaa

SEQ ID NO: 80274 - DNA, 377 bp, Homo sapiens
  sig_peptide (158)...(293): this location contains the signal peptide sequence, MLFSLQTAIVYCTITVLCHRTLIFSSMHKCIMLFPIIHICSYVFF, Run with SignalP
  misc_feature (102)...(377): similar to gi340588 in the genepept database release 114, Run with FASTXY 3.3t00, default parameters
ggcacgagcacatttgccagagcctggagtctgcgaaggccgggacccggttccccggcccacagtgggggtgtgcaaaccctaaagaactgtgttgctaattcgtgatgaatcaacatcatgtttggcactttttttttggagccctgaatcttacatgttgttttctttacagaccgctattgtttattgtacaattactgtactttgccatcgaactttaatattttccagtatgcataaatgtatcatgttgttcccaataatacatatttgttcttatgtattttttgttatatattcgttttaacctggatgtttattttttacttttcttttttctttttcaggctctgttttttattttatattatgtt

SEQ ID NO: 80275 - DNA, 1813 bp, Homo sapiens
  sig_peptide (759)...(894): this location contains the signal peptide sequence, MWCAEMLHILFMGLRVNLNHETFLIICCEIYQAWMISVFLVVCCF, Run with SignalP
  misc_feature (1813)...(183): similar to gi1339994 in the genepept database release 114, Run with FASTXY 3.3t00, default parameters
tcagtccagtttgtttgaagtcaatcttttcatcagaggcagcttaaagatgctttcagttagttttgtcttactttcagatttctctacataaatctagatactcattaagtagccttatgacaaacagtatgagatacttatgacaaactcgctctgtcacccaggctggagtgcagtagcatgatcgacagagtgagtttgtcaaaagtatctcatacttataaacagtatgagataggaggattaaaatattattttaaagaaaccactgtttccccctaaaatgtcataagagcactgaagaacttgaaatatttttttcagagtttctcacacactttaaaagtctaacttttttgtgtgtaagcatttagcttgccagcatatttctttttggctccttaaattgcggttgtgtttgcagtattgtcacttttgctctcactgttatgttgaataataattagcatataattgtctacagaagcaagagcaatctggaaggaacaaaaatgttttctgtgattaacagtgaagaccttgtaaatgcagatgtgtgataaagcatttagtcagtcccccaaacagtcatgccaactgtgaaggaatgtcccacaaaacatttccattccctgaggaaaaacattttctttcctacatgtatctctggtatttagaattgtcactaataaccttttcaagtgattttggctattctctaatgaagatatggtccatttgtttttcttcctgcaatgtggtgtgcagagatgctgcatatcctttttatgggattgcgtgtgaatttgaaccatgagacattcctaataatttgttgtgagatataccaagcatggatgataagtgtgtttttagtggtgtgttgtttttttaaagaggtgattcaagtaccgttgctaagctgtcaacataccaagctgttgaaaaaattgaccatttctttcagaagtaattctcagcctgtggaataatagcaggtgaagacttcatagaaggcgacagattgatagggaggctattgaagcagtttttctgaagcctgcattttgagttagtttatagtgctaatagattctatataactgtgagagtttggtagtaaaccagtagggattgttttctctcctaaaaatttgcacactacttcattgtctaccaactttttacatattggaaaatagaaattgcaaatacatacatgtatggaaacatattcagattgggaaaaacaatggacattagtttttaaaaagttacgtggaagcaagatttctatatttgtttttttaaaggaagcagtcattctttctactaaatcccatttcaagctagttctctgaaaattttgccatttatctacagaaatttgattataaabatgttccyttttcaaagaaactttattctagaacaaaatagtctatatggtacttgatctacatttaagtggaaaaattagcagtatttgaaagctcagtttatgtcattgtcttaacttcagatacaaataactgaacagaaagttttaacctttaatatctcatgttctgtttttttattcagtattttcctttatgttaattcaattatatacttctgaatggcaccttactttttggaaacaaattcttctgttatttacaaaaataataatttttaaaaaacatttaaaaaaaatccaaagctgctctcgataatagtcaacatttgcatatatatggaatttcttactttttttctcccaaactctatttaataaacttattttaatgtttgtgtaaaaaaaaaa

SEQ ID NO: 80276 - DNA, 430 bp, Homo sapiens
  sig_peptide (163)...(298): this location contains the signal peptide sequence, MLSSRFGKTYKQAVYGLFISLLCIFLDIYRLFDISTHYQILGYGI, Run with SignalP
  misc_feature (425)...(274): similar to gi1653705 in the genepept database release 114, Run with FASTXY 3.3t00, default parameters
tccacgcgtccgggcggatggagaatagtagaggttcaagacagaaataaaataatatagcttaaattgacgtcatttaaattatccattgtttcctcatttagtttaatttttgcacatatatatatatttagtactagaaggtaggtttgcagttattaaatgttgtcaagcagatttggtaaaacctataagcaagcagtatatggtttgttcattagccttctttgcatatttttggatatttataggctcttcgatatatctacccattatcagattctaggatacggtattcggttctgtattcattgtgtgcttttatataaaggattacatgaattcatggtttgtgctgcgataaattaatcatttctttcggacttccatcataagtatatgtatatttaatatctcttcttccctttag

SEQ ID NO: 80277 - DNA, 420 bp, Homo sapiens
  sig_peptide (113)...(248): this location contains the signal peptide sequence, MPLQFLISIGVGVLAHAVSQGKNTCMLIEKSTRYLFIFPQPDTIP, Run with SignalP
  misc_feature (63)...(180): similar to gi1850235 in the genepept database release 114, Run with FASTXY 3.3t00, default parameters
aatgatttaaaaacacatataaaagatgactttcttattctgataaggagtacatgcaaaagcctatagcaagcattgtatttaataatgatgcattgagaaactacagagaatgccattgcaatttctaatcagcattggagtgggggtcctagctcatgcagtaagtcaaggaaagaatacgtgtatgctgattgaaaaatccactagatacctatttatctttccccagccggacaccattcctcttctcccttgaagtggtcatgtgactgagttctggccagtggaatgaggaagaagtgacatatgctgcttccagacctggctcagaaaaacctgctgcatgatctgtgaacttctctctctgtattcagtctgcctgctgaatgctaatgccgagggaaacctttgaagcac

SEQ ID NO: 80278 - DNA, 379 bp, Homo sapiens
  sig_peptide (224)...(359): this location contains the signal peptide sequence, MTSLQKRLLSHCMQCTMLLGICGQCKDDDILASWVIQEFTAMQSR, Run with SignalP
  misc_feature (14)...(120): similar to gi3758795 in the genepept database release 114, Run with FASTXY 3.3t00, default parameters
gtatttttggggtctcactatgtggcttgggctgtatcgaacttctggactcaactgattctcccactttggtctcccaaaatgctgggaatacaggcatgagacaccgtgcctggcctgtatttttcaatagtcatatttaataaaatttttaaaggcataattcaattaataaatgtaagatgatgagggacctgatacagtttcacctttcatgtttcctatgacatctcttcagaagcgtttgttgagccactgtatgcagtgcacaatgctgctaggcatttgtggacaatgcaaagatgatgacatcttggcctcctgggtgatccaggaatttacagcaatgcaatccaggtccaggaatttacaatccagg

SEQ ID NO: 80279 - DNA, 464 bp, Homo sapiens
  misc_feature (1)...(464): n = a,t,c or g
  sig_peptide (165)...(300): this location contains the signal peptide sequence, MPKSECQTILVEALLLLPLGTGITADNINIGHMTPQLIPLQRLKA, Run with SignalP
  misc_feature (39)...(323): similar to gi2916734 in the genepept database release 114, Run with FASTXY 3.3t00, default parameters
ctcgacgccttaggattgtacnccatttgccgggtcgacccacgcgtccgctttcttggtatatcagtcaggatttttcattataaacaaactttaagaagttaaaagtgaaatagacattaaagattgagaatcttaggtgtgaaggttgtgcagtcaggaaaatgccaaaatcagaatgtcaaactattttagtggaggcactgttgctgctgccattgggcacaggtatcactgctgataacatcaatattgggcatatgacaccacaactaatacctctgcaacgtctgaaagctggatatctccttactcctttgatagattacctcattgaaccttctttgagtagtgagtttttgataaactgtctccctgctcctgcctgggaggaattctctcacctggagggatgggaaagtgaattgtgtcctctgtttaccttgctagcttttttttttatc

SEQ ID NO: 80280 - DNA, 876 bp, Homo sapiens
  sig_peptide (131)...(266): this location contains the signal peptide sequence, MLLATLLLLLLGGALAHPDRIIFPNHACEDPPAVLLEVQGTLQRP, Run with SignalP
  misc_feature (7)...(421): similar to gi6015444 in the genepept database release 114, Run with FASTXY 3.3t00, default parameters
tttcgtcgggccatggagcccccctggggaggcggcaccagggagcctgggcgcccggggctccgccgcgaccccatcgggtagaccacagaagctccgggacccttccggcacctctggacagcccaggatgctgttggccaccctcctcctcctcctccttggaggcgctctggcccatccagaccggattatttttccaaatcatgcttgtgaggaccccccagcagtgctcttagaagtgcagggcaccttacagaggcccctggtccgggacagccgcacctcccctgccaactgcacctggctcatcctgggcagcaaggaacggactgtcaccatcaggttccagaagctacacctggcctgtggctcagagcgcttaaccctacgctcccctctccagccactgatctccctgtgtgaggcacctcccagccctctgcagctgcccgggggcaacgtcaccatcacttacagctatgctgggggccagagcacccatgggccagggcttcctgctctactacaggcaagcccctctccatggtgcctctgcagattggctgatgtgcttgcacgaagaggttcaatgcctgaaccaccgctgtgtatctgctgaccaacgcgtggtaggggttgatgcctgtggcgatggctctgatgaagcaaggtgcagctcaaaccccttccctggcctgaccccaagacccggcccctccctgccttgcaatgtcacctttgaggactttctatgggggcttctctctcctggataacacacctaagcctaagctcccacccccagtcctgccttgggtgctgaaccccatgatggccggggactggcgtgccctacaagcctggacttggctt

SEQ ID NO: 80281 - DNA, 390 bp, Homo sapiens
  sig_peptide (57)...(192): this location contains the signal peptide sequence, MFCSNFYFVDQSSLIALVLPIVLLTLYNILKRAVSRTALLQLQSA, Run with SignalP
  misc_feature (24)...(363): similar to gi4938496 in the genepept database release 114, Run with FASTXY 3.3t00, default parameters
gtgattccttattatttaatacccacttcctgtcagtttcctcgcttgtatctgaaatgttttgtagtaatttttattttgttgatcaaagttcactcattgctttggttctgcctatagtcttgttgactttatataatattttgaagcgtgctgtgtctagaacagcgcttctccaacttcagagtgcacatgactcatcttggaatctgcttaaagtactggagacttcccccttcagatagggattttcctccccaaagtttattttggtgattttgaaacctaaagaaaagttggaagaatggtacaatgaacatcatatgtccttaccttgcattgaccaattattaacaatttattaacaattattaacatttactacattta

SEQ ID NO: 80282 - DNA, 1183 bp, Homo sapiens
  sig_peptide (215)...(350): this location contains the signal peptide sequence, MFFVLVLTPVECCLCFWLNIYRALFEKLNSDPSRDEGNKAETLIT, Run with SignalP
  misc_feature (963)...(644): similar to gi3327362 in the genepept database release 114, Run with FASTXY 3.3t00, default parameters
ctggttctaaggaatgaaaggaggacaccagctcagatttcctaaaaatgtctttatgtataatttttaaaaattctcaaaaaaaatcttcctataaaagtcaaaaggatgaaaatgaatgtagcaggaacaactgtgaggtgtcccagctacagtagtcattgagtttttttgcataaaaatacgattgtaaagatagattccataaaatgtgatgttctttgtcctggtactgaccccggtagagtgttgcctatgtttttggcttaacatttatagggcattatttgaaaaactgaattctgatccaagcagagatgaggggaacaaggctgagaccttaattactggctctctcttgtcagagaaaggtgctttttgtcatattcccatgggatttgattgaccttcggacggcctgtgtctgttaggaggcatttctatttctcaggtttgagggctagtcagtaaaatttggatgaatttggactggatagagggactcaacctgaattgtgaaaatcctgagttacagaatttttaaaagttctatgttttagttatatataataatttagctattttaaagcacaaaacaaatacgtgcacttggagaatggagtccacagcattcagcaacagtggcctgaagcagagccccagataaaacactgggttgaatgtcagtgtgctgacatcagtgttttttattatatgactgtgttctttctataaaaatcaggcattgtgagaagcccagatgtgaagcttggaacaataaaaccaaaggaagaatacatcagaggtttgtaaaacttagataatatggaagtaattaaccattagactcacgatatgttctctaacagtaaccttgaaactccatgttttgtgtctaatgacttctaggacacataaagacaaaaggaaagaataatatgctttcagagcatgaagaacttgctttagagtccctgtgtcttttgactcgaatacacaggattattatatcatgcagttatgaatctgaggaaagtatgacatgatcgataggtctaattctaaaatatctgataaagaagttaataccaaaattagtgagtttcctaactttacagtgaaataactagataaagaagaactaaatgcaaagctagcagaaggaaggaaataataaagattt

SEQ ID NO: 80283 - DNA, 822 bp, Homo sapiens
  sig_peptide (189)...(324): this location contains the signal peptide sequence, MIWLIHFSLRLLSVLVCFAICLWLGCFQFQTCCNKHLCNILLFTL, Run with SignalP
  misc_feature (114)...(363): similar to gi2695794 in the genepept database release 114, Run with FASTXY 3.3t00, default parameters
gtaaccactatttcctttcattatctgtctttccagaccttttctcttcctttacatatgcgtatatgtatccagagagaatatataatgaggcatttgtgtttcttttcttttactttaaacaactgtcatactaagtggaacattccacaactggcttttttcacgcaacatgtctagaactttccatgatctggctcattcactttagcctccgtttactgtctgtactggtttgttttgccatttgcctatggttaggctgtttccaattccaaacatgctgcaataaacatctttgtaatatcctgttatttacgcttatatacaagtatttctctagggtagggattgagaagtggaattgctaagtcttaaatcatatacctttacattttattgtttaatggcaaataactctcccaagtaaaatgaacactgtattttatactttggtttcttgcccagcttttcagaatggcaataggagaagctttcagaggacagttacggtggtctagagtagaccagtgcttttgtaaaccttagcgggcagactcattacctgcggaatgtgttaaaaagtaaattgggactcaataagtttggaatgaggcctggggggctgtagttttaacaagcttccaggtggggatcagggaccacacttgggataagaagaatcttgcttcaggtcattttttagcattggctggaagtaattttaggggtgggggggcccattgattaaacttatgggcaccagcctgtttccttaggaaggtaaagttttgccagaaattgggaccataaccccccagg

SEQ ID NO: 80284 - DNA, 935 bp, Homo sapiens
  sig_peptide (55)...(190): this location contains the signal peptide sequence, MGLPGLFCLAVLAASSFSKAREEEITPVVSIAYKVLEVFPKGRWV, Run with SignalP
  misc_feature (26)...(556): similar to gi1911338 in the genepept database release 114, Run with FASTXY 3.3t00, default parameters
ccaggaactaggaggttctcactgcccgagcagaggccctacacccaccgaggcatggggctccctgggctgttctgcttggccgtgctggctgccagcagcttctccaaggcacgggaggaagaaattacccctgtggtctccattgcctacaaagtcctggaagttttccccaaaggccgctgggtgctcataacctgctgtgcaccccagccaccaccgcccatcacctattccctctgtggaaccaagaacatcaaggtggccaagaaggtggtgaagacccacgagccggcctccttcaacctcaacgtcacactcaagtccagtccagacctgctcacctacttctgccgggcgtcctccacctcaggtgcccatgtggacagtgccaggctacagatgcactgggagctgtggtccagacagaggggcaggccccagggtggagatgatctgccaggcgtcctcgggcagcccacctatcaccaacagcctgatcgggaaggatgggcaggtccacctgcagcagagaccatgccacaggaggcctgccaactttctccttcctgccgagccagacatcggacttggttctggtgccaggcttgcaaacaacgccaatgttccagcacagcgccctcacagtggttgccccaggtggtgacccagaagatggaggactggcagggtccccctggagagccccatccttgccttgccgctctacaggagcacccgccgtctgagtgaagaggagttttggggggttcaggatagggaatggggaggtcagaggacgcaaagcagcagccatgtagattgaatcgtccagagagccaagcacggcagaggacttcaggccatcagcgtgcactgttcgtatttggggttcatgcaaaatgagtgtgttttagctgctcttgccacaaaaa

SEQ ID NO: 80285 - DNA, 423 bp, Homo sapiens
  sig_peptide (43)...(178): this location contains the signal peptide sequence, MCVCEGLLPIPLAPGAWCLKRWCVPCQATLKNIYVQQQYNSTRER, Run with SignalP
  misc_feature (10)...(34): similar to gi3879382 in the genepept database release 114, Run with FASTXY 3.3t00, default parameters
tcattcagctgcctcctttctggtcctcttgctgctgctgggatgtgtgtatgtgagggtcttcttcccataccccttgcacctggtgcctggtgcctcaaaaggtggtgtgtcccttgccaggccactctcaagaatatctatgtacagcaacaatataactctacaagggagagaagtgtgttcacttccttttgctaagcccttcctttccagagagtgtcttggggggcatctgactgcttccccccaccctctgccaggcattgctggagaatgttaagacggcgatggagatgccatcaaccccaccctgcagagcatcaccagacaccaccagaccaaattcactttccagccccttcatgttgaacctgaaacttgagctagtgtcttgggagaaaagggggaaatctctacgag

SEQ ID NO: 80286 - DNA, 418 bp, Homo sapiens
  sig_peptide (161)...(296): this location contains the signal peptide sequence, MKSHWRFCFALLFAFWGFRSGVLGIYIQYTVQYTGQLYTIYCIIY, Run with SignalP
  misc_feature (415)...(180): similar to gi899139 in the genepept database release 114, Run with FASTXY 3.3t00, default parameters
ggacaggtgagggggcttttggttgcctattacccaagtggctgctgtgtggccagtgagaggaggcgtcgagggagatgaaaatggagaagtggacggggcttaggccaggcagggcctgtatgctgtacgatgggatttgggttttcttttgtatgtgatgaaaagtcactggaggttttgttttgctttgctttttgctttttggggttttaggtcaggtgtactgggtatatatatacaatatactgtacaatatactggacaactatatacaatatactgtataatatattgtacaaatatatacaatatactgtacaatatattatacaaatacatacaataaaatgaattttggcaaatgcatccaggtcttgtgccccccccacaacccaaaatttaaaccattcctttg

SEQ ID NO: 80287 - DNA, 643 bp, Homo sapiens
  sig_peptide (412)...(547): this location contains the signal peptide sequence, MFSRLFAVFLILYKLLGKYYGIRFKIVITCVWRYVLGGRYILCSF, Run with SignalP
  misc_feature (636)...(494): similar to gi3287125 in the genepept database release 114, Run with FASTXY 3.3t00, default parameters
gcttatgcacctgctttctggcctggactttcctgtcagtttctcctgcctgttcaggatgtcctgctcagtgcctgtgcctgaagaggcacagaattcaggaggtctctgtagggagctcattgttcactttctcaggcaaaggtagtaaacactgctgcttcccaccggcttcaggttcttcctggtgattctgtccaatttggagctcccaaacaactgatttgcctccttgatgacgataattcccagaaagcaggtgatgttagagacagtgctggttagctaggctcctatttcaactaggtctcatcctagttttctgcagtttggctgcaggtttcttgcccttttttttcatctcaaatactgtttattacatgacaggaaacatcattggatagtgaacctatgttttcaagattgtttgcagtttttttgatactctataagttacttggtaaatactatgggattcgtttcaaaattgtgatcacttgtgtctggagatatgtgcttggaggcaggtacatcctctgctcttttgctgtagctaagggtgaattattgtgcagtttaagcacacatagcacacataggcgtggctgattgttggcctacatgtgcccagggtctcgtgccg

SEQ ID NO: 80288 - DNA, 382 bp, Homo sapiens
  sig_peptide (179)...(314): this location contains the signal peptide sequence, MIQGPLACEFFLQGALLSFCMMRLEAWHGSLKTTIPLGWGPSPSG, Run with SignalP
  misc_feature (377)...(175): similar to gi1340150 in the genepept database release 114, Run with FASTXY 3.3t00, default parameters
tgaagtcaaagctgtaaatgcagcttttatggagtgtcaaccactccctgaggaacctggtagctagagggaaaggagggggaggggcatcctttgactcatcccaaggggccagaaccttttttcacttttctgtagcaagtagggcttctagagaggagagctctgctagtaaggaatgatccagggccctctggcctgtgaatttttccttcaaggggccttactttctttctgcatgatgagactggaggcatggcatggctctttgaaaaccaccatccctttgggttggggaccttctccctctggtacctgtgtgccaagggggtgtatggaagacaggcttctgtccagtgccctctgtggtatgtggcctatc

SEQ ID NO: 80289 - DNA, 2528 bp, Homo sapiens
  sig_peptide (450)...(585): this location contains the signal peptide sequence, MPAIVVFLFCFVISDGLTLSPRLDCTGLNLLSSSDRPTSASPVAG, Run with SignalP
  misc_feature (512)...(748): similar to gi2580578 in the genepept database release 114, Run with FASTXY 3.3t00, default parameters
ggttggaagattattttgagataagtgttcagttctgggctgggcagtcgtgccgggcacgggaaattcaggttctttaagggaaaggcctgatgtgctaagacgaaatctataccgtgtgtagccgcttatgagaatatgaaactaaggagagccacaggtaagtatacgtctatgaatgcgaattaaaacgggtgacaatataaagagagattggtgtcacaaatggtggagtgacttttgtatttcagcagacctcagtgagaaatggtcaccaccactccctagatgtgtgaccttgagtgagttgcttaacctctctgatcctgttacctcatctgcaactggggatgagaatatatatcatagcatgccctgggagaagctgttcctgaccacctgggctatggtgattttgacttcctctgtgtcagaagtacccccgtctcatgcctgccatagttgtctttttgttttgttttgtgatttcagatggactcaccctgtcacccaggttggactgcactggcctcaacctcctgagttcaagtgatcgtcccacctcagcctccccagtagctgggaccatagctgtgcagcatcatgcctggctaattttttaagttttttgttgagatggtggtctcgccctgttgctcaggctggcctcaaactcctgggctgaagcagtcctcccacctcagcctcccaaagtgcttggattagaggcgtgagccaccattcctggctccttggacaatattttattcctcagattaagacacgtccttgggatggggctgcattggataattcaccgaaggcaccgctgaatggagtgggccctcagtaaatacctggaggaatgtgacctggccagtgaggttattttcttttgtaggtgaaaggtgtagcagtcactcggcctacacccacagcatcgaccttgtgaacccagcgacctgactgccttgggagaattgaagcgaatgagagtggggagtgtgagaggtgcgtttggtgcagcatttctggcatgggaacagaactggccaggaggaagtgacgtctgggttctgcccgcacacattcctcgccaccttcttggtgtctgagaacctccagcttcacctccttttctggacccgagggcctggcggagcttccagctgggaccagacctccatggatccactccagaaacggaatccagcatcgccttccaaatcttccccgatgacagctgcagagacttcccaggaaggtccagcgccctctcagccttcgtactcagaacagccgatgatgggcctcagtaacctgagccccggtcctggccccagccaggccgtgcctctcccagaggggctgctccgccagcggtacagagaggagaagaccctggaagagcggcggtgggagaggctggagttccttcagaggaagaaagcattcctgcggcatgtgaggaggagacaccgcgatcacatggccccctatgctgttgggagggaagccagaatctccccattaggtgacagaagtcagaatcgattccgatgtgaatgtcgatactgccagagccacaggccgaatctttctgggatccctggggagagtaacagggccccacatccctcctcctgggagacgctggtgcagggcctcagtggcttgactctcagcctaggcaccaaccagcccgggcctctgcctgaagcggcactccagccacaggagacagaggagaagcgccagcgagagaggcagcaggagagcaaaataatgtttcagaggctgctcaagcagtggttagaggaaaactgagacgtgcacccccatgggatggagacccgaagggactcagacggagccgccgtgttggcagcgcctgggtgtgggcccattttggggaccaaacagcaagctgtggtcggatgagtgccaggacctgtgtaccgggacacgtgggagtcctcccagcatgatgcttgactgacccgaggaaggtcctcatgtttcgtgcctgtcattctcggatggctgtgaggcattccttggcaagggacgctgcgtaccagcggtcctcaccgcatctcacatggctcctgtgatgcatgttgtcgctttcccacccgggatctccatctctcttcccttcctgctgtcagtaagagatcacatgtctgtgtagtgtgaatgccttgtcgctgtcctgtgcttttgcaccattgagttgactgcctctgagaagcagcactaggcctgttgaaatgcaatgtgctgccctgagatccagtttcaagaatgggcaggtaaacgcagtgtgggaaaggaatgtggaatgagaacttggtggttcaccgctgtactatttgtgtaaatgtttacgtatgtgataagctacatgtatgtaaatgttgcaatacccctaacagtcgagtagtagtctcccttacaggaatttttgacggggttcctcatcatcaataccaaataaatatatgtaggaatggaaaaaaaaaaat

SEQ ID NO: 80290 - DNA, 369 bp, Homo sapiens
  misc_feature (1)...(369): n = a,t,c or g
  sig_peptide (159)...(294): this location contains the signal peptide sequence, MRSWYLASFLSLSFLLTEGRFSLYFPQRPLCLAQHWTTANVSTWG, Run with SignalP
  misc_feature (245)...(110): similar to gi3097279 in the genepept database release 114, Run with FASTXY 3.3t00, default parameters
ggcacgaggagagctagcacctgagcttcaatacccgatgtcaatggtttggctttgctgtgccagggaggtccacaagtccggtttgataacaataaaggaaacctcctctgaggtcccggtcctttgcttctccctctgaggcatggccacctgccatgaggtcttggtatcttgcttctttcctgagtctctctttcctactcactgaaggcaggttctccttgtactttcctcagaggcccctgtgcctagcacagcactggaccacagcaaatgtcagcacatggggattgggaggggagtanagcannaacaagttctgtggaagggcaatcccaccccggaattccaaggcaatccatttgg

SEQ ID NO: 80291 - DNA, 361 bp, Homo sapiens
  sig_peptide (169)...(304): this location contains the signal peptide sequence, MSWLPFIVYSLKAATVCESFLTICTVKSCWIDSGMRQIKQPAYKI, Run with SignalP
  misc_feature (358)...(201): similar to gi450755 in the genepept database release 114, Run with FASTXY 3.3t00, default parameters
ctgacataatgttacgtaacacacacattgattttttgtatctatggttgcaggtaataaatattttcacatgaattgacaaaattttctacaatgggcaggcaggctttgtgtcaaaaacatattttgaagccacaaattattttatgttcgctacaacatacaattatgtcttggctaccttttatagtatatagtttgaaggcagcaacagtttgtgaatcattcttaacaatctgtacagtaaaaagctgttggatagacagtgggatgagacaaattaaacaacctgcttataagatttcaatgattgaaataatgggatgcagcttcacttcagtgtagctgtataactacaatt

SEQ ID NO: 80292 - DNA, 390 bp, Homo sapiens
  sig_peptide (248)...(383): this location contains the signal peptide sequence, MLGASNLLQVLWRAIWHCLVKLKTLKPHGSGGLSLHVCVCSRKPS, Run with SignalP
  misc_feature (64)...(145): similar to gi1131430 in the genepept database release 114, Run with FASTXY 3.3t00, default parameters
gtcagcagtgggcggaggtgagacgtgagtgagctgaggaggttggctggagcgagatcctgagggtttctcttcgtctccacggcctggtgtaaggggctgcccccgcccccaagtttaaatgctctctagttcacgctctctaagcttcatcatgtcagttctgatcctcattcctggggcgagatcatgtggtgggcccttggtagctcaagattagcctggcagtgtctcatgtccatgtgccatgctgggggcatccaatttattgcaagtgctttggagagcaatttggcattgtttagtgaagctgaagacgcttaaaccccatggctcggggggcctctctctgcatgtgtgtgtatgttccagaaaaccatcctgacatgc

SEQ ID NO: 80293 - DNA, 367 bp, Homo sapiens
  sig_peptide (163)...(298): this location contains the signal peptide sequence, MTGLTRLMHRRGVLWITIARPRHPMRSVMDTLSVTRKAMRRFHSG, Run with SignalP
  misc_feature (3)...(292): similar to gi2654535 in the genepept database release 114, Run with FASTXY 3.3t00, default parameters
ggccggatttcacacttcatgcacatgtggggacccggattcaaaatgaaaactcacgccagtatctggaccagatccgtctgacgatcttggaaaacctgctgatgctgaaccatgcccctagtgtccagattcttgacgcgcctgctgacctcctgacctatgacaggactgacgaggcttatgcacaggagaggggtcctgtggataactatagcacgccctaggcacccaatgaggtctgtgatggataccctgagcgtgactaggaaagcgatgaggagatttcatagtggcttgggatgctgtgtaccagggaatttcttattcactcttgcatgtgcctggaggcaaaggaattggctcc

SEQ ID NO: 80294 - DNA, 404 bp, Homo sapiens
  sig_peptide (29)...(164): this location contains the signal peptide sequence, MFYLTFLCAYMGVGERHTFHVSAFFFLQSPHSLYLPLLEEEGRKW, Run with SignalP
  misc_feature (368)...(240): similar to gi1247481 in the genepept database release 114, Run with FASTXY 3.3t00, default parameters
gagcttcactctttaaaacacaattgttatgttttatctgacatttctatgtgcttatatgggagtaggggaaaggcatacatttcatgtatctgcctttttttttctgcaatctcctcactctctatacttgccccttcttgaagaagaagggagaaaatgggaatgttcttctcatcttggcatggaaatgagagaagagagggaaaaagtaagcaatattcaattaaaagactacttaagacatggcttctctttaattcccctgtattcaagccctgctcttttcccaggcccctaacactctgtacccattcctgctgacctctcttctccagcgcttccctgtgtgctggagcctaagggtgggctctcatgactgctccttcgaccacagattactc

SEQ ID NO: 80295 - DNA, 425 bp, Homo sapiens
  sig_peptide (84)...(219): this location contains the signal peptide sequence, MALALSCLRAFLCSLLCLGAPFRLVQMVRIPMTQTHFNGTPPKYA, Run with SignalP
  misc_feature (317)...(216): similar to gi726439 in the genepept database release 114, Run with FASTXY 3.3t00, default parameters
ggcacgagcagaaaacctactgtggaatttcatctaaaattaatgaagagtcagcactgtggattttaaatacagaggcagtaatggctttagctctcagctgtctgcgggctttcctttgctctctgttgtgcctgggggctcccttccgtcttgtccagatggttcgtatccctatgacacagacccattttaatggaacaccaccaaaatatgcagtatattccaaagtcaaaggtttaggatcagaaaagtgaaaaaggttcatcgtattaaaaagaaaacaaacgtggagaataaaaactgggcagtgaaatctagctagatgaccataatatgtctgcttttcttgactttattattattactttttaagggcattgttcaatcctcgattttgtatctatggcagcaggtgaaggtct

SEQ ID NO: 80296 - DNA, 703 bp, Homo sapiens
  sig_peptide (40)...(175): this location contains the signal peptide sequence, MWLLVTLSPRLLLSPSHFTLEGPQIDQAHSELQVLPLVRPSAVPL, Run with SignalP
  misc_feature (39)...(8): similar to gi5105118 in the genepept database release 114, Run with FASTXY 3.3t00, default parameters
ggcacgaggcattatggtggcagatagacccctcatgtcatgtggctgcttgttacgctcagtcctcgtctcctgctttctccctctcatttcactctggagggtccccagatagatcaggctcactctgaattgcaggtccttcctcttgttcgcccctctgctgtgcctttactccagagagcatcatggctaagatccagatgtctgcatttgcccaagacagtcctggtttgaatttgtgaacccatatgactattaatagtgtccccttccagtctcagaggtgtcctgtattggatgataaatgacatggccacccttcccacagctcgctctctcgcttccttcaggtcttgcctgaattgccatattttacttcagcactcccctcctatcctctctacctaatatttctccattgtgccacctggcatgctagatttttaaattttggactttttttattgtaaggtccatgactgtcaggatttttggtttgctcatgactgtattccccgagcttaaaacagttcctggaggatgggccaagggctcacgccttggatcccagcactttgggaagccaaggggggcggaatcacccggggggcggagcctcaaacccacccccacgaacatggagaaaaccgccctcccctcctttgcttccacacaccatccccggctcaggtggccgcac

SEQ ID NO: 80297 - DNA, 708 bp, Homo sapiens
  sig_peptide (66)...(201): this location contains the signal peptide sequence, MLLLSMIFLTTIVERQSSPFTCIFTCNVIFDAYYVLLFNQPILFY, Run with SignalP
  misc_feature (15)...(654): similar to gi1022918 in the genepept database release 114, Run with FASTXY 3.3t00, default parameters
aacatttccatgaaatgtatttttgcattgtttgatcttaaactttttgtgtctttatataaggtatgcttcttttaagcatgatatttttaaccacaatagttgaaagacaatcttcaccttttacttgtatatttacatgtaatgtaatttttgatgcatattacgtcttattatttaaccaacctattttattttatctagggcatttttcagaaagccttattttcttgtattaatcaaatatttttatcattgtattttttcctctattagttagtaatacgttactctaaatatatattgtggctattttcagaattgcaatatgcctccttaatttattagaggctaacctaaattattacttttaccacttacttgaaaattctggaactttagaacatttattgttttatgcattttaattctacttgtatttttactactctaaacattattattgttttagacaagccaaaatatattttgttattatcttattcttcatttctttctgtatttttatgccactatgtatgctcaatttccttctatgtgatgaacctaattcagtacttttgttttttaatctgtgcaggtagcctggccattaaatttttatttttggtttgctgaaaaaattgtgtttatttctatatgcatacttatgcatatagaattctaggttgacatatttttagtatt

SEQ ID NO: 80298 - DNA, 777 bp, Homo sapiens
  sig_peptide (120)...(255): this location contains the signal peptide sequence, MITPLRILSIFSLPCLACKEYNHDPFYKQNTSIERTEILGFKYFK, Run with SignalP
  misc_feature (21)...(192): similar to gi2645365 in the genepept database release 114, Run with FASTXY 3.3t00, default parameters
cttccagcaacttaatttaaagctatcagtatatagtaataatcttcaaattaaaaaatctagcaaatttgccagtgtagaaattgacaacttataatatcaaatttcttcctgactttatgataactccattgagaattctttcaattttctcattaccatgtctggcatgtaaagagtacaatcatgacccattttacaaacaaaacacaagcatagagaggacagaaattctgggttttaaatattttaaaaaatggtctgagaaatcaaagaggctgaattcacatttcctttcattcaaatttaatgctatagagttcatagtaattctattctagcccatgcctcagaagtacctggctttggtgagatcccactgaatttgagactccagctcaatatttttttaaaaggagaaggaggctgagagattggaaagagtgccctttgctaactgaaaaataaagttgaacatgctttccttccttctaaatacaaagccctcatgttgaagcaatgaatataaatggaacatttagaaactgagtcacatgctatactattttgacaaccctacatgtcttaaaggagccatggcctgtgtatgatgtgtgctcaacatatctttatgcaacctaagagctcaacttcaccttagaaagggggccatctgtcacttccttcttcactcggcttacaaaggtacataatccccaacttgccatcttaatcaaacagacaataaccggtgctggagacaatgtatgaacctta

SEQ ID NO: 80299 - DNA, 769 bp, Homo sapiens
  sig_peptide (17)...(152): this location contains the signal peptide sequence, MSLLPPWCLLKARVAFSEWKSNRVPPAQTPQHSLLSSPLSSVTSS, Run with SignalP
  misc_feature (668)...(237): similar to gi780170 in the genepept database release 114, Run with FASTXY 3.3t00, default parameters
agcagcctcttggcccatgtccctactcccaccctggtgcctgctcaaggccagagtggccttctcagagtggaaatccaatcgcgtccctccagcccaaactccccagcactcactactctccagccctctttcaagcgtaacaagttcctctcacctcagggcctttgcacctgctctttctcctcccccacatcatcatctgggtcccacctcacatgactcttcctccaaggagtctttctgggctaccttagcagaattctctaacccattgctccagctcattcccttcaaaacttgattgcctatttagtgcctggctcccctattagattgcaagacccatgagggccaagaccttctctatctgttcacttagaacagcatttggcccgcggaaggagattactaatgaaccctgcctagaagcaggggatggacaagatgacctcaaggttgacgaggctataaaatccacagtatagagctctggtggggctctgaggctcccgctggccttcccagaaggaggaaaaggcaggggggcagaaagagctctgggttcatagatagacccaccagctggggggaacgctcaccaccaggggggcgcattccctatagaggaaactcccatacaatgcgcctctggctgtctgggtgcccgcccgcccgagaaccaatggccccacggaggtgcgccctttggtcagcgagaaaacccacggcggagcgcggggtgtgaccagccccgagcccaagcccc

SEQ ID NO: 80300 - DNA, 375 bp, Homo sapiens
  sig_peptide (110)...(245): this location contains the signal peptide sequence, MLSTLSIGTLSMLIIVVSDSWSYSSNSPAMFGSDAGFIPSNCIFA, Run with SignalP
  misc_feature (100)...(277): similar to gi1674260 in the genepept database release 114, Run with FASTXY 3.3t00, default parameters
gcccatcagaggcattgttcctttctgttacattgtttttgattgctaccatttcctttttattcttaggatttccgtctctctgctgacattgcccatctcttcttacatgctgtctactttatccattggaactcttagcatgctaatcatagttgtttcggattcctggtcttacagttccaacagtcctgctatgtttggttctgatgctggctttatcccttcaaattgtatttttgccttttagtatggcttgtaatttttcttaataactggacatgaagtacttattaaaagtaatggcataaataggtccttaggaatttactggtaaagtgtaggaggagaggcagtgttctacaggcctatgat

SEQ ID NO: 80301 - DNA, 335 bp, Homo sapiens
  sig_peptide (17)...(152): this location contains the signal peptide sequence, MGRCLSLGILRQGLCCPCWSVVAESGLTASLGGSGHPATSCSKEA, Run with SignalP
  misc_feature (177)...(109): similar to gi763429 in the genepept database release 114, Run with FASTXY 3.3t00, default parameters
cacggactggcctctcatgggaagatgtctttctttgggcattttgagacagggcctttgctgtccatgctggagcgtggtggcggagtcagggctcactgcatccttagggggctcaggccatcctgccacctcatgctctaaagaagctggaaccacaggtgagtgcatgcaccacacccagctaggaattcaaaccttgaggacctattatatgccagattctgttgaattatcagagaccatgtctggctgtaactggctcccaacccaacaaacacaaagttgggctaacattcttagagtatatttaacactaaaatacagattttcag

SEQ ID NO: 80302 - DNA, 654 bp, Homo sapiens
  sig_peptide (102)...(237): this location contains the signal peptide sequence, MKMFQMLLTSSFCSLSHLQSCQHISFLSISNHSKIFLYLQPTCYL, Run with SignalP
  misc_feature (8)...(191): similar to gi551720 in the genepept database release 114, Run with FASTXY 3.3t00, default parameters
ccacctttctccttttttccgatgacttccatttctatcaatggcagaaccattttctttgtttctaagtcttggagtcacagtcacacacattttcagtgatgaaaatgtttcagatgttactgacttcaagcttttgctcattatcccatctccaatcatgccagcacatttcattcctgagcatatcgaaccatagtaagatatttctttacttgcagcctacctgttatctgtatctacccccactcccactcttttcacgatcctggcattggaacctcagagtccacatttgctccccctgaacggaggtatgttccccaaggctgggcctctcctgttctttcaggcagtcttcaggtcaatgtccttcaaaacgtggtgctcagaactaaacacaaaactccaggacactggagtgggacagtggatggactgcacttccaacaaaacactgtagatctccgaataaacgtaagatggcgctataagcacgcacccggcctaaagccctggtgaaagctcaccagcagtggggctcagtagctctgcgaggcgggaattagttctcttacttgacatattaggaaatgtgaaatgtagacagattaaagcacttgctcaaggtcaaacaactaggaagtggcagaa

SEQ ID NO: 80303 - DNA, 717 bp, Homo sapiens
  sig_peptide (88)...(223): this location contains the signal peptide sequence, MLPLGVFLPLFFSWTRKPGDLFLRSQKRKNRDSSTQTQPLALMTS, Run with SignalP
  misc_feature (563)...(659): similar to gi536474 in the genepept database release 114, Run with FASTXY 3.3t00, default parameters
aactggggggaattccagagtgtcctggaacattggaaataggcttaaagcttaaatgatgaatcagaagacttatgctgtattctaatgctgccactaggggtttttcttccactcttcttctcatggactaggaaacctggggacttatttttgaggtcacaaaagaggaaaaaccgagactcctcaacccagacccaaccactggctttgatgacatcaggaaagagggaggaatgttctcttcagacttgggaagctggcaggcgactctcctggaggctggtgtgcttgaggtctctgaggggggcccagtcgcagcccctacagaccaggatagaacaatgagatgttttcatgccaggacctacagaaggaaccattcatctcttgctgcttcaggcaatagtccagcttctcttggcagggagcaaatctatgccaagattcactgaggttttggtgctcacctggatggcagaagaccctctctttcttcctgggtccattgaacacataaaaaaacttaataggtgatcaaaactgagccatttccaggctcctgaggcatttcaatgatcattatactattagaaccattgaataaattttcaaggtcccccgctttacggtacgagggggcgggaataacttcagcagggaaccagctcctgccccgtctgcgtttcagtccggcaccccactggggcactggcc

SEQ ID NO: 80304 - DNA, 727 bp, Homo sapiens
  sig_peptide (533)...(398): this location contains the signal peptide sequence, MWTILLPTHLSSLSFLSFTVEPLFSVMPSLVRSVNCYSIHFVPFQ, Run with SignalP
  misc_feature (116)...(390): similar to gi639476 in the genepept database release 114, Run with FASTXY 3.3t00, default parameters
attcgtagaccctagtctagtgtggcggaattcaagccagagaatttctgccagaggccaccttcgtatcctatacttgtcccgtattccatcccttaagaactttaaacacagtggagtgctacactgtatggtttatgtgccctgctgtctaccaaagggcctgtatcatcagattgttttggtttggacatgcttcaaatttgaacttaaatagctctttagaacattatcgaggcctttccccagaattaatatctattcctttatttcattcaccattttcagattgtctgctacgtgcaggccttttgttacgaggcaatattggtatacaaaaaagaattcaccaaggagcttgaagaacagttggggaattaaacataaaaccaactattgaaaggggacaaaatgaatactgtagcagtttacacttctaaccagggatggcattacagagaaaaggggctcaaccgtgaaggataagaaagatagagaagaaagatgtgtaggaagtaagattgtccacattctagaatgagaggaaaggaaaagcaaagacagggaatggcaggtatgttaccaagagatgaaattgaagcagtacctcccatgcccaaaagcttactcttttattttggacgaaggagatcatttaagaagctggaagaggaagagggaactggtccagcctattttaaaaaagattactcttaaccccagggtc

SEQ ID NO: 80305 - DNA, 468 bp, Homo sapiens
  misc_feature (1)...(468): n = a,t,c or g
  sig_peptide (245)...(380): this location contains the signal peptide sequence, MLLGCSLLTTWVVSTEMGRTVKGWRHLTVLFPCADLSFACGHPRS, Run with SignalP
  misc_feature (416)...(305): similar to gi222591 in the genepept database release 114, Run with FASTXY 3.3t00, default parameters
acggggctnnttactgatcgagtctctactgccgtgcggtggaattcccggcacctttccactagtcccatgttactgcgggagtatttccattttattcacgtaataatcctttagagagaacgaaagaatgtgattgcaaacgcatgttactgcaaactgatgcactttatcatggagtattaatgattcctttcacgaattttcggcttctagctaaaactttgcacgaactatttggacaatgttactggggtgttctctgctaactacatgggtagttagcacagaaatgggtagaacagtgaaagggtggaggcatctgactgttctcttcccctgtgccgacctgtcctttgcctgcggtcatccacggagtacactcacgagtggagacattttctccatttgcctaccggagctaccaccttccaacattatcttccagaaagctacaacagtcatgta

SEQ ID NO: 80306 - DNA, 564 bp, Homo sapiens
  sig_peptide (232)...(367): this location contains the signal peptide sequence, MGGRTQRLGPGALLLTVGTPSYVWGSPYQTKVPDLSLAREADTAQ, Run with SignalP
  misc_feature (15)...(159): similar to gi2296745 in the genepept database release 114, Run with FASTXY 3.3t00, default parameters
ccacagatgtgtgcacatgcaggcccacacacaggtgagcgtggacctgtgtgaacagatgcgcgcagacctgcacgtggagacacagacatgcaggcgcacaaagagatccctcaaggctgacacccaggaaggggcctctcacttgtgggactcccgagatgcagtggccaacactagtgtagtgcccagttcactgctggataagacagaggcctgttctggtcacacatgggaggcagaacccagagactgggcccaggagcccttctgctgacagtgggaactcccagctacgtgtgggggtccccataccagacaaaggtccctgaccttagtcttgcccgagaggccgacacagcccagctttggggtctggctttacccacaagaggccacaccttgccacagcactgtttatctggcctgtttcagaagcaccgtcagagtggcgaaggcaggaggtggtgcacgagagtctacgttctagcatccattcaagtgagggaaaggcgtttcgtacttagaaaaatgcaaaattaatgattctcacccacatgtatt

SEQ ID NO: 80307 - DNA, 465 bp, Homo sapiens
  sig_peptide (56)...(191): this location contains the signal peptide sequence, MSHAAAFSTWLSLMKLPSLPLHTTLFLHERPLGLFSSHPESCGTD, Run with SignalP
  misc_feature (8)...(200): similar to gi1335110 in the genepept database release 114, Run with FASTXY 3.3t00, default parameters
tttgagtttcgtagatccctagtccgtgtggtggaattcaggactgctgacggaaatgtcacacgcagctgcttttagcacttggctctcactgatgaagcttccctctctgccactacacaccaccctcttcctacatgagagacctttagggctctttagttctcatcctgaaagctgtgggacagattataaattgatatcttttatatcagtatagctcatgcttggttgatgtgcctgatgggctataggagtgattgactcagctactattttggtgaggaaagagagtcttccttagaaagagaattgtgtgccttgccctaaaaaggttaggaatgcggcctatggtcctaattaagtgccctgttaaacagtgtcccttgaacaagtcactttcttcttctgcaacttctccagctatataattaagcatgtaatcctgtgtgacttcatagtagg

SEQ ID NO: 80308 - DNA, 659 bp, Homo sapiens
  sig_peptide (466)...(601): this location contains the signal peptide sequence, MGGTPWAQAPTQTSLTTLAMSSLSWLVRSGAIFTRTAGLCTLRKP, Run with SignalP
  misc_feature (633)...(635): similar to gi555594 in the genepept database release 114, Run with FASTXY 3.3t00, default parameters
caatcgatcgcgtactctgtgcggtggaattcttcccctaggacagggtccagtccttacaacaacccaattacagtgtcttgtctgaggcccccaggtagtaagtggtggaaccaggatttgaacccacgatggccgggctcagtctgtttccactactctcctatgccacagagacccgctgtccagacaggctggagagaggagtgagagaaagaattttcagtcccagtcaagactggccaaggagccaagctcaagccttaaacttgctggatgcagttgacaaaagagaggaagaggcattagaaaaactccttcaagcacttattccaacattcgcttttgaccacagggtgagttacaccatgacacacaccaaaccagccttgaataccaaggagaggaaatcacaaagaacgccattctgggctagcccagctggccaaacggcctctgcagaccatgggaggcacaccctgggcccaggccccgactcaaacctctttgaccacactggcaatgtcctccttatcctggctggtgaggtcaggagcgatcttcaccaggactgccggcctgtgcactctccgcaagccatccctctcctgcagcacttagggcgacacacggccagagctggaattccaccagactgt

SEQ ID NO: 80309 - DNA, 1038 bp, Homo sapiens
  sig_peptide (774)...(639): this location contains the signal peptide sequence, MRKLIAGLIFLKIWTCTVRTSTDLPQTEDCSQCIHQVTEIGQKVA, Run with SignalP
  misc_feature (1039)...(805): similar to gi2587023 in the genepept database release 114, Run with FASTXY 3.3t00, default parameters
tggctcaggagagcatttataaacttctcctccaaccacaatatttacttgaggatccagtccagccccatcaattcctagggttacatgctccctttttttccagcgaggatgaagggggttggttattactagttctaaggggttacactgaccactggtacaggaagggccacttttccttttctgaaggtggacaggatccttttcattttttgtccaagtagcctaagtgacacaagaccagtatccacgttcatttccacacagccctaattcatcacaaatgtacttattttctgccatatagcctctttcctaattaagagacccacatcctattcttaacttattactattaatgacagcacaggcatcaaattttaaggtgacttctttgggcacccctttttcttctgttttggctaacactttactcatatagtttatgagcccccaccagtcctcagtccttagtcttattttaaaaactgtggtcatgggaggctcagatgggtcataacacatcaggttggtcatttcctgggctatataccttgtatagaataacattatacaaacaagttctttttagagttccagtatacttataataaccataaaataataggactgtagcaaccttttgtcctatctcagtgacttgatgtatacactgggaacagtcctcagtctgaggaaggtcagttgaagtccttactgtacaagtccaaattttaaggaaaatgagtcctgcgatgagttttctcatgcttcggccatgcgtggggccagtcagcctccgggtgtgactggagcagggcttgtcgtcttcttcagagtcactttgcaggggttatctaggcttggtctcacctcccaggtctcaggtgctgcaggttttacctggctgtgttggatccaggctgggattccctctatctttacggctgtgggagtggtcaagatgatggtctggggtccttttcaccgtggccgcaaggagcctatgttccaatccttgatccacacctgatc

SEQ ID NO: 80310 - DNA, 979 bp, Homo sapiens
  misc_feature (1)...(979): n = a,t,c or g
  sig_peptide (276)...(411): this location contains the signal peptide sequence, MISRLFPWNVTLMCFCLFTALLEPCSQASSFIHFSPFSYQGGECV, Run with SignalP
  misc_feature (607)...(351): similar to gi3687488 in the genepept database release 114, Run with FASTXY 3.3t00, default parameters
cgcccccatagatcgccttcggattagcaccgcatgcaggaattcggcacgagaatattttaagtaccgaacatgctggttttcccacaaaggcacatttttagcataaagctttttgctagtttggtatcatctgcccataaaataagtcaatacttgagctattggaaaaataattgtgtatatttttatttgtttagaaaggttcagttagcattttctccatacgcatactacaattctgtacagccaacccttagtggccagttggatgcatgatttcgcgtttatttccctggaacgtcacgttgatgtgtttttgtcttttcactgcattactggagccatgtagtcaagcatcaagtttcatccacttctcaccattctcctaccaagggggtgagtgtgtgagagttgagggtgaggatgggggaacacggaggatatacatttagcttaattctaaatgtgtatctgcttttaaaaacttctaaacttataaagttggtctttgattctgtcaagtaaattgggtgtttgaggaactaactgctttgtctgtttgctccatgtaggattgagttacactgataccctgttgatttggtaattccagctgctccatttgtctggtttgttcagaactggaatggaagcttaaacataatgtagtgggcatcatgctgtaacatccagttggccaaatgctttactctaaaaatgtgccacagtggggaaagcacgatgtttgatgtttaaaatgtttttgttatgttacagacttttaaggttatgccctcaactgtgcatagcagtgaagagacttgaaaaggaagacagtaaagccttacagacttcccttaagtttgctgctctataagtatgcagcctgctgcaggtgtttcctgttggttagtaaataacctccacacattgaatgtttccacttcagctattaataaaaatgtgtncaattgtc

SEQ ID NO: 80311 - DNA, 460 bp, Homo sapiens
  misc_feature (1)...(460): n = a,t,c or g
  sig_peptide (153)...(288): this location contains the signal peptide sequence, MHAAFVPGRIWRWTLMSLSRQRTGIINSSTKESRRDLILMCSAWC, Run with SignalP
  misc_feature (406)...(294): similar to gi2454158 in the genepept database release 114, Run with FASTXY 3.3t00, default parameters
attgagnaatgtagatcttctagcccgngcggnggaattcctttggcctgctttattaaaataagtttttctttgaaaaataattgacctatttttgatctgcttatcatctactgagtgaccatacacactcgactgccatgagtataaacatgcatgctgcttttgtgcctggaagaatttggcgctggacactcatgtctttgtcaaggcagaggacagggataattaacagcagcacaaaggagtcaaggagggaccttatactaatgtgttcagcatggtgctcattctgagagaatactgagtcattgtgaaaacttcttttgaaatgcaatattttccctttaaaattaaagccatctagacctgtaaattaagggccactcctagcaaaattgctgattgcgtgttgaaccatggtgtgaactcagcttattggacctgtctgtgtgaactg

SEQ ID NO: 80312 - DNA, 1459 bp, Homo sapiens
  sig_peptide (146)...(281): this location contains the signal peptide sequence, MAFASVLLARASPAVVRACLSRCAYGVGSDCPHLVTLAALILFWV, Run with SignalP
  misc_feature (231)...(526): similar to gi309074 in the genepept database release 114, Run with FASTXY 3.3t00, default parameters
gcggtggaattcgctggccagctcgctctctattcctgtgatgtctcctcaactagcaggctgccctgggcttattcatgtatcacagggttctagagtggcaagagaacaagtgtcagtgcacactctttaagtctttgcttggatggcgtttgctagtgtcctgttggccagagcaagtccagctgtagtgagagcgtgcctaagcagatgcgcgtatggggtggggagtgattgtcctcacttggtcacacttgctgctctaatactcttctgggtttaaggcaaatgcagatttcagtttatcttaaacatgtattctgctcatgtattctggtactttccttagaaggtatggcaaattcacatttgaataaatactcacgaaaatggtgatccagcccccctgctctgccccttgttagctgtgggaaactttggacagatgctgaacatttctgccattgtgtttctgtttcttccttttcgaagtattgagtggggtgggagttagcatggctaaaggatcattagtttatcgtcagatctttgttttgaaggaatatactgagtgtactaccttcatttcccccagttctgagcccatggttccataatcccactcatactggtgtctgatgcatagcggctcactcacagagacaacagattccaaagtgcttttacagttctaacattctgtacctcgtgatctactgagcttagtttgtcaccagaagggggcaccattaggcaagttttttgtttctgtttaaaattatattcttttaatcttgttcttttacatggctcagtcttcaaaaatctcagttgaagtactgtgtttttatctttcacaagtttatcctgtaattaaaattctgtcacatttgtggcatctcaaaatgtaaatgataatgcagcaagtgaccagccattagatttgtttcctgtggctgccataacaaatcaccacaagccaggaggcttcaaacaacgcaagtgtcttctctcacagttctggaggccacaagtctgagagcgaggcatgagcagggccctccctctgaaagctctgagaaaggatctgtcttcacctctctcagctccgggtggctgctagcaatccttggtttgtagatgtgtcactccagtttctgcctccattgtcacgtagctgtcctcacattcacatggccttttttttttttttgaaaaaaggtctactttttttccccagcccaaagggccgggggggaattggggttaattggacccttgtccccctgggtggggggaattttttgccccaccccccccaaacaaaggggcccccctgcattccccggtaattttttgaaattttaaaaaagaacaggggttcccaatgggggcagggggggggttaatcccggggcattaaaaacccccccccaaccccccccaaagggggggataa

SEQ ID NO: 80313 - DNA, 731 bp, Homo sapiens
  sig_peptide (151)...(286): this location contains the signal peptide sequence, MSLLLHFYCAFMCTHTLLSIFDLYNPLHILCLVMCLTNDSVFSAL, Run with SignalP
  misc_feature (16)...(354): similar to gi206233 in the genepept database release 114, Run with FASTXY 3.3t00, default parameters
cgtgcggaggaattccatcacattgcaaatttaagaatgttcactgacatttttagtagccacttaaaaaatttttctaagcaatgatgtcattgtattttacttataatcagaagtacatcagcccgtgaatttagctaaaggtttttaatgtcacttttgttacatttttactgtgcattcatgtgcacacacacacttttaagcatttttgatttatataaccctctgcatattttgtgccttgtgatgtgtttaacgaatgacagtgtctttagtgcattgctatttggggtttctacactggaagtgtaatccgaggccttggaattggtcaaacaaaactcacttggcaacatttacttagagagcactctgcgagcactctgcgagcagacatgtcgatatcagctccctcctcgttcccccccccaccccccatcccatgtttatttgcaattaaagttaagatgcttgaaaatggctttaccattaatctagaaacatagagttgtttcctggtgaatgatgtatgacagttttctttgtgcttcctctgaatagagagtagtttttgtggcattggtacagagaacaacttttctgtaaggctcacaggctcaactgttttaaactcctggtgttcgtaaatttgtcagaagggtctgccagggaccgtatttatagaaaagaggtagaggggccactctaaaaagctcttcatgcatacc

SEQ ID NO: 80314 - DNA, 540 bp, Homo sapiens
  misc_feature (1)...(540): n = a,t,c or g
  sig_peptide (51)...(186): this location contains the signal peptide sequence, MLFIVAFEMFFIGPCFSNILCTLQSLIEIWTLTKSYLLQSFYNIA, Run with SignalP
  misc_feature (18)...(318): similar to gi3133198 in the genepept database release 114, Run with FASTXY 3.3t00, default parameters
caccaaccctggcctgttcaatttatttggaattttaaaaattactttatatgctttttatagttgcttttgaaatgtttttcattgggccatgtttctctaatattttgtgtacattgcaatctttgattgagatttggacattgacaaaaagctacctgttacaatctttttataatatagctttgtcctggcatagtctgaaatcaatagtcttggctagagattctgggaatttctcaaacatgttcttaggatgtgtcttgtctaaattttgtgtttattgtttagttaaatggcttattttttttaataatcagtaatcacttgctgcagccattccctgtttggggtactgcagtttctctgcttctctaacatttatctttagactcagtagactcaaactgtcattccaatgtatatcaccacttctttaagcgttttatgtcatgggagacattaaacagtgtctaagaagcacatagaagccagaaataaagatgtatgtgccaatgtttttctttannaaaaaaaaaa

SEQ ID NO: 80315 - DNA, 650 bp, Homo sapiens
  sig_peptide (23)...(158): this location contains the signal peptide sequence, MWLFIASKCIFLLIVPNFIFVFWRKVFSHDRLNIAYSFELSSKYI, Run with SignalP
  misc_feature (35)...(208): similar to gi4103890 in the genepept database release 114, Run with FASTXY 3.3t00, default parameters
gacagaaacagtgcttgctttcatgtggcttttcattgcctcaaaatgtatcttcctcttaattgttcctaattttatctttgttttctggagaaaagttttttcacatgacaggctaaatattgcctattcgtttgaactttcctcaaagtacatctttattttatttatctaaagaataagttacttaaagttcatagaagttgcttaacttagtagtgcattatcagggaatgaattctcagatagatgtctcatctttgaaagtgtaattgccctttgagagtatcatattaaattctaattcataaaactggaatataccacctctgcaccgtagcaatgtgaacataattctagtgcagagttgtgctgagaatcttgttcagagacaaaagtcaaaataaggaggccgggcgtggtggctcacgcttgtaatcccagcactttgggaggcagacgcgggcagatcacttgaggtcagaatttcgagaccagcttgggcaacatggtgaaaccccgtctctacgaaaaatacaaaaattagttgggcgtggtgctgggtgtctgtaatctcagctacttgggaggctgaggcaggagaatcgcttgaacccaggggtcggaggttgcagtgagccaagattatg

SEQ ID NO: 80316 - DNA, 377 bp, Homo sapiens
  sig_peptide (44)...(179): this location contains the signal peptide sequence, MIVLFPLLLLFQALPVSILCFFCLVISSLKSSRYFLKIFFKEIMF, Run with SignalP
  misc_feature (9)...(46): similar to gi14687 in the genepept database release 114, Run with FASTXY 3.3t00, default parameters
atattttaatgctacttttattgcctttactattgcttttagaatgattgtgctttttcctcttctcttgcttttccaagctctgccagtttctattttgtgttttttttgtcttgtaatttcgtctttaaaatctagtaggtactttttaaagattttttttaaagaaattatgtttctctgaattttttgaagctgaaatactatatgtttaacttattttttatgggacttttctccttcgcatgtatttatttatggcaatttttaatgagatacaaggaaggagagtggaataaaaatctttttactcggccatacttcagtagatgttctcaagacttaatttttaaaatttttaaagttttctgtgacgg

SEQ ID NO: 80317 - DNA, 742 bp, Homo sapiens
  sig_peptide (38)...(173): this location contains the signal peptide sequence, MVEVVSLLHLYAVACARKGPFPNTKDLSGWTPSSGREELWKGKRA, Run with SignalP
  misc_feature (199)...(365): similar to gi434712 in the genepept database release 114, Run with FASTXY 3.3t00, default parameters
ctgtggtggaattcgtggggctggtgggttctggagtatggtagaagtggtctcacttcttcatctttatgctgtagcctgtgccagaaaagggccctttccaaacacaaaggacctttccggttggacgccgtcctctgggagagaggagctctggaaagggaaacgggcggctgcggccactagaaacccgctggtcctcacaggtcttggcagcccaagtgcacggctctgacagcgatgagaagtacaggatcccctgacaccgtctagggacatcgggctgaaccaggggtgcagagtgctggaggaggggcctttggacatcaccaactaaaggcttgattcggagtgtggccaggcaccacggccagcccagcaggacacaggatgccggaggagaagaaggcagcgggcctgccaatcatggtgccctgcttcagagtgaggcagttgggagggccttccggaagacatggaggaaagtcagggcagccgacgaagctggaagcccagacgtggagtcggctgccctgggttccactcacagtgccacataccagctgtgtggctccaagcaagttcagctctgatctggggacaactgccctctgtgggagagctggtcccacgactattaatgcgggcgcaaggggacggccacttaccaggcggcctctttcagcactacccaagccacctgccttccctcgtactggctgacgcccgcacgacctgccac

SEQ ID NO: 80318 - DNA, 745 bp, Homo sapiens
  sig_peptide (286)...(421): this location contains the signal peptide sequence, MLVPTFFLLSLLDQSCLSICVSQDYFSSIVVQIRQIGSLCLNKSL, Run with SignalP
  misc_feature (745)...(636): similar to gi984293 in the genepept database release 114, Run with FASTXY 3.3t00, default parameters
cctggcgtatttcgtgcattcctcatgccagtcagagcacctggtgcttcttatgtgtatgttagagtgtggcatcccttttcccagacacatggtggactcacataacctgtccaaggtaggagagtctcatgccctgttgctaattgtttctggtacaggaggtctcaaaccttaagtttgacactgatatttagtggattcatgttttagcactcttctttccccttttactaaccatactggctgtgtagtgtagcaccctcgagctttaaaatcagcctgatgttagttcccacattcttccttttatctctcctagaccagagctgtctgtccatatgtgttagccaggattacttctcttcaatagtggtccaaatcagacaaattgggtcactatgtttaaacaaatcactgtaaagtacaatttttagataccagaggacattttaaaatatgactattttatgggttcatgatgagataccataaaaataatgctccaggtaaaccgttccctggaaataaagatggatcaaagcaggatctcaaataagaacaagaatacattaaaaaatggttcttggggccaggcacggtggctcacgcctgtaatcccagcactttgggaggccaaggcagggggatcacctaaggtcaggagttcgagaccagtctggccaaccatggtaaaaccccgttcttactaaaaatacctaaattagctgcgcgtggggccccg

SEQ ID NO: 80319 - DNA, 1040 bp, Homo sapiens
  sig_peptide (24)...(159): this location contains the signal peptide sequence, MPTLAKWILSLSMTSTTWSPCSSMIPLMASSTAPSRLRTGSLPSM, Run with SignalP
  misc_feature (11)...(370): similar to gi31645 in the genepept database release 114, Run with FASTXY 3.3t00, default parameters
cgtcgtggaattcgtcaccagggatgccaactctggcaaagtggatattgtcactatcaatgacctcaactacatggtctccatgttccagtatgattccgctcatggcaagttccacggcaccatcaaggctgagaacgggaagcctgccatcaatgacaatcccatcaccatctcgcaggagtgagatcccacccaaatcaagtggggtcatgccagcactgattatattgtggcggccaccagcatctttgccagcatggagaaggctggggatcacctagatgggggagccaaaagggtcatcatcactgccccctctgctgatggccccatgtgtgtgatgagtgaaagctatgagaagtactgcctgcagtaagagcttgctactattaatatcatcattttagtaatcatactctgaatcttggcaaaaaagaaaagacggttctgaaaatcaagtctgtctgtttctgccagaatactcatgagacagtttggtcctaaagcagcaattaggagtaaagaaccaaaacagtgtgatcatccaaaaagtcagcttctggcttagctccatcaggatcccaattctctacggagtcgagaattatgaaaactaaagctatttacagcttttaacaattgagtaaaggatactgttaccagaattgggagcatatttggtgctctctacctgggttctccagaatttggaaactatttagtcactgaaaactaagctgtgttttcttaaaaccctgcaaactgaagccagacaacttgaacttcagaagaaaataacagcaacctatttacgtacataagccactttcatacctgcctactaatgtatggacttcagagtaatgtggcttatatcgatttttctaggattgttcttttgtttgttgttgttttttctcccttcctccctgctattttctcttcacagaatgtgagacttcacaacctactaaaaatgagcttttgggacttacccatctaggaataaaccatcatagctatgagaaatcagatga

SEQ ID NO: 80320 - DNA, 684 bp, Homo sapiens
  misc_feature (1)...(684): n = a,t,c or g
  sig_peptide (78)...(213): this location contains the signal peptide sequence, MPRYSHFYCSRLLQSRLIFFLILCCHLQKIIRKIGLTLCPIYIWS, Run with SignalP
  misc_feature (21)...(19): similar to gi1197008 in the genepept database release 114, Run with FASTXY 3.3t00, default parameters
ctaaaatctaaaatatttactatttggctcattacaggaactgtttgccatcctttctgtaactttagtttgtgctgatgcccagatattctcatttctattgcagtaggctgctgcaatctagactgattttttttctcatactatgttgccatttacaaaagattataagaaaaatagggttgactttgtgccccatatacatctggagtagatttcagagatttctaggggagattataggttagggaagtgcccagtataaagcacatttttcacgtttctaacagatctatgtcagttcaccttagtttcttcaagtccttaggaaagatggctggaggagtataaactttaaagcaatcgttgttaaaagtataacctaaagaccttgggagggaggccaggcacgatggcacatgcatgtaatcacaggctgaggcggctggatcacttgaggtcaggagttcaggaccagcctggccaacatggtgaaaccccatctctgctaaaaatacaaaaattagctgggcacgggggtgcatgcctgtaatcccaggtacttgggagactgaggcaggagaattgcctgaacccaggaggcagaggttgcattgagccaagatcataccactatactccagcctgggtgacagagtgagactctgtctcanaaaaaaaaaa

SEQ ID NO: 80321 - DNA, 409 bp, Homo sapiens
  sig_peptide (190)...(325): this location contains the signal peptide sequence, MRFIVLTSLLKLNFELVIGNHKLMIKLCYLSRISINPVTHDIHKQ, Run with SignalP
  misc_feature (343)...(150): similar to gi293756 in the genepept database release 114, Run with FASTXY 3.3t00, default parameters
atacaaactgatgtatacataaataagggataccgtataccattgatgaaactgtgctgtgaaacaatcatttagattaatttcatttaaatgcagttcatttaaaggtaaacctaaattattgttatctatgcgagaggggcatagagacaagtattcattatatagttcttttccttgtatttaggaatgaggtttattgtacttactagtttattaaaacttaactttgagctagtcataggcaatcataagctgatgataaaactctgttacctatcaagaatttcaattaatccagtaacacatgacatccataaacagaaagaaaaatcacagtggtttcattctttctaacatctcttttgtacttcacagaatggaggcgtgatggctgatgcaatcattt

SEQ ID NO: 80322 - DNA, 2528 bp, Homo sapiens; identical to SEQ ID NO: 80289
  sig_peptide (450)...(585): this location contains the signal peptide sequence, MPAIVVFLFCFVISDGLTLSPRLDCTGLNLLSSSDRPTSASPVAG, Run with SignalP
  misc_feature (512)...(748): similar to gi2580578 in the genepept database release 114, Run with FASTXY 3.3t00, default parameters

SEQ ID NO: 80323 - DNA, 417 bp, Homo sapiens
  misc_feature (1)...(417): n = a,t,c or g
  sig_peptide (145)...(280): this location contains the signal peptide sequence, MKNTWGLLMYLHFCVSCRMSLMYKCSIFSVKTQMLLEDGGRKHIL, Run with SignalP
  misc_feature (12)...(156): similar to gi15908 in the genepept database release 114, Run with FASTXY 3.3t00, default parameters
cacattttattctgccaggatctcagcttccttccccttttctgttcctgtcatggtcaccacactgatgcactttgcggaagagaaggtggcaagtgccctgtgtgcttttatatgtgagacaggacctgacaaataagtactatgaaaaatacctggggcctgcttatgtatctgcatttttgtgtttcctgtcgaatgtctttaatgtataaatgtagcatcttctcagtaaaaacacaaatgcttttggaggacggggggaggaagcacatactagaattggcatgctgtttctaaagccctctgggaaaaacaaacatgtaagaaataaccaagatattcctggaaaagcacagcattgagagggacactggcactccanatactaaaaagtctaagataaagataccattg

SEQ ID NO: 80324 - DNA, 859 bp, Homo sapiens
  sig_peptide (151)...(286): this location contains the signal peptide sequence, MTVLCWAFIFIFPHICPYGGDAFEYFHFSFQLFGLKLCSHGVPPN, Run with SignalP
  misc_feature (518)...(342): similar to gi3603102 in the genepept database release 114, Run with FASTXY 3.3t00, default parameters
aacctttccagatctctagggattggattgcttgggacattaaccctattgggagaatcatgcagttcccacaggttgagtcccatcttgcctggtggcctcgccagtctgtttacatcatttaatggtgcctgcctgcttacctttactatgactgtactctgctgggcttttatcttcatttttccccatatttgtccttacggaggagatgcttttgaatatttccatttcagctttcaactctttgggttaaagttgtgcagtcatggagttccgcctaatggtatatggtaaacttacacagaacacagtttaccagtcactgtttttaatgcctaattcattcactcctcaaagtgaactatgaagaatctaagtcacagagagtttatataacttgcgcagggtcatttggatcgtaggtctccaggcagagcttgggtcctgggactgtgtcccctggtagcggtgaggactccaggaggccttggtgtttgtttctctgttggtacacactggctttgcaccctgagccacatcactgcttcagttttcaagactgtccagtggagacacctgttggagtccccaagtgccaccagagttaaaatgagtcgaaggattctcatcccttttatatggccttgggggagtcctattatcaacgacctaatggtagtcggcgggaaaagccttccctgctggcgaaattacccataagcccctggtgaagggggacccccctgtgggcccccgtttccttttgcttcccttgggagttttttacatggaacgctggctggggcgaagcgggactctgggtgatcgaagggaagaccttttccaaccgaacccc

SEQ ID NO: 80325 - DNA, 2012 bp, Homo sapiens
  sig_peptide (939)...(804): this location contains the signal peptide sequence, MQDAVFSIICLKVLLIGMLLFCTVDGPVLQEVVWYIFRTWGFRIF, Run with SignalP
  misc_feature (14)...(313): similar to gi3874336 in the genepept database release 114, Run with FASTXY 3.3t00, default parameters
tttcgtgggtgtgccaaccaaaccctgaacagaggaggtggcggtggtggccctcgcctgtggcccccgtgctgcttgcactcgaactcgtcgccatggaggagctccaggagcctctgagaggagagctccggctctgcttcacgcaagctgcccggactagcctcttactgctcaggctcaacgacgctgccctgcgggcgctgcaagagtgtcagcggcaacaggtacggccggtgattgctttccaaggccaccgaggggtctgggcctaacagcctccactgcctgggctcactcagggagcgcctcattatttgggcagccatggattctatcccagccccatcatcagttcagggacacaacctgactgaagatgccagacatcctgagagttggcagaacacaggaggctattctgaaggagatgcagtatcacagccacagatggcactagaggaggtgtcagtgtcagatccactggcaagcaaccaaggacagtcactcccaggatcctcaagggagcacatggcacagtgggaagtgagaagccagacccatgttccaaacagagaacctgttcaggcactgccttcctctgccagccggaaacgtctggacaagaaacgttcagtgcctgtagccactgtagaactggaagaaaagaggttcagaactctgcctttagtgccaagccccctacaaggcctgaccaatcaggatttacaagagggagaagattgggagcaagaagatgaggacatggaccccagattagaacacagttcctcagttcaagaagattctgaatccccaagtcctgaagatataccagactacctcctgcaatacagggccatccacagtgcagaacagcaacatgcctatgagcaggactttgagacagattatgctgaataccgcatcctgcatgcccgtgttgggactgcaagccaaaggttcatagagctgggagcagagattaaaagagttcggcgaggaactccagaatacaaggtcctggaagacaagataatccaggaatataaaaagttcaggaagcagtacccaagttacagagaagaaaagcgtcgctgtgagtaccttcaccagaaattgtcccacattaaaggtctcatcctggagtttgaggaaaagaacaggggcaagctgaagttatcaagggaatttttgagcctctgcttagtgaaacacaaaggaacaaagcagctataaactaaatagaatgcaactatctgcttttcttatgctgaccactggagtccatggtggcaagtagagagctgctctaggttcttgaggtttggttttcattattaatttttagggtatggggcactgtggcaaagactccatagctgtgcctaggagtctaggaaaagtgacagaggcttggcttttttacctttagttcagccaagtcattttcaagtcctgagaaatgacatcatcttcaggataaaataatgaggacattagacaaaccaaactaagtgaattttagcctggtagcctctctaaggaaacagtaataataacttctgataagagttaaaagaacttgtagcatacctggatataatgggaaagggcctgggtgttacccatgtactgaaaatgaacttttaccaacatggctaaaaaattaaaactgactgcttctgtgtcctttgtacaagtttatatgtttcccttaaatcttccaaggcagatggttcttaaccctggctttacatgtgagccacttttggggctctctaaacaattagatccccgggccccagcccagatgttatgagttacaagattatggtttagacatcttttactttttccaagctttgtgtgtgaccaagatacatactttactataaggctctaccaaattcatcttaaaattgacagctaaatactgtaattatatagtaggaagaaaattcttttctgaacataggagttcctaggagccctactttaggtgatcctag

SEQ ID NO: 80326 - DNA, 407 bp, Homo sapiens
  misc_feature (1)...(407): n = a,t,c or g
  sig_peptide (178)...(313): this location contains the signal peptide sequence, MALKCNGQLGRLLLSHVGPLYFLVFVVVLPLSTPNVWAPLLLDSG, Run with SignalP
  misc_feature (359)...(144): similar to gi3860621 in the genepept database release 114, Run with FASTXY 3.3t00, default parameters
tttcgttttatctgtgctgtaatttgagtacagtcagttttctggatgttttcagagggccgaggctttgtgcagggtctttatttgtattaacaggtgaattcttatctttggtttcacaggaggatgtattagcaaaacgtttttggtgttgaaatttgggctgtgatccagcagatggcgcttaagtgtaatggccaattaggtaggctcttgctcagccatgtgggtcctctgtatttccttgtgtttgtagttgtactccctctcagcactcccaatgtttgggctcctctactcctcgattctggctgcagatctcggcttgccactcccgggctgcacactgaagtcctgagccgagctcaggctttatgttccctccacagcttggaggaagcaggggn

SEQ ID NO: 80327 - DNA, 1058 bp, Homo sapiens
  sig_peptide (156)...(291): this location contains the signal peptide sequence, MELGCWTQLGLTFLQLLLISSLPREYTVINEACPGAEWNIMCREC, Run with SignalP
  misc_feature (31)...(294): similar to gi516695 in the genepept database release 114, Run with FASTXY 3.3t00, default parameters
tttcgtgatgaggatgggagagcctggcgagctgaaacccgagctcccgctcagctggggctcggggaggtccctgtaaaacccgcctgcccccggcctccctgggtccctcctctccctccccagtagacgctcgggcaccagccgcggcaaggatggagctgggttgctggacgcagttggggctcacttttcttcagctccttctcatctcgtccttgccaagagagtacacagtcattaatgaagcctgccctggagcagagtggaatatcatgtgtcgggagtgctgtgaatatgatcagattgagtgcgtctgccccggaaagagggaagtcgtgggttataccatcccttgctgcaggaatgaggagaatgagtgtgactcctgcctgatccacccaggttgtaccatctttgaaaactgcaagagctgccgaaatggctcatgggggggtaccttggatgacttctatgtgaaggggttctactgtgcagagtgccgagcaggctggtacggaggagactgcatgcgatgtggccaggttctgcgagccccaaagggtcagattttgttggaaagctatcccctaaatgctcactgtgaatggaccattcatgctaaacctgggtttgtcatccaactaagatttgtcatgttgagcctggagtttgactacatgtgccagtatgactatgttgagggttgtgatggagacaaccgcgatggccacatcatcaagcgtgtctgtggcaacgagcgggcagctcctattcacaacataaggatcctcacttcacgtccttttccactcccagggctgtccaaaattttgacgggtttccatgcccctttttgagggagacaaccacgctggtcctcataccctcggttccattaacggacccaggctccttttacagagcgtggtcttttcaatgcggcccccgctctccgcgcccattacttggcagaacgctctctcaaaaattcttgttgaggcttcggggtcgtcccagacgaccctacatgtctacactcactcccttctagtccc

SEQ ID NO: 80328 - DNA, 475 bp, Homo sapiens
  sig_peptide (127)...(262): this location contains the signal peptide sequence, MRIFFAFQSGLLASASFLPTKNSVDSQINIFKLVHSLRRSSRRSS, Run with SignalP
  misc_feature (11)...(171): similar to gi2190500 in the genepept database release 114, Run with FASTXY 3.3t00, default parameters
ctagagcccctccgagaatgatagccatcagatcccgcgtcgacccacgcgtccggaggacagtcggagtctcccactatcttctggttaccgcgccttccagctggcatcattttcctctgttccatgagaattttctttgcatttcagtctgggctgctggcctctgcctcctttttgcctactaaaaattctgtggactctcaaattaacattttcaaactggtacattctttgagacgcagctcaaggcgtagttcttctaagaagcctctcccttgactattctgcacagtttaatggagctgagaccaccctaaattattcaggtagccttgagaatctgaacctttgaatatttaatgaattaccaaaatgtgtgtgttgaggaacaggagttagctacagagagactgatcacagttaccaccgactagaagcccttactcctgacttgcttatagcaattggtggg

SEQ ID NO: 80329 - DNA, 731 bp, Homo sapiens
  misc_feature (1)...(731): n = a,t,c or g
  sig_peptide (147)...(282): this location contains the signal peptide sequence, MVTFVLWKIILQLETHWHYLLITASFYILLNAKLCKKVMVGEKSR, Run with SignalP
  misc_feature (133)...(276): similar to gi902352 in the genepept database release 114, Run with FASTXY 3.3t00, default parameters
aaaacatgctggggatcttgctctcttctttctgcacatgatcaagctttaaacctaagcgttgttttgcttgctgctatgtatgtatgatcacatactcacaaataaggggcaaaatgagagaggcagtgagtcaagtcatctaaatggtcacattcgtcctttggaaaattatcttgcaacttgagacccattggcattatttattaattactgcctctttttacattctacttaatgccaagctatgcaaaaaagttatggttggagaaaaaagccgtctatggaaaagaacaagcattacctgtgtgtgagtcctactagattcatcagacttttggcttctttgcctcacactttttaaatgtattatcttcagaaaaagcatttttacttgaaaataagtttgcgtttctgctacagcaagttcatctcacattgagttattggccaagactgccgtggtaaatatagtctgctccacctagaactgaacttatttttatatggattgggcctccctcgaaatttagcatggtgataaacatgtctttttagctttccaaagtgaatgaaattcacggctaacttgattttcctgaaacctatcttaagaagtaaaggaagtgactatcaatttgggacccggataaaaaggtaggaaacctttgattcattaaatcattggactatgaagacctaagactacagcggccccttgaantcctggc

SEQ ID NO: 80330 - DNA, 586 bp, Homo sapiens
  sig_peptide (174)...(309): this location contains the signal peptide sequence, MVFAWGLAVNKTSLVPIFMDLSLAGKIYIKQRMRMEENLLGDNEV, Run with SignalP
  misc_feature (362)...(259): similar to gi2114482 in the genepept database release 114, Run with FASTXY 3.3t00, default parameters
ggttttaccatgttttccaggctggtctcggactcctgacctcgggtgatccgcctgcctcaggttcccagagtgctgggattataggcatgagccatggcacccggccagtagcttcaattttttgtatttagtggggatgaaaaaaatcttatttaactagagtatatactatggtatttgcttggggtttagcagtgaacaagacatctctggtccccatcttcatggaccttagtctggcagggaagatttacattaaacaaaggatgagaatggaagagaacttgcttggtgataatgaggtcaaagaagagaaagatcaagctgttaaatggcaaactttgaggtggtgaggaggactgatatgggtgtaaagtcttaatgaaggagggaaaagtgactgaagaggtagacagttgagaaatagttggtaaaaggtgatagtgttgatttgagctcaggtgaacaagcatttttataaggggctagaggaagaatggtccagaaatggctttgaggaatgatgaaaacaccaacatcaatactggactcttaaggtgtatgggctgtgtagatctcattc

SEQ ID NO: 80331 - DNA, 398 bp, Homo sapiens
  sig_peptide (99)...(234): this location contains the signal peptide sequence, MLALFFFHWLLTVMSLCFASTVSYPQVFRTHLIFFLDTVLLLLLS, Run with SignalP
  misc_feature (3)...(155): similar to gi4049654 in the genepept database release 114, Run with FASTXY 3.3t00, default parameters
taaaacctaaacttttcctttgcctcatggcagtattggggttggttaaaaatgataacttcagagacttcagatctccagacccatgagctttacagatgctagctctattctttttccattggctcctgactgtgatgtccttgtgcttcgcttccacagtctcctatccccaggtttttaggacacatttaatcttctttcttgatacagtgctacttctcttgttgagtatttgatggacttggtgactgttacattcttccaaggccacctttttttggcatctggttcaaactatgtctgtttttgctagaaactgtcacgtgaataaaggaaagagtagaaattattgtagtcatattgcagagcaatttgaacattccactgaagttgaa

SEQ ID NO: 80332 - DNA, 388 bp, Homo sapiens
  sig_peptide (168)...(303): this location contains the signal peptide sequence, MLTLSHLSLHIILCKGKLRFREQKLTTWASQLVSKPACCRRKGLE, Run with SignalP
  misc_feature (32)...(153): similar to gi60953 in the genepept database release 114, Run with FASTXY 3.3t00, default parameters
ggacatttaaatccctgttattaggaactctcagctgcctctgtctgcttctgcaccctctgcctgcttctgcaccctctgcctgacctaccactttgtgatttggccccacagagacctttatcttgcttctgagtgggactgagtcttttaaattttaacagttcatgctaacactctcacatctgtcattgcatatcattttatgtaaggggaagttgagattcagagagcagaagttaactacttgggcctcgcagttggtaagtaagccagcctgctgtagaagaaaagggctggaaaaggtttctggggaagtgctagaaatttaataagcatgtagagagagaaaaatcattcattatacatcacaaaaattaactgtagg

SEQ ID NO: 80333 - DNA, 480 bp, Homo sapiens
  misc_feature (1)...(480): n = a,t,c or g
  sig_peptide (333)...(198): this location contains the signal peptide sequence, MVSVVPIISFFKLLLFVKSNYLNRMEVKLRLKRANGGGGGGVMTA, Run with SignalP
  misc_feature (74)...(28): similar to gi1498235 in the genepept database release 114, Run with FASTXY 3.3t00, default parameters
cttttggggctaacggccctatccttttttggaaccatagtcctccagtcatttccctttccatatttttaacctctttttctgcttgtctcttccattcatgaatgttcatttcccattgtaaaacatgttcatttcccattgtaaaatatgttgtccacattctccctcatgccatctcttgaaaagcttctttagctgtcatcacccctccccctcccccaccattagctcttttcaatcttagtttcacctccatcctattcaaataattgcttttgacaaatagaagtagcttaaagaaagaaattattggtaccacgctcaccatagacaaattttagcctttacgtcacttaacttttttgcagcatttaacacttataacagctctattattaaaatcggacgcgtgggcggacgcgtggctcgacccgggatttccggtccggtnccgcaggcgacagtctgcaatcggtg

SEQ ID NO: 80334 - DNA, 548 bp, Homo sapiens
  sig_peptide (139)...(274): this location contains the signal peptide sequence, MSSLHCALNCLLSCTMFLFFWFGWNLRTLLKAMTDGDSRFLLLSQ, Run with SignalP
  misc_feature (11)...(103): similar to gi298345 in the genepept database release 114, Run with FASTXY 3.3t00, default parameters
actagttctaatttacagatttatggcagaaataccaagaattccttcagagaagatcctagagaaggaaacaggctgactgtccagtatggacttggaaaatacaacactgccatggctgcttgtatgaagagcaaaatgtcttcactgcattgtgccttgaactgcttgctcagctgcactatgttcctgtttttctggtttggttggaacttaagaactttactgaaagctatgactgatggagactccagattcttgcttttaagtcaattcataacatcttccagacttcactagtactgcacatttttgtcactatttaaaaagctgtgagttctagaacgagaacaacaaaaaactctcctggtaaacattctgctcatggtgctagccctcatactgctatttttctaaacttcacattgtgccctaagaatgaacatttctttttctcttaattgatatttgggagaacagggcctcactatcttcacattaatcatgtcccacccccctaatcctactcctgaggcttaaaaaaaaaa

SEQ ID NO: 80335 - DNA, 858 bp, Homo sapiens
  sig_peptide (19)...(154): this location contains the signal peptide sequence, MSTVYLFGLRAWALAFDCLGWSPSSATVAHAVGLHPGVHGTYHSR, Run with SignalP
  misc_feature (82)...(277): similar to gi3002482 in the genepept database release 114, Run with FASTXY 3.3t00, default parameters
cacactcactactttaaaatgagcacagtgtatttatttgggcttagagcgtgggctctggcatttgattgccttggttggagtcccagctctgccactgtagcacatgcagttggtctccacccaggtgtccatggcacttaccattcgagagtgcaccagcctcacttccaagtgctgacactgtcactttgcttgagggcttcttctgactatcagagtccatcgcgccctcccacaaaaaggctggaagtactggggaattaattccactcctcctccatccccaagcagccctcatacaatggctgttgggaattggtagacaagtctccctgctccctcacgcctcaggtacaatagctgtcaagcacgcacttttgattgtctcccagttccaaggcaggattgagctccatttgtccaccatggttaacaataacgcagtcttcactggcctctgtcccttccctgctcatttctccacccgctttagctgcttcatggaatcgcctctcaggtaaattatttcacttgaatccttgtctcaaggtctgcttctgggaagcccaaattgagacagacttttgctagctgtatggctggccactggtgttgcctaatccctttgtatctctctttttcctatctgtaatggaaggagaataatagcacctctacctcacagttacaggtgtggtacaagctctcagtgcctggcttaggagaaagcactttacaagggggatctaaggttgggcgggggggctaatgcctggaatccccaacacgtttgggaagcccaggcgggtgggataacctgagggtccagaagtcaagaacaacctgggcccaaag

SEQ ID NO: 80336 - DNA, 853 bp, Homo sapiens
  sig_peptide (163)...(298): this location contains the signal peptide sequence, MELHRTFFVCSLSIVRLVLIAACICRLLALVATWDSFVWIYHAFL, Run with SignalP
  misc_feature (400)...(237): similar to gi56590 in the genepept database release 114, Run with FASTXY 3.3t00, default parameters
tttgataaattatcaaagtaagtgcacccatgtaactaccaacagatcaagaagttgcatgtagtcagcttcccagagctgctctctgagccctgtcaaggtgtgatcattctggcttttgacaccaaagattatatcttgcctggttttgacttcttatagatggagttgcaccgtactttttttgtgtgttcactcagcatcgtgagactggtcctcattgctgcttgtatttgtaggttattggcactcgttgccacatgggattcatttgtgtggatataccacgccttcctcacccactgtcaggtagaccgaccctggggttgttttcagcttggagctgttagaacgctcatggggtggctgttgcctgtgtctgttggatggactggctagggtgacatagggcaggctttcttctacaggagcacagcagtgtgtggcgagctcctgtcctctccatcctcaccacgggcacttgatgtgttactgatttatgtactagccattctgatcagtatgtcacagtagctctttctggtgtaagctgcattccccatggaccttttcctgtgtttactggccacttggagagcctcttttataaagagccttttcaagacctttttccaatgctcttcttgcctgactgtctttttttcatgtccgcccagcagatcttaatctattaaggacttgcaagcccttttgaaatcatacactaaatccaacccacggatgcatgtgaagtacccagcatgctacagcccgcataaggctctctttcatatgggccttgtgccccgccaaaatttttgcctttttgaacccttaattcatgcccccgtag

SEQ ID NO: 80337 - DNA, 385 bp, Homo sapiens
  sig_peptide (92)...(227): this location contains the signal peptide sequence, MLRSFITIAIIEWMIILKLQKGIWHIFSKPQNNVLQDNTHLDIKQ, Run with SignalP
  misc_feature (372)...(155): similar to gi2190541 in the genepept database release 114, Run with FASTXY 3.3t00, default parameters
aattactccctgaaaaattaaaaattacttaaatggctttgggttcaaagcagttaacctccaagagggtataactttgcaatttattaaaatgttaaggagttttattacaatagccataattgaatggatgattattctaaaattacagaaaggaatttggcatatattcagtaaaccccaaaataatgtactccaagataatacacatttggatataaagcagttagtggttggtttctgtcctctgcagggtaggtgaatggtaggcaaccccagacagccccaatatttttctttcccaatttccttgatttgggctgataaaccaagtataactaactagatgattgctggatttgctgctactagccaggaattccca

SEQ ID NO: 80338 - DNA, 401 bp, Homo sapiens
  sig_peptide (25)...(160): this location contains the signal peptide sequence, MATLGRCSLCFPACLGHEAWMGSSLPGSLILGSLHSGRLHGPLVW, Run with SignalP
  misc_feature (66)...(224): similar to gi5104315 in the genepept database release 114, Run with FASTXY 3.3t00, default parameters
tgacagggagcctgggagctgagaatggctaccctggggaggtgctccctctgtttccctgcttgcctgggccacgaggcctggatgggtagctccctgcctggcagcctcattctgggctccctgcactcaggccgcctgcatgggcccttggtgtgggaagccacgctggctcctgctttgtgcctcacagagcaagttcgcaggggtgagctcagcctcatggcagccaccatggcagcttcctgtgaggagcaagcaatcagcctaaagagctttgcacattattaatgtgtgtgcacatgggcctgccttgctgctccaaggactctccttgtggaagggctgagagaggacgtgccccttttcagtgcatctttcctctttctttcagcagggaa

SEQ ID NO: 80339 - DNA, 850 bp, Homo sapiens
  misc_feature (1)...(850): n = a,t,c or g
  sig_peptide (29)...(164): this location contains the signal peptide sequence, MLLKSVSIQHFCLLVFLMAHFPLLFAFMMNYSPSLPQKQLMNDSW, Run with SignalP
  misc_feature (18)...(115): similar to gi606881 in the genepept database release 114, Run with FASTXY 3.3t00, default parameters
cttggcaaacatgtactatgtttccttcatgttattgaagagtgtttcaatacagcatttttgtttgcttgttttccttatggctcactttccccttctgtttgcttttatgatgaattacagtccaagtctgccacagaaacaattaatgaatgatagttggtgcatgcatgcacacacacccacatgcaaaaaccttttatttggagatgcttttatactttatgaccacttgaagtctctccaattgttacatactgagagtgtaaaacattgagataataacttatacaaatagtcacaaaatggagaattgaatattggctcctgagttactctctcctattacccaaaagcccatgatacacagcctgttgtaaatatagtttcttttcaccttgaaaacattgccataaaactgaaaacactttctaaagttgtaaatttctattagcatattactgatgatttttaaaggagactttccattaaaaagaaatgataattttcttaattgcaagattaaacatggaaggtaaaagccatatgaaaatgataatactcataaaataagagtacctctggtcattagaaaactggaaagaaaaagattacagaattactagattaataggttgtggtcatctctgaaaattatgcttagtagaagatattagtgagtatttctataagtcagttaatattcaccaatattttggtaactccatanagcaaggcttagaataaaatcctgatatgactaaagaaatgcgctcagctgggcgcaggggttacgcctaatcccacactttggagcccaagcggtggattacctgaggtagagttacgc

SEQ ID NO: 80340 - DNA, 401 bp, Homo sapiens
  sig_peptide (80)...(215): this location contains the signal peptide sequence, MIRCGLACERCRWFLTLLLLSAIAFDIIALAGRGWLQSSDRVQTS, Run with SignalP
  misc_feature (9)...(287): similar to gi193207 in the genepept database release 114, Run with FASTXY 3.3t00, default parameters
ctcccagccgccgcccgggcccgcgcgcttctccgccgcgcttcgctcgtctcctctcgaccccacaccgccggtcgacatgatccgctgcggcctggcctgcgagcgctgccgctggttcctgaccctgctcctactcagcgccatcgccttcgacatcatcgcgctggccggccgcggctggctgcagtcgagcgaccgcgtccagacgtcctcgctgtggaggagatgtttccttccacaggggcggcggcggcggcagcgggtcctaagaggacggctgccacagcctcatggagtacgcgtggggtcgagcagcgctgccatgcttttctggggcgtcagcatcctggagatctgtttcatcctctccttcttcgtcctgtgtgtaccccagatac

SEQ ID NO: 80341 - DNA, 433 bp, Homo sapiens
  sig_peptide (177)...(312): this location contains the signal peptide sequence, MGNEIGVVLGLSLLPARLLLKAVQVIHFSFHLYTGKEGRWYLFLH, Run with SignalP
  misc_feature (20)...(135): similar to gi335531 in the genepept database release 114, Run with FASTXY 3.3t00, default parameters
caagctttttattaaggctttcaagtgctttagattcattacatgccattttcttcacatataacccttcagagaatatggcaaagatgtttttacagatgagggctttgttaggctctttttcttctctctcctcccctccccttcacttcaaggggaaatgatcataaacatagatggggaatgagattggggtggtgctgggattatcactgctgccagctcgcctattacttaaggctgtccaagttatacatttttcatttcatttatatactggaaaagaaggcagatggtatttattcttacatgagagacagtatcatgtaaacaaaataatcatatattatgatgaatgctgtctatgaagggaataaatgaggtgttatgatggataataatgaggtacttaacattaaaaaaaaaaaaaagg

SEQ ID NO: 80342 - DNA, 627 bp, Homo sapiens
  sig_peptide (69)...(204): this location contains the signal peptide sequence, MLFPSLVMGHIFCCFSCLYIVNFTLSFARLLLYSFKQCWAFSQDA, Run with SignalP
  misc_feature (52)...(193): similar to gi1183959 in the genepept database release 114, Run with FASTXY 3.3t00, default parameters
atttatagtaactgttttaatgttcttatctactcagtattccatcatttttgcatctgtgtgtattaatgctttttccctctctggttatgggtcatattttttgctgcttttcatgtctgtatattgtgaattttacattgtcatttgctagacttttgttatattcctttaaacagtgttgggctttttcccaggatgcaataaaggtgcttggaatttgttggctcttttcaaggcttcttttaaagctttgttaagataaatccaaagcagcctttattccagggctaattttactttactttgaggtgatgctttgatgctgcatatatttgagtctttcgctttggctgttcgaaacacaaacttatttccgtccctgtttgagctctaggaattgttcagtccactgctctttggggattagtcccccatccttgtgagtttcttctctgcactcataaagtcaggctaaatagaaactcagagaatccccctgcatatgtgttgagcgccctctcgtgccactcccttttattaacaccctgctctcccactttaaatgccttggcctcttgaactccaaaggcttgcccttttacttaccccccccccaccctggct

SEQ ID NO: 80343 - DNA, 428 bp, Homo sapiens
  sig_peptide (106)...(241): this location contains the signal peptide sequence, MNVSGLLCFTSLSLICLLYKMEQIAPRTSGYCKNEMKLDRAYQAD, Run with SignalP
  misc_feature (393)...(238): similar to gi1492068 in the genepept database release 114, Run with FASTXY 3.3t00, default parameters
gccgaagccagattggactctgcgctctgggagggtgtgttccatcaaccactgcacattcagtgcctggtaagacagggtgctcacgaagaacttggggaatgaatgaacgtatcaggccttctctgtttcacctcattaagccttatttgtcttctctataagatggagcaaatagcacctaggacatcaggttattgcaagaatgaaatgaaattagaccgtgcatatcaagccgacagcccagaaccagacgcacagctcagtaagtggctgccatctccattttcacaactagtgcaagtctgtggctctttcagaatcctgaaaggtaccatgattttctatcctaatcctctgttcttcaaagaatcactatcaaggcagaggaagttctaaagcacggagaatgggggggttcattcttt

SEQ ID NO: 80344 - DNA, 748 bp, Homo sapiens
  sig_peptide (156)...(291): this location contains the signal peptide sequence, MKSKRTIFFSKFLGSLQESVGVLLFLLVPVSVAAGVGRREAILCL, Run with SignalP
  misc_feature (32)...(219): similar to gi2160176 in the genepept database release 114, Run with FASTXY 3.3t00, default parameters
gtggagtaattcccttgggtaataataaattaaggtaagaagacagaacatggaaatgagaaattgtctttcctatctttcagctttatctctattttgcatagttgtatttgcatcatgaaagcattcaccttcaaatggcttcttgaaaatgtatgaaaagtaaaaggactattttcttctccaaatttctgggatccctacaggaatcagttggggttctcctctttttgttggtacctgtgagcgtggcagctggagtgggcaggagggaggccattctgtgtctcttcctccttatttcacgtgatgctgctccttaggcctggcttgaaaaaagcaggacattcggcttagacagatggagggcagggtcattttcaaaatgaaatgaatgcaaagatcacactgtgaaattggcatgaccatcactgctgctgtgatagaccgacctttatttggtctcatataggcatatggagagtagatcagcttttgggtggtagaggaggggaaggagaccctttaattaatgatagaaactctggaaagcaataaacagggtggaatatcataaagtatcttttttgtttacaacaaaatcttgaaaagctggaacatatatcaaaaagtaagtctataataccactcccagcagtaagaaagcatttggtgtttacaataaaatgatttagtgccttaacgaagggaatttaactttcaggaaatgggttaggactcgcaatga

SEQ ID NO: 80345 - DNA, 439 bp, Homo sapiens
  misc_feature (1)...(439): n = a,t,c or g
  sig_peptide (433)...(298): this location contains the signal peptide sequence, MFALVSCIILYRGALEFWKPVPSTGEQLPCLQQETSVHGDNAGVQ, Run with SignalP
  misc_feature (6)...(115): similar to gi1789663 in the genepept database release 114, Run with FASTXY 3.3t00, default parameters
tataggtttttgtcagtagttcctgtttacaagagtttatacagctgtttgccactggaacaccaccttgcagagtataaccgtggcatcctttgttgataatcacctgttgcctagcaatcatcatcccgcatggagacagacagcactagggctcttccatccgaggttaaaattcaaaacaagcccaacaagcctgcatttcaaggtggtcttcgtctgcaactagttaagtttaaaactggcaaacaacaacaatggtgtctgaagccaatggtgcagcattgctggcttcctcttgaactccagcgttgtcaccgtgcactgaagtctcctgctgcaaacaggggagttgttctcctgtactgggaacaggcttccaaaactcaagagcccctctgtacaggataatgcaggaaactaaggcaaacatttttcn

SEQ ID NO: 80346 - DNA, 429 bp, Homo sapiens
  misc_feature (1)...(429): n = a,t,c or g
  sig_peptide (263)...(398): this location contains the signal peptide sequence, MISKLLACAGGWLWGCLLIRENKGRAKVQVRVKLEVKAFDSFWMK, Run with SignalP
  misc_feature (373)...(163): similar to gi3257337 in the genepept database release 114, Run with FASTXY 3.3t00, default parameters
agactccgtctcaaaataataatagtaacaatagaaataacagagaatggcctggagatagtgagtgcaaaagtgcgagctgggagatcagtgagccttttgtagtcttccaggagacaggtgattgtggcttggagcagagggaagtaaaaagtgagcaaagaaatattttgcccactttgagaaatatttgaggaatattttggagacaaaagtatcagaacttggaatggatggatgtaagggcatgaggacgtcgaatatgatttccaagcttctggcttgtgcaggtgggtggctgtggggctgtttactgataagggaaaacaagggaagagcaaaggttcaggtccgtgttaagctcgaggtcaaggcctttgactcgttctggatgaaatgtggagaccacgatgccgggtgcggtggttn

SEQ ID NO: 80347 - DNA, 1968 bp, Homo sapiens; identical to SEQ ID NO: 65013
  sig_peptide (1352)...(1487): this location contains the signal peptide sequence, MFLRFPLRFGILADKLILYKASHFTMLSVPGLYLSTLLEGIFILK, Run with SignalP
  misc_feature (2)...(284): similar to gi1177607 in the genepept database release 114, Run with FASTXY 3.3t00, default parameters

SEQ ID NO: 80348 - DNA, 407 bp, Homo sapiens
  sig_peptide (73)...(208): this location contains the signal peptide sequence, MWGILQNGLRRGVFGFLQLFSHWKQRPNLGRLTVINQVLAIFSQL, Run with SignalP
  misc_feature (331)...(293): similar to gi555170 in the genepept database release 114, Run with FASTXY 3.3t00, default parameters
aaaaagggagggcttcagatgtgcactgtttggaggctgctggcatgaggaagctggaggtgagctaaatagatgtggggtatcctacagaatgggttacggcggggtgtatttggctttctccagttgttttcacattggaagcagaggccaaatttagggaggctgacagttattaatcaagtcctggccattttcagccaattgctacagaggctgtggtttggcttccagcagcagttgcttcaggttgtgggtaagagttctatttttacacacagcctggtcattgtctgtttgtgtattcagtctctcagaagcaactcagcacacattctttatttaaggtcttttctgctttgattttgcatctggcattcatttttctactcattgttcatattttg

SEQ ID NO: 80349 - DNA, 434 bp, Homo sapiens
  sig_peptide (90)...(225): this location contains the signal peptide sequence, MAKLNFIPWLPYLKFTCLTIRVNMNGTKDYQNKIGDELFTREDFN, Run with SignalP
  misc_feature (24)...(116): similar to gi554951 in the genepept database release 114, Run with FASTXY 3.3t00, default parameters
taccctgtaataaatattattattgttcctttaatatcacatcataagttaagcctcagagaatcaagccatatgctctgaaaacgttaatggcaaaactaaattttatcccctggctgccttatctcaaattcacatgtttaaccatacgggtaaacatgaatgggacaaaagactatcaaaataagattggagatgaattatttacaagggaagattttaatcaaggtaagtacataaactgagagagttcgtagagtttagctacaaatgtgctatatctacatatgatgagaagtactccatactaccttgataaacctgacagaggttttctttaggggaggttacattttgaaatcatttatgaaaatccagctcttcggagggaattgggtcaactcacataaccagttctatgtaaatgctttaac

SEQ ID NO: 80350 - DNA, 347 bp, Homo sapiens
  sig_peptide (80)...(215): this location contains the signal peptide sequence, MSTNLIFGSYFPDHFLFVFWLLHAIGVTTTLISGKFSRVSTLSPH, Run with SignalP
  misc_feature (98)...(322): similar to gi559931 in the genepept database release 114, Run with FASTXY 3.3t00, default parameters
gtgaattccaaaatcctttgagacttatctctccccaaatatataattataatttggcattcttgggtactctattataatgtcaaccaacctgatttttggcagttattttcctgaccactttttatttgttttctggttattgcatgccataggagtcaccacaactttgatttctggaaaattcagcagagtttccaccctgtccccacacaccttcttctcccttttagagataattgcaaatcataataaacaggcttataagaagacctgaacttcaaaatataagtcttattttttaaaaaaactgtatatcaataaatatagaataagaattgatgttc

SEQ ID NO: 80351 - DNA, 2773 bp, Homo sapiens
  misc_feature (1)...(2773): n = a,t,c or g
  sig_peptide (1311)...(1176): this location contains the signal peptide sequence, MCVYTYVCMCACMYVCIMCIFSSSLPLLLALERDTKYWLGAILFF, Run with SignalP
  misc_feature (10)...(548): similar to gi4894624 in the genepept database release 114, Run with FASTXY 3.3t00, default parameters
cctcgagtaccattagtccagtgcggtggaattcgtgcagctggtgaactggccacagtagaatgttacaacccaagaatgaatgagtggagctatgttgcaaaaatgagtgaaccccactatggtcatgctggaacagtatatggaggcttaatgtatatttagggaggaattacccatgacactttccaaaatgagctcatgtgttttgacccagatacagataaatggatgcaaaaggctccaatgactacagtcagaggtctgcattgcatgtgtacagttggagataagctctatgtcattggtggcaatcacttcagaggaacaagtgattatgatgatgttctaagctgtgaatactattcaccaacccttgaccagtggaccccaattgccgccatgttaagaggccaaagtgatgttggagttgccgtctttgaaaataaaatctatgttgttggtggatattcttggaataatcgttgtatggtagaaattgtccagaaatatgacccagaaaaagatgagtggcataaagtttttgatcttccagagtcacttggtggcattcgagcctgtacactcacagtttttccacctgaagaaaaccctgggtcaccttctagagaatcacctctttcagcaccttcagatcattcttaggtctaaggtgtaacacctttgcagtacgtcatgggtgatctaatacttccccttcagttgtatcttcttacagtgattggtacagttattagatataaaggtaactgatgttattcgtcttgtatggcttttagtatgtgctatcaagtggctaacaaatgcattctgaaaatgtatttaacatagctgttttaacaaatgaaaaaaagacgtagaaaaatgtttagatgtctttttgtgatgttatataaaattgtagatgactgtggtaaatgtgtaattatgtccattatgcttcaaagttgagttttcatctttgactccaaaatgtcagagggaggccgctctaaactaaaaataacgaaaggttgccaagtattaatactagttacctccctcttttcgtagtttttgtcatgtctgtcaacttactcgattgtgtggttgcattcagaatatttgaagtttcttacgtagacagaaataataaaaatattaactaggaaaaaacagtatagcaccaagccagtatttggtatctctctctagagcgagcaagagagggagagaggaggaaaaaatacacataatacaaacatacatgcatgcacacatacatacatatgtatacacacacataatttgaaaactgattggcacttcaacgatgctgaaattgtttttaaattgaagtttctttcttccacaaagcagccgtttctattcaaatggaaattcagtaccagagaataaatgtctatgtagtcatactgaatttagatagataagggctacagcatactaaatcgacaaccaaatttgtcatgtgactaaaccgttacttcagatgaagcttacattactgttttctgcttgtgtattttctgtagagtacttttacacagattggtaaagttcaggtttcagagaactgcttttgtgcagaaaatttaggttcttttttccacctttttggtcagtaaaacttaatgaaaaaagcaaagaaaaaaatattctgaacaaagctatagggttttaagttcagcctcccaacttagtcatcctaacatgattattttgtgatttggggtgcttgccctggtgctgttccagtccatgtgcatcctgagctgtgtgatctgcctcgaggctatgatctgagcaagcaggagataacattttcttctgcatcaagtgaggaaaaatgtgcttttggccatgtctcaaagacaggaccaacttcagattcccaaagaagccagctacagagcctctggaacactatggtcttacaagcagtactaaaatcaaccctcagcctcttcaatgccaaaggtatccctattggttgagaaccacatggtaatttttaatgggacttttatcagcaaatggagttacaggaattctctgtaatgagtgattctgaagaggtactttcctggaataattgtctacctgaagaaaaaaaatttatatatacattgtgtgtgtgtgtaatacacacacacacaaccccctatacctggaagattgtcagcatgtaaatcaggaacaactttctccttattgacaatcccatattaaaactcaggaaccaaggcaaaatgaattggcttctaggggtctgaaccttactgcccatacaagtgttgattcattttaatgctgtttatgatttctgcattggcagaaattttcatactttctatgtttttttaattactcagttttttattactaaaaatagcacatttgagtacatttgaaaagtagaaaaattagaaattattaactttattgaataagcaagaagtgcatcctaatcctttgattattaatgaggttgaatatttgtgtgctatcggtagctgtgtttctttgatcagatgttcctgtccttttgcccttctgttatctgttgggagttgctttgtttttcgtatcaagttataggatctctttatataataaatgtaatttaacttggcatttgcttggcatttnatttcttccctcaatctgttgtaggtttacaaagggcaacgctgttncagttaattttgaggnccaaattgtcnttttttttttttgaggacggggtctt

SEQ ID NO: 80352 - DNA, 376 bp, Homo sapiens
  sig_peptide (223)...(358): this location contains the signal peptide sequence, MLSTLTMVGLADLLFDFLFAPKRSYTTKSCCSIAHIRKSPSKGII, Run with SignalP
  misc_feature (7)...(152): similar to gi563136 in the genepept database release 114, Run with FASTXY 3.3t00, default parameters
actcaatactttcatttgatttttttcttcatcttatataattgtttaatctttaaagatatttttatctacaactttgtaaccattacacaactttgaagtttcagttatgttaaattgaattatatcattacataaactcatgtaatcatcatgtaaaaagtataaaaacatttgtatacatacaataagtagtccaccaaaatatctacaaatagaaaaatgctctccacattaactatggttgggttggcagatctactcttcgacttcctttttgctcctaagcgcagctacactacaaaaagttgctgttccatagcccatatcaggaaatcaccatcaaaaggaataatcggaatttgtgcactttgtg

SEQ ID NO: 80353 - DNA, 385 bp, Homo sapiens
  sig_peptide (59)...(194): this location contains the signal peptide sequence, MGVILIACVLGSLHCQVLKQILFLQMVKALLLPSSCLKFGFFPSH, Run with SignalP
  misc_feature (20)...(321): similar to gi556880 in the genepept database release 114, Run with FASTXY 3.3t00, default parameters
tcgacccacgcgtccggagattttgttgggaagaagcaaagaaaatatcctagggaagatgggggtgattttgattgcgtgtgttttaggttctctgcactgccaagttttaaagcagattctgtttcttcagatggtgaaagccctcctccttccctcctcctgccttaaatttggcttcttcccaagccatgtcaatttttgcaagtcagttgagaatgtcaacgtggctggtgttgaaagagccaatatgttggaatatgcttaaagccaagtagaacatttatgtgaattaaagaatatatcagggatgatttttaaaaatcagatttggattaagaaacctgttgaattaatacttgcataacagatgtatcactgataa

SEQ ID NO: 80354 - DNA, 869 bp, Homo sapiens
  sig_peptide (137)...(272): this location contains the signal peptide sequence, MGWKPVQHGQGGLGLIFSSATAFLCSFGIVLWMFSQYPFPVSYEL, Run with SignalP
  misc_feature (23)...(169): similar to gi972771 in the genepept database release 114, Run with FASTXY 3.3t00, default parameters
agagaaccagcatggcagtgctgggctcagggtgatgcctgcctgccagcacagcggttcttgtccctgtcccacattgcttcttggaagcctttttacagcctcaatcatcttgctttttctaccgcagctataaatgggttggaagccagtgcaacatgggcagggaggacttggtttaatcttttcaagtgctacagcatttctctgttcctttggcatcgttttatggatgttttcccagtatccctttccagtgtcttatgaattggctagcaagagcgcttcccagtctatcagatggagagagcattaggctcagagaaattacatgaaagtccaggatttccaacttcttgttcacttttctaccatattaatcatctctcagacagtgatgtggtaggattcatatgcatagaattccattgtacttattgggggggggggtaattccactttacatttttaccacctgctaggacttaattggatacgctccttgaggctgggtttggaaatctggcgctttgaaacgggaatgctgatacccaaaggaatgtatatcttaaggacatggttcagactgtgacctcttgaaaagtttgcggcctacaggaagttttaagggacctttacaccagaagcaggctggggatcctagacgtcaaaacgtttgttatccacctgggttccgggcaatcgcccggggatagcctaatcggattcccatctccaggtggggacttgtaccaacccatttttcatgcaaggccaccttccccatgttaataaaaataacacaaacgctagtttcggtaatggcagagaactcccgaattgtcacttcaccggaaggggggctaacg

SEQ ID NO: 80355 - DNA, 873 bp, Homo sapiens
  sig_peptide (210)...(345): this location contains the signal peptide sequence, MVMPTLQVEPLCVCFWKLLFKNWGRGVVPLVLHVSLFIFQACWRA, Run with SignalP
  misc_feature (84)...(201): similar to gi4151887 in the genepept database release 114, Run with FASTXY 3.3t00, default parameters
cgtgattttgtgagtgcctcagggaagggctgcggaaactcggaaagcaggcgggcagcatgcgaggaaaatgacactgagttgataaagagctcagacggctccacacattgccagtttcatctttgagtacgatcctgatgtttattaggtttgataaatagcacaaaacaggaaaagagggttactattctagcttttcttactgaatggttatgccgacacttcaagtcgaaccattgtgtgtttgcttctggaaattgctttttaaaaactgggggaggggggtagtacccctagttttgcatgttagcctttttatatttcaagcttgctggagggcaaggaaccatatagccaaagacacgttgctatgtttgtcttttcaaacttctccaccacgttttggcccaaaactattagtgtttcgtctcaatcttttactagagggatttcagtatagcttgtttggaagaaggaattctggaaggaaatggtgagctgtgtgcccgaaaaggatccgcctgactctccgcacgcggatgcatgtcctctggttccggcgattgccacatgcacggctatttcagtggcgaaagcctcttccactcagcgcccatatcccattagtttgacttaatttcctacttaggaatgaacattgatccccggggtgtttggatggccatgtaccccctctgtccgctgtttggagggattaacttattgaagaaccccaatcaatgggaagcaggactgtgggttcatggcccggggagaacggagtccgcttccataaacttttgcccttaacggtcccctttagtgaaatggcaaccctccacaacccattcgtgatgcccttgggttacg

SEQ ID NO: 80356 - DNA, 227 bp, Homo sapiens
  sig_peptide (53)...(188): this location contains the signal peptide sequence, MDCWTMGLALMWLWRSLWRPQRGSYHVQVPTVKHEGKYSFKGFCV, Run with SignalP
  misc_feature (127)...(65): similar to gi1127550 in the genepept database release 114, Run with FASTXY 3.3t00, default parameters
atgattaatttatgatgtggtgtcatgatgaaggaatagtgcagagtgaagcatggattgttggacaatgggactggcgctgatgtggttgtggaggtcactgtggagaccacagaggggtagttatcatgtccaggtcccaactgttaagcatgaagggaagtatagttttaaaggcttttgtgtaggggtcatttcacccaaaggatgaaattaagtggtgtggc

SEQ ID NO: 80357 - DNA, 401 bp, Homo sapiens
  sig_peptide (98)...(233): this location contains the signal peptide sequence, MLMYVTNISFCNLLFLHARETCISFNVCAYKHNKDHPQLLLSRAL, Run with SignalP
  misc_feature (4)...(117): similar to gi552185 in the genepept database release 114, Run with FASTXY 3.3t00, default parameters
acactcttcgacccaaacgagcgccatattaaatttctgacactggagtgacttgacacactgttacactatgaggatatgacatctgacctaatctatgctcatgtatgtgacaaacatttcattctgtaacttgctttttttacatgccagagaaacatgcatatctttcaatgtctgtgcatataaacataacaaagatcacccacaacttttattaagcagggcactatgcaccatgtactcttcactcaaaacagcctttggagcagaccctatcattatcctcacagaggaggagactaaggtgttggagaattaaacatttgcccatgagcacacaagtgggaaaagtgaaatctttccagctacatacagcggttcctgacatggtatacctg

SEQ ID NO: 80358 - DNA, 857 bp, Homo sapiens
  sig_peptide (42)...(177): this location contains the signal peptide sequence, MLANISMLVSLVIIIQYITQEIPDPSRLPLVASWKTYPLFFGTAI, Run with SignalP
  misc_feature (9)...(587): similar to gi2429516 in the genepept database release 114, Run with FASTXY 3.3t00, default parameters
tggtcctcatccggaacctcaggatcttgaccatcttctccatgctggccaacatcagcatgctggtcagcttggtcatcatcatacagtacattacccaggaaatcccagaccccagccggttgccactggtagcaagctggaagacctaccctctcttcttcggaacagccattttttcttttgaaagcattggtgtggttctgcctctggaaaacaagatgaagaatgcccgccacttcccagccatcctgtctttgggaatgtccatcgtcacttccctatacattggcatggcggctctgggctacctgcggtttggagatgacatcaaggccagcataagccttaacctgcctaactgctggctgtaccagtctgtcaagcttctctacattgccggcatcctgtgcacctatgccctgcagttctacgtccctgcagaaatcatcatcccctttgccatctcccgggtgtcaacacgctgggcactgcctctggatctgtccattcgcctcgtcatggtctgcctgacataatgaatcacaatacctaaaaggatagtagccttcatctccattttgcagctgaggaaacaagctgagggaggggtgggacttgggcaaggccatacaagaatgaaccagactcctgccttcagacctgtctgttgtttaacacactcctccaaagaggcctgctcaggctccctggaattatggtgacccggaacattttcattcaaaatataaaaatggaaaagcccaggctggtaacggctggtaaaaaaaatatttcaaattttaaaaaaaaaaaagggggccgttttaggtaccatttatacgcgggggggagtt

SEQ ID NO: 80359 - DNA, 842 bp, Homo sapiens
  sig_peptide (311)...(446): this location contains the signal peptide sequence, MVPTFLCLLALSTYPLSTTHITPPIQPIIPIGFQVCQSSYGFLNM, Run with SignalP
  misc_feature (58)...(237): similar to gi2695921 in the genepept database release 114, Run with FASTXY 3.3t00, default parameters
aaggatcacacaatgtccagaggtaatgaacacagaactttttagtttgtttttaggtcagagtctcatatcctggtctgcactcgatggattcttaaagcaattggaacctcaggctggtcctggagcaagagctggtcctttacttggggctctcaggttgagaagtttgagctctaggattctccactgaccacctctccctgtctttgctcacttcccatctttaaactcccattgaactggcatgctattcttagcatggcactcaggctcttgactccacccagtccttctagttatattggccatggtacctacgttcttgtgtctcctagcactgtctacctaccctctctccacaacacatattacacccccaatccaacccataattcccattggtttccaggtatgccagtcttcttacggtttcctaaacatgtcatagtagggaaaatgctacatgttcactacctcatttcaccttcctaggcagatgagaagacatctcccagtttctttttgcagctaagttgggacactgacaaaatttttgacaacaaaaaagtgagtggagggatatggcattctgggtcaggaagactaaaaggggggcagaggtcctaatgcgtatattcttttggacataggccaggatgtgcgtaactcaactcaatgggttgaagaatgaaaggcggttggggctttattgtgaagaaagaaaaagaaaaagccctgtcctccccttcgaggggctggggaacactaaaccctcaaaccattgggggctggccgttggggggccggggccccgcctttggagggtggcctggagacgg

SEQ ID NO: 80360 - DNA, 848 bp, Homo sapiens
  misc_feature (1)...(848): n = a,t,c or g
  sig_peptide (94)...(229): this location contains the signal peptide sequence, MGRERGLLPLALRQLSIFWAPPGRWDALLGHWSLSDLRRFQSGFT, Run with SignalP
  misc_feature (27)...(167): similar to gi4982255 in the genepept database release 114, Run with FASTXY 3.3t00, default parameters
tccatattttgttctttagacagaagctggggtgggcagtaattccttggaggcagtacggactcccagccgggttctccagaactttggggtatgggcagagagaggggccttttgcccttggctttgagacaacttagcatcttctgggcacctcctggcagatgggatgccctcctggggcactggagcctctcagacctgagaaggtttcagagtggcttcacctgcgagttcaccttcagcaggtggcaaaactgattccctaatttgtttttggtttagagatgatccaggaaagttgtgagttactctgctttgaaaacatcttcctaaatcagacttggctgtgcctgtcactgtgggtgggcgagtcacatccatgtgtgaggtttcttcggtgctgagctgctatggggcactgttgattcatgatactgggagatatcagggcccctcgcaggggccttcacagccacgcgaccgtactggnagctttcctttcttgattaaggtaacattgggtctcagagtcagttggacagatgggaggtggggcactttgttttcagggtgggcccctcactgaaaaagcctggtcccctggagtacttgctactggacctgcatcctcccccgtttgcctacagaaaataagttttagagggcactcactgaaccaatataaccttggaaggcatcaaaatctttccatggggtctgcgggcttaagcccggacgccccatgttcttcaggggcataattgggtcgtttccccaaacctcaatacactgaccacgttaaaccacgcgtgacagcagacatgccagtcctctggcgccgccac

SEQ ID NO: 80361 - DNA, 677 bp, Homo sapiens
  sig_peptide (259)...(394): this location contains the signal peptide sequence, MTLWPFISYPSKLYFLLIFLYSYFTSAILAPKLFYLGSSYLSLHA, Run with SignalP
  misc_feature (124)...(393): similar to gi2654247 in the genepept database release 114, Run with FASTXY 3.3t00, default parameters
gaattcccgggcttttacaaataaaagtgttttaaaataattggcagagtatatttactaagttaatcttgataaaggggaaaataatgcttaacactttatggttgactttacgtttattacttgaaataaggaataattcatagctaaatttctgttcaagttcttttgattctgccacctttgtagctaatgggtatctctctctttctccataatccctttccatttctaaggacagagtttgggtctgttttcatgacactatggcctttcataagttacccttccaaactctattttctcctaatttttttgtattcctacttcacatcagccatattggcccctaaactattttacctaggttcttcttatctttctctccatgcctttgtaaaggaatatttctctttttcttactccgtttaccctattctgagtagcgtcacctttatataatacctcattgctttaaccaggcagttaattctttgttggatgccctccccatttccccttattttaattctttgctcttattgtgcttctcgcatgcatgtagcatagggaaaagccctgtctgttacgaatcttaataccctttgtatggacccagtgccttagcctattagtaggtttcctaggaaaaaattggttaaactttaacgctgcac

SEQ ID NO: 80362 - DNA, 3200 bp, Homo sapiens
  sig_peptide (12)...(147): this location contains the signal peptide sequence, MSELMGLSVLLGLLALMATAAVARGWLRAGEERSGRPAWSCSVTQ, Run with SignalP
  misc_feature (6)...(1631): similar to gi5262625 in the genepept database release 114, Run with FASTXY 3.3t00, default parameters
tttcgtcgcagatgtcggagctcatggggctgtcggtgttgcttgggctgctggccctgatggcgacggcggcggtagcgcgggggtggctgcgcgcgggggaggagaggagcggccggcccgcctggtcttgctctgtcactcaggatggaatgcagtagtgttgtgatcatagcttactgcagcctcgaactcctgggctcaaatgatccaaagcattgggattacaggcatgagccaccatacccagccagccaaagcctctgtttttgcccatatcacactcattctcctccagaagacaagggccatatctggttaatctcctgctgttccactcaatgcctggctcatcataggtgggcagtaaatgcttatcagtgagtaactggagaacaacatggcccttccttataggccaaaaagcaaatgaatttccacctgacaaatcttcgggatccaagaagcagaaacaatatcagcggattcggaaggagaagcctcaacaacacaacttcacccaccgcctcctggctgcagctctgaagagccacagcgggaacatatcttgcatggactttagcagcaatggcaaatacctggctacctgtgcagatgatcgcaccatccgcatctggagcaccaaggacttcctgcagcgagagcaccgcagcatgagagccaacgtggagctggaccacgccaccctggtgcgcttcagccctgactgcagagccttcatcgtctggctggccaacggggacaccctccgtgtcttcaagatgaccaagcgggaggatgggggctacaccttcacagccaccccagaggacttccctaaaaagcacaaggcgcctgtcatcgacattggcattgctaacacagggaagtttatcatgactgcctccagtgacaccactgtcctcatctggagcctgaagggtcaagtgctgtctaccatcaacaccaaccagatgaacaacacacacgctgctgtatctccctgtggcagatttgtagcctcgtgtggcttcaccccagatgtgaaggtttgggaagtctgctttggaaagaagggggagttccaggaggtggtgcgagccttcgaactaaagggccactccgcggctgtgcactcgtttgctttctccaacgactcacggaggatggcttctgtctccaaggatggtacatggaaactgtgggacacagatgtggaatacaagaagaagcaggacccctacttgctgaagacaggccgctttgaagaggcggcgggtgccgcgccgtgccgcctggccctctcccccaacgcccaggtcttggccttggccagtggcagtagtattcatctctacaatacccggcggggcgagaaggaggagtgctttgagcgggtccatggcgagtgtatcgccaacttgtcctttgacatcactggccgctttctggcctcctgtggggaccgggcggtgcggctgtttcacaacactcctggccaccgagccatggtggaggagatgcagggccacctgaagcgggcctccaacgagagcacccgccagaggctgcagcagcagctgacccaggcccaagagaccctgaagagcctgggtgccctgaagaagtgactctgggagggcccggcgcagaggattgaggaggagggatctggcctcctcatggcactgctgccatctttcctcccaggtggaagcctttcagaaggagtctcctggttttcttactggtggccctgcttcttcccattgaaactactcttgtctacttaggtctctctcttcttgctggctgtgactcctccctgactagtggccaaggtgcttttcttcctcccaggcccagtgggtggaatctgtccccacctggcactgaggagaatggtagagaggagaggagagagagagagaatgtgatttttggccttgtggcagcacatcctcacacccaaagaagtttgtaaatgttccagaacaacctagagaacacctgagtactaagcagcagttttgcaaggatgggagactgggatagcttcccatcacagaactgtgttccatcaaaaagacactaagggatttccttctgggcctcagttctatttgtaagatggagaataatcctctctgtgaactccttgcaaagatgatatgaggctaagagaatatcaagtccccaggtctggaagaaaagtagaaaagagtagtactattgtccaatgtcatgaaagtggtaaaagtgggaaccagtgtgctttgaaaccaaattagaaacacattccttgggaaggcaaagttttctgggacttgatcatacattttatatggttgggacttctctcttcgggagatgatatcttgtttaaggagacctcttttcagttcatcaagttcatcagatatttgagtgccccctctgtgcccgaaataaatatgagctggggattaaatacgaataagacatggtttctgccatcaaagatggctggtgggagagagagatacacccttattaagtgctttgtgttagtttattcatagctattgttatatatgtcaaggcaagagaggaccagagcaggacagaggcaatgggtattgaagttgaaggggtacatttgataagagagtcggtattgagaagtttaaatttgtgaatttgaaggctgcgtgggtgtggcaggtaagggaaatgaggtatctgggaaggcttgagtgtaggcaaatttattcatcccaagtcaaactcttgatctctctcacgaaaactatgaccccccctggttgcccctgacctctcaatgttggaacaagccacaaccgtggagttatccttgatgactccccattcattatcccttctgtcccaccaccacagctgtcatctgttcaccagaacgttcttttggttacactccatgtgacatcctgaggctgttgcttctctccagcttttctgttaccatcctggtcctggctactgtcacctagtgggccactataatatggcttcctaatggatcttcctgcttcctctgttgcctcattacttttctatatagcagaatgatcttttgaaaatgtgaaccagatcacattattccctagttaaaaccccccaaggcttcccatcacacttggaataaaatccaaaagaatttttctaaaccaaaaaaaaaa

SEQ ID NO: 80363 - DNA, 391 bp, Homo sapiens
  sig_peptide (43)...(178): this location contains the signal peptide sequence, MYFQRILWARKLFCLLKSVLHYFEIATINNQLIRSLQLCGNKRQT, Run with SignalP
  misc_feature (40)...(284): similar to gi5813902 in the genepept database release 114, Run with FASTXY 3.3t00, default parameters
cgcgtccgcccacgcgtccgtagttttacactgtattaattaatgtatttccaaagaattctgtgggctaggaaattattttgtttactgaagtcagtgcttcattactttgaaatagctactataaataatcagctaatacgctctcttcaactatgtggcaataaaaggcaaacggaattagctgaccttgaaggaaggattattattttagcagcacaaatttattgataactctaatgtgttctcttttctatcagcaagaatttgatattaaagtggcctaatttaaacgttcttttgcgttatcttttttcttaaatttatggcagttctttttttgtaggtggtttggtcttctccttagtccaggaaaagatgtacgacatat

SEQ ID NO: 80364 - DNA, 455 bp, Homo sapiens
  misc_feature (1)...(455): n = a,t,c or g
  sig_peptide (298)...(433): this location contains the signal peptide sequence, MIMIIVIIFLKFSMPITVSCVGTDKNELQKPLYYISDSGAALNCF, Run with SignalP
  misc_feature (8)...(317): similar to gi396628 in the genepept database release 114, Run with FASTXY 3.3t00, default parameters
aatttcatggtctttatgattgctcatgcttcatctctgaaggctaagcattcctttgtctctaggtcagagtgaatgccctctcaattactcttaaagaattctttgctaaaagtgatgatatatttacacagtgtattgaagatattttatatttgtttccttcctgagggctgtaccattggtcccattatcacatttcagtttaaatcccctccttgacatttatattcatgtgatttttttggtggtaattaaatataagtgataaaatgaattcagcacatttcttagttaatgataatgataattgtaataatatttttaaaattctcaatgcccatcacagtgtcttgtgtaggtactgataaaaatgaactgcaaaagcccctttattatatatctgattctggtgctgctttaaactgctttccacttcttgttttttaaggaan

SEQ ID NO: 80365 - DNA, 398 bp, Homo sapiens
  sig_peptide (224)...(359): this location contains the signal peptide sequence, MIISHICLLFYNLVGFVSITPLSAVRKHFGPVGAWGRLSSQGDTC, Run with SignalP
  misc_feature (364)...(281): similar to gi38877 in the genepept database release 114, Run with FASTXY 3.3t00, default parameters
tttcgtgctgattagataaacgcttaagaacaattttatttttcaaagattctgttaactgtcagggtagcagggaatttgacatgttttctttctgtatttcttaggattagttgaaatgagtggtcaaaaagggggattttgattttcttcttccctcaggaaaattggaatatttccaaaaatgtaattaaaatgttccgggctggtggtggtggcagtgatgataatatctcacatttgcctgctattttataacctcgtggggtttgtatcaatcacaccattgagcgctgttaggaaacattttggtccagtgggcgcctgggggaggttatctagtcagggggacacctgtgaagtcaggtgagtgcttggttctcagcctgaccagcctg

SEQ ID NO: 80366 - DNA, 658 bp, Homo sapiens
  sig_peptide (135)...(270): this location contains the signal peptide sequence, MLFVFMLCQWLVQQQQSSVVRDNHVFAAEPTLFTFWAFADERGQP, Run with SignalP
  misc_feature (15)...(88): similar to gi887418 in the genepept database release 114, Run with FASTXY 3.3t00, default parameters
cagcctacactgtgccgcattttgggttgtttacagtcccatagggcatggattggccagccacagcctgcaggccgagcaggcccccaatgtgtttttataaatcatgtatcgtggatcgcgtgggaacacagatgctgtttgtgttcatgctttgtcagtggctggtgcaacaacagcagagttcagttgtgagggacaaccatgtgtttgctgcagagcctacgctatttactttctgggcctttgcagatgaaagaggacagccctgctgtagggtgacgccatcatcatctctaaggactgctctcagggacaccatccctgaagtgagggggattcaggggctcccctcatctaatttgaagcaccttttgtttttccctgtggggcctggcgacagggtacttctgtggctcagcaggcatcaggcaagtgagcgagctgtgtccaggtgctgggaggtcttcctgtgtccaccatgataaacccttttttggggggctaagtactatgcaggggtgtgaaagcgccccttctgcttttttttttccctcagggtcttttttgtttaatctccctccccttgataaactcctcggggtcgggagtacaattattttttgcccggtcatcgctcccatttgccacctcttcc

SEQ ID NO: 80367 - DNA, 367 bp, Homo sapiens
  sig_peptide (60)...(195): this location contains the signal peptide sequence, MIFSDHAVAVSQSLFCALYLLCMYDENGNFSSVFFSSSQSTSKAL, Run with SignalP
  misc_feature (365)...(166): similar to gi2809531 in the genepept database release 114, Run with FASTXY 3.3t00, default parameters
tataatttaagtttacttattttcaatctcttgtttttctggtaaatgcattttatgctatgattttttctgaccatgctgtggctgtttcccagtctttattttgcgcgctttatttgttatgtatgtatgatgaaaatggaaatttttcttcagtttttttttcttcatcccaaagcacaagtaaggcgttaaatttcaataggtagatagatgtagagatagtagatttttagccacgttttaattttatcctattacatttattttaaaagatttggaagacttgcatttttttaatttggaaatatatccttttgtcctaaaacttagataatttttgtgaacattccacatgtttgataag

SEQ ID NO: 80368 - DNA, 437 bp, Homo sapiens
  sig_peptide (55)...(190): this location contains the signal peptide sequence, MLKITSHIFNLLHLATIPPSFLIYIGHMQGPFNVLYSFPKRNLSS, Run with SignalP
  misc_feature (2)...(112): similar to gi39686 in the genepept database release 114, Run with FASTXY 3.3t00, default parameters
gcaacaggtaatttttagtataagtatgtcccatgcaatatttggaatacatgtatgctgaaaattacttctcatatttttaatttgctacatttggcaaccataccccctagtttcctgatatacattggccatatgcaaggacctttcaacgttctctatagttttcctaaaagaaatctgagctctaatgtcagccttgcccctggtaatacagtactgctgattagagctgaggttcattcagaactttttttggactgaaatacatatcatgaaattcgtatcatgaactctttaggggggagttgcatttgtatacacaactctcccctaaactccacctctttttctccctcccaagaaaacattaaatataaataagaatgactattacaggaataaccttgagcccttctgatttattatttgaaaca

SEQ ID NO: 80369 - DNA, 731 bp, Homo sapiens
  sig_peptide (111)...(246): this location contains the signal peptide sequence, MFSGLLPFLPLFFSAIPHTGHCFPFLSLFDHGCFNSLHIFVKHIL, Run with SignalP
  misc_feature (703)...(225): similar to gi5051998 in the genepept database release 114, Run with FASTXY 3.3t00, default parameters
atatatagtcttatatcagtgatcttttcaaacttttaaaatgaagtctgaataaatattattttcttatgcatttcttctgcaccagctgatagggaattttctgtacaatgttttcaggcctcttgcctttcttgcctttatttttctctgcaattccacacacaggtcattgctttcccttcctctccctttttgatcatggatgcttcaactcccttcatatatttgttaagcatattttactaagatttcattttgtgatgcttgcaaatatacattacaaaatatatatttttaaaaagtgatttgaagggccctctgtccatctgatgattaactagaagagtcttttgtaccttgctaaaagtgataagttagccagctatatttagctggataaaacccattacatccttggggaagaatgtgctttgtttagctttatgagaaaatatttaataaatgctgtcttgaaaatatttagcctggctgagtgagctggcaaggcttcaatactgataaagcagaggtgatggtgaaaagctggcctgccagtccaagctcaagttaaaaaaatgcacctcttgtcactaagggttgcaactgtcgccaagtgcttgtccatcatggccccgcaaagattttttaacccaccaaaggcctcctggccgttggttggctaaaaagggccccttaatattccaaagggggtcccaatggcctttgat

SEQ ID NO: 80370 - DNA, 747 bp, Homo sapiens
  sig_peptide (185)...(320): this location contains the signal peptide sequence, MAFHLLLFSFLFVFSLKFFLLIFLFSPIVHFKHLVYTIGVNMFFS, Run with SignalP
  misc_feature (156)...(327): similar to gi1022918 in the genepept database release 114, Run with FASTXY 3.3t00, default parameters
aaaatgttctaaaggattttcctcataatttaaatgggaattatgactccaaagtagatttctagagtagaaattaccctttagcatcattcacttaaactttgtagaaaaattcaaaggtatctggtatggaatgggtagtctaaagcagagatttccttgagtggctcataagacagttttcatggcatttcatttacttctcttttctttcctttttgttttctctttaaaattctttctacttatttttctgttttctccaattgttcattttaaacatcttgtttatactattggagtaaatatgtttttttcttctttcttgctcacactcgaaatttgctatagacactccgagggcattgactagtccctttagtacccctaaagaatgaactgctcaataaagtgaagtataagtttgatatagacatgctaaaattaactgggctttggatcatggcccattattgattaaagctaaggtaaatggtcttccaagtttctgtacttttgaattaatcagacttgtgttggcctgcagttctacaattttattactggccaggtgtggggggttaacgcctggaatcccagcacttttaaaaaggccgagggcgggcaaagaacaccttgagggcccagaattccaaaacacatcttgggccatggggggggaaaccctattctttttaaaaaaattttaatcccggggggggggggccccaccccttttgggcttgg

SEQ ID NO: 80371 - DNA, 398 bp, Homo sapiens
  sig_peptide (122)...(257): this location contains the signal peptide sequence, MTTIIYKILFALKSVFPSINAATSTFFCIFAWHVFFFILSLSTFL, Run with SignalP
  misc_feature (2)...(250): similar to gi562064 in the genepept database release 114, Run with FASTXY 3.3t00, default parameters
aatccaatgcttgttagcattctgcagattttgcctatatattttggagctagattataatgtgaatttgagttgggaatcgaattatcttccagtgaattaaaactttcgtcagtgtttaatgaccactattatctataaaatactttttgctctaaagtctgtttttcctagtattaatgcagctacatctactttcttttgcatatttgcctggcatgtattttttttcatcctttcactctcaacttttctgtagcactttattttagatatgcttattaaaaacaaaagagaactaaacattgtttcatttctccattctaacagactttataatttaatgagagtttagagtttagatcatttataatcattgtgattatatctgcacatat

SEQ ID NO: 80372 - DNA, 400 bp, Homo sapiens
  sig_peptide (55)...(190): this location contains the signal peptide sequence, MTHTTCCIFSLFLMKITITCPIYSVLNALKGNRQGIQSFNLSEIA, Run with SignalP
  misc_feature (60)...(265): similar to gi221399 in the genepept database release 114, Run with FASTXY 3.3t00, default parameters
aatacaccctgtcttcttaatttttctttttttgatctcataataactgactgaatgacacacactacttgctgcatatttagtttatttctaatgaagataactattacgtgtccaatctactcagtccttaatgccttaaagggaaacagacagggaatacaatcgttcaacctctcggaaatagcttactactattattttgcaaccaaaaggctaactcttcacattgtatacacccataagatagaattcaaaattctcacagcttgcatattacaatactcagagtcttaccaaacacaaaatattatgacttatttgaaaccaccgaactccccccaaaatatttcttctcaaaaccaactctaaatagaatagacaggtatccagttatttg

SEQ ID NO: 80373 - DNA, 401 bp, Homo sapiens
  sig_peptide (152)...(287): this location contains the signal peptide sequence, MPVHSEPGSFLFSTGFGVLILFLLLSLHLLESLTLQNLSPTSCQD, Run with SignalP
  misc_feature (214)...(95): similar to gi5059109 in the genepept database release 114, Run with FASTXY 3.3t00, default parameters
aatacagccggggtttctgagactgtatgtgccaggcatgttgcttggcataagacgtagtcaggtttaagacaatcctctcgcaaaagcagcactccttttgcccgcggtggtgatggtcctagagatggaaggaagagtggaaatggggatgcctgtccactctgagcctggttcgtttctcttctccacaggatttggggtgttgattctgtttcttctcttatcactgcatttattagagtccttgaccctccagaacctgtcacccacctcgtgtcaggacccagcctttgtggtcaggattgcagcaccctgagcccacctcgagacccacaggcttaactgtgaagtggctcccatcggtaggggacctgatgttggagtccttaataaggagt

SEQ ID NO: 80374 - DNA, 466 bp, Homo sapiens
  misc_feature (1)...(466): n = a,t,c or g
  sig_peptide (168)...(303): this location contains the signal peptide sequence, MQRQGSVLCRLCLILRRGVSWWNLRHCSGQGGRGQGALVPEIHLG, Run with SignalP
  misc_feature (455)...(403): similar to gi187242 in the genepept database release 114, Run with FASTXY 3.3t00, default parameters
tcttaagcggcgcaacactccttacctgagttacaaaaccctttcccagaccccccgcccctaggccctctctctgcaggtggcccctgatatccctgttagagacacaggcttagtgaggacaaggacctcacccaggcccacagtgaaaggcagagccggctggaatgcagaggcaaggctctgtgctgtgtagactatgccttatccttagacgaggagtgtcttggtggaatctcaggcactgtagcgggcagggtggccggggtcagggggcacttgtccctgaaatccacttgggagctccccgccctccacagttcagctctttgcctgggagaatagaggagcaaggtgcagcagcctcagccctgggccgagggtctgtcatgagcctgcggnggcgcggtggcagtggctcacccttgacacagaccctaggagccggtggtctccagcagcgtcn

SEQ ID NO: 80375 - DNA, 364 bp, Homo sapiens
  sig_peptide (121)...(256): this location contains the signal peptide sequence, MESTALSIHSAIFSVTWVLPFLLSSRRQAACALFTMGYGSDIHIV, Run with SignalP
  misc_feature (20)...(129): similar to gi5456996 in the genepept database release 114, Run with FASTXY 3.3t00, default parameters
cagaattcttttgttatcctggaagccactggcctgtgggtggagggcatggaggtatatgaggtatatgtcttgtgggcttccagatgccaactgcaggtagaagactttggcatgtagatggaaagcactgcgctttctatccacagtgccatattctcagtcacttgggtcctgcccttcctgttaagcagcaggaggcaggctgcttgtgccctctttaccatgggttatggctcagacatacacattgtagtatattatttggctcatataaggcctgaggctcaaaggctacttcaggagaagcagagagggcatgaaggggctgtgcagcctttttagatgagggtgctatggggtt

SEQ ID NO: 80376 - DNA, 1034 bp, Homo sapiens
  sig_peptide (444)...(579): this location contains the signal peptide sequence, MFILCPVVLTIIENGLLQFAISIIDLRIFSFNSVSFCYAYFEALV, Run with SignalP
  misc_feature (95)...(259): similar to gi1015421 in the genepept database release 114, Run with FASTXY 3.3t00, default parameters
cttgctttgagtttgtattgttgctcctttccagtgttttaaggaggaaaattagtttattgatttgagatcttttttaatatggttattacagctacaaatctctctctaagcattgctttatctgtgttccataagtttgagtatgtcttcatttttacctcatagcattttttctaatttgccttcttattgcttctttgactttttttttaactttggaatgtattatataatttgtgcatgtttgtgcattctcaaaattcctttgtcttactgatttgtaatttccactgtggtcagagaatcgttttaaatttattctggggaatgtttcatgtgtacttttaaagaatacctgttccactgttttcaagtggaatgttctgtctatatctcttagatctggttgctttagagtgtcatctatatcttctgtttccatgtttatattgtgcccagttgtcctaaccattattgaaaatgggttattacagtttgcaattagtatcatagacttgcgtattttttcttttaattctgtcagtttttgctacgcgtactttgaggctctggtaagagtatatatgcttaaaaatggttatggcttcttttatcgattgacccttttattggtatataaaaaaaattcccctctttatccctaggaaaatttttggggtaaagggtattttgtgggatattaggaaagctactccacccttattgggcccaggcccggaatatcttttttgtttcaaaattcaacctgttgaatcaatctctttagaaaagccatgtttggactttccactttcacacactgaaaattgtgcttttgattggatttcaaacattccctttcccgcggtatgctaacaaggttccgacttaccaggtggctaaaatttgacttctcaggctttcgggtgaaccctatggttccgatcacacgccccttacctttgtcgctatcccacccctcaccgtcatcaaactcttccaccctctcccatttactccgcttctgaccc

SEQ ID NO: 80377 - DNA, 402 bp, Homo sapiens
  sig_peptide (175)...(310): this location contains the signal peptide sequence, MYLFKYWLLTGKCILPHSLLEHTVTSAKVTHFGKKKIFFGKNCIT, Run with SignalP
  misc_feature (397)...(295): similar to gi4587889 in the genepept database release 114, Run with FASTXY 3.3t00, default parameters
acattttatttcccaaatctaagtatctcctccccttccccctattccagagaccagaccaccacatcatgctgggtgttagataaatatgtttaatcttcttcttatttatcctaacaagcagatatttaaaggaaattatcaactaagcaagaaattttcagaaagtaagacatgtatttgttcaaatactggcttctcacaggaaagtgtattttaccacattctttacttgagcatactgtaacctctgcaaaagttacacattttgggaagaaaaaaattttttttggcaaaaattgtattactgaccaaactttgaaaaaaatgttattctatgcttgtagaaaagttattttagtggaaggtgttgataattaagtggaagtagttgtatgcttt

SEQ ID NO: 80378 - DNA, 1145 bp, Homo sapiens
  sig_peptide (564)...(429): this location contains the signal peptide sequence, MILLLSTFFCCFREDSCFYKKYVGLVQWLMPVIPALWEAKVGGSL, Run with SignalP
  misc_feature (206)...(430): similar to gi3002527 in the genepept database release 114, Run with FASTXY 3.3t00, default parameters
caatgatatgctcttctacactcttaaaaattatagacaaccccaaataacttttatttagtggttttaacaatatttaccatgtctgaaatatgataaacattaaaattagtattttggaaaaatgccatattagaaactgatgatttaaaagtaacaacaatgaatccattacatgtgaacatactgtttttttgtttgtttgtttgtttgttttgagacggagtttcactcttttgcccaggctggagtgcagtggtgcgattgcagctcactgtagtcttcgcctcccaggctcaagtgattctcatgcctcagcctcctgagtagctgggattacaggtgctcaccaccacacccggctaatttttgtagagatggggtttcaccgtattggccaggctggtcttgaactccagacttcaagtgatccacccaccttggcctcccaaagtgctgggattacgggcatgagccactgcaccaggccaacatactttttataaaaacagctgtcttctctaaaacaacaaaaaaatgtagataatagtagtatcattttatagttttgcaactctctttaatgtttggcttaataaaagatagttggattctcgtatctgtttttgtattcagtctgttgtggatggtgatttgattgaagtaaatgaaggaaatccagctacatacagatttggagttggaaaaaatagtattttaataacctttttagatcatggtggatactcttcttttgtttggcctcaaaattagaacaaaggcagtttctgaaaataattgtatgtggtgaaaaattaatgaatcttatatggaccatacttttaatttagaatattggtctaaaaaaaaaaaagggggccctttaaaaacaaatttagtacgggcgtggatgttaacttttttggggccagattgttcgggcgggtgtacaggggaaggggaaaacgggtggggctaggacgtgttgaacaaatgacgtgctcgtgctggcgaccgacctcttgtacgagaggtaatgcgattgggaacgagtgatgggtgcgtcgattggtcgaggcgtgcgatgcatgcaatggggcgcttaggcgttgggtaggatgggtgggacggatcgaacgttctcg

SEQ ID NO: 80379 - DNA, 425 bp, Homo sapiens
  sig_peptide (232)...(367): this location contains the signal peptide sequence, MHGSLLGLVHFLKLLKKYLGINQLQFSSFSLSFSNWCCVTCFWVR, Run with SignalP
  misc_feature (293)...(231): similar to gi324994 in the genepept database release 114, Run with FASTXY 3.3t00, default parameters
cggtcgaccacgcgtccgcccacgcgtccgcccacgcgtccgggcaaattgtctctttatttggtgcttaaattactcttaaataatgtgtaacttgaaaatgagacttctaaaaaagtagcacttatatagttaattgttgattttcaaattgatttaaaaactatttttgtaagatcttatgtcaaggacaaagttaatttgtcactactgtatgtttcaacttggcagatgcatggatccttgcttggtttagttcattttctaaaacttttgaaaaaatatcttggcattaaccaactgcagttcagtagtttttctctttcattctcaaattggtgttgtgtcacatgcttctgggtaagacgatttcttcttttaaattcagactttaattaatatgtagtgtttgtttactttgtgta

SEQ ID NO: 80380 - DNA, 737 bp, Homo sapiens
  sig_peptide (34)...(169): this location contains the signal peptide sequence, MLHISSAFHCYAFLPLFALTHNFIFLFYLLSLSPKLECKFQEGRD, Run with SignalP
  misc_feature (6)...(128): similar to gi2654252 in the genepept database release 114, Run with FASTXY 3.3t00, default parameters
actgtatatctaaattgcagtgtcacccctcccatgctccacatttcttcagcctttcactgctatgcttttcttccactttttgctctgacacataatttcattttcttattttatttattatctctctcccccaaactagaatgtaaattccaggaaggcagagatttctatctatttttttttgtcttccccatattctggcatgtctggcatagaaaaggcatttagtaaacatttgttaaatgaattgactatcttttctctgcaaacttgttcctcaaattctgccaaacctaaattgaaacaagcaggtattgtattttggtacaagtcctggggctgtggattaaatccaagagcattgatccatatttttcaggggaatctcacattataaataatgcggcatcgcttgggtaaaaacttttgtgaaagactaaatatgacatgagtctgtttaaggaaggcgttaaatacgctcagactacctctggcgaattagatttatatttacatgcccctgttgataaggccttatcacaccacgagcaccttcacttaataacagtgttaagcggggcggtatttcttttccactcacaccggccagcgccatgcctttctatgtctcacgcacaagcatccctctacgtcatccacgcccgcctccacactccccccgctccgcaccgttcccacatagtcgccaccgccatgtccccgctcccgccccc

SEQ ID NO: 80381 - DNA, 397 bp, Homo sapiens
  sig_peptide (377)...(242): this location contains the signal peptide sequence, MIKIAVSLSVMFLKVLLKVIFIIILRTRERFLVWLPVPLLLISLK, Run with SignalP
  misc_feature (271)...(108): similar to gi1326167 in the genepept database release 114, Run with FASTXY 3.3t00, default parameters
cccacgcgtgggacaggataaaaacattcttgactttctcttgcttttgcttttatatatgagcataaatatctatttcatgcctctttatgtatgaaggaatataccacattatcattaccaaaacctcctaataaagctgaattgtgctttcaagtggacacagacctggaaatatgaataaaagcattcctctccagcaaggtagtactttgagtagatctcagctcagacagatagcttgagagaaataagtagcagtgggactggcagccacactaaaaacctctctctagttctcaggatgatgatgaagattaccttcaggagtacctttaggaacatgactgagagcgaaaccgctattttgatcatattttggatggtgatttactcc

SEQ ID NO: 80382 - DNA, 390 bp, Homo sapiens
  misc_feature (1)...(390): n = a,t,c or g
  sig_peptide (34)...(169): this location contains the signal peptide sequence, MKRRRQLRARVFALALAWSLGPCWALRVAVPKASXTIRGPQRRLL, Run with SignalP
  misc_feature (45)...(127): similar to gi3874102 in the genepept database release 114, Run with FASTXY 3.3t00, default parameters
acgcccacgcgtacgagatcgggaatttcttttatgaagaggaggcggcagctcagggcgagggtgtttgccctggccctggcgtggagcctgggcccgtgctgggctctgagggttgctgtcccgaaggcttcanccaccatccgggggccacagcggaggctgctagcgagcctgctgcaggaaaatactgagatcctcggctacctgctgggtagcgttgctgcctttggctcctgggcttctcggatcccccctctctccagaatttgccgggggaagacatttccctccatccacctgtggacccggctcctgtcggccctggctggcctcctctatgcctcggccattgcggcccacgaccggcaccctgagtacctgctgcgg

SEQ ID NO: 80383 - DNA, 412 bp, Homo sapiens
  sig_peptide (125)...(260): this location contains the signal peptide sequence, MVALVTKPGQTFAPLLGTWLLCFYTGHDLFQQSLITPVGSAHPWP, Run with SignalP
  misc_feature (394)...(388): similar to gi3979922 in the genepept database release 114, Run with FASTXY 3.3t00, default parameters
ctgcagcaaccgcgtcttcactgagggcacctgtaagctgctgaccttggtggtcactgacctggtagaccaggacctggtgctgaaccaccgcaagcaggcagcctcggcactcctctttggcatggttgccttggtgaccaagccaggccagacctttgccccgctgctgggcacctggctgctctgtttctacacaggtcatgacctcttccagcagtccctcataacccctgtggggagtgcccatccctggccagagcccccagctccagcccctgcacaggccccgacgctccgccagggctgcttctacctgctggtgctggtgcccatcacctgtgctctgctgcagctcttcacctgcgcccagttcacgctgcatgggagacgcctgcacatggtcaaggcc

SEQ ID NO: 80384 - DNA, 417 bp, Homo sapiens
  sig_peptide (218)...(353): this location contains the signal peptide sequence, MRCRAPAWLRRLCGQLLSERLMRPNGVQAVVRGILEGAGAGAAGG, Run with SignalP
  misc_feature (379)...(238): similar to gi3878140 in the genepept database release 114, Run with FASTXY 3.3t00, default parameters
tttcgtttctaactgaagaggagagaaccctatccaggggggccttgagagacatgctggatcaagtctatcagcccttagcagtccgggaactgcttatcctccagggaggaccaccccagatcatactggggcaggaaagaaatacaaaagaaatccggccgggcgcggtggcgcactttgggaggctgagtcctgcacagatgtgaagacacagatgaggtgtcgggccccagcttggcttcggcgtctatgtggacagctgctctctgaaaggttaatgagacctaatggtgttcaggcagtagtccggggcattttggaaggagcaggtgcgggagcagctggtggaagtgatgctgaggtgacggctgctgactggaaaaagtgtgacctgatcgcaaagattttggcctt

SEQ ID NO: 80385 - DNA, 649 bp, Homo sapiens
  sig_peptide (19)...(154): this location contains the signal peptide sequence, MSLPWTFTVLILAPSLSGSLSGKSSTCAPAPSAPGSRSSGPRRNH, Run with SignalP
  misc_feature (29)...(249): similar to gi853970 in the genepept database release 114, Run with FASTXY 3.3t00, default parameters
aatacatgcttgtgggagatgtcattgccttggactttcactgtgctgatcttggccccgtcgctgtccgggtctctgtcgggcaagagctccacctgcgcgccggccccctcggccccgggatccaggtcctccggcccccgcaggaaccaccattggatctccagatacaccgaggcggagccgctctggaaggcgcaggacatctccacattctgcccctcggtcgccgtcacgttccgcggaaactcggtaaattttgcttgagaagaaagcccttgttgtacatataaaacggaaaagaaaacaaatccaacatacaccaaaaagatccccatcattccaaaaagggaggggggtcacatcagtgtagccaacagccgaaaagccctgaaagaaaggcgtgcgagtggatggcaggctcagtctcagagccctgggcgcgacactgcaaacatcctgctgcttgcttggcgagggctggctgtggggagaagggattgcgattctggaaggttagaaccagctggctgggattcagcgaggcttcctgcggagcccaggctggaatcgctgggaagtgtctcggctgcctggctgcctgctttcagctacctggcagctcgtccaacgtcagcccgccacgaaa

SEQ ID NO: 80386 - DNA, 424 bp, Homo sapiens
  sig_peptide (31)...(166): this location contains the signal peptide sequence, MASEVVCGLIFRLLLPICLAVACAFRYNGLSFVYLIYLLLIPLFS, Run with SignalP
  misc_feature (44)...(312): similar to gi536079 in the genepept database release 114, Run with FASTXY 3.3t00, default parameters
ccctctgctccgactcgccggaccgacgcgatggcctcagaagtggtgtgcgggctcatcttcaggctgctgctgcccatctgcctggcagtagcatgtgcattccgatacaatgggctctcctttgtctaccttatctacctcttgctcattcctctgttctcagaaccaacaaaaacgacgatgcaaggacatacgggacggttattaaagtctctgtgcttcatcagtctttccttcctgttgctgcacatcattttccacatcacgttggtgagccttgaagctcaacatcgtattgcacctggctacaactgctcaacatgggaaaagacattccggcagatcggctttgaaagcttaaagggagctgatgctggcaatgggatcagagtgcttgtacccgacatcgggatggtcattg

SEQ ID NO: 80387 - DNA, 412 bp, Homo sapiens
  sig_peptide (269)...(404): this location contains the signal peptide sequence, MPIIGLLQIFFCLEDIFPCWKNSAFLPHTDTNSSPSRASVWGIFV, Run with SignalP
  misc_feature (147)...(289): similar to gi22252 in the genepept database release 114, Run with FASTXY 3.3t00, default parameters
tatgtccttgttccacttcccttactaaaagataatctttgttttttttgcagaatgggcgggatgggggcttaaaactgcatcttttgtgcattcttaagtatttctaaaactctttaatagtgtgagtggcacatacaatagatgatcagtaaattttgctttgttgcctgaaagttttagatgaaataatcaagagaggtctctcaaatgcttatgaaagatgtttgtcattagttgaagggtttattgactataattgttatatatgcctataattggcttactccagatatttttttgcttggaagacatatttccgtgttggaaaaatagtgcttttctccctcacacagatacaaacagttccccttccagagcctctgtttggggaatttttgtggattttgcc

SEQ ID NO: 80388 - DNA, 402 bp, Homo sapiens
  sig_peptide (128)...(263): this location contains the signal peptide sequence, MLFLLLAIGKATDLQNVRQLGWQAEHTLRSFIPKCCHFRQTFDIL, Run with SignalP
  misc_feature (52)...(178): similar to gi1304439 in the genepept database release 114, Run with FASTXY 3.3t00, default parameters
gtggggtgggttggaggtgcggcagagcttcccaaggaagttatgggaccttgcctcgggatattcagaagtgccagtccagttctggcagcctgaactcttcctcctccaagctgaaatccgagagatgcttttcctcctcttggccatagggaaagcaactgacctgcaaaatgtgcgccagttagggtggcaggcagagcacacattacggtcatttattccaaaatgttgccattttcgccaaacctttgatatcctttgttgcatgtttggtaattaattcaccaccctattatgcaggggctgccggggaataaacgaggactccaaattttctgtaggaggggttttggggggtgagcaattcagtctgggagagagaaggcctttaatcctagg

SEQ ID NO: 80389 - DNA, 961 bp, Homo sapiens
  sig_peptide (90)...(225): this location contains the signal peptide sequence, MSFSIWLGLSLSFCCLFSIYPICFLFILSSFPGFFLITFLLFHLL, Run with SignalP
  misc_feature (21)...(277): similar to gi662134 in the genepept database release 114, Run with FASTXY 3.3t00, default parameters
atttattttagatagtagatagttggatttttaaagtccaatcttaccatctttgttttttaattgaagtgtttagaccacttacatttatgtcattttcaatatggctgggtttaagtttatcattttgctgtttgttttctatttatcccatctgttttctgtttattctttcctcttttcctggcttctttttgattacttttttactattccatctcctctgttagctataaacctttgttttacttttataacagttgctttatggcttaaaatatgcatctttaacttatgcagtctgccttaaaataatatgccacttcatttatagtgtaaaaacttcaaaaagtgcactttcattttcccattatatctttggactattgacatacattttacttcgacatgttaaatgtcccacaattcattgttaccaattttgcttttaatgacaaaaagcctgaaaaagaaaagtattttccatttacccacatatttgccatttccaatgccctttattcttttgtttagatctgagttcccatccgtattattttatttagcctgaaaagcttcaccgttttttgtactaaagatttcttctaggctgtgcacggaggctcacgcctgtaatcccagcactttgggaggccaaggcaggaggatagcttgagcccaaaagttcaagaccagcttggacaacatggcaaaaacccatctcaacaaaaaatactaaaattaggcagacatggcagcatacatctgtaggtccagctactcaggaggctgaaatagatcacttgagcctggggaggttgaagctgcaatgaaccatggtcattcagtggaccacagaattcttctagaacaaacctgggggcaaatagttgcctccactttggtttttgaaaaaattctttaattttccatctttttgaaggggtatcttgcttgaacg

SEQ ID NO: 80390 - DNA, 1222 bp, Homo sapiens
  misc_feature (1)...(1222): n = a,t,c or g
  sig_peptide (148)...(283): this location contains the signal peptide sequence, MIGTIFLWIFWPSFNAALTALGAGQHRTALNTYYSLAASTLGTFA, Run with SignalP
  misc_feature (13)...(911): similar to gi5911316 in the genepept database release 114, Run with FASTXY 3.3t00, default parameters
cccacgcgtccggatgccggaggctccatgactatccacacctttggtgcctacttcgggctcgtccttgcgcgggttctgggcaggcccgagctggagaagagcaagcaccgccagggctccgtctaccattcagacctcttcgccatgattgggaccatcttcctgtggatcttctggcctagcttcaatgctgcactcacagcgctgggggctgggcagcatcggacggccctcaacacatactactccctggctgccagcacccttggcacctttgccttgtcagcccttgtaggggaagatgggaggcttgacatggtccacatccaaaatgcagcgctggctggaggggttgtggtggggacctcaagtgaaatgatgctgacaccctttggggctctggcagctggcttcttggctgggactgtctccacgctggggtacaagttcttcacgcccatccttgaatcaaaattcaaagtccaagacacatgtggagtccacaacctccatgggatgccgggggtcctgggggccctcctgggggtccttgtggctggacttgccacccatgaagcttacggagatggcctggagagtgtgtttccactcatagccgagggccagcgcagtgccacgtcacaggccatgcaccagctcttcgggctgtttgtcacactgatgtttgcctctgtgggcgggggccttggaggcatcatattggtcttatgcctcctagacccctgtgccctgtggcactgggtggcaccctcctccatggtggggggcagagaagcctcacagatcctcccctaccaccaccagggctcctgctgaagctaccctttctggactccccccccagactcccagcactacgaggaccaagttcactggcaggtgcctggcgagcatgaggataaagcccagagacctctgagggtggaggagatactcacttatgcctaacccactgccagcccatgataggactttcttcttttcgaacaagatgactggctgttacaagaaaaatttttttgagctccccttgctcgacatgcaagaaaggacccatagacccataaggagggcggtttccacaggctaangcctcacccagtagagggccctgagaggacgggcactttttggaaaaggtgcccgcctgtgctaaaactggtttttcggactcccgttcccgcccccgccccccccg

SEQ ID NO: 80391 - DNA, 406 bp, Homo sapiens
  sig_peptide (183)...(318): this location contains the signal peptide sequence, MAIRQATGWSLPRAPWTFFVMMDFVLDPILDIWAPLWYPYVLDLL, Run with SignalP
  misc_feature (404)...(401): similar to gi1171367 in the genepept database release 114, Run with FASTXY 3.3t00, default parameters
agacactcagacggacttgcggaattcaaagtgcccagatacccttagttttccatctcataagccagaatgatgtcacgtggcatccatggatgcacacgaggctgagagatagtggcgtttgttagctgggctcctagccatcctgaatgccaagtttggtataaagaaacagaggcaaaatggcgatcaggcaggcaactgggtggtctctgccacgggccccttggacattctttgtaatgatggactttgtcttggaccctattttggatatttgggcacctttgtggtacccttatgtgctggatttgctgatgtctgcccttcaggaatagcagctgagtcaagctgtccttggctgctccaatctggagtcagaggttggagatttccatggctcccc

SEQ ID NO: 80392 - DNA, 574 bp, Homo sapiens
  sig_peptide (139)...(274): this location contains the signal peptide sequence, MCEIADLWIGLLWLFFVIYCFSFNSLTTVCRAAVVFWRSAPDPGA, Run with SignalP
  misc_feature (71)...(237): similar to gi967238 in the genepept database release 114, Run with FASTXY 3.3t00, default parameters
cagccatctcagcctcagcctttttctgtttctttgctggacaggtgttgctgtcagttggagaaaagggcacactctgacttttgagttttcatcatttttgtgccacttctcatctttgtgggcttatctatttcaatgtgtgagattgctgacctttggatagggttattgtggttattttttgttatttattgtttttcttttaacagtctgaccactgtgtgtagggctgctgtggttttctggaggtctgctccagaccctggtgcccttggctttttcagtatctggaagtatcaccagttaaggctgtgaaacagcaaagatggcagcctgcccctttgtcaggtcagaatgcatactgacctgttgcctgcctgaacacacctgtagaaggtggctgaaggctttggattggaggtctcacccaaccaggaggaatggggtcagcagcctacttaaagaagcagtctggctgtgttttggtagagcatctgtgctgtgttgtggattccttcagctctcaaatggtttgggctatccaaagcccacagtctgcactaacttacct

SEQ ID NO: 80393 - DNA, 947 bp, Homo sapiens
  sig_peptide (413)...(548): this location contains the signal peptide sequence, MMTVYPLLGYLARVQLLGHIFGDIYPSIFHVLILNLIIVGAGVIM, Run with SignalP
  misc_feature (329)...(748): similar to gi3875887 in the genepept database release 114, Run with FASTXY 3.3t00, default parameters
tcgacccacgcgtccgaaagcaatgctttctcgatctatctgtggtgaaggacaaaattgtctttgctgttgctttaatgttaaataaattgcaggctgatacttttgtaaaatagaataaaattgtggcaatgtcagattcctgtaaaagtttctgaacactttcggtttctatacttacctcattgaaaaaatacttaacaagtagttgtggatgggcactagtccacaaaccacaatcggagtagcacctgtgttcaaaataagcagaagacattccattttatgaatgtgtgtactgaatttgatttttaacatgacctcattatctttcttggattagaattttttagacaacttccctagcagtgacaccctgtccttcattgcaaggatattcctgctgttccagatgatgactgtatacccactcttaggctacctggctcgtgtccagcttttgggccatatcttcggtgacatttatcctagcattttccatgtgctgattcttaatctaattattgtgggagctggagtgatcatggcctgtttctacccaaacataggagggatcataagatattcaggagcagcatgtggactggcctttgtattcatatacccatctctcatctatataatttccctccaccaagaagagcgtctgacatggcctaaattaatcttccacgttttcatcatcattttgggcgtggctaacctgattgttcagttttttatgtgaaatacctcaactgtttttttcaagagctctcatgatattttgagccttgacaacagttctatacaaattcacttgtaaacgctgctgttgcgtaattctaaacattctctaagatcatttgaaagcacgggaactagcggacccttcaagagcattcctttattgggcggcccccagggggcacacacgctcgcccctc

SEQ ID NO: 80394 - DNA, 665 bp, Homo sapiens
  sig_peptide (126)...(261): this location contains the signal peptide sequence, MKISLIFLKVNNFFLILFPDYVHNSIVNFIRVPYFHVSHPPNYTF, Run with SignalP
  misc_feature (51)...(281): similar to gi13261 in the genepept database release 114, Run with FASTXY 3.3t00, default parameters
tcccctaactctagaagcttctgaactgtatgtatttctacttaaatgtcccattcttttccctacaccttgactttgcatagattgctatttaccaaccaataatttttctagtcaatttcacaatgaaaatctccttaatcttcttaaaagttaataacttttttcttatactattcccagattatgttcataactctattgtaaacttcatcagagtgccttattttcatgtctctcacccaccaaactataccttccttgagggcagaaattgtgccaccaaaaggcagatccaaatacagtctgcaatgaagtgtgaataaaatttaaaaacaaaaattacttttagatcaaaaaatgttttagatgctttctataaatatttttttaaaaatcacctgcagttggttctatagtgagatataaaactgaacaacattccaaaatcttaattttttcttaaaaaaaatttccctggtagttaacaagtattttttatttgtactcactgtaattttctctgattaagtgttatttggtcacacttctcacttggctttcaagcctgctttcaatttataagaacaggagaaaaaagaatgctatagcaagtatttaaatgtagcagttatagtataagagaatttttaaggaaaagggtg

SEQ ID NO: 80395 - DNA, 625 bp, Homo sapiens
  sig_peptide (359)...(224): this location contains the signal peptide sequence, MAKYASMTFKLFSLCVCMYIHACTHTHISHTDIDIKQFYAQEYQG, Run with SignalP
  misc_feature (19)...(344): similar to gi220578 in the genepept database release 114, Run with FASTXY 3.3t00, default parameters
aagtagaggacgttcagtactattttatcatctttacaaacatgctagctagttaggacagtgtttttttaacttcatcttattgcactatgctgtctgctagcttcagctggtaatataagcagaatattaaactagaaaaattgtgttctctcagtaaaaataggtgctaaaattaaaaacacaatatattacacttctgtttgttttgtcttttggttggccctgatattcttgtgcatagaattgtttaatatctatgtctgtgtgagatatgtgtgtatgtgtgcatgcatgtatatacatacacacacataggctgaacaatttgaatgtcatacttgcatatttagccataagtctcaaattaatccttttcttgattctatcttaacccatcactgactctttcgatttaaaatgctccaggaaggcctgaattaaattgaaaggaaattttttaaaactcatatctgttcctgatatcaagttttctgttctaatacatcctatctgcccttctcctgccttaaaaaaactgtaagaaacaagggttgaactggaaagaaagtttaaacagggatggtttttttttaacctaacttttgccccaaattcttcagaa

SEQ ID NO: 80396 - DNA, 353 bp, Homo sapiens
  sig_peptide (128)...(263): this location contains the signal peptide sequence, MLQRRGALCLVLPWSLVRISSFIQIVPSAPGKPIYFRSPIHMLSS, Run with SignalP
  misc_feature (319)...(345): similar to gi221859 in the genepept database release 114, Run with FASTXY 3.3t00, default parameters
ctaggggaggagagagcatgagctgaagctagagggaaatgtggagtcgagggaggcttttctaaggagggtgatgtagcagaatgttaatatgctgttggaaattatcgactaaagagcataagtgatgctccagagacgaggggccctctgtctagtattaccatggtctcttgtcagaatttcatctttcatccaaattgtcccttctgctccaggcaagcctatctactttcgttcgcctatacacatgttgtcttcaactgtgtgtatttcagtaggatatttattgagcttaagatgttcctctgcctcatctgttcttatttctcccactctagacctggcttatt

SEQ ID NO: 80397 - DNA, 1045 bp, Homo sapiens
  sig_peptide (133)...(268): this location contains the signal peptide sequence, MRLLFSCRGRGMFLFRRRMLPSRDRYYKDVELIFNYLGFLIVSGL, Run with SignalP
  misc_feature (745)...(719): similar to gi13260 in the genepept database release 114, Run with FASTXY 3.3t00, default parameters
gggcagggaaagtacagtcaagtagcaatataatatatcatgttgacatttcttagatgcctactgcatgccaagccccgtcctaggaggttgctacatgttatcccacttaatcagtaatcccataatcacatgagactattattttcatgtagggggcgggggatgtttctcttccgcagaaggatgttaccttcaagggacaggtattacaaagatgttgaattaattttcaattatttgggcttcttaatcgtatctgggcttttggatctcatattttagttttaaaaccccatcagtttatagttaataacataagtttacaagtgtaataactcaaaaatttatttcatttagttgtataaaatatgattggcttattccacatgcaaccatttagttaaaaaaattgagacattacatttcattttaaagctcatctttgttactttctttgaacctgaaaatccttaatctgttactctaaaaaaatcttcactgagatatgactggcctcaccacactggtctatgtgaatttgctgacttttaaggacattatagtcagagccaaggtagacaagctatgaagtatgtgtgctctcacatttacatatttatacaactagaagagtatttgcaaagttttaatatttggatcactttaaaaactattagaacgtattagaaaaactattagaacatattagaaaatgattaaaacatattagaaaaaactggtcacgtggggggggggggggtcacgcctgtagtaatcccaacactttgggagcctgaggcgggtggatcacaaggtcaagagattgagaccatcctggctaacacagtgaaaccctgtctctactaaaaatacaaaaaaaatagctgggcgtagtggcgggcgcctgttgtcccagctactcgggaggctggagcaggataatggcctggaccctgggaggcgggaccttggcctgagcccagaataaagcccctggccttccacgctggggggggaacagaaaatggtcttaaaaaaaaaa

SEQ ID NO: 80398 - DNA, 445 bp, Homo sapiens
  misc_feature (1)...(445): n = a,t,c or g
  sig_peptide (80)...(215): this location contains the signal peptide sequence, MLTLSFLTSLCRHLIFQILPTNFMKAIGQSVLIQNLKLFICNWAG, Run with SignalP
  misc_feature (56)...(270): similar to gi3549763 in the genepept database release 114, Run with FASTXY 3.3t00, default parameters
agagacagntgtatccatccatttcctagtcagnttcaccatatttttaaatgaggcacaagattactgtgttatcaaaatgttaacattaagctttttaacaagtctgtgtaggcacttgatttttcagattttgcccactaattttatgaaggccattgggcaaagtgttttaatccagaatttaaaattgttcatttgtaattgggcaggcttataaaaaggggcatattttaaatctttatcatcactttatagccataatatacatactaaaagtttggtagcaatttgagtatttaactacatagggtggtactttgaaggaaaaagcattttaagttgagctttaatttaatttctgcttttaaaaacccaatatagtagtacgtcatctatgtatgtacattgagcatgcttcttaacatatttaacttccaattct

SEQ ID NO: 80399 - DNA, 442 bp, Homo sapiens
  sig_peptide (61)...(196): this location contains the signal peptide sequence, MLRFYLIAGGIPLIICGITAAVNIHNYRDHSPYCWLVWRPSLGAF, Run with SignalP
  misc_feature (434)...(286): similar to gi62324 in the genepept database release 114, Run with FASTXY 3.3t00, default parameters
ggaggcaggagggcaccccctccgcaagaaggggaccccgctctgcctactcccagtcctatgctccggttctatttgatcgctggagggattccactcattatctgtggcatcacagctgcagtcaacatccacaactaccgggaccacagcccctactgctggctggtgtggcgtccaagccttggcgccttctacatccctgtggctttgattctgctcatcacctggatctatttcctgtgcgccgggctacgcttacggggtcctctggcacagaaccccaaggcgggcaacagcagggcctccctggaggcaggggaggagctgaggggttccaccaggctcaggggcagcggccccctcctgagtgactcaggttcccttcttgctactgggagcgcgcgagtggggacgcccgggcccccggaggatggtgaca

SEQ ID NO: 80400 - DNA, 786 bp, Homo sapiens
  sig_peptide (94)...(229): this location contains the signal peptide sequence, MVFFTASFTSWMLHISHYFKNNSLPEDHGCTVSLVLLSQRVHVFS, Run with SignalP
  misc_feature (75)...(351): similar to gi624314 in the genepept database release 114, Run with FASTXY 3.3t00, default parameters
gctaattcccgggtcgacgatttcgtcaaggaggcaagaagcagttactggcagctgggtgtttctgaaagaatagaaaacaccactggaaagatggtatttttcactgcttccttcacctcttggatgcttcatatttcacattattttaagaacaattcactcccagaggatcatggatgtacagtcagtttggtcttgctgagtcaacgtgtgcacgtgttctcacaaatctccaggcaacattcactgacaaggcagggggagctgtgctcagcattttcttcaaattgccgtctgaacagtggtgtgaaaatgatgttcactgttgtttgtttcacccattctcagtactgagagttgtcaaaattactatttctgagtacagcatgtgttctaattaaagataaagtgtctttaagactcaggcctatctccagggagcaatgtattagttacatggatgtagcccagagggaatttttggaaatttggagaactgcgttttagagactcacaactgtgactggtgagtggaccatctatgggcaagagcagaattactgaatactggatgagggttgccccgagccctggatttttgtggaggggatctggtagcggtttgcttaggaaaattttttggcggtgtctcaggtcgcccgccccccgccctcgcgccggacatttttgaaacggccccccgggttaattgcctttgaaaggggagattgtgtggatggaagaaaaaggaattgcgcggctccgccgcgtccccccccccct

SEQ ID NO: 80401 - DNA, 856 bp, Homo sapiens
  sig_peptide (59)...(194): this location contains the signal peptide sequence, MSRPLGILRSFCFCLWVLYSVQQNMGVESKTVIWLLCVPPAKHLD, Run with SignalP
  misc_feature (193)...(332): similar to gi4981934 in the genepept database release 114, Run with FASTXY 3.3t00, default parameters
aattcccgggtcgacgatttcgtaaaaagacatttctcattgaaggggtgatgcgtcaatgagtcgtcctttggggattttacgatccttttgcttctgtctttgggttctttattcagtacagcaaaatatgggtgtggaaagtaagacagtcatctggctgctctgtgtgcctcctgccaaacatctggatatctggaaacacctggaaaagttactgaagttttcacaagggtgtttagcattatgcgaatgaaacctcaggctcatagtcatctcctggtccaggattgatacaaatgttgtatttatgaaggaggagagttgactaggttatagaatacatttagttgcttagctttcattagtttttgttttagcggagtgagataaggttgttcagtttcagagcatttcagctggatgaacatattcacagttaaatcccaaggagacatgagagccagcagcaagttggagtgatctgcttctgtcatggctgctgcatggtgtatgtgtatgaaatgtccaatcacttcaagagacaacaataacagaccattgacagccacagaacaccccagaaaagtggttttgtcaggccattatggccctcatatagccctcagactgctggtgcactcagtagatggtaaaagatggttttcacctaggactaactatgaaatagctgtttacttcacaaggccctgaaaagaaaacagaacttttgttctcaggcaggccccgagaagggtcgtctaatcagtcataatagagtgtgcctctaaaacggtgccttcctgcagggagccttgcagatcacagggtattgaagctcatggtgctagctctc

SEQ ID NO: 80402 - DNA, 414 bp, Homo sapiens
  sig_peptide (193)...(328): this location contains the signal peptide sequence, MVHHVLVVMWFSAWVARWDHLSGFENSQCLDPSLGISLQFVWGLL, Run with SignalP
  misc_feature (7)...(133): similar to gi552372 in the genepept database release 114, Run with FASTXY 3.3t00, default parameters
tttcgtggaagcacagaggcctaagttccattcccagccctcctgggctgtgtgtgcaacttaaggcaagctactcaactttgctgagtctcaagttgcccatctttaagatagagagataatgcccacccccattggctaatgataaggattaagaaaaattggatatttagagccccaggtgccaggtgcatggtacatcatgtactggttgtgatgtggttttcagcctgggttgcacgttgggaccacctgagtggctttgaaaacagccaatgcctggatccatccttggggatttctctacaatttgtctggggtctgctgagggatggggggcacaggtatcctaaacagtcccccaagtgattctgctctagagcagacttcctcacacttcaacatgcatcagca

SEQ ID NO: 80403 - DNA, 463 bp, Homo sapiens
  sig_peptide (320)...(455): this location contains the signal peptide sequence, MAQSQRGWFPHVLKCSLLALLQMLSTQQTFQSLLRVQHGAHGSGR, Run with SignalP
  misc_feature (41)...(150): similar to gi1517899 in the genepept database release 114, Run with FASTXY 3.3t00, default parameters
ggaattcccgggtcgacgatttcgtctcaccacttagaaaccaacccagggaccaaccaagcatattcccagcagtaggcaagaagatccctaaagaagggaagtgagacctgcgtttattcccctgatacttgggaaatctagcagatatagagacagtgacccaggtatccaagggattggtccaaattcaccatcctgtaactcgaaatgcaatgctctttctaccatcggttctccattctttctggaaggtgtgtcccccttcttccttttgccctttcccacactctttgggggtctatgtccatgtcttccaatggcacaaagtcagaggggatggtttccccatgtcttgaagtgctcactgctggccctgctccagatgttgtccactcaacagacatttcagtctttgctacgtgtacagcatggagctcatggcagtgggagagactaccca

SEQ ID NO: 80404 - DNA, 880 bp, Homo sapiens
  sig_peptide (148)...(283): this location contains the signal peptide sequence, MILLCPGLTDLSVFLFSLTIGHFSRVRGQTITACPSSRIPAGFQD, Run with SignalP
  misc_feature (19)...(167): similar to gi330838 in the genepept database release 114, Run with FASTXY 3.3t00, default parameters
tttcgtctgggatgtggcccggcaaaaccacctgagcagagacaacagtgttgtaccctgctggtagttttggcaaaacacagtgtgccagggataacgtggagttcggcttattcatctgttatttgacttaggtttattgctgccatgattctgctctgtcccgggctcactgacctcagtgtgtttctgtttagcttgaccattggacacttctccagggttcgtggacagacgattactgcatgtccaagttcaagaatacctgctggattccaggatatagtgcaggggtcagcaaactctggcccacgggccctggcccgctgcccgtgtttgtaaataaagttttactgtcacacagacacaaccattcctttacatattgcctgtggctgcttttctcaccacaaaggcagagttgagtattcatctgggatggcctgcaaaatctgagatggttgctgtctgaccctttgcagagagaatttaccaatgtctgaaatgaaatcggccctccggatctgcaagttcctcatctggggtttcaactaaccatggattgaaaatacgtggggaaagaaaaacccaaaaatgaccatacagcaataaagcgtaatccacattttaagaatgcagggtaaccatgatctacccagcatttacattgcattagggataaggattctaaaaatgaattttcataggatatatgcccataggaatcctttggacaatcggggccttggggatctgggggatttgggtccttcagggggggatctgggacccatcctccccggattcccagggaaaggcaccttgccccaatcctggttttccttaaaaactctatgcccctttccctttggtatagggc

SEQ ID NO: 80405 - DNA, 795 bp, Homo sapiens
  sig_peptide (45)...(180): this location contains the signal peptide sequence, MPGFKFCSSLRFLYLINFPIGKFVCLAILLPHFPLLSCCPLQDHL, Run with SignalP
  misc_feature (256)...(511): similar to gi1256532 in the genepept database release 114, Run with FASTXY 3.3t00, default parameters
taccccctgtggtggaattcgatccatcagtgattttctaagatatgccgggatttaaattctgtagttcactgaggtttctttatttaatcaactttcctattgggaagtttgtgtgtttagccattcttctgccacatttcccccttcttagctgttgtcccctccaagatcatctggattttccaggcaaggagtcaaggtattcagggtcatgctggttgccatcatattctctgagtgttgctgggtctccccttggtcaccttcccaacacgtacatgcacacacctagaacgttctctctcttgcccattccccatccctccgtaaattgggactcttttaaacccttctccatcagggaagcccttgccactgtggagtctctaggacgccaggccttcccaaacacacccaccacgtgggcctttaccctccacctctcctgactctgtgccaggtctctgctcttctcttcacaccttgctcttcctgggctctagaattattggaattccggaattaagatggtaattggctgggtgcagtggctgatacctataattccagcactttgggaagccaagggaggattgcttgagtccaggagtttaagacccgccctgggcaacataggggagacacccctctctaccaagaggggtaaaaccacccaccccccccggggtgggggggtgccctgaaatactaaacctcccgggggaaggcttaagtggggaaaaaattgctttgagcccccccgcggggggggcgcctctcctacgccaaccg

SEQ ID NO: 80406 - DNA, 428 bp, Homo sapiens
  sig_peptide (223)...(358): this location contains the signal peptide sequence, MSVFSPNCKFHESRHLVFFVPWWICLFLIKEPCTPMGRSVVYNPG, Run with SignalP
  misc_feature (424)...(263): similar to gi1335579 in the genepept database release 114, Run with FASTXY 3.3t00, default parameters
tcagaattccaggtcgacccacgcgtccggtctttgcctaattaatgactaattattctttaagtcctaggtcaggcatctgtcactcagggaagtctctgacatcccagagtactccatgccacccctttattttaatcaacattaagtaaactgtgcttctttcttcagagaattatctcagtttatagccatgtagtcataattgcattcctttgattaatgtcagtcttctccccaaactgcaaatttcatgagagcaggcatttggtattttttgtcccctggtggatttgtttatttttaattaaagagccttgtaccccgatgggccgctctgttgtttataatccgggcccttggggagtggcgggaaatctccttaaaaggcgggccttttttttatttttgggcccccgtggcgtatt

SEQ ID NO: 80407 - DNA, 412 bp, Homo sapiens
  sig_peptide (141)...(276): this location contains the signal peptide sequence, MNTYFFSIGICLFLCITARSNHCIVYFCRKIEEFYFNTIFPIYPA, Run with SignalP
  misc_feature (335)...(145): similar to gi4884029 in the genepept database release 114, Run with FASTXY 3.3t00, default parameters
atcttttgcttaggcctgttaaacctactcaatgtgtgtatcttctactccatgtctttattcctactgttgtcttaacaggaaatccttgcaacccaattcatagtttttgttctttggaaaaatccaaatcatgtatcatgaatacatattttttctctattgggatttgcctgtttttatgtatcacagccagaagtaatcactgcatagtgtatttctgtagaaagatagaagagttctattttaacacaatatttcctatatacccagcaaaggtctaggtatttatacatactattgtatttattcatctcatcaatgcaatgaagaaatattaataaatccattatatatgctaaaaggtagcgacacatatatgctacatgtgcaggttttctcaggtattatt

SEQ ID NO: 80408 - DNA, 799 bp, Homo sapiens
  sig_peptide (342)...(207): this location contains the signal peptide sequence, MSTGLGAWLTVWVGHRGPQQGLQENSNSNGNGSAQSTCQSPNNLR, Run with SignalP
  misc_feature (83)...(171): similar to gi3510479 in the genepept database release 114, Run with FASTXY 3.3t00, default parameters
tgtaattcctccatgaaactgctgagatatgtacctgaaaaattgaaatggcttgttcacctgagtcgtcatcaagccctgacttgtcagaacactcttaaaacatccagttgaaatgaacatagaaggactagagcatgtaggaattcagctttaagaaagtcacttccaaggatgatgaacatcgtggcagatgcccttgttctgagattgttagggctctggcatgtgctctgagctgaaccgttaccattactgttactgttttcctgtaatccttgctgcggccctctgtgccccacccacacagtcaaccaagccccaaggccagtactcattcctgtctcttccttttccctcatcactccatcttatccgtaactgcaccctgttggttccagctcctgaagtcatctaaatctgtccacttctttctacccacagtgtttgtggctaagtcaagccctcaccatctcttgcctggctccgtggagcagtccccacttcagtctccccacctccaatccttagtccacattgtggccagagtgagatttctgaaagcccaatctgatatcatcagtgagttgcagagaagtcaatgaaagaaacaaacaattgtcagagaggatggagaaatgtcaaagggtgatcagtactctataagttatattgggccgaattatgaattggagggggggtatgacaataaaatgatatgcagggtttggaaaggaccgggcataccttttcatcagaaacggagccagggaaagaactttttaaggggaaaaaaaac

SEQ ID NO: 80409 - DNA, 792 bp, Homo sapiens
  sig_peptide (340)...(475): this location contains the signal peptide sequence, MFLFTSWVKGLTSLRDWFSVWESNLGSGCESMESSPLEYRLDCPF, Run with SignalP
  misc_feature (17)...(693): similar to gi1276721 in the genepept database release 114, Run with FASTXY 3.3t00, default parameters
aattcgtctttttctttcgacgcgattacagaccttaaagcggaagctgaagggtaatttgcatgataaacgattacatttgtagacatcttggtgccttaatgtcggtaaggattgcacaatgagtttggcagttcggcatgcatgcattctggaggtgtatagacattctagtttcctgtaaattttaagttgaaaaggggcctggaaccaggtgctgactttagataatagggaagtctaattacttctaaattcctcaaataaggaatttttctttttgtctcttaatggcctgcttgatggtcactaggtgatctttgctctccttacttataaatgtttctttttacctcctgggttaaaggacttacatctctaagggactggttctccgtctgggaatcaaacctgggcagtggatgtgaaagcatggaatcctcgccactagaatacaggctggattgccctttttgcatatcccacagggaatccaaagcaggcagtgtgtgtatacacagggttttaactttgttttaaatctgatttctgccattttggaatcttgccaatagaattttaaaggctatatttcttttgtattttttcatacataccaatatgatggctatttaagataagagctctctaaaaagttttcttttaaaaatagaccttttgctattcccaaagcgacccaggcccatccgactttttgaatgcaaggaaccccatggtccctcagtatggttctaaaaagggttctcaaaccacgcaccttgaatttgatcc

SEQ ID NO: 80410 - DNA, 455 bp, Homo sapiens
  misc_feature (1)...(455): n = a,t,c or g
  sig_peptide (209)...(344): this location contains the signal peptide sequence, MNTFLAPRFLLKGVTVGFMIIYFDSTSRLPAFVIECFCAWVVCFG, Run with SignalP
  misc_feature (447)...(205): similar to gi160178 in the genepept database release 114, Run with FASTXY 3.3t00, default parameters
gtcgtggcctttgntnaacacaggatagaagtgttttgggaaatcaaagcttgtagccgtttttttaattggggttgttgtggtatggtggtctaggggtagtgattgtgagattgactgtttatcctttgttccgtaatttgggtcttattaatgaaagtaagcagttgaggaatgtatagtatttgagaaataagcacatccacacatgaacacttttcttgctcccagattcttgttgaaaggtgtaacagttggatttatgattatatactttgatagcacttcacgtttgccagcatttgttattgagtgtttttgtgcatgggttgtgtgttttggcgcttattattcctatttgcatgtggggccctgtggtcctgtggagccaggcctggatatagccctggactcgggtcgggaggtctgggctctgcctgagctctgtgggacct

SEQ ID NO: 80411 - DNA, 423 bp, Homo sapiens
  sig_peptide (135)...(270): this location contains the signal peptide sequence, MSLHSHVIITQSLLFILEFTLSFVRSVGLDKFIIACFHHDSSIKS, Run with SignalP
  misc_feature (12)...(93): similar to gi199690 in the genepept database release 114, Run with FASTXY 3.3t00, default parameters
ctggaagtcccgggtccacccacgcgtccgatactgagcaaaaggtatagagatttttcatataccccagcccctacacaagcatagtctccccaactgttaacatccccaaagtggtccatttgttatagttgatgagcctacattcgcatgtcataatcactcaaagtctattgtttatattggagttcactcttagttttgtacgttctgtgggtttggacaaatttataatcgcatgtttccaccatgatagtagcataaagagcagtttcactgccccatgatgaggcttgaaaagttttcacatggttgtggtgaattggagagtttttcaaagagacaaagtaaggcttacagaaagtgttttagggcttttttaagtttgggaattactaatttataatcgaatgaatgttacct

SEQ ID NO: 80412 - DNA, 427 bp, Homo sapiens
  misc_feature (1)...(427): n = a,t,c or g
  sig_peptide (106)...(241): this location contains the signal peptide sequence, MSFALLRSFLILWKQLEVLKEHWGRLKLQGQDINSVSLHKRFSEL, Run with SignalP
  misc_feature (427)...(163): similar to gi1280380 in the genepept database release 114, Run with FASTXY 3.3t00, default parameters
ggtggaactccacagccagattggtccaaagtgccaggattcagaagtcagttccgaagcagtccaaagacctctgagctgctggagggcctgtgcgatgcggngatgtcctttgctttgctgagatcatttctgatactgtggaagcagctggaagtgctaaaggagcactggggccgactcaagctgcaaggccaggatatcaactctgtctctctccacaaacggttttcagagctctatgacttcaaaaacttctggaaaattgtgaaattcaaatgatccaagaggtactaagaaaagttaacagagaaatgacactggttttatcagaaaagtgcaaggaggagtgttctctccctacagatctctggaaacaccaagtcatgaaagaaaacttttcagtctcaagaccacaaatagttgg

SEQ ID NO: 80413 - DNA, 651 bp, Homo sapiens
  misc_feature (1)...(651): n = a,t,c or g
  sig_peptide (34)...(169): this location contains the signal peptide sequence, MPLESIPSILTTFTLILALIHPPQTSTLIPLPLALNLLIYPAYYL, Run with SignalP
  misc_feature (136)...(388): similar to gi3133232 in the genepept database release 114, Run with FASTXY 3.3t00, default parameters
gagtgccgttgaattcatatttttttctctgaaatgcctcttgagtccattccctccattctgactacatttactctaattttggccctcatccaccctcctcaaacttctacattgatccccctgcctctggctttaaatcttctgatctaccctgcatactatctgcttactgagaatacctgtttgatcatgtttctcttgctggaaaacctctgatggctttcgatagtacaggaaaagtgccaagttttcagcataccatacaaaactatgctgattctgtctgctttgctcttttcttgtgttttttctcctcttgtattctagctgtatttgtctttggctaattgcttggatatagcatggatcttaatctttggactttgtccacacgtttctggtgtctataaggccctctcctttcctcctttgctcagtgaaatcctgcttatctctcccgacccactcccccccctctttccccactgcttaccctgatacccnnccctgnctatcccctccaccacaaccaaaccccttttatttactcattatctgatggtctttgcatgtttttttggtatagaatttattagaatgtaacctttggttgggtgtatatatgtataaagactcacagggggctgg

SEQ ID NO: 80414 - DNA, 711 bp, Homo sapiens
  sig_peptide (127)...(262): this location contains the signal peptide sequence, MKCFPLLFLRLNFKLVLKKKCKELMYQTLEMCKRKTFKIVFSKIL, Run with SignalP
  misc_feature (133)...(406): similar to gi3874803 in the genepept database release 114, Run with FASTXY 3.3t00, default parameters
atgggctgtacctgtaactcagtgtggaagctgcatattgtaggctatttctactgttggagagggagggcgggcattgtggtaactctttttaccttttcatatgttcattaactttccaaggaaatgaaatgcttccctcttctttttctacggttaaatttcaagctagtgttaaaaaaaaagtgcaaggaattaatgtaccaaaccctggagatgtgtaaaagaaaaacctttaaaattgtattttcaaaaatcttgagtccttttaacattcctatagataatttagtaaagataaatcatacttactttttcatgaagctaattgcctctggtttgtatcccctgagaaatactaatttacaaattagaacctacaaatgatttttgtttcaaagaccacttttgtttcagagaccactttccagggaacaattctcaataacggaaggagggtgatttagttcccccttcaaaggaaggcattggcactgaaagtttcggttcgctttgttttgttttacaaagaagccagatggtatttattttgcatagctgaaataagttctaaggaaagcacttggaaatggtactaatgtttaatgagaagatgtataaacccacttgggaactgtaaagcattatgccaggtatttgttgagctatttaatataatgaacaggtaaatcattcttgtgctggcctttg

SEQ ID NO: 80415 - DNA, 412 bp, Homo sapiens
  sig_peptide (160)...(295): this location contains the signal peptide sequence, MNPYLLHFPLYPLLPLSSSLSQPFPVPSLLTFETLHGASFPWALG, Run with SignalP
  misc_feature (380)...(214): similar to gi1072028 in the genepept database release 114, Run with FASTXY 3.3t00, default parameters
tgttagatgagtaacagggagaatcagccaaggtcaggctcttcggggccctgactccccagcttctgccaggtcaccccatgtgtctcccttctccatctttgagaccagaagtgcagagaaagggagccctctcggaatgaagttcgcacctttgggatgaacccttacttgctgcacttcccactataccccctcctgcctctttcctccagcctttcacaaccattcccagttccctcgcttctcactttcgagactctgcatggagcatcctttccctgggctctgggctctgcttgggaaagctctgttatcttagccctccaccctggcccggctacccgcttcctttaggcctgcagtgcccccctatagcagccactagccattcaactgtacatttcatgcc

SEQ ID NO: 80416 - DNA, 625 bp, Homo sapiens
  sig_peptide (95)...(230): this location contains the signal peptide sequence, MITFFFTFIIRYLSLYYLKTRCQLLLPKLSVLHLTLLFPFRKVYS, Run with SignalP
  misc_feature (5)...(252): similar to gi4049785 in the genepept database release 114, Run with FASTXY 3.3t00, default parameters
cttgttccttttcctatttttgctggtttgatgaagttgctgtttcctccatatttttctcttaatttggaagttctcattgttattttctttaatgattacctttttttttactttcataatcagatacttatctctgtattatttgaaaacgagatgccaactccttctgccaaaactgtctgtattacatctgacccttctctttccctttaggaaggtctactcctccacactcacacttgctctcaattcttaggttttgctgaaattaaaggctcttgaaccttactgctactatcccttggttaaccaagccaaataacactggggatgcagggatctcatttcttccaaagtagctgggaacatttccagtcaaaagggaaacagaggacacagtattcaggaagttaagatttgggggaggggaatcgagaggcaaagtgagagaagctttttaataagtttctaagctccagagggaaccaaatttgacagcagtcatctttcttggggttgttactgaagggtagccaacagactccatgctttccaaagcttcagggattctaaaatgtgattaaaaaatccacacatctctggctggacacagcggctcacc

SEQ ID NO: 80417 - DNA, 366 bp, Homo sapiens
  misc_feature (1)...(366): n = a,t,c or g
  sig_peptide (105)...(240): this location contains the signal peptide sequence, MPISGPSAFFFYLGTCFTFFLSFKFNIISLYTSVGVPAVSFYSII, Run with SignalP
  misc_feature (3)...(54): similar to gi899334 in the genepept database release 114, Run with FASTXY 3.3t00, default parameters
ccgcggtcctgaaccaggtatgattgttgcatgagaaaacgccagcaagctgaaaaacatatatagaacgatcaatgcatcattgaaaatagctcttcagtggcatgccaatttctgggccttctgcatttttcttctatcttggcacctgctttaccttctttttatcctttaaatttaatatcatttccttgtacacaagtgtaggggttcctgctgtgtccttttatagcattatacctaccttatcaaagcagntatcattaccatactctgctatagctagtttaattattgatctgttagactgtaaattacatgtggacagagactttattttgcttaccattgtatttctagcccagg

SEQ ID NO: 80418 - DNA, 1694 bp, Homo sapiens; identical to SEQ ID NO: 80259
  sig_peptide (222)...(357): this location contains the signal peptide sequence, MAGPRPRWRDQLLFMSIIVLVIVVICLMLYALLWEAGNLTDLPNL, Run with SignalP
  misc_feature (332)...(700): similar to gi1814029 in the genepept database release 114, Run with FASTXY 3.3t00, default parameters

SEQ ID NO: 80419 - DNA, 592 bp, Homo sapiens
  sig_peptide (46)...(181): this location contains the signal peptide sequence, MEWPALLTSALLLGWGMPCGPSPCVRRSELRNDGECHCRSMHRQQ, Run with SignalP
  misc_feature (2)...(171): similar to gi545616 in the genepept database release 114, Run with FASTXY 3.3t00, default parameters
ccctacttttcagatggtgaatgagccatgagctaagtaagagcaatggagtggcctgccttgctcacatctgctttgttgctggggtgggggatgccctgtggccccagcccatgtgttaggaggtcagagctcagaaatgatggagaatgtcattgcaggagcatgcacaggcagcaagctgcacaattagccctgaatagcaggccacctcttaaagcatgccctgacaacaaaggtgactgggttgaagtctgtaggtgtagtagttacctattgctacgtagcaagtctccctaatcttagcagcttagcagtgggaatggctttactgggtggttctgatgagaattttaggttgtaactatgcttagagtcatatgcagtggctggacagtggctcagtttttgccaacttttgtcaggatgcctcagctctttgccatgtggcctctccgtatgcctgagtggcttcacaaaatggcagctgacttcctgtaaagcatgtgattccacaggggggtgccagggaccactgcaaggccttttatgaacctaacccttgaaagggaaaaccctggcacttggcttc

SEQ ID NO: 80420 - DNA, 395 bp, Homo sapiens
  misc_feature (1)...(395): n = a,t,c or g
  sig_peptide (146)...(281): this location contains the signal peptide sequence, MPYLILCLSPLISHLKDIVWFFCLSQMSSSGIWILRQFREVACAL, Run with SignalP
  misc_feature (65)...(334): similar to gi56308 in the genepept database release 114, Run with FASTXY 3.3t00, default parameters
gacatatttcagttttaataaatagtgtgcccctctattttaaccattttgttttagaaatatctccttgtattttgtgctttccctttcccagccgtgatgggaaaaagagactcatttctgttttgatttagtgtccttggaaatgccctacctgattctgtgtctatctcctttaataagtcatctaaaagatattgtctggttcttttgtctcagtcaaatgtctagtagtggtatttggatcctgagacaattcagggaagtagcatgtgcactgtgtaggacttcctgatcatttttaaatcgtggcacagagaaaaccacacaagtaaagttataaacaaatgaggctgcttacagccaggggcaactggccctacctggctattccn

SEQ ID NO: 80421 - DNA, 1694 bp, Homo sapiens; identical to SEQ ID NO: 80259
  sig_peptide (222)...(357): this location contains the signal peptide sequence, MAGPRPRWRDQLLFMSIIVLVIVVICLMLYALLWEAGNLTDLPNL, Run with SignalP
  misc_feature (332)...(700): similar to gi1814029 in the genepept database release 114, Run with FASTXY 3.3t00, default parameters

SEQ ID NO: 80422 - DNA, 372 bp, Homo sapiens
  sig_peptide (232)...(367): this location contains the signal peptide sequence, MCLGERRSRIEFCVLLHIYLKILKALLCVCHLFFTSKVGLQIFRF, Run with SignalP
  misc_feature (186)...(87): similar to gi3510291 in the genepept database release 114, Run with FASTXY 3.3t00, default parameters
aaagtagctggcccaaaatcaatgaccagaaccaaggttgaagctcaggttatcctgactttgaaatcacgcttaactcttaagtgatattttttgagacttcctgcatcacaggtacctgggccttgtcctagacctgttgaattataatttcaagagtaggggaccaggagcctacatttttaatatggtccctaattgtgcaacacacaattactgccttcaaagattatgtgtctaggagaaagaaggagtagaattgagttttgtgtattgctccatatttatcttaaaatattaaaagcattgctatgtgtatgtcatttattttttacctccaaagttggtttgcaaatatttagatttctcaga

SEQ ID NO: 80423 - DNA, 338 bp, Homo sapiens
  sig_peptide (108)...(243): this location contains the signal peptide sequence, MQKLPLIKPFPLLLLVEDWLPEDQLWLLKFYSSYKGLLKHNLLLW, Run with SignalP
  misc_feature (8)...(127): similar to gi5105791 in the genepept database release 114, Run with FASTXY 3.3t00, default parameters
accaagtcctcatggacatttgaatccttccaaaacttggcttatgtctttctggccttggagccctttatttccctagatttctagttccctatttcttcctaagcatgcagaagctccctctgatcaagcccttccctttgcttttgctagttgaagactggctacctgaagaccaactctggctgttgaaattctattcatcctataaggggcttctcaagcataacctgcttctctggcactttcctgaagcgccagtgaaatattcaccaattcatcattcattcatccattccacaagtatttcagtgagcacggcaaagttccaattccca

SEQ ID NO: 80424 - DNA, 363 bp, Homo sapiens
  sig_peptide (185)...(320): this location contains the signal peptide sequence, MGHNRQVFLILAMTKLITCLWWLGGKTVCQQNLVKKQSQGQGVGL, Run with SignalP
  misc_feature (17)...(203): similar to gi4379319 in the genepept database release 114, Run with FASTXY 3.3t00, default parameters
catttctcttataaggaaggaaatgaaagtcatttggtaacgtagaggcacaattagacctgacagcctttgtgtttctcttctgttctttaggccccccagttccctttgctgctttcttctttatgccacagatttaatgcttgaacacatattgaaattttggaaagttactgtgaatctaatggggcataataggcaggttttcttaatcctggcaatgaccaaactaatcacttgtctgtggtggcttggtggaaaaacggtttgtcagcagaatttggtaaagaagcagtcacaaggacagggtgttggtctcatatttgagtgcttccctgaggaaagaaaagataaagggaagag

SEQ ID NO: 80425 - DNA, 739 bp, Homo sapiens
  sig_peptide (737)...(602): this location contains the signal peptide sequence, MVCLVGFLELILYVYRFRQSLALSHRMECNGTILAHCNLRLPGSS, Run with SignalP
  misc_feature (656)...(403): similar to gi2580578 in the genepept database release 114, Run with FASTXY 3.3t00, default parameters
gcctagttgacgtatggatcttttctaggttgtaggatttggtagtgtagatccccagagtcacactgtatctgttgcctatatttggctaggttgagtcatgtcaccaaatatagcctatgccttcggcatgatgtatgccaggcttctggttccaaattctgcagctggcctccagagactactgcttttcctgtcataatgttccttaagattagggctgctgaccaggcagtattttttatatttataacaaaatcaataccaagagccttcaaagattgaattttgctcatcaaataggttcacatgctgaaatcctaatgccttccttctccctttagaaattaaattctgaatgtgcccaaacctggataatgattaaagatagatgagttcttggctgggcaccgtggctcatgcctgtaatcccagcactgtgggaggctgaggtggaggcatcacctgaggtcaggagttcgagatcagcctggccaacatggtgaaactctgtctctacaaaaatacaaaaaaaattacccgcgcatgatggcgggtgccagtaatcccagctactcgggaggctgaggtgggagaatcacttgaacctgggaggcggaggttgcagtgagccaagatcgtgccattgcactccatcctgtgagacagagcgagactctgtctgaatcgatatacatacaagatgagttctaaaaacccaaccagacataccattccg

SEQ ID NO: 80426 - DNA, 417 bp, Homo sapiens
  sig_peptide (324)...(189): this location contains the signal peptide sequence, MPLRKRKVGEVAHLVVTIVLRSSSPFSGGWRSVWLIQHVFHTCFL, Run with SignalP
  misc_feature (323)...(227): similar to gi3219284 in the genepept database release 114, Run with FASTXY 3.3t00, default parameters
tctagatagattggaaacaatttgttgagcctgattagttattatacagaatatattttaatgtgtttaggtatctagttgggggcctatatgtccagtttcaaagttaaatggtgataaccctgaatatttgtgaactctagttttatatcctcagtagagcttcacatattttatagttgctcaagaaacatgtgtggaatacatgctgaatgagccacacactcctccaaccgcctgagaagggggaagagcttctcagcacaatggtcaccacaaggtgggccacttctcccacttttctttttctaagtggcatcagcatgtatttggtcacctgcagagaatagctgaattgcaaactcagtttcccatcgttattttctgttcacaattttggggcttaatgatctttca

SEQ ID NO: 80427 - DNA, 482 bp, Homo sapiens
  sig_peptide (236)...(371): this location contains the signal peptide sequence, MARAHLPTSAGFLLTLLFMSLSKEQGPPVREQNTYVQRNEDAGRR, Run with SignalP
  misc_feature (480)...(349): similar to gi1788097 in the genepept database release 114, Run with FASTXY 3.3t00, default parameters
gaaaagggggccttcagtctaatgcctcacttagcctctgccattgctgtcagttgcaaccagtaatccaaaagcagagcccaaaaggtgaactcaagggtaacctgtattaaatgtgggacctggaggaactagattcaagctggagagaccatcaatatccactttcttgtttttcccagattcacactgaacttttctattctgtccaacacacaggaccctggacttgctgatggctcgagcacatttgccgacctctgcaggttttctgctgactcttctctttatgtctctctcaaaagagcaagggcctcccgtgcgtgaacaaaatacctatgtgcaaaggaatgaggatgctggcaggagaatgccctgcctggcagcaagtcagaaagcacctcagctcagcttcccggcaccaggagggcccctggactctcaccttggctccaagacatgagcagcccatgtgaggagaa

SEQ ID NO: 80428 - DNA, 525 bp, Homo sapiens
  sig_peptide (16)...(151): this location contains the signal peptide sequence, MELVVIYSLLLYKIFPLKSLCPICTLFIGDWTRLDTLEQWFSKNS, Run with SignalP
  misc_feature (110)...(242): similar to gi6013265 in the genepept database release 114, Run with FASTXY 3.3t00, default parameters
gttgtggcctgtgagatggagttggtggtcatttactccttgctcctatataaaattttccctctaaagtccctatgtcccatatgtaccttattcataggtgattggaccagactggataccttagagcagtggttctcaaagaacagctcctggagtgattgtaggaatgcttctttcctggggaaccacagacctcctgagtcatcccacctggaaaggtagctccgtatttcataagcaccctaggcaactcttctgcacatctgagtttgagaaccactgccctagaaggaatcaggctgtagcatgcactttaatactgagaatttggatgaagggacactgagtgtcgggcatttaaactgggaggtgacgtatgcctgggctgggacagcatcttactccatgtgcgtgctgaagtacagaatgtcggtctgcagagagaggcaggagaatggagcaaacatgaagagagacgagaccacacaccacgccgagccctatgcagtctcaaaaaaaaaa

SEQ ID NO: 80429 - DNA, 349 bp, Homo sapiens
  sig_peptide (213)...(78): this location contains the signal peptide sequence, MPGLKLHLITAAVATPLHGASQECEPNATQMSDFQEKLGICIFNG, Run with SignalP
  misc_feature (175)...(317): similar to gi522145 in the genepept database release 114, Run with FASTXY 3.3t00, default parameters
agaagattgactccaagagtattttagttttattttaattgcttggccacatttgaaaatcggaacacagaacatttcccattaaagatacagattcccagcttttcttgaaaatcagacatttgagtagcattgggttcacattcttggctggcaccatggagaggggtagccaccgctgctgttattagatgaagtttgaggccaggcatggtagctcatgcctgtaatcccagcactttgggagtccaaggtgggaggattgcttgaggccaggagtttgagactagcaacatagcaagaccctgtctctatcaaaaaaaatgttttttataataagcgggtgtgt

SEQ ID NO: 80430 - DNA, 739 bp, Homo sapiens
  misc_feature (1)...(739): n = a,t,c or g
  sig_peptide (514)...(649): this location contains the signal peptide sequence, MNSLSWGAANAVLLLLLLAWASPTFISINRGVRVMKGPSAFLSGD, Run with SignalP
  misc_feature (222)...(340): similar to gi305340 in the genepept database release 114, Run with FASTXY 3.3t00, default parameters
cgcccggcttactcccttgctggctcatcccactgaagagctatggcacttccaattcctgagcctttgtgaggttctgcgtgtcagtaagcttgcttccgggcatcacctccgaaaacacttgggtttcagttttctctgtgaggcttcttaaggagtggaggaaagtggatgttttcaagataacgcagctaacattcaaagaggttaagtgaattgtccaaagtcacacagcaagcactggaggattagaaaagcacttgggaagcccattaatcttgccggcgttgtcaggagtgatcagcgagttttattaaaagccctgggattgcctgaaaggcccccttgtctgactttgaaatgaaaggggcatgttaacatctcggggcacattgtcaggacccctcaccctgccccttggactatgagctgaccctccaggaggaagcacagaagccctcctttgttaaagggatttcgccggtggacagagaagagttgggccctgtcagcatgaactctctgagttggggggctgcgaatgccgtgctgctgctgctcctcctggcctgggccagccccaccttcatcagcatcaaccgcggggtgagggtgatgaagggcccctctgccttcctgtcaggagatgacatgaagtttgccatccctaaagagaaagatgcctgctgtatacgagaatcgtcgacccgaatnnnccggagcggttccgcagggttac

SEQ ID NO: 80431 - DNA, 636 bp, Homo sapiens
  sig_peptide (115)...(250): this location contains the signal peptide sequence, MFLFGFPTSYMILNMSLVLPARFPQQQMFNFEYKLVKVTTWTAVT, Run with SignalP
  misc_feature (14)...(167): similar to gi2650745 in the genepept database release 114, Run with FASTXY 3.3t00, default parameters
gactaatagggaaaataattttaagtacaccaatttttacccccatttaaagtcacttatattggtgttcctgagcataattttagagtgaatttattttagcaacaaagatttatgttcttgtttgggtttcccactagttacatgattttaaatatgtcattagttctcccggctcgatttcctcagcagcaaatgttcaactttgaatataaacttgtcaaagttactacatggactgcagtaacactttctgttaacaactttgctctgaagttgtagctttttttacatcttcataataacataatagtacatttagttcacagtaatattcatatatattttttgattgatactattcaaatagttttaggactagaaaatgtatacacagataaaaaggggaagatggtgcaaagagaaagagattttacattttagcaagaataaacatctacaatttatttttaaaatctcacttaaacaaaatacgttggcccagcgaggtggctcatacctgtgctcagcactttggaaggccaaggcgggaggatcgcttgaagccaagagttcaagaccagcctgggaaataaagggaggaaccttttttttacaaaacatttaaaaaaaaaa

SEQ ID NO: 80432 - DNA, 725 bp, Homo sapiens
  misc_feature (1)...(725): n = a,t,c or g
  sig_peptide (120)...(255): this location contains the signal peptide sequence, MFYKLVLWFWWCLTTRGNLLCLACIFATLSLESKNFPTLQATLLI, Run with SignalP
  misc_feature (33)...(215): similar to gi1022918 in the genepept database release 114, Run with FASTXY 3.3t00, default parameters
aaatggtttgaactcattacttttccatgtgtttgttgtccacaaatgctagtgagatgcttatttatgactttgtttacttctggtaggtcaaattgatagatttctgtttagcacagatgttttacaaacttgtactttggttctggtggtgtcttaccaccagagggaatttattatgtctggcttgcatttttgctactttgtcccttgaatctaaaaacttcccaactttacaagctacgttgttaataaggcagcacttcatttataaaacgtttgtttggcctacagtgtgccacgatctttgttctttgtaaaaaacttaatataggtctatgacctcatgagaatacggcctgaataagattaactgtcagcagttcatcaacattctttattacaacacatcattagcatggctctgagaaagngttatactctgttcttttgttgcagattggactactagagtgaagcaaattgccaaattgtggagaaaagcaagctcacaagaaagagcaccatatgtgggattttaagaaactcctctatctttttaatatttaaaataccgcgccttggaacccttatttggatttagggtaaaaaaaaaaccaaattttccattttttgaaaaaaggttggttaagaacctgggccccccaagcccactttttttttttaagggggattttttcaactcccttatgggcttaaaaaaa

SEQ ID NO: 80433 - DNA, 766 bp, Homo sapiens
  sig_peptide (206)...(341): this location contains the signal peptide sequence, MLQALKSTVSALATAFWDLDLAAATILAVSIFHHSPCFAALVPES, Run with SignalP
  misc_feature (106)...(323): similar to gi561540 in the genepept database release 114, Run with FASTXY 3.3t00, default parameters
catgccacagaagctgattttggttggcttaggaagaaaaataaatttttaaagatgttgagttgctgtgaaattgttagaagggctagagagagatgtctgcaggcactgcagccagggacagcgcatcaaatcttacacagaattggcccaggccggatgctgctgctgtgttcctgggcgtagacagtgtagcttgcaccagatgctgcaggcactaaagtctacagtgagtgccttggccactgctttctgggatcttgatcttgctgcagctaccattcttgcagtgagcattttccatcatagtccttgctttgcagcattagttcctgaatcaaagtctgggacaggtgtaaataatggcagggtcaagggggcctcctagctgcaagggggcactgagaaggcaggcagctggcatttttagcttatttaatgggaggtagaccctacctttaactgagactaataaggtgggaaagtccccaggcttaggaaagaagggttcaaaagctaggtagtcagaaagaatgtcagagatcaagtactcttgcccagatataattcagcgaaccagggcaaaagaagaatatttttagccatgagggattcatccatctcatttgaacaaatattcagatgtccaattggatgctggtaattggctcagaatagaaatatgaagatagaagaaaatgaataatataggtaacagtagaagagagtgaatgttgcagcaaggaacattgcatacataaaatgg

SEQ ID NO: 80434 - DNA, 665 bp, Homo sapiens
  sig_peptide (273)...(408): this location contains the signal peptide sequence, MGPVSGCWHMSLCLRVYLALDPAHQELMPPGSSLQPITLGIGIEI, Run with SignalP
  misc_feature (99)...(167): similar to gi1289273 in the genepept database release 114, Run with FASTXY 3.3t00, default parameters
tttcgtcctcagcctccttgcagcaggagccacagcatcccactgggacccttaagcagcctgggcacaggatggtgatgggtctgtcctcacttgggccctgttgcccatgacccacctgtcccagctgtgtgtgtcagtgcgtctgcctctctgccagatgttggagtctcccagtatgcccactgactatctttcagaattccacaggggcagatgctcttaatgccccacctgagtccccttggcatttcttttctgtttcaggacacatgggccctgtgtctggctgctggcacatgagcctctgcttgagggtttatttggcactggaccctgctcaccaggaattgatgcctcctgggagtagcctccaaccaattactctaggaattggcattgagatcctccagcctcctacccttgaagtgggcaactctgaggcactctcggtgccgtctcgcagaactcccaggaggactgagctcccgtggcccacggtgctaactggctttctaataaacactttatgagccttcttcccttccctgtctcacttccctctccctcctccccatatcagtgcttcctggggtcacatctcaaataagattggatccttggctcaaggtttgcttcttagggaacccaaaccgacgtgtatt

SEQ ID NO: 80435 - DNA, 694 bp, Homo sapiens
  sig_peptide (245)...(380): this location contains the signal peptide sequence, MTLPLFISVLKCRTCIALFLSPTSCSHFPPQDFMTLQKKTNTFLH, Run with SignalP
  misc_feature (152)...(309): similar to gi2934981 in the genepept database release 114, Run with FASTXY 3.3t00, default parameters
cgtattcggcacgagcagagctggttggctaaaacctagaaatgaaatcatcttcattctatttactccttaaagttgagttttaaaaaagtaattgatttttgtcttcagtgatttctccttggaatcactaactggagctctcccaggattgcatgtttgtgttggtattaactgcgtttctaactctctcctaatcgtcacctccattattttaccgaaaacttaatttggactttccagaatgactctacctctcttcatttctgtcttaaaatgtagaacctgcattgctttgtttctgtctcccacttcatgttcccactttcctccccaggacttcatgactctgcaaaagaaaactaacacatttttacatttaagcaaatttctcctcaccctagagtgtgtgttgctaggacctgctgatttgtgtgtgttcacattttttcaagtgttcgctttagcgctttttatagatacctatttttaccagatcatcactgcttcttaattgttctcaaatctttttcattattgttcaaatcggattttaaatagcagagtggcactaaacctttagataatgtttctgaatctcatccctttctctcttattagtgagatcacttccccttgatgccattttctttttcgcagatattcgtaaaatccccagagatgttttcctttt

SEQ ID NO: 80436 - DNA, 419 bp, Homo sapiens
  misc_feature (1)...(419): n = a,t,c or g
  sig_peptide (91)...(226): this location contains the signal peptide sequence, MTITALAFTYVLLAHSFMLAHYFPLNSWFLASIIFFLVVIKLLSL, Run with SignalP
  misc_feature (77)...(205): similar to gi1181439 in the genepept database release 114, Run with FASTXY 3.3t00, default parameters
gacctcgctgcaggaattcggcacgaggctaaccgatccgcgagcccggggggagagggacgaacggcgtctttgttatcactttgtcctatgacaattactgctcttgcatttacttatgttctacttgcccatagcttcatgcttgctcattactttccattaaactcctggtttcttgcttccatcattttctttttggttgtgatcaagcttttaagcttataaatactgcgtatgatgcacatttatcctgtgtgttgctattgtacagtactgaccacatgacaaaacaagaaacagtcaggaggtgggggagtgggttgtcatagcaacagactgatttgcaaaatgtaagcagtctgcagcagtgcaaggagaggaaagagcatgtccccaaagtgtcataaatctgtctn

SEQ ID NO: 80437 - DNA, 475 bp, Homo sapiens
  sig_peptide (375)...(240): this location contains the signal peptide sequence, MATLLIILLLMVCDEWGIHRILYGIFLKSKFKFLQELMGETEPQE, Run with SignalP
  misc_feature (55)...(227): similar to gi5922636 in the genepept database release 114, Run with FASTXY 3.3t00, default parameters
actgcctgcaggaattccgcacgagaagacgactcttttccagatcaccagtgacctccatcttgccacatccactgattggttctcagtgttcatcttgctcaaactctcatcagcatgtgacagtttgccactccctcctcttgccttctgggtgttctttctcacctctccccactggccgctcctttcgcagtctcctttgctgccaacactcattccccaacctcttgatctccctcttggggttctgtttctcccatcagttcttgcagaaacttgaatttagattttaaaaagatgccatacaaaatacgatggatgccccactcatcacataccatcagcagcaggatgatcaacagtgtagccatgaacacaagcagggtaacccaatattgtgctacatcttgaggggaggagggtaggtggctcaaggcacctggcctggactgcggaaggaatgggtgagttg

SEQ ID NO: 80438 - DNA, 871 bp, Homo sapiens
  sig_peptide (195)...(330): this location contains the signal peptide sequence, MQAGSALWHLWAEGRCWLWAGFGNFGERPHLKTHTDYPGPTEASC, Run with SignalP
  misc_feature (9)...(184): similar to gi555431 in the genepept database release 114, Run with FASTXY 3.3t00, default parameters
cacgagtaccaaagggcccccctggccctccaggcgaggatggactcccaggacaccctggacagagaggcgagactgtgagtatcggaggggctgggggacgtggctggctggctctctgaccaccctgcacgagggcacagccctcgctgcccagcgccatctaggaccctcctggcctgggaagagcagtcatgcaggccggcagcgccttatggcatctgtgggcagaaggcaggtgttggctttgggctggttttggaaactttggtgagaggccacatttaaagacacacacagattatcctgggccgactgaagcctcatgcatccagccttattttccctctagaataatgctgagtgctaccccgcttgagggatacgtcttttaattgggaaagtgctgggaaagggtctacatgttactcagcgtcattcagtcattcgatgctgcaatacttcaagagggcggctgtgggccatgcaccaaccccacccacgttcacccgggcccttccaggtccaattcagggggtctggaggatgcctgcaatgtccccttttacactaaagaaaacaagcgccagtcaggtggaagcggcctctaactagtcactccgctgggcacaagggctctggagtcagagactccccttttgaccttgcccttcactttaagaaaggcatatcaaagggctacttcatccggaccagaaagggactccagtgggttttcaagtggggagaaaaaagcccctcatccagaaaaaggggatcattttttccggggccccataacgccctttggaaagttggggcccacagtttccttaaccggggggtgtgcaaggaaaaggggccccacacc

SEQ ID NO: 80439 - DNA, 448 bp, Homo sapiens
  sig_peptide (283)...(418): this location contains the signal peptide sequence, MGMLHGSAFSCSLGLLSSSRTLTWATCITLQKSNHCKEAGGGTHE, Run with SignalP
  misc_feature (406)...(186): similar to gi5139355 in the genepept database release 114, Run with FASTXY 3.3t00, default parameters
cttctagtccagcgtggtggaattcccaggttggaagtgagtatgacttggaagaaatgcaaggctgtgcaagaatcaattcacacccatcaggggcatttggtgatggtcatgtgcagtactgtgacaatgtagttgacaggtggccattccttcctcttttctgcacattctttccagatggatggggctgcttctgggcggcccagagtgttgtaggttcttgggggagaggaaatgggcctcaactgctaccccaagagctctggaaatggcattggcatgggtatgctccacggctcagccttctcctgttccctgggcctcctgtcgtcatcacgcaccctgacctgggcgacttgcataacattacagaagtccaaccactgcaaggaggcaggtggtggcactcacgaacatgttcattccctttttgggggcaccactg

SEQ ID NO: 80440 - DNA, 398 bp, Homo sapiens
  sig_peptide (88)...(223): this location contains the signal peptide sequence, MLRPCSWFYLQSLAQGLLHSKCFIDHCRMSEQINVWNRLCLPGTT, Run with SignalP
  misc_feature (24)...(6): similar to gi459273 in the genepept database release 114, Run with FASTXY 3.3t00, default parameters
ctctgaagactttcccagccttccaagcctcatccttgtgtatgtgtctccctgctagcccatgacttcctggaagcagaagccctgatgttaaggccttgctcatggttttatctccagagcttagcacagggtctgcttcatagtaagtgcttcatagatcattgtcgaatgagtgaacaaataaatgtatggaatagactttgtttacctggaacaactcctgtcccagaactggattgggtcctgcaggggacagaaagggcacttactacaaatctgagttcagagacctggtgcttcacagttaaacctggagacggactcatggaaggaccatcatctcttgactcttctgcctgctgtcctcatgccagacatctgtcctctcttaagct

SEQ ID NO: 80441 - DNA, 411 bp, Homo sapiens
  sig_peptide (172)...(307): this location contains the signal peptide sequence, MVMMGVRMMLKVMKIPLLLTEALPAFTVACWKDASGAYTIAVSGS, Run with SignalP
  misc_feature (372)...(234): similar to gi460146 in the genepept database release 114, Run with FASTXY 3.3t00, default parameters
cggacgcgtgggatttcctctcactcccttgtcatgtttctcagagactcagttttttttcatttgcagagcaaagataacaatgcctattttaaagggttgttgtgaggcctagaacagtgcttggactcctgtaagcactttatataatgggggctgctgtgatgtgtaatggtcatgatgggagtgaggatgatgttgaaggtgatgaagataccacttctgttaacagaggcattgcctgcctttactgttgcctgttggaaagatgcttcaggggcatatacaatagcagtttcagggagtggtgtgacctgtagcaggaaggggaaagtcaggagaaaagaattttcttctctgcaagagactggggtaggtaccagctatttgacagggaggcactattcttgg

SEQ ID NO: 80442 - DNA, 383 bp, Homo sapiens
  sig_peptide (200)...(65): this location contains the signal peptide sequence, MRRARTKFVLLAFIASRNTDDFCCPRWSSYLFTSWNWTGPSDLTG, Run with SignalP
  misc_feature (79)...(216): similar to gi3860945 in the genepept database release 114, Run with FASTXY 3.3t00, default parameters
cttttcttacatgaaatagggttcgagactgtgtagtgaaatgaaacagatgccatcctcgaagggcctgtgagatctgatggtcctgtccagttccacgatgtgaacagatagcttgaccatctcggacagcagaagtcatcagtattcctggaagcgatgaaagcaagtaaaacaaacttggtcctggctctacgcatttcctctgtgctgtggggacacgcacgcatttgtggagtcttcagtcacggcagtgttccaggttcacgagaagggaaggctttcccagcctgctcccccgacctccctgcaggcacagatggggcatcttgctggcaaagtgctttccacacccaattccatccctccaaccctgcaggaag

SEQ ID NO: 80443 - DNA, 746 bp, Homo sapiens
  sig_peptide (121)...(256): this location contains the signal peptide sequence, MLLSCFSVLTPTSFIPSSPSILLRHEYRACLFSQNFQHLHLTQRI, Run with SignalP
  misc_feature (1)...(357): similar to gi5852323 in the genepept database release 114, Run with FASTXY 3.3t00, default parameters
tcagcccatagctttctattggctccacctcagaatcctaggacttctgcacttgctctgctacgaccctggtcccagcctgcagcacgtcccacctggcttattggtaggctctcctaaatgcttctttcttgcttctctgtccttactccaacatcctttattcccagcagccccagtatccttctaagacatgagtacagagcatgtctcttttctcaaaacttccagcatctacatctcacccagaggataaacaaagtcaatacaaaaactctaaggcccttgaagacctggcccctttacctttctgacctcatctgctacttgcctgttccctcctctgcagtctcaccatgtccttgctgttgcccagtgggcccagttccaacctttgcatttacatttcgttttgtccacaaacttttcccacagatagtccagtggctggctttctccttctttttgacctttaatcaaatggcaccttcttattgaggcttcctgtgactaccatatttataattacaaccttttctctatttcgttttgttctttcatttcacttggcaccatctaacatactatagagcttatttatttgcttattggcctcctttcctccacttagaaaaataaacctccctgggaattcccgccgttggggtttgggttttttttttttctcttaaaaattccccaaaaggcttattttcccggggccccggggccatattttctagccc

SEQ ID NO: 80444 - DNA, 703 bp, Homo sapiens
  sig_peptide (13)...(148): this location contains the signal peptide sequence, MLCVWIKVLFLLIAESNTWLLSPRTKDVLKSEPTQIYPHTSRKQF, Run with SignalP
  misc_feature (11)...(87): similar to gi1499555 in the genepept database release 114, Run with FASTXY 3.3t00, default parameters
gtgggaaggaaaatgctatgcgtgtggataaaggtgctctttcttctcatcgcagagtcaaacacctggctgctatcaccaaggacaaaggatgttctgaagagtgaaccaactcagatttacccacatacttcaagaaagcaatttaaaaaaccgcaggaatccaaacattctttcattggctactaaaatacaagaaaagaaatcaagaaaagtttgtaggacttttaggaagctattacttgatcagaatattattattataaatatatcagaacacttttatccttgcttgatgggaattcaacacttcacgtcagccaggaaagctacaggttagtaactaaactaacctagtctgttggccctaaagattttctgccaatggccaggcatggtggctcacacctgtaatcccagcactttgggaggctgaggcgggtggatcacacctgaggtcaggagtttgagaccagtttggccaatatggttaccatactgattatcattttaacatttatatacaaacatctttaagtcttcctagacaatgttaaggaaatgttaaggaaagccctcaagaatcaatatggtgaaaaccccggactttctaaaaaccaaaataaacccgggtggggggagggcccgtggtccacttctcggagggggggggggagaaaacttgttctgcgagcgaagacta

SEQ ID NO: 80445 - DNA, 533 bp, Homo sapiens
  sig_peptide (133)...(268): this location contains the signal peptide sequence, MKSLCFYLSFTFTLDALSLRERGTAHGPHVQTTSSLSVLLSKPLP, Run with SignalP
  misc_feature (40)...(291): similar to gi3258064 in the genepept database release 114, Run with FASTXY 3.3t00, default parameters
cctgcatagcatctccacttctgtccccagtaggcaattcttaatttccaccctgtgactaacaagctcttccctctgtcttccccatctcggcaaagggcatccccctcgactcagtcactcagaccaaaaatgaagagcctgtgtttctatctctccttcacatttacactggacgcactctctctaagagaaagaggcactgctcatggcccccatgttcaaaccacatcatctctctctgtgctgctgtcaaaacccctccctgggctctgatttttctctgtgacaggccagttggcagcctccccgacagccttagcacctgcttcccagctaagcgaaccctgattttgtttggggcaactatgtgctcgcctagtgggggctggccatcctggtccactttgacacatgttcactttcccaccctgttaaagtcagggccggccacatggcccatggcctaacggggttaaagagacacttgcagggggagcctctgagaagcttttcctttgttaaaaaaaaaa

SEQ ID NO: 80446 - DNA, 335 bp, Homo sapiens
  sig_peptide (72)...(207): this location contains the signal peptide sequence, MIKSLSTLAFYVFWVNMYSRLPCLIPVMLQVPREKDGTRSSPVWG, Run with SignalP
  misc_feature (206)...(51): similar to gi4138433 in the genepept database release 114, Run with FASTXY 3.3t00, default parameters
ttatgcaccttgtttgggaaattaatgactgcagagatttaggaatacggtccctacgtaactttgccgtgatgatcaagtcactcagcacgttggcattttacgtgttttgggtgaacatgtacagcagattgccatgtctaatacctgtaatgctgcaagttcccagagaaaaagatggaactcgctcatctcctgtttggggagaatttcatccacactctcgaatttccccacatccctgaggctttcatgccaggctctgtcctcacttttcctgctcacctcctgctacgcctgtctaccgtaaccagtgagacttcagacggcagatt

SEQ ID NO: 80447 - DNA, 501 bp, Homo sapiens
  sig_peptide (152)...(287): this location contains the signal peptide sequence, MTRHWVLSVLVALKKQKEFTHWVLSILVALKKQKEFRHWVLSVLV, Run with SignalP
  misc_feature (323)...(143): similar to gi553593 in the genepept database release 114, Run with FASTXY 3.3t00, default parameters
acactctgcatttttggtgtttgaaaaagcgttcaaagattaattcagagtaatcattctcatttaatctcttgctttaattttgggaacattaaaatggcctaaataaattctgtttaccccaacaccactgctgacaatataaatagcaatgactagacactgggtgttgagtgttctggtagctttgaagaagcaaaaagaatttacacactgggtattgagtattctggtagctttgaagaagcaaaaagaatttagacactgggtattgagtgttctggtagctttgaagaaacaaaaagaatttactggttgggtttttgcttcagtttaaaaatatttttgatatatagcattggcttttggacatcttaagctttaggtaaaggcagttattcaaattcaatgtatacgcctggataatttttacttttctggagaataaagttaaattttgaagcgtcacaggcaatgatttcctgggcccctccggacctt

SEQ ID NO: 80448 - DNA, 333 bp, Homo sapiens
  sig_peptide (61)...(196): this location contains the signal peptide sequence, MIKSLSTLAFYVFWVNMYSRLPCLIPVMLQVPREKDGTRSSPVWG, Run with SignalP
  misc_feature (195)...(39): similar to gi4138433 in the genepept database release 114, Run with FASTXY 3.3t00, default parameters
gtttgggaaattaatgactgcagagatttaggaatacggtccctacgtaactttgccgtgatgatcaagtcactcagcacgttggcattttacgtgttttgggtgaacatgtacagcagattgccatgtctaatacctgtaatgctgcaagttcccagagaaaaagatggaactcgctcatctcctgtttggggagaatttcatccacactctcgaatttccccacatccctgaggctttcatgccaggctctgtcctcacttttcctgctcacctcctgctacgcctgtctaccgtaaccagtgagacttcagacggcagattccagggggc

SEQ ID NO: 80449 - DNA, 357 bp, Homo sapiens
  misc_feature (1)...(357): n = a,t,c or g
  sig_peptide (201)...(336): this location contains the signal peptide sequence, MIVCVCTSAFKWILSGIWIFSKTHSHASARASSFGWVKRKPLWLE, Run with SignalP
  misc_feature (351)...(264): similar to gi306325 in the genepept database release 114, Run with FASTXY 3.3t00, default parameters
gtagagttgagctcaagtcatataaatttggnnnttcctgccatggacaatggttcttgagtaaattatggagtctttgagatttgtttttctcaggctccaaatattgtgataatatataaattggacagtgattctgcaaaccatatcgaacccatggtagatatttgcattctagtcactgtctttggctactggaaatgattgtatgtgtgtgcacatcagcattcaagtggatactgagcggcatctggatatttagtaaaacacattctcacgccagtgcccgtgcttcttcctttgggtgggtaaaaagaaaaccactctggttggagggttccgtgcattcccaggcct

SEQ ID NO: 80450 - DNA, 251 bp, Homo sapiens
  sig_peptide (69)...(204): this location contains the signal peptide sequence, MTVTVMYVPCHLLVYRLRLPGVKACVSLSSFQRMEGWWGWENCLR, Run with SignalP
  misc_feature (1)...(192): similar to gi2764941 in the genepept database release 114, Run with FASTXY 3.3t00, default parameters
tctgattcccccaccagctgctcacgggagtgtgtgcagtttttggcctgtatgacttactgtgctagatgacagttaccgttatgtatgtcccgtgtcacctgcttgtctatagactcagactccctggggtcaaagcgtgtgtctcgctgtcttcattccagaggatggaggggtggtgggggtgggagaattgcctcaggggctccctgtttcccactcatgcttttcctcgccgggaagatgccgca

SEQ ID NO: 80451 - DNA, 451 bp, Homo sapiens
  sig_peptide (199)...(64): this location contains the signal peptide sequence, MFFQTHGLLIAKFLSTVQIKESNKEKMIEHEITLLPVMLSGTTKE, Run with SignalP
  misc_feature (25)...(161): similar to gi3834507 in the genepept database release 114, Run with FASTXY 3.3t00, default parameters
aatacagtgtctctgcatacttatgtcactgctttgtgatgctgtcttttatacaagttctctcttctttagttgtgccagaaagcatcacaggtaataatgtgatttcatgttctatcatcttctctttattggattcttttatttgaacagttgataagaattttgcaatcaacaggccatgggtttgaaagaacatactgtggaatctgacaggctgggttcaaatcccagcatagttacttaccatttgttagggctcaaacaagtgaatcaacatctatgacccttagcttgcttcctcctttataaaatgaacataataaccataattcctggaagggctgcatgaggattaaatgaaagaccacactcggcagtgctccagatgttcaaaacacatgccctgcctagaggcttttcagctcaggggcttgataaagtgccagcc

SEQ ID NO: 80452 - DNA, 430 bp, Homo sapiens
  misc_feature (1)...(430): n = a,t,c or g
  sig_peptide (50)...(185): this location contains the signal peptide sequence, MNRHKYAALCFLILQALLSRALYMGGHDRHVYXXXXXXXGGPFKG, Run with SignalP
  misc_feature (430)...(115): similar to gi531829 in the genepept database release 114, Run with FASTXY 3.3t00, default parameters
ccacgcgtccgaaaaanntnnnnaagtgattgcagcttgagttgattttatgaacaggcacaagtatgctgccttatgctttctgatcttgcaagcactactctctagggccttatacatgggaggacatgatagacatgtatacnnnnnnnnnnnnnnnnnnngggggggcccttttaaaggaaccaagtttaagtccccgggcttggaaaggaaaaannnnnnnnnnggggccccaaaattcaattcccgggccggggttttaaaaccgcgggaagggaaaaaccctggggttacccaaattaatcccctttggaaaaaannnnnnnnnnnnnnnnnnnnnnnnnnnnnntnnttntnnnntnnnnnntnnnttttttnntnttnnnnnnnnnnnnnnnnnnnnnnnggtttttatnttntttattta

SEQ ID NO: 80453 - DNA, 1488 bp, Homo sapiens
  sig_peptide (972)...(1107): this location contains the signal peptide sequence, MFQVGGRVFKRCIFSFCCCHFIGLGLGVCFSSLNGTRMFADSYSV, Run with SignalP
  misc_feature (12)...(108): similar to gi5702177 in the genepept database release 114, Run with FASTXY 3.3t00, default parameters
gctggtccgcttttttttttttctatcgctttttttttttgtaccaattcaagtgttttctctttctccccatagaagtgtgtctatatatatgccgtgttaacctctctttttatctgatgaggaaaaacatatgatctgaggggctaagtgctgtagcctagtgccaggtcttctggccccaattctgggttctccccaagcccatgtttcttcccctttctcacaatctttacttcttcctctgaccctcaccaccacccaaagtacttttaattctagaaaagaaacccagctgcacactggcacacctgaccttcatgcagtcagaagctttggatgattccccatccaaaatattaaagatgaaatgaaagcaaagtaggcatctgacaaaagttgctttttcccttctgcattttaggacctcaagtaatgtttatccagaaactgctatcataccagggattcattgtgtatttaacaacataggcatgcaatctggcaaatttgaaaaactcttaacatacaccccaaatccctgcccaaatttaagaactagggtggacacagtgcgtttttccatgtcgcatcttctgtgatggggctacgatacgtgggagcagagaatggggagggtggagcgcatgccagatgaggatctatcagcaatgggacggggcctccactttagcatctccaccctgctcctctcagaggaccgcctttcattgcattcagctgtgatggtagcacgaacacaggtgcaccgaggacgaggagagcaggagccttgtgctctctctgcatctgaggcaggacagcacagggtacggagcagtctgcagagaggccagctcatcagggaagcacttgtcttccaccttgggctttgactgagcactgggcaattggcctctggggatcaacgaaataatcctaaacagagttactctatgtcacactatggaatgttccaagtaggtggccgtgttttcaaaagatgtattttctccttttgttgttgccatttcataggtttaggattgggtgtgtgtttctcctctctgaatggcactcgaatgtttgctgactcctactctgtgtgactggggtgtacagctatggactgatgcatcccatcccatcatctttcatgatcaaagcagtctcttcttttttgacagctgaagaagcatcggtagggaatccagaaggagcgttcatgaaggtgttacaagcccggaagaactacacaagcactgagctgattgttgagccagaggagccctcagacagcagtggcatcaacttgtcaggctttgggagtgagcagctagacaccaatgacgagagtgattttatcagtacactaagttacatcttgccttatttctcagcggtaaacctagatgtgaaatcactgttactaccgttaattaaactgccaaccacaggaaacagcctggcaaagattcaaactgtagc

SEQ ID NO: 80454 - DNA, 3134 bp, Homo sapiens
  sig_peptide (1504)...(1639): this location contains the signal peptide sequence, MAFRTCFLSCLTVVKVCSKASPSFSTQQPCVTTKVELSLICCCFS, Run with SignalP
  misc_feature (1)...(996): similar to gi6005986 in the genepept database release 114, Run with FASTXY 3.3t00, default parameters
atgcgcttccgctttggggtggtggtgccacccgccgtggccggcgcccggccggagctgctggtggtggggtcgcggcccgagctggggcgttgggagccgcgcggtgccgtccgcctgaggccggccggcaccgcggcgggcgacggggccctggccctgcaggagccgggcctgtggctcggggaggtggagctggcggccgaggaggcggcgcaggacggggcggagccgggccgcgtggacacgttctggtacaagttcctgaagcgggagccgggaggagagctctcctgggaaggcaatggacctcatcatgaccgttgctgtacttacaatgaaaacaacttggtggatggtgtgtattgtctcccaataggacactggattgaggccactgggcacaccaatgaaatgaagcacacaacagacttctattttaatattgcaggccaccaagccatgcattattcaagaattctaccaaatatctggctgggtagctgccctcgtcaggtggaacatgtaaccatcaaactgaagcatgaattggggattacagctgtaatgaatttccagactgaatgggatattgtacagaattcctcaggctgtaaccgctacccagagcccatgactccagacactatgattaaactatatagggaagaaggcttggcctacatctggatgccaacaccagatatgagcaccgaaggccgagtacagatgctgccccaggcggtgtgcctgctgcatgcgctgctggagaagggacacatcgtgtacgtgcactgcaacgctggggtgggccgctccaccgcggctgtctgcggctggctccagtatgtgatgggctggaatctgaggaaggtgcagtatttcctcatggccaagaggccggctgtctacattgacgaagaggccttggcccgggcacaagaagattttttccagaaatttgggaaggttcgttcttctgtgtgtagcctgtagctggtcagcctgcttctgccccctcctgatttccctaaggagcctgggatgatgttggtcaaatgacctagaaacaaggattctacctgaactgaaaggactgtgtgacctcccccaagccaaccactttcacctgggatgactttcgattatgctttgttttggggctgtatttttgaaatactctacaagaaagctgtggctcaacacatgagaagaagcacgaagcagttaggctgtacatcagacagaagggtaatgcgtgcagttcctgctgcctgcaggcagacgaggcctttgctttacagcactgtatgtgttgcacgatggatccgtgacagcactttcctgttgcactgaaactcttggccatgtagaggaaaagatatggagttatgtggatttcatcactagtatgtgtgcgtgagctggtcagttgccaaaggaggaaataaggttagaagcctgaaccgttacaaaagaagagctcactatggtcaaaaagtgatggctttcaggacttgttttttatcctgcctcacagttgttaaagtctgttccaaggcatcaccttccttctctacccaacaaccctgtgtaacaactaaagtagaattatctctcatttgttgttgtttttcctcaaaattaccaaacaaagcaaaaaatacccttgttttttatagttgagatgtcaagaagttaaattgaggcttaatgagcataggtagcttgtccaaggtctcatgaccagtcaagggcaagctggagttaataatctatatttatttgactcagcactgttttcatcacaacttgttttcccagcatcatgtagtgcatttagttttgtctttctcagggtatagtcaatatgcctgcaggagtttctatagcgagacatagaatagtattctgatcagttgccaaagaatctaggaaattagttgtattttgtgcaagctaatttaaaaacatgatgggctgttttaagaccagagtggaaattcatgagaggaactatactaccaaaagagcccaaatgaccaaatccatggataattgcttcacagccttggccatcctggctcagctctcaatttagtataatatgcagttcctgtgcctccagactatgcagctcatcaccctaggttctacaggaaatacagagatgaacaactttgccttcaaaaaatgtgctgcctagaaaacagacctgcatttcaacccaactgtaatgcaggatttggaccatgaatgatatgctagaatagaagaaagagaagtgtttttttaattgagagcctctatgtgcaaggtgatatataatcatatccagtttaatcttcacaatatccaatgaagaaggtctcattatctccatgataaagatggggaaactaaggtcagaagggttaactcaactgtctattgtcacatgatgaataaatagatgaagtgagatacaaagctaggttttgattcaaagccccttactttcctaattaaactatgatgcgtatttatttttctgcacccttcctttcttccacaaacaccatattgatagatgcaagagactctttatttagaaggcgtgggggacaagaaggatacaaggtaagtttcagtggagctcagaggacggggagatagaactgtggcacttaggggagatgacatttgctttgggcagaggcagctagccaggacacatttccactataattttacaaagtttaatttattagcctagcattaagttaaagtgaagtccagctcccttgctaaaaataactagaggtaataattggtattcaggtaactcatttacagtcataatgtgttgtgaaaatttaatcttaaaaattaaatttttaaactatgtgggtctgtgaatttctttaatgtctaagaaatcccagcttcataatttccatgatacaaaagatctttttttcaggtgggatttttaccttttgttccttttgctctgatagacaaaatcagtttaggactattaaagaatgttttggaataaactgtctttttcctcaatgaatgggatgtctaatgtatttcaaaatcacccaaaacttttggcaaataaaagcattaaaaaagaaaaaaaaaaa

SEQ ID NO: 80455 - DNA, 378 bp, Homo sapiens
  sig_peptide (58)...(193): this location contains the signal peptide sequence, MFSFHTFSLIYFTLFSHYMEKNFHSPGDKFPHSVSLLSFFTKIVS, Run with SignalP
  misc_feature (366)...(264): similar to gi4775569 in the genepept database release 114, Run with FASTXY 3.3t00, default parameters
gaacatggtaggaaaagctttaaatttttagtttatcttattgaaacgataagtaatatgttctcatttcatacattttctttgatatattttactttgttttctcattatatggaaaaaaactttcatagtcctggagataaatttccccatagtgtttctttactctcattttttactaaaatagtgtctagagctgggaggtaacctgatgaattttgtattatagataacaaaactgagacccagtgaggaaagtgacttttgcaaggccatacagttgattagcatagttgagactggaactatttagttcttctgacagccagtccagaactgtttttattcggattgcatcagatgtattacatacctgcc

SEQ ID NO: 80456 - DNA, 351 bp, Homo sapiens
  sig_peptide (156)...(291): this location contains the signal peptide sequence, MLMHRWGVTAKIMQLTFVMMRVSSEVWEEGDTPDRRDPILAAFND, Run with SignalP
  misc_feature (315)...(222): similar to gi3164080 in the genepept database release 114, Run with FASTXY 3.3t00, default parameters
tgaacgtctcctctaccagaatataggtttcaggagacacagatttttgtcatttcgttcattgcttgctagatttctagtacctacagcagtgcctggcgcacagtaggtacttgataactcttttgaattaacccaataaagcaagctgctttatgttaatgcacagatggggagtaactgcaaagattatgcagttgacatttgtaatgatgagagtctcaagtgaagtttgggaggagggagatactcccgacaggagggacccgattttggcagccttcaatgacgagtctaggcggctatctcttatgccttgtctgtcgcttcatgctctttgcaccttggcag

SEQ ID NO: 80457 - DNA, 319 bp, Homo sapiens
  sig_peptide (268)...(133): this location contains the signal peptide sequence, MVLWFFYLWGEGTALATTNNHQSLIHRTAWAMSSSFNNPLATHSG, Run with SignalP
  misc_feature (3)...(115): similar to gi414131 in the genepept database release 114, Run with FASTXY 3.3t00, default parameters
catttttggtaactcagattcctatagctgtgcatggggtcattaccttggacaatctgatgcctgagaagactctgttttgtgtttccaaatggaccatcttatggaccatctttgcttggaaaaggcactgtccagaatgtgtggctaatggattgttgaaggagctggacatggcccaggcagtccggtgaatcagtgactgatggttgtttgtagtagctaatgctgttccctccccccaaagataaaagaaccataaaaccatcaagtggcttgatttgactattgccacctttggtgacagaactgggaacca

SEQ ID NO: 80458 - DNA, 372 bp, Homo sapiens
  misc_feature (1)...(372): n = a,t,c or g
  sig_peptide (89)...(224): this location contains the signal peptide sequence, MPLSVVFMAFAWWKSCGGYVEIKTRINFCSRSKYIFLKSRIMFPI, Run with SignalP
  misc_feature (45)...(120): similar to gi210732 in the genepept database release 114, Run with FASTXY 3.3t00, default parameters
atttctgtactgagatttttttaacgtataaaatgtagatacaactgttctatgatggctgtttttgccaaaaacatgcctgcccaggatgcctttgtcagttgttttcatggcatttgcttggtggaaaagttgtgggggttatgtagaaataaaaacgagaataaatttctgcagccgatctaaatacatatttttaaagtcaagaattatgtttcccattaaataaacgttctcatttatggtctccgttcatatagtgatgggtcctattagctgtcattatccttctattctcattaggagagaaaaatagtccaggctcctaaaagtatcttcatgagaagtatcagctcctaattagcagtgacn

SEQ ID NO: 80459 - DNA, 387 bp, Homo sapiens
  sig_peptide (38)...(173): this location contains the signal peptide sequence, MLNSKLHFTVMVTAFFLWGLQGKQPLVSICEHTCSLCLGRVPGAS, Run with SignalP
  misc_feature (119)...(185): similar to gi3256968 in the genepept database release 114, Run with FASTXY 3.3t00, default parameters
ttcagtccctagccctctctttatctcactttgtttcatgttgaatagtaagttgcattttactgttatggtgactgcatttttcttatggggccttcagggtaaacagccgttagtttccatctgtgaacacacatgtagcttgtgtttgggtagggtgcctggtgcttccaaagtcattattttctctgtaatgtttgttctccatggttgtgcatagatagattctatgccccagtgcaggacgaagaggtagcctgtaattccagctgaatgtgttgcagttgaaagtgggacgggagtggaagcaagtgatggatcaagcaaatcgcttttaattttacataaattggttttctgctttcctctggggcagaagtttgctgg

SEQ ID NO: 80460 - DNA, 680 bp, Homo sapiens
  sig_peptide (425)...(560): this location contains the signal peptide sequence, MWLRKCLLGLSLISFRVCGPLIALWVVSDSSIRRLNPLVVFLCVC, Run with SignalP
  misc_feature (677)...(537): similar to gi808730 in the genepept database release 114, Run with FASTXY 3.3t00, default parameters
gtctaatgaatacttagttttgtcatctacaaaatgaaaatagtaatatttgcctcaaagactattatttgggaggatctagtgcaaatgttagtaatgtggatattgtgtagtgtcccaggatattaatgtttttagcctcttggcttttattctgtattgttgccccaaaagatgatgctcacttatctttcatccagtgtaaggatatctggaaagacaacagaaagtatagctgttttcatttcaaaagtgatcagctgcttgagctagcaagcaaggcttgcactagcttccaggcgcagtcacgcagtttcacagcaggcgcggttccctcggagcacccagagctgccctgtggtagtcagcagttgttctgtggctgcactgccaggctgggtggcaggtggatcggagccagcagatgtggctcaggaagtgccttcttggcctctccttaatctctttcagagtctgtgggcccttgattgcactgtgggttgtttcagactccagtattaggagactgaaccccttggtggtttttttgtgtgtgtgtgctgagctgggttgaggacatggtaagcaggtggggtgcctcccctgtggttgctccgggtggtacctgtggtgtggggtgggtcttgagtagtctggcccccacttgctggagtatctgg

SEQ ID NO: 80461 - DNA, 405 bp, Homo sapiens
  sig_peptide (181)...(316): this location contains the signal peptide sequence, MCLLLSLCSFRFALKIGRNEEFPSFSFPSAVNISVLVLILFGRLR, Run with SignalP
  misc_feature (2)...(101): similar to gi496191 in the genepept database release 114, Run with FASTXY 3.3t00, default parameters
cccacgcgtccgaattgataggattattttctactttaaaagaattttttttgaaaaggagaatttgtactgcgctctctttattcttattattcttggactttccagattattcataatatcttagatttaatggtttataactctgaaaacacttgctaattccttgagtccacatacatgtgtctgctattatcactttgttcattccggtttgctctaaagataggaaggaatgaagaattcccttctttttcattcccttctgcagttaacatttccgttctggttctcattttatttggaaggttaaggttagttttttgttgtttcttgaagaacttggattttaagttaagctcattttggattggaagttctgcttcccagcctgttgtggagcaa

SEQ ID NO: 80462 - DNA, 392 bp, Homo sapiens
  sig_peptide (187)...(322): this location contains the signal peptide sequence, MFQFTFYIRLHFKVYNLVFCRFIMFRIFLKCFYTHLIYCTLPLLK, Run with SignalP
  misc_feature (139)...(285): similar to gi4588006 in the genepept database release 114, Run with FASTXY 3.3t00, default parameters
ttttgaatagttttttaaaatttacagttcttaatttttttataagtatgtgggctatgcattttggggctggccataggagaggataagaaaaattcagtcgctatggtgaattgcaaagtgttggaaagttgataattaataagaaatgaaaatgaatttaaggtaactagtgataggcataaaatgtttcaatttacattttacataagattacattttaaagtgtataatttagttttttgtagattcataatgttcagaatatttttaaaatgtttttatactcacctcatttattgcacattaccacttttgaagggtgggcttatcagaaacattttgaatcatagccaaataattttcctcattaatttaaaattgggtttgag

SEQ ID NO: 80463 - DNA, 362 bp, Homo sapiens
  misc_feature (1)...(362): n = a,t,c or g
  sig_peptide (25)...(160): this location contains the signal peptide sequence, MSVRSYPIGVLICTFRVFKLLLFPYQSTLWEVGYFTFSYHALYYF, Run with SignalP
  misc_feature (22)...(180): similar to gi732980 in the genepept database release 114, Run with FASTXY 3.3t00, default parameters
tttttttaaatagtaggtatcccaatgagtgtgcgttcatatcccattggagttttgatttgtacttttagagtctttaaattattactttttccatatcaaagtactttgtgggaagttggttattttacattctcataccatgctttgtattactttcccatttggatgcccttttcatccttcacctcatcctgtaaacccaaaatctaacttaaatcccaaatccaacttccactgtaaagcctttgctgacttctttacttcacattgatttctgaatttctaaaagttcctcattgtctaccacaaaactaagtatttgtttataagaaaaagctttatttagtcctatattattn

SEQ ID NO: 80464 - DNA, 827 bp, Homo sapiens
  misc_feature (1)...(827): n = a,t,c or g
  sig_peptide (14)...(149): this location contains the signal peptide sequence, MKFHLSFFSLKRAIFYICAKADKISGGYLYKCRTVSYSGKNVRSG, Run with SignalP
  misc_feature (114)...(200): similar to gi470369 in the genepept database release 114, Run with FASTXY 3.3t00, default parameters
aaaaattgtgagaatgaaattccaccttagtttcttttctctgaaaagagccatattttatatatgtgccaaagctgataaaatcagtggaggctatttgtacaaatgtaggacagtgtcgtatagtggaaagaatgttagatctggagttaaaatatctggatttctgtctgcttgcatcattagctatctgtgattgtgagcaagtttcctagtgttttaagtaattcacccaagattatgcaagtagtgagttgcagaaccaggattcagatgcaaatctttctaaccctagggctctatctctagtgtctatactcctaacctagactgtggtgtttcccctaacttctgaatctttctgatacagattttgtccccatgaaagggaacattctcacacccacttggtttcatttgttgctagtaaagataaaatgggatcatacgtaggtaaagcccactgtgcagtctacattatcatgatacttattgtataatatctgattattcactattcaaagctctacctctgagaactaggtataaatgaagttagctcttgagcgtctgaaatcaactaacaaacacagcccactcattggagacattcattcaacactatttacttattttttaaaagataaatgcattgtgtatatttgaggcgtataacatatngtatggggtttatatataaataagaaaaatggttagtgaagnaaattaacatggctggcatctcacataggtacttttcttgggggaaggcaaaaggcagctaaaaatctgcctattttaacaaaaaaacctagtacatttacatc

SEQ ID NO: 80465 - DNA, 597 bp, Homo sapiens
  misc_feature (1)...(597): n = a,t,c or g
  sig_peptide (25)...(160): this location contains the signal peptide sequence, MRLLHCKTLHIVLFTLLYKILMDHQNLSEHVLCMVLYLIELGLEN, Run with SignalP
  misc_feature (70)...(199): similar to gi1787411 in the genepept database release 114, Run with FASTXY 3.3t00, default parameters
ctccatcctagctataaaggtcttatgagacttttgcactgtaaaactttacacattgtgctattcactctgctttacaagattttgatggatcatcaaaatctgtcagaacatgtactctgcatggttttatatctgattgaattaggacttgaaaattctgctgaagaagaatcagatgaagaggcatcagtgggtggaccagaacgttgtcatgacagttggtttcctggcagtaacttagtgtcaaacatgcgacactttataaactatgttagagtaagagttccagagactgctcctgaagtaaagagagactcacctgcaagtactagctctgataacttgggttctttacaaaattctggtacagctcaagttttcagtttagtagcagaacgtagaaagaaatttcaggaaatcatcaatcgcagtagcagtgaagcaaatcaggtggttcgtcccacaacttcaagtaaatggtctgctcctgggtcagctccacagttaactacagccatttttggaaattaaagaaagcatattgtctttgctaattaaacttcaccacanactcttcagaagtcgacgcgggcg

SEQ ID NO: 80466 - DNA, 842 bp, Homo sapiens
  sig_peptide (130)...(265): this location contains the signal peptide sequence, MWSVTSTIFICRLLIVRLLGNTAVRTSVVFLPHKAGRHWEKSTSL, Run with SignalP
  misc_feature (82)...(123): similar to gi559089 in the genepept database release 114, Run with FASTXY 3.3t00, default parameters
aacagttcaggccatagaggattactaggtctttacaggcttattgaagagggaggctgagaatatgctggatgaaaaatgagcccaaatccaccatctcctgtccctccagttatgtgctctggtgcaatgtggtccgtcacaagtaccatcttcatatgcaggctactcattgtaagactcttgggcaacacagcagtgagaacctctgttgtctttctaccccacaaggcaggaaggcattgggaaaagtccactagcctggtgtcaggaggctgaggttcagtcctgctctgtcatgaattggctacatgactgaggaccaaggacttgagttttctcatctatgaaacaaagatattggataccagtcattttcaaacatttctttttccaataagcagaacccttttcaaatgaaatcttatgtatagtgcagttgctcagagcaggtgctctcggctgccctctcaccctttatggtagatcttgaggagcctccacaagcatcacagcactggtcagtacttctgcacatgaggtctgaggaccacctgcatctgaatcacccaggtgcagattcctgggctctttcccggacctcttgaatcaaactttttgggtctgggactgaggactctatttttaatgagcacttcatgggattctcatgtacattgaagtttgagtaccactaggccagatatttcaaggttcctctcaggctttaagtacagtgactctgtgatcctcttcagctttggtgtgatggcgaggagccaaagaaagggagttcgtgacctcacctgataaaaagatttaacagcatgtattgcgcgcgg

SEQ ID NO: 80467 - DNA, 289 bp, Homo sapiens
  sig_peptide (77)...(212): this location contains the signal peptide sequence, MFSALSFFIHLLPERGACLLCQNLFWILLIWPGIRIMNLTNGRLY, Run with SignalP
  misc_feature (38)...(237): similar to gi1591281 in the genepept database release 114, Run with FASTXY 3.3t00, default parameters
caggatctagagacggtgctgctgttctctgacttagtactttgttcacaaccttttcctcttgcttaaactcatcatgttcagtgctctgtccttcttcatacatttactaccagaaagaggggcgtgtcttctgtgtcagaacttgttttggatattgctaatatggccgggaatcagaatcatgaacctaactaatggacgtttatattatatcttagcatcctgtaacacttttgactctgtgtcaagaggggtatgtacaagaccagtttgacacccttaactc

SEQ ID NO: 80468 - DNA, 377 bp, Homo sapiens
  sig_peptide (107)...(242): this location contains the signal peptide sequence, MMFKTGPWLLLQRCWAELCRCFIVNSNCEHGLEPAICIFSLHGVK, Run with SignalP
  misc_feature (341)...(165): similar to gi145811 in the genepept database release 114, Run with FASTXY 3.3t00, default parameters
ggcacgagcctaacttcacaaatcagctgctcaggcgttttatacctaccagtatttttgtcaagccacagggtcgactcatggatgatacctctattgctgctgcatgatgttcaagaccggcccttggctgttgctacagagatgttgggcagagctatgcaggtgcttcattgtgaactctaactgtgagcatgggctagagcccgccatttgtatcttctcactgcacggcgtaaaaatcatatttagctgagtagacccattattagagggtattacgacataacaagtgtgggacagttttctggggatcaggagtgttagaagacgtttaggaacgtataacagcgaagtttcctagattgatgaggacg

SEQ ID NO: 80469 - DNA, 507 bp, Homo sapiens
  misc_feature (1)...(507): n = a,t,c or g
  sig_peptide (240)...(375): this location contains the signal peptide sequence, MTLPLLWVSGLSGHYHWYGFRFKHITPIVLGSGFSTSLPLFWISG, Run with SignalP
  misc_feature (507)...(390): similar to gi1780786 in the genepept database release 114, Run with FASTXY 3.3t00, default parameters
gacgtggtaaagcgctttcggccaattgaacacctnattgaganacgtagatantactactcactataacgactcactacctggaagccggcccttcaggcacgagaattcagcactagacctgctcttagcacctcactcccattgttgtgggattccagggtttagcacgtcactcccattggtctgggtttctggtttatcatgtcactctcattgttttgggtttctggtttatcatgacactcccattgctatgggtttctggtttatcaggtcactaccattggtatgggttccggtttaagcacatcactcccattgttttgggttccggatttagcacatcactcccattgttttggatttctggtttagcaggtcactcccattgtttccggttctggcttaagcacatcactcccgttgatttgggttctggttttagcacctcactcccattgttagcgtttctggatttgcaggtcactcccattgctttgggtg

SEQ ID NO: 80470 - DNA, 338 bp, Homo sapiens
  misc_feature (1)...(338): n = a,t,c or g
  sig_peptide (111)...(246): this location contains the signal peptide sequence, MVLHCLAPTSLFHFLPHSLASALEAHWLIAGLRTDHVCFCQRPLH, Run with SignalP
  misc_feature (224)...(96): similar to gi392881 in the genepept database release 114, Run with FASTXY 3.3t00, default parameters
ggcacgagccaaaacacagctccgatcctgtcacgacctcttgctttagggcccattagtagctttctgttgctcttgtgatagaaacaaaactccctgatacagcctacatggtcctgcattgtctggctcccacttccctttttcatttcttaccacactccttggcctctgcactagaggctcactggctgattgcaggcttgagaactgaccatgtttgtttctgccagaggcctttgcactgctgttttcttttcctggaatgtgcttccttccctatttagttaactcctagtcatcctttaatttattatttgagacggtcttgatctgtn

SEQ ID NO: 80471 - DNA, 7830 bp, Homo sapiens
  sig_peptide (1949)...(2084): this location contains the signal peptide sequence, MPSRLKALGTLVSHVTLRLLKPECVLDKSWCQEELSVAVKRAVML, Run with SignalP
  misc_feature (2)...(7241): similar to gi1504020 in the genepept database release 114, Run with FASTXY 3.3t00, default parameters
ggatctgatactgcccaccatacagaagtccttactgaggagtccagagaatgttattgaaactatttctagtctgctggcatcagtgacgcttgacctcagccagtatgccatggacatcgtgaaaggactggctggtcacctgaaatccaacagtccccgcctgatggatgaagctgtgctggcactgcggaacctggcacgccagtgcagtgactcttcggccatggaatccctgaccaagcacctatttgctatcctcggaggctcggaaggaaaactaactgttgtagcccagaagatgagcgtcctctcagggattgggagcgtcagtcatcacgtggtgtctggaccttccagtcaggtcctgaatgggatcgtggctgagctgttcatcccgttccttcagcaggaagttcatgaagggaccttggtacacgctgtctcagtcctggctctctggtgtaaccgattcactatggaagtgcccaagaagctcactgaatggttcaaaaaagctttcagccttaaaacctccacatctgcggtgaggcatgcctacctgcagtgcatgttggcctcttaccggggtgacacgctgttgcaggccctggacttactgcccttgctcatccagacagtggagaaggcagcctcccaaagcactcaggttcccaccatcaccgaaggggttgccgcagccttgttgctcttaaagttgtcagtggctgactcacaggctgaggccaaactgagcagtttctggcagttgattgtggatgagaaaaagcaggttttcacttctgagaaattcctggtcatggcttcagaggatgccctgtgtactgtgttgcatctgacagagagacttttccttgaccacccgcatagactcactggcaacaaagttcagcagtaccaccgggctctggtggcggtgctcctgagccgcacctggcacgtccgcaggcaggctcagcagacagttcggaagctgctgtcctctcttgggggctttaagctggcgcacggactcttggaggagctgaagactgtcctcagttctcacaaggtgctgcccttagaggctttggtgactgatgctggagaggtgactgaggcaggcaaggcctacgtgcctccacgggtcctgcaggaggctctgtgtgtcatctccggtgtgccagggctcaagggtgatgtcaccgacactgaacaactggcccaggaaatgctgatcatctcccaccacccatccttagttgccgtgcagtctggactttggccagcacttcttgccaggatgaagatcgatcctgaagcctttatcaccaggcacctggatcagatcattcccaggatgaccacacagagtcccctaaaccagtcctccatgaatgccatgggctccctttccgtcctgtcgccggaccgggtcctcccacagctcatcagcaccatcactgcctccgtgcagaaccctgcactgcgcctggtgacgcgggaggagtttgccattatgcagacccctgctggggagctgtatgacaaatccatcattcagagtgcccagcaggacagcataaaaaaggccaacatgaagcgagagaacaaagcttattccttcaaagagcagatcatcgagctggagctgaaggaggagataaagaagaagaaaggcatcaaagaggaggtgcagctgaccagcaagcagaaggagatgctgcaggcccagctagacagggaggcgcaggtccggaggcggctgcaggagctggatggggagctggaggcggcgcttggactgctggacatcatcctggccaagaacccgtccggcctgacccagtacatccctgttttggtcgactcttttctgcccttgctgaagtctcccctggctgctcccaggatcaagaaccccttcttgtccttggctgcctgtgtcatgccctctaggctcaaggctttgggcactttggtgagccacgtgaccctgcgcctgctgaagccagagtgtgtcctggataagtcctggtgccaggaagagctgtcggtggctgtgaagagggcggtgatgctgctgcacacccacaccatcaccagcagggtgggcaagggggagccaggtgctgcgcccttgtccgcgccagccttctccttagtcttcccgtttctgaagatggtgctgacggagatgccccaccacagtgaggaggaggaggagtggatggcccagattcttcagatcctcactgtccaagcccagctgagggcctcccccaacaccccacccgggcgggtggacgagaatggcccggagttgctgcctcgcgtggccatgctgcgtcttctgacttgggtgatcgggacgggctcgcctcgcttacaggttctggcttcagacaccctgaccaccctgtgtgccagcagcagtggtgatgatggctgtgcctttgcagagcaggaggaggtggacgtgctgctctgtgccttgcagtccccgtgtgccagcgtgcgggaaaccgtgctccgggggctgatggaactccacatggtattgccagcacctgatactgatgagaagaatggcctgaaccttctgcggagactctgggtggtcaagtttgacaaggaggaggagatccggaagctggctgagaggctctggtcaatgatgggcctagacctgcagccagacctctgctccttgctgattgacgacgtgatctatcatgaggcggctgtaaggcaggcaggggccgaagccctctcccaagcagtggcacgttaccagcggcaggcggcggaggttatgggcaggctcatggagatttaccaggaaaagctctaccggccgcccccagtgctggatgctttgggacgagttatttcagaatctcctccagatcagtgggaagccaggtgtggcttggcgttggccctcaacaagctctcccagtatttggacagctctcaggtgaagccactctttcagttttttgtccctgatgccctcaatgaccgacacccagatgtccggaagtgcatgttggatgcagccctcgcaacgctcaacactcatgggaaggagaacgtcaactcgctgttgccagtattcgaggagttcctgaagaacgcgcccaatgatgccagctacgatgctgtgcgacagagtgtggtggtcctgatgggctctctggccaagcacctggacaagagtgaccccaaagtgaagcccattgttgccaagctcatcgctgccctctccaccccctcccagcaggtccaggagtccgtagccagctgcttgccacccctcgtgccagccatcaaggaggatgctggagggatgatccagaggcttatgcagcagctgctggagtcagacaagtacgcagagcgcaaaggggccgcgtatggcctggcgggcctggtgaagggcctgggcatcctctcgctgaagcaacaggagatgatggcggcactgactgatgccatccaagataagaagaacttccgccggcgagagggagccctctttgccttcgagatgctctgcaccatgctggggaaactttttgagccgtatgtggttcacgtgctgccccatctgctcctgtgctttggggatggaaaccagtatgtgcgtgaggctgcagatgactgtgccaaggctgtgatgagcaacttgagtgctcacggggtgaagctggtgctcccctccttactggctgccctggaggaggaatcgtggcggaccaaagctgggtcagtggagcttcttggggcaatggcgtactgtgctcctaagcagctgtcatcctgtctacccaacattgtgcccaagcttacggaggtgctgaccgactcccatgtcaaagtccagaaggctggacagcaggcgctcaggcagatcggctccgttatcaggaacccggagatcctggccattgctccagtcctcctggatgccctgacggatccctccaggaagacccagaagtgcttgcagaccctgctggacaccaagtttgtccacttcattgatgccccatccctggccctcatcatgcccattgtccagagagccttccaggaccgttccacggacacgcggaagatggcagcccagattattggcaacatgtactccctgacagaccagaaggacttggctccgtacctgcccagcgtgacgcctggcctgaaagcatcgcttttggaccctgtgcctgaggtgcggaccgtatctgcaaaggcccttggggccatggtgaagggcatgggggagtcgtgctttgaggacttgctgccgtggctgatggagacactgacctatgagcagagctctgtggatcgctcaggcgctgcacaggggttggctgaggtcatggccggtttgggggtggagaagttggagaagttgatgccagaaatcgtggctacagccagcaaagtggacattgcaccccatgtccgagatggctacattatgatgtttaactacctgcccatcacctttggagacaagtttactccttatgtggggcccatcatcccctgtatcctcaaagctcttgctgatgagaatgagtttgtgcgtgacaccgccctgcgcgcgggccagcgggttatctccatgtacgctgagacagccatcgccctgctgctgccccagctagagcaaggcctctttgatgacctttggagaatcaggttcagctctgttcagctccttggggatctcctgtttcacatctcaggagtcactgggaagatgaccacagaaactgcctctgaggatgataactttggaactgcccagtccaacaaggcgatcatcactgccctgggggtagagcggcggaaccgggtgttggcagggctgtacatgggccgctcagacacccagctggtggtgcggcaggcgtccctgcatgtctggaagattgttgtctccaataccccccgcaccttgcgtgagatcctacccactctctttgggctcctgctgggtttcctggccagcacgtgtgcagataagagaacgattgcagcgagaacattgggagatcttgtgcggaagttaggggagaaaatcctccccgagatcatccccatccttgaggaaggcctgaggtctcagaagagcgatgagaggcagggtgtgtgcattggcctaagtgagatcatgaagtccaccagccgggatgccgtgctgtatttctctgaatccctcgtgcccacggcaaggaaggctttgtgtgacccactggaggaggtcagagaggcggcagccaagactttcgagcagctgcattccaccatcggccaccaggctctggaggacattctcccatttttactaaagcagctggatgacgaggaggtgtcagagtttgccttggatggtctgaagcaagtcatggctattaagagtcgtgtggtgctgccctaccttgtgcccaagctgacaacgccacctgtcaacacccgggtgctggctttcctttcgtcagtggctggtgatgccctcacccgtcatcttggcgtgatcctcccagcggtcatgctggccctgaaggaaaagcttgggaccccagatgagcagctggagatggccaattgtcaggctgtgatcctctccgtagaggatgacacagggcaccggatcatcatcgaggatctgctggaggccacccgcagccctgaggtgggcatgaggcaagctgctgccatcatcctcaacatctactgttcccgctcaaaggctgactacaccagccacctgcggagcctggtctcgggcctgatccgcctcttcaatgactccagccctgtggttctggaggagagctgggatgccctaaatgccatcactaagaagctggatgctggcaaccagttggcactcattgaagagctgcacaaggaaatccggctcatagggaacgagagcaaaggcgagcatgtgccaggattctgcctcccgaagaagggagtgacctccatccttccagtgttgcgggaaggagtcctgactggcagccctgagcagaaggaggaggcagccaaagccttaggcttggtaatccgcctgacctcggctgacgccctgaggccctccgtggtcagcatcactggccctctgatccgcatcctgggggacaggttcagctggaatgtgaaggcggctctgctcgagacactcagcctcttgttggctaaggttgggattgccctgaagcccttcctgccccagctgcagaccactttcaccaaagccctgcaggactccaaccggggggtgcgcctgaaggccgcagatgctctggggaagctcatttccatccacattaaggtggaccccctcttcacagagctgctcaatggcatccgcgccatggaggacccaggtgtcagggacaccatgctgcaggccctgaggtttgtgattcagggagcaggggccaaagtggatgccgtcatccggaaaaacatcgtctcactcctgctgagcatgctgggacacgatgaggacaacactcgcatctcctcagccgggtgcctaggggaactgtgtgcctttttgactgaagaggagcttagtgccgttctacagcagtgcttgctggcggacgtgtccggcattgactggatggttcggcacgggcggagcctggcactttccgtggctgtgaatgtggctcctggcagactttgtgccggcagatatagcagtgatgttcaggaaatgatcctgagcagtgccacggcggacaggatccccattgcggtgagcggggtccggggcatgggctttctcatgagacaccacatcgagacaggcggagggcagttgccggccaaactttccagcctgttcgttaagtgtctgcagaacccatccagcgacatcaggctggtggctgagaagatgatctggtgggcaaataaggacccactgcctcccctggacccccaggccatcaagcccatcctgaaggctcttcttgacaacaccaaggataagaacaccgtggtcagggcctacagcgaccaggcaattgtcaacctcctcaagatgcggcagggtgaagaggtgtttcagtccctctccaagatcctggatgtggccagtttggaggtgctgaacgaggttaaccgaaggtccctgaagaagctggccagccaggccgactccacggagcaggtggacgacaccatcctgacatgagaggcctgggccagcagcagcattgccgctccacatctttgctcaatgttttcatttttgaaaatacatttgttccaatggggagcttggaagatggcgttcccagaaagtattttaatatcaatagaccacagccaaagccttaaatcaaacccacacacaactgaaaattgcctcctccatctctcaccttttcctgtggagaagagaaggaaaagcacacgcatgcgcctcagcaaatggcagcccaggagctgtttgtccagtttagcatggctaggtctggaactataatagcagggtcagactgtgggttcctcttctcctgtgcttgagctctggtttgagagctggcgctaccaacctttttcctatatcccgagtggggcacagacggtggatctctgcccagtgtggtgtgtctggcttggcttttcaatattgtgaggtctgaatggatctgacccctgtcagatgaaaatgattcacagctctggcagttcccaagtctggggaggggtataggtttgaaaggctgtttgaaagaggaatgtttaataaaggctttgatttaatcttgaaaaaaaaaa

SEQ ID NO: 80472 - DNA, 344 bp, Homo sapiens
  sig_peptide (152)...(287): this location contains the signal peptide sequence, MGSFVFISAPCFFHWVGSLAVLTSPTHHPPVSHPWWEVEGHLPGK, Run with SignalP
  misc_feature (164)...(280): similar to gi2266833 in the genepept database release 114, Run with FASTXY 3.3t00, default parameters
ggcacgagcagccattgtccttttgtctgttggtgagttacatgtgtatcgtagaagatgtagaaaatagagcctcggaaagaaattaaaaatcacccgacttcccttaactccattactgtgagctaaatcacagagacattctttttagatggggtcatttgtgttcatatctgcaccctgcttctttcactgggtgggttcactggcagtgctgacgtcgcccacacaccatccacctgtgagccatccctggtgggaggtggaaggccatcttccggggaaattattttcagtgctgtttcgtgacccctcgctgatggaacacagtggttcacctaccg

SEQ ID NO: 80473 - DNA, 383 bp, Homo sapiens
  sig_peptide (73)...(208): this location contains the signal peptide sequence, MKMMVVLLMLSSLSRLLGLMRPSSLRQYLDSVPLPPCQEQQPKAS, Run with SignalP
  misc_feature (385)...(260): similar to gi974822 in the genepept database release 114, Run with FASTXY 3.3t00, default parameters
ggcacgagaactggaaggaaaagagcgggaaggggagtggaaggcaggggctgaagacacaggccaggcggaatgaagatgatggtggtcttgcttatgctgtcctcgctcagccggctcctgggcctcatgaggccatcatctctcaggcaatacctggactctgtgcccttgccaccctgccaggagcaacagccaaaggctagtgccgagctagaccacaagtgtctgccaaagccaaggctcagaggtgcaaccttggagcagaagctgcctggccaaggggaagaggttgtgcggtttgctcatggggcagggaagacatggcagcctcgtcctggtggccagtgccacactgctggggctcagaaggcctgctacct

SEQ ID NO: 80474 - DNA, 327 bp, Homo sapiens; identical to SEQ ID NO: 44939
  sig_peptide (11)...(146): this location contains the signal peptide sequence, MLFVYLFVWGRVYFLLQPCPLHMCHMLSLLCAHLSTAVLGHIWTP, Run with SignalP
  misc_feature (15)...(75): similar to gi2447210 in the genepept database release 114, Run with FASTXY 3.3t00, default parameters

SEQ ID NO: 80475 - DNA, 957 bp, Homo sapiens
  sig_peptide (119)...(254): this location contains the signal peptide sequence, MNRRASQMLLMFLLAICLLAIIFVPQEMQMLREVLATLGLGASAL, Run with SignalP
  misc_feature (8)...(572): similar to gi3004482 in the genepept database release 114, Run with FASTXY 3.3t00, default parameters
ctattttggccttaatctccatgtccagcatctggggaacaatgttttcctgttgcagactctctttggtgcagtcatcctcctggccaactgtgttgcaccttgggcactgaaatacatgaaccgtcgagcaagccagatgcttctcatgttcctactggcaatctgccttctggccatcatatttgtgccacaagaaatgcagatgctgcgtgaggttttggcaacactgggcttaggagcgtctgctcttgccaatacccttgcttttgcccatggaaatgaagtaattcccaccataatcagggcaagagctatggggatcaatgcaacctttgctaatatagcaggagccctggctcccctcatgatgatcctaagtgtgtattctccacccctgccctggatcatctatggagtcttccccttcatctctggctttgctttcctcctccttcctgaaaccaggaacaagcctctgtttgacaccatccaggatgagaaaaatgagagaaaagaccccagagaaccaaagcaagaggatccgagagtggaagtgacgcagttttaaggaattccaggagctgactgccgatcaatgagccagatgaagggaacaatcaggactattcctagacactagcaaaatctagaaaataaataacaaggctgggtgcggtggctcacgcctgtaatcccagcaccttgggaggctgaggcgggcagatcatgaggtcagaagataaagaccaccctggccaacatggtgaaaccctgtctctactaaaacaaatacaaaacttcgctgggcacagtggcacaggcctttaattccagctacttgggaggctgaggcaggagaattacttgaacccaggaggtggaaattgcaatgagccaagattgggccactgcattccagcctggtgacagagcgagactgtctcaaaaaaaaaa

SEQ ID NO: 80476 - DNA, 340 bp, Homo sapiens
  sig_peptide (173)...(308): this location contains the signal peptide sequence, MACSSLVLPALSSWSLSLSLCHRLPGRNAYRPSFVFSLTLLGAAL, Run with SignalP
  misc_feature (341)...(97): similar to gi3135267 in the genepept database release 114, Run with FASTXY 3.3t00, default parameters
ggcacgagggcctgaactatacagaagtgcacttcttttccacagagaaggtgagcagactagggcagaattagtgactgcttggcatccaggacagccttctgtggttcactcgtgtgtgcttgggtgtgacctccgtgtcctgaccggtgttgcctgcccctgatctttcatggcctgttcgtctcttgtccttcctgctctttcgtcctggtctctctctttgtcgctctgtcatcggcttcctggccgtaacgcttatcgaccttccttcgtcttttctttgactctccttggggcggcgctggctgcgctccgttttgcgctgtctttccttttc

SEQ ID NO: 80477 - DNA, 351 bp, Homo sapiens
  sig_peptide (199)...(334): this location contains the signal peptide sequence, MSLSPISLLFFLPHALLYYTPRFLSAPPSHPLLCLLYFQLYSLLF, Run with SignalP
  misc_feature (351)...(156): similar to gi1590961 in the genepept database release 114, Run with FASTXY 3.3t00, default parameters
ggcacgagcaccttggaaccagaaggtgtgtggtctgagaacgatggatgggctgctctctgcctctctcacagcagttctgcccctccttgggaccactcgttttctgcattcctggcccatcttctatatatctctggtccatatttcagacgatccctgcttgactcgcatccaacaccttgtccctctcgctccatgtctctctcccccatttctctattattcttcttgccccacgctttgctctattatactcctcgctttctctccgcccctccttctcatccactcctttgtcttctatactttcagctctattcccttctcttctacactcttctactatgc

SEQ ID NO: 80478 - DNA, 704 bp, Homo sapiens
  sig_peptide (118)...(253): this location contains the signal peptide sequence, MALLLPRWFREAPVLFSTGWSPLDVLLHSLLTQPIFLAGLSGFLL, Run with SignalP
  misc_feature (10)...(561): similar to gi1002424 in the genepept database release 114, Run with FASTXY 3.3t00, default parameters
ggcacgagggtgctgggggtgacccaggctgtggttttgtctgctggattctccagcttctacctggctgacatagactctgggcgaaatatcttcattgtgggcttctccatcttcatggccttgctgctgccaagatggtttcgggaagccccagtcctgttcagcacaggctggagccccttggatgtattactgcactcactgctgacacagcccatcttcctggctggactctcaggcttcctactagagaacacgattcctggcacacagcttgagcgaggcctaggtcaagggctaccatctcctttcactgcccaagaggctcgaatgcctcagaagcccagggagaaggctgctcaagtgtacagacttcctttccccatccaaaacctctgtccctgcatcccccagcctctccactgcctctgcccactgcctgaagaccctggggatgaggaaggaggctcctctgagccagaagagatggcagacttgctgcctggctcaggggagccatgccctgaatctaccagagaaggggttaggtcccagaaatgaccagaacgcctacttctgccctggttaatttagccctaactttcatctgcttggaaaaacagctcccaaacgggtctttcttgtaaggcacaaggatatggtgtgatgcgcattacactgggaccggtctaaaagagctc

SEQ ID NO: 80479 - DNA, 1735 bp, Homo sapiens
  sig_peptide (110)...(245): this location contains the signal peptide sequence, MGIALLQIFGICLAQNLVSDIKAVKANWSKWNDDFENHWLTPTIS, Run with SignalP
  misc_feature (2)...(195): similar to gi3152703 in the genepept database release 114, Run with FASTXY 3.3t00, default parameters
ccggctcaaactggagctggagcagcagggcttcatccacaccaaaggctgcgtgggccagtttgagaagtggctgcaggacaacctgattgtggtggcgggagtcttcatgggcatcgccctcctccagatctttggcatctgcctggcccagaacctcgtgagtgacatcaaggcagtgaaagccaactggagcaaatggaatgatgactttgaaaaccactggcttacgcccaccatttccgaggtcctgtccacggcggggcctcagcagaactctctgactggggcccctggcccggccccacccagccgacatgttttctttggcctgggtggtttataccctgagccaacctttaaaaattggtagatttcacataaaagtccagatccacagcttctcttgaagaatgaccacctggctacgccggctcttcggtggcaacactacctgggacactgcctccccagtcaccaagggccccagctggcccgttctactcacctaagtgccgcctgacccttgtacactaggagctggcctcccacctctgcagggttatttcctgcacctcgaggccgctgcgggccaatctggagtgaaacacggggacctgaaggatggagaggctggaccccgctttgaagagggtgcagcctgggaagggcggccttgctggggactgcggtgggagtagagtgcccaggagagggtctgaggggtgggatgggggtcaggacaattttgcaaaagaagtagctggaagccatgggactggcgggagcctgtttgggggatctggatggttgactcctaggagtcaagttcagcatcttcgccgtggctgcagagctgcctgatgggcactagagggcacgccagccccacactccctgggtctggcttcctcccgcaacctcactctagtagagcctgtgcctgcctactagcgctctggggttcggagagtttgggaatttctcagagccaactggctcaggcttgggaaggctggctgctgccctcagctccgcctcatcagctatgtgaaggggtgtgtatggagtgatcctgccgccccctccctgggctggtccagagatctcaaactccgatgcccctggggccacgtatgttgtgtaaatggatgaaacaggcccttgagttgggagcctgcttcactttgactttcccactgttgctggagacaaagacatcgtgatgagagaaagttcgcacaatctagtcggtaacagccactttccttgagaccaagagagtgcggtggggatgggggggagagcacgggtccccgtctgacagtggccgctgccatattcaggtgtagctaattgctctggtgtgggaatgcaggcctaatgacagaaatctggagaagccagaaatacagatttgtatgtgagatgtcctgattttttaagttgttggcagaaattaattcagaaatcaaatctgcaggccaaacaaggtgcaggacccagctttggccccatgcccctgtaggtccctctgggacagtcaccgctggggtcctggctgctctgtcattgagggatgctgggcactgctgccgggtggccagggtatggggcatgtgcccagcaatgtggctccttggccccgctggccagtgtcctgggcccctgacaggcgctggctgtgagtggtttgtacatgctacaataaatgcagctggcagcaaaaaaaaaa

SEQ ID NO: 80480 - DNA, 753 bp, Homo sapiens
  sig_peptide (564)...(699): this location contains the signal peptide sequence, MSPLPLHAPLAFFPFIFIYLLTFMKFPLPSDPYCPCCPDHPSQPS, Run with SignalP
  misc_feature (752)...(623): similar to gi2407289 in the genepept database release 114, Run with FASTXY 3.3t00, default parameters
atagtcgctggactcgagcatctggctgggctcttacctcatagaccttcaaggacagagaccccagggcctggacctgatgccaccccaggccaaagccagagtgggagacccattggtcaggctcagcagggtgggaacaggcagagggacaagaggggaatggagaagtggagaggaaaaggaatcgagggacaggaagggggaggctctaggaaggttctgggttgggggtcagtgcatctcagggagaaccaaggaaggtgggcatggctggagaggaggaaaaggaaggagccccaggtgtcagggcagtaggctgggagtcagtgtggcaaagcgggggcaggacacagatacagtggcaggggcccagggctgggacatgagagaaggcagcgaggcggcagagggagaagagaggactcaggtggaggtggggtgggtcagctgtcagcatccctcagaggagaaatgtggagagctggaggccagcagtcactcacactcgctctgtcctcctgtccagtggatacagccctgggcgctctgctggcccaaggatgtccccactgcccctccatgcgcctttggcctttttcccattcatatttatttatttattgacttttatgaagtttccccttccatccgatccctactgcccatgttgtcctgaccatccctcccagccatccagctgtctgtctatctgccacaaggaaataaaaatggcaagcagcaaaaaaaaaa

SEQ ID NO: 80481 - DNA, 511 bp, Homo sapiens; identical to SEQ ID NO: 63735
  sig_peptide (66)...(201): this location contains the signal peptide sequence, MVVLIPVSWVANAIIRDFYNSIVNVAQKRELGEALYLGWTTALVL, Run with SignalP
  misc_feature (3)...(355): similar to gi4191360 in the genepept database release 114, Run with FASTXY 3.3t00, default parameters

SEQ ID NO: 80482 - DNA, 1438 bp, Homo sapiens
  sig_peptide (1)...(136): this location contains the signal peptide sequence, MALSWMTIVVPLLTFEILLVHKLDGHNAFSCIPIFVPLWLSLITL, Run with SignalP
  misc_feature (25)...(302): similar to gi5832807 in the genepept database release 114, Run with FASTXY 3.3t00, default parameters
atggccctgagctggatgaccatcgtcgtgccccttcttacatttgagattctgctggttcacaaactggatggccacaacgccttctcctgcatcccgatctttgtccccctttggctctcgttgatcacgctgatggcaaccacatttggacagaagggaggaaaccactggtggtttggtatccgcaaagatttctgtcagtttctgcttgaaatcttcccatttctacgagaatatggaaacatttcctatgatctccatcacgaagataatgaagaaaccgaagagaccccagttccggagccccctaaaatcgcacccatgtttcgaaagaaggccagggtggtcattacccagagccctgggaagtatgtgctcccacctcccaaattaaatatcgaaatgccagattagatgccacttccggggacagagcttaagtggactgggacgcactctctccgccttcctctgccccctcgttcaccccgcagaccagaaccagtactggagctgggtctccaggtacgtccatctcatgccttgtttgcatccagcgcctatcagccactcaccacgacgggacgcggaagtggcaggtgacgggggtgtgtgccagcagatgcggatgccaggaagagtgtgagaacaggggtgggattaccgtctgtctgggaggggctccaggtacccctcttccccgtcagacccactgggagatggctgcttgccaggcccccagaaggaacatctgtctatacggtgctgaaatcccaatcaaaagtattgtttagaaatgtatttctccacagggctgacctcctgcagctcgctgagcactcccaggtcctcagcactcccaggtcgtggctggggcagtcagtaggaactgtaactatgtctctgatgcaccacgtgtttagacacagcacagtccttttttctgttcctactgtggaagtagtttctctttgggcatgctgacagcagtttttcatagcctcacggatgagccctttctacgggagtgactccatgcttgtatacagagtatttatacaaatgttttagcatcttcatatgcggggttaacccctagttccgtacagcatattctgttcaagtatttttttacaagcttgtgctgtaggcacatgccttctgctgcagaagtggacgcccgtggcacactccccccccccccccggggggggccccccctttatgggacattgccatttttgccctggaactcgggcggggacgtaaaaattgtttttgccccaaggggaaccccaagcaaaaaaggggccttgcttttttgacgttttaaaaaaaggggttagttttaaacctgaaaagggctggttgaaacccgaaacattaaaaaaggttgttgaaagcaaaaacggccacccgggtcacaattttgcgg

SEQ ID NO: 80483 - DNA, 1313 bp, Homo sapiens; identical to SEQ ID NO: 63929
  sig_peptide (157)...(292): this location contains the signal peptide sequence, MMLGPVTLHLVGHLLAFLDLLCPRGPIHSILPMTFEAVKQDHGFM, Run with SignalP
  misc_feature (28)...(939): similar to gi179401 in the genepept database release 114, Run with FASTXY 3.3t00, default parameters

SEQ ID NO: 80484 - DNA, 583 bp, Homo sapiens
  sig_peptide (184)...(49): this location contains the signal peptide sequence, MVMVIFYICVCCSNFSENMLCICTYQNLNFTETIFLVHVNKHKKK, Run with SignalP
  misc_feature (502)...(456): similar to gi927002 in the genepept database release 114, Run with FASTXY 3.3t00, default parameters
tggaaatagccaatagtgaatatttttattatgtgttagataaagcttctttcttcttatgcttatttacgtgaactagaaatatggtttcagtgaaatttaagttctgataagtacagatacatagcatattttctgaaaaatttgaacaacacacacaaatataaaaaattaccataaccattctatcaagcaaccagtgttaatgttttaatgtttctttccaatgtctttttaaaaaaatctcattgagactattctatgtatttaatcttactatgtattcttaacaattattttaaatttttgatcaccaacctaaatagtttaatgaagtttaatagtccaaacattggtcccagtattttgccaccacaaataatgttgctgtcagcatctccctgtatgaaactctttcttatttaggatgatttccttagaagagattctctttttggggaatttacttggtcaaagggtatgaatattttaaggctcttggtacatgttgccaagttgctttcaaaaagggttataccagattataaccctatcagtgtggctaagagctgctttcccacat

SEQ ID NO: 80485 - DNA, 2107 bp, Homo sapiens
  sig_peptide (1526)...(1661): this location contains the signal peptide sequence, MHAHSASLWVAFFYRSPFLFFTTGPPPPTSSSPAGLPLLESTVDA, Run with SignalP
  misc_feature (7)...(1457): similar to gi3327086 in the genepept database release 114, Run with FASTXY 3.3t00, default parameters
tagtacgacaggacagaaaccgcgatcaacaacctcaaccccgccttctccaagaagttcgtgcttgactaccacttcgaggaggtacagaagctcaagttcgcgctctttgaccaggacaagtccagtatgcggctggacgagcatgacttcctgggccagttctcctgcagcctgggcacgatcgtctccagcaagaagatcactaggcctctgctgctgctgaatgacaagcctgcggggaagggcttgattacgatcgctgcccaggagctgtccgacaaccgcgtcatcacactaagcctggcgggcaggaggctggacaagaaggacctctttgggaagtcagacccctttctggagttttataagccaggagacgatggcaagtggatgctggtccacaggactgaggtgatcaagtacacactggaccctgtgtggaagccattcacagtgcccttggtgtccctgtgtgatggggacatggagaagcccatccaggtcatgtgctacgactatgacaatgacgggggccatgacttcatcggcgagttccagacctcagtgtcacagatgtgtgaggctcgagacagcgtcccgctggagttcgagtgcatcaaccccaagaagcagaggaagaagaagaactataaaaactcgggcatcatcatcctgcgatcctgcaagataaaccgagactactccttccttgactacatcctgggaggctgccagctcatgttcaccgttggaatagactttacagcctccaacgggaatcccctcgacccttcctctttgcactatatcaaccctatgggcaccaacgaatatctgtcggccatctgggctgttgggcagatcattcaggactacgacagtgataagatgtttccagctctgggattcggggcccagttacccccagactggaaggtctcccatgagtttgccatcaacttcaaccccaccaaccccttctgctcaggtgtggatggtattgcccaggcgtactcagcttgcctgccccacatccgcttctacggtcctaccaatttctcccccatcgtcaaccacgtggcccggtttgcggcccaggccacacaacagcggacggccacgcagtacttcatcctcctcatcatcacggacggggtcatcagtgacatggaggagacacggcatgccgtggtgcaggcttccaagctgcccatgtccatcatcatcgtgggcgtgggcaatgcggacttcgctgccatggagttcctggatggggacagccgcatgctgcgctcccacacgggggaggaggcagcccgcgatattgtgcagttcgttccctttcgagagttccgcaacgcagcaaaagagaccttggccaaagctgtgctggcggagctgccccaacaagttgtgcagtatttcaagcataaaaacctgccccccaccaactcggagcccgcctgagctccagtgcccagcagcagcatgtcagctgagcctcctgccctcccccaggaacatgcacgctcactctgcttccttgtgggtggcctttttttaccgatccccttttttattttttacaaccggacctccacccccaacttcctccagcccagctgggcttcctttgttggagtcaactgttgatgcttccaggccaaactggcttcctctcctcctctccccacctttgccattcttaagtattgaatgtactttgtataattttagtggaattgttattgagaataaaatttttacaatcataactggctttttccaagtaactagctgcagactctgatgaaagaaacatgtccttggtgcatacgtgtcgtagcctgcacctaattaattcctgctgtttttttaatactgtgactgtgttctatttgttatatgctcagggtaacaaatgagtttcagacgtccctgcgtcagctccttcctcagcagggacctgacgggctcactgatctaagaaaggaaatggaaaatgaaaatccaccccacaagtctaataagttggtgtagtcacttctgcatggggacatgcattccagatgataacctgttaaatcactgccagttaacagtg

SEQ ID NO: 80486 - DNA, 2549 bp, Homo sapiens
  sig_peptide (1528)...(1393): this location contains the signal peptide sequence, MSDISPLLYEIWLGDTSAGFFTFCVTVLHVLLLLSSVLHFLCPRD, Run with SignalP
  misc_feature (1871)...(1707): similar to gi214636 in the genepept database release 114, Run with FASTXY 3.3t00, default parameters
ttttttttttttaagtatacaatttgtttttatttacaataccctataaaaatgtaaatttagaaacttttattttcattaattagaaccaatccaaacaaaaaagataaagcacagtaaggaagagataataatcaagtattcacttgattggttgtgaagggaaggtaggaaaggcatgtagtggaaatggtcagtagacaacggtagagggaagctaggtaacatcactggggaacagctggtggagcctggggttacagcattgggaagaaatggagatggagaacaggacagctggttttaacagaggatcttactgttgtacaatacatgtatgtgcaaaatgtttattctctttaaataccataacctgtccctcccaccccccaactacattcgaaaaagtaagaacagcagaaagatcacgaaggccatgtaaaattaattcagatttaattttcttcagggctgtaatcactagggatcaaaactccttagtctggttgattgctgaatgggagaggagtaagtgagaaagatcatggcaggctggccctgcaattattcaaacccaggcccctggctgcctgggaacgggacttgggtgagatgaagtagtaaagacagcagttctgcccatggtgtggagactaaaaagcaaagcaggccaaacttagcttccatggttacatttggaagtttctattcatgacaccaaataaaagtggggaagaaggaagcatggcttactgaagtagtctcaggaagacagggcaagtgtgcaaaaagccacactgccaaagcaggctactagtgaggatcatcctgggtgacttcgaatgcacttgaggggaaaggctcaagtaccctgtagttgtagcaggaaaaagacataaccatgtgttgtttcgattaaggtggacagaaactaaggaaataaaggtgggaagaagaaaaaggacttctcagcctagacctgggcataagccaattaagagttctgattttattaaacgtgctgcatactctttatttatgttaaaacaagtagaacccaccaaattaattacaagatagaacagaaacagattaaaatacatcagctggtttgtgtttagaagaggtaatgagacaactaaatatttttcaatctaaaattcattctttaaggaccctctgaagaccacataaatacatgtatggggtgtgtgtgtgtgtatctatgtgtgtgtgtatatcttgatttctacttaattggctcttctatagtcatattaatatggggcaatgaaaaaacaacttcaataggatgagggaaggaatcctttggcaggctacaatctactctgaggtggagtaagtggagggataaagggagagattacacttgtgtctctagggcaaagaaaatgcaaaacagaactgagtaaaagtaggacatgcagaactgtaacacagaaggtaaagaaaccagcagaagtatcacccagccaaatttcatagagcagtggggaaatatctgacatttagagagacaacccctgtaaacaggaatcgatcccacaagactttgctttggggaaaaagctaccttccttccctcattaaaaacactccattggtgatggcagcagtgcaggtggcagccaaaaggaggtacaggacacatttggagatcttttatcgtatcccctgaactagctgcagttttgtctccagcaagttcagtttctgccggtcaacatagcgagaaaagagggacactaggtttgtaggtatagagattggcttggccagggctgcttggggaatccgcagaagttctcgtgttgccatgaacatcacctccgtcctgacagggaagacccataataatatcaggagaaaaaaatttaaaagattacctcaaagaacttaaaataagagaagaaacagtccgcactgaccactgattattttgtgttgattctgtagcagggtctgaactctgtaggtcttcaccacggctcaggaggatgaggagcagtgacaggccaaactacgagaaaagacagagggaatcaaactcaacactgtgtctaaacctcctccaccactgttgaagggatcctggcatcagatggggaacagctctaaatcaaaataacctcactactgtgcttttctgtaaaaccaggtaaagatcagacaagcatgagttgaaaggctatgtctctctccaggctttattctgccatagcagtgaccaggcgcagccaacagaaacggaaagtcatggtgtccaacacgcctctctgttccccatgctgaggttaaaaaatggtttttccttgccatggataatgtagaatttgacttttctcctatttatgagaacagaaataggctaaaaaagaaagtaaatgaagaccaattttggtacagaaattaaaaatcaggaaaaaataagaaaaaagcattacagtaagatattttgaattaagaaacaaggtgtaaactgtaggaaaatatacaaataaacacaactgaaataaaaaaaaaaaaaa

SEQ ID NO: 80487 - DNA, 2098 bp, Homo sapiens
  sig_peptide (685)...(820): this location contains the signal peptide sequence, MNETGVIVWYLALCLLLAWLIVGAALFKGIKSSGKVVYFTALFPY, Run with SignalP
  misc_feature (1)...(1928): similar to gi5732680 in the genepept database release 114, Run with FASTXY 3.3t00, default parameters
atggacaagttgaaatgcccgagtttcttcaagtgcagggagaaggagaaagtgtcggcttcatcagagaatttccatgttggtgaaaatgatgagaatcaggaccgtggtaactggtccaaaaaatcggattatcttctatctatgattggatacgcagtgggattaggaaatgtgtggagatttccatatctgacctacagcaatggtggaggtgccttcttgataccttatgcaattatgttagcattggctggtttacctttgttctttctggagtgttcactgggacaatttgctagcttaggtccagtttcagtttggaggattcttccattgtttcaaggtgtgggaattacaatggtcctgatctccatttttgtgacaatctattacaatgtcataattgcctatagtctttactacatgtttgcttcttttcaaagtgaactaccatggaaaaattgttcttcgtggtcagataaaaactgtagcagatcaccaatagtaactcactgtaatgtgagtacagtgaataaaggaatacaagagatcatccaaatgaataaaagctgggtagacatcaacaattttacctgcatcaacggcagtgaaatttatcagccagggcagcttcccagtgaacaatattggaataaagtggcgctccaacggtcaagtggaatgaatgagactggagtaattgtttggtatttagcactttgtcttcttctggcttggctcatagttggagcagcactatttaaaggaatcaaatcgtctggcaaggtggtatattttacagctcttttcccctatgtggtcctactcatcctgttagtacgaggtgcaactctggagggtgcttcaaaaggcatttcatactatattggagcccagtcaaattttacaaaacttaaggaagctgaggtatggaaagatgctgccactcagatattttactccctttcagtggcttggggtggcttagttgctctatcatcttacaataagttcaaaaacaactgcttctctgatgccattgtggtttgtttgacaaactgtctcactagcgtgtttgctggatttgctattttttctatattgggacacatggcccatatatctggaaaggaagtttctcaagttgtaaaatcaggttttgatttggcattcattgcctatccagaggctctagcccaactcccaggtggtccattttggtccatattattttttttcatgcttttaactttgggtctcgattctcagtttgcttcgattgaaacgatcacaacaacaattcaagatttatttcccaaagtgatgaagaaaatgagggttcccataactttgggctgctgcttggttttgtttctccttggtctcgtctgtgtgactcaggctggaatttactgggttcatctgattgaccacttctgtgctggatggggcattttaattgcagctatactggagctagttggaatcatctggatttatggagggaacagattcattgaggatacagaaatgatgattggagcaaagaggtggatattctggctatggtggagagcttgctggtttgtaattacgcctatccttttgattgcaatatttatctggtcattggtgcaatttcatagacctaattatggcgcaattccataccctgactggggagttgctttaggctggtgtatgattgttttctgcattatttggataccaattatggctatcataaaaataattcaggctaaaggaaacatctttcaacgccttataagttgctgcagaccagcttctaactggggtccatacctggaacaacatcgtggggaaagatataaagacatggtagatcctaaaaaagaggctgaccatgaaatacctactgttagtggcagcagaaaaccggaatgagatctcattgaaaaaaatatatgattgtataatgtgattttttttagaatagggggaaccttatttatttgtgtgttaactgaataggaaaatgtacatactatgttcatgatagtgtgatttttttcacatttaagcaggaatgcaatataaaaatgtgaatctctta

SEQ ID NO: 80488 - DNA, 1528 bp, Homo sapiens
  sig_peptide (891)...(756): this location contains the signal peptide sequence, MPTLGDALILYLHLVLGVAGVLQPPGPRPSQALGPTGDRAPGKWN, Run with SignalP
  misc_feature (13)...(263): similar to gi28969 in the genepept database release 114, Run with FASTXY 3.3t00, default parameters
ttttttttttttgagatcttggtccggtttactgaggctctggagttcaacactgtggttaagctgttcgccttggccaacacgcgagccgatgaccacgtggcctttgccattgccatcatgctcaaggccaacaagaccatcaccagcctcaacctggactccaaccacatcacaggcaaaggcatcctggccatcttccgggccctcctccagaacaacacgctgaccgagctccgcttccacaaccagcgacacatctcattgtctttaggaagcctttaggaagccaggaacagtccgccttggtctgcttgtggatgggggtgaggatggtgctgtgctccgatgctggtgctggccctcccctacttttggaatatggagtgggcaacagtctgggcccagctgaaggcggtgttcctggaaggtgtggatgggtccaatgatgcgactgatatgagttatgtctttacagctttaatctagcaggccagagatgtggccagtggggcagccagagaggagggctactgccagctgctgacggaacctcctccctccccccaccccagcccagaggggacaaacagtagggccccagccttcctggctgggatcttgggagcagagggactatttgaaaacaggcactgtgacccaggctgtcatctccctcccttgcccccagtaaaaatagcccataattccaagccctccccccaacccctcatagttctagttcagctcctgttccacttccctggggctctgtccccagtagggcccagggcttggcttggtctggggcctggtggctggaggactcctgccacccccaggaccagatgcaggtacaggatgagggcatctcccaaggttggcatcactgaaggggcagcagagacatggctggttcctcaggctcccgggtaagagggctgtggtggcatatagggaggaggagctgcagggttgtagactgggggcccagctgggtagagtggatattggggagcaggaccactaggtgggtacatgaagccaggctgtgggggtgcagggccagctttggggtcctgggggtatgggtatactggctgcactgggatgcctgtcattggaatctcctggccttcaaatgggctctggagctgctggcgccggcggtacaggtagcaacaggaacagaggaagcagcagatggtggtggcaaccacagcaacaaagaggatcacagctgaggcgatgcctgctatggtcttggggctgaaggccaggcagtgcttctgctgcctctcggtgataagcaaggtcaggtccctgcagcagtaccgatggtagcaggtcccgcagcagaaggtgaagaactcgcagttaaaccccggatgccaggagccattccggtccaggtaccacaggcagtcctcgccggccagcactagcctctggagctgggtgcccctcacccagcagagcactgccctgctccccctgtccccggctccgcggtggttcctcccatccg

SEQ ID NO: 80489 - DNA, 424 bp, Homo sapiens
  misc_feature (1)...(424): n = a,t,c or g
  sig_peptide (249)...(384): this location contains the signal peptide sequence, MSRWVRWVRGVGVLCVCVVCPKRLLGRAWQLFISNSLLSVLPTSL, Run with SignalP
  misc_feature (422)...(280): similar to gi1248206 in the genepept database release 114, Run with FASTXY 3.3t00, default parameters
atatttttaatttcaggaactcctctttttttgccctttgaatgtgctattgtcttagcaaacttacatatttatgaatgtacctacacgttttgaaaacttcctttaaaagtctttttaaaaacagaattatctcttttaactgatggggaatatgctatttgtttatgagaatcttcttacactattggcttttttccctcaaaatgtctagtgaagtttggttgttggaacatatttgtaagtgaatgtccaggtgggttagatgggtcaggggtgtgggtgtcctctgtgtttgtgtggtctgtccaaagagacttctagggagggcatggcagctcttcatcagcaacagtcttctcagtgtccttcccacctctttgactgtagctcttgtccttatgctcgtaaaatggctgatgtn

SEQ ID NO: 80490 - DNA, 432 bp, Homo sapiens
  sig_peptide (200)...(335): this location contains the signal peptide sequence, MYRCNIVLFASLVSCHGCPGILRESRLSFKGRLSHDKYSCDRFLW, Run with SignalP
  misc_feature (430)...(373): similar to gi4981843 in the genepept database release 114, Run with FASTXY 3.3t00, default parameters
agtacacataggaactgacaagcattaatgcatacctggcatctaagtagctgccttatgaaggataaaattttaattcatcaagtcatatcatagatagatgttgaaatgagaagacaagacagaagacggatagtctatctgaagggatgtgagagatcaatatgaagatgagtttgtaagagctgcctgcctttccatgtacaggtgtaatatagtgctttttgcctctctggtcagctgccatggatgtcctggcatcctcagagagagcaggttgtctttcaaaggcaggttatctcatgataaatacagctgtgacaggtttttgtggcaggaggatatgttaaatatatgagactatacttttggttcatgatttaatatgaaccaatatagaaccaagaaatagaactgtaccaagttttcagg

SEQ ID NO: 80491 - DNA, 778 bp, Homo sapiens
  sig_peptide (322)...(187): this location contains the signal peptide sequence, MKKITVIILKTMAYLNFTIYLTLQDTATTYFYFQAMEIFYLMFFS, Run with SignalP
  misc_feature (334)...(416): similar to gi5262487 in the genepept database release 114, Run with FASTXY 3.3t00, default parameters
agaaaatttgtcagtatcatagaggaaaatgcttatcttctaatttgcactggaatgtatatactttctgagtatatctgaagaagaaaaatttggagataaatgatgattaagctaaacatctatatgtggaacatagagaaaacaatatgagagaggtgaacagtccagttagagaatccacaaggctgaaaaacatcaagtaaaagatctccatagcttgaaagtaaaaataagttgtggcagtgtcttgtaatgttaaatatattgtaaaattgagataagccattgttttcagtatgattacagtgattttcttcatttttaaaatagtttccaatgggtcctgggtcagatggtcccatgggtggattaggaggaatggagtcacatcacatgaatggctctttaggtaaggcttttcaatttgatgtttagaataaattcataacaaaaccttaattctacctagtgcatattacagtttccaaagttcttccatagccagctactcatttttaaatacttcaacttttacctcatacagatagtttaattgacattttattggttataactgtagatcacttgaagatcagaagtgtgagaattgttctagttcatattcacagttatttactttaacctatagaaatctcatgtcttaccataaaaggagacattgctgctgtgggcaccgtgtcatgcttgcccaacccagaaggctgcagtattcttgcccctgtttggtgttgggcgtatcgggggcgtcgccccc

SEQ ID NO: 80492 - DNA, 655 bp, Homo sapiens
  misc_feature (1)...(655): n = a,t,c or g
  sig_peptide (336)...(471): this location contains the signal peptide sequence, MQRKRQRYPGHLGLVFIVLGSLILNKHSLKELLIPRSKFSLSKVD, Run with SignalP
  misc_feature (56)...(426): similar to gi2688067 in the genepept database release 114, Run with FASTXY 3.3t00, default parameters
gggcagcggccgcgcaccacgccgccgggcgaataactggattgaaatttataatttcgtacagcaacttgcggagagatttgtgagccctgaaatgagattatctttcattgtgttttcttctcaagcaactattattttgccattaactggagacagaggcaaaatcagtaaaggcttggaggatttaaaacgtgttagtccagtaggagagacatatatccatgaaggactaaagctagcgaatgaacaaattcagaaagcaggaggcttgaaaacctccagtatcataattgctctgacagatggcaagttggacggtctggtgccatcatatgcagagaaagaggcaaagatatccaggtcacttggggctagtgtttattgtgttggggtccttgattttgaacaagcacagcttgaaagaattgctgattccaaggagcaagttttccctgtcaaaggtggatttcaggctcttaaaggaataattaattctatactagctcagtcatgtactgaaatcctagaattgcagccctcaagtgtctgtgtgggggaggaatttcagattgtcttaaagtggaacaggatnaatgccggcccaggcggaaaggcagggtttttctgcacttacactgtaaatgaaacatat

SEQ ID NO: 80493 - DNA, 1947 bp, Homo sapiens
  sig_peptide (891)...(756): this location contains the signal peptide sequence, MLFSSMTLRLSRCSCSILLFWASAACMFPSSRYLWSGRSLVSVEG, Run with SignalP
  misc_feature (54)...(1014): similar to gi3327222 in the genepept database release 114, Run with FASTXY 3.3t00, default parameters
atagagcgccctcggtaccgcacacgaagaagcaggtccatccacgcgtccgcagccgcatcgccgacccctgcgagcgcatggtgtacatcgcagcctttgctgtctcggcctactcctccacataccaccgagccggctgcaagcccttcaaccctgtcctgggggagacctacgagtgtgagcggcctgaccgaggcttccgcttcatcagtgagcaggtctcccaccacccccctatctcggcctgccatgcagagtctgagaacttcgccttctggcaagatatgaagtggaagaacaagttctggggcaaatccctggagattgtgcctgtgggaacagtcaacgtcagcctgcccaggtttggggaccactttgagtggaacaaggtgacatcctgcattcacaatgtcctgagtggtcagcgctggatcgagcactatggggaggtgctcatccgaaacacacaggacagctcctgccactgcaagatcaccttctgcaaggccaagtactggagttccaatgtccacgaggtgcagggcgctgtgctcagtcggagtggccgtgtcctccaccgactctttgggaagtggcacgaggggctgtaccggggacccacgccaggtggccagtgcatctggaaacccaactcaatgccccccgaccatgagcgaaacttcggcttcacccagtttgccttggagctgaatgagctgacagcagagctgaaacggtcgctgccttccaccgacacgagactccggccagaccagaggtacctggaggaggggaacatacaggccgctgaggcccagaagagaaggatcgagcagctgcagcgagacaggcgcaaagtcatggaggaaaacaacatcgtacaccaggctcgcttcttcaggcggcagacggatagcagcgggaaagagtggtgggtgaccaacaatacctactggaggctgcgggccgagccaggctacgggaacatggatggggccgtgctctggtagccctggccccgggggcaggaggctctggttcctcactcctcctgcctccaccccctaccatggacacatgggtgaggccgggctccccgcctcactgcccttgagaccaaaggggcagccctggccctccctcccctctgctggccagagggtctgcatctcagcccacccccaaccccaccgtttggggtgagaagcagaatctgtgcttccccagtctccttgccccagacaaccagcatgtaagacccttcccgcttcaccattccgattcctgtcccctttggggtacttgggggagactctggctcccaggatctgttccctatttcagtgccttcctaggacacaggggactccttgacgctccccaggctttctgtgcccaggcctctgtccccagcggtgaggttgcagtgagtgaaggagaggaggtgatctgttctccctccccttctgcccatctccagcatcttcttccccttccctggccctgcagggccttctccagctccctttggttagtccctggccatccctcctgtcctggatcccttctccctaactgcaaaatgcctgcagcttccagctccttcgtccctgatcctcaagcggttccctcccgtctcagctcagcggatcccccagagtggaggaggcctctccatgaggaggggagcagcccaaggcacctgtcctctgacccaccggcagcgagtgcgcaggtgtgagtgtaagttcatgtaggagagtgtatgcgtgtgcgcctgtgccctgcttgcaggcaagcagggctccctcatgtagcccggccttccccctgctgggggtccaccacatcgctgctctttctcacagtctgcctctgatgagggcgaattgctatgacattccaagctccaataaagactgtcccagactttgaaaaaaaaaa

SEQ ID NO: 80494 - DNA, 1392 bp, Homo sapiens
  sig_peptide (698)...(563): this location contains the signal peptide sequence, MALFCLVYQIIFLIQHTHFSLAKLLIMALNTLTYCVLVQSNNTQS, Run with SignalP
  misc_feature (125)...(197): similar to gi162191 in the genepept database release 114, Run with FASTXY 3.3t00, default parameters
ggattgctagtgcctcgggcacttcctaccgtacgaggcgcaggtgggagacttccgccctcgcgggactggctagggcgtttgaccgccggcggtgaaggggaggcggtgggcgtcttggagaacagagcgagatggagaagcgaggccgaggcgtgaagtcgagccccatccagaccccgaaccagacccctcagcaggctccggtgacgcctaggaaagaaaggaggcctagcatgttcgagaaggaggcagtgagtgcggagactgctaggggcccgagacggctatgtccgaccgtttaagtgaaatcgctccccagtgggccccgctcccgtcaccacccccagagccaaggaggcagcatctcccttttgtgtttcttttttccccagatgcgaaattgaagcctgagactgagttgggcagtcccctttggacttgagtgctaaagttttcttgttttttaattagggccatagaaccctacataagtcgattggaagggtggttacaagatcttcttttcaaatttactcagcttgcggatttcctgagagtactctgagtattattgctttgtactaaaacacagtatgttagtgtatttagtgccattataagcagttttgctagcgaaaaatgagtgtgttgtattaaaaaaataatttgataaaccaggcagaatagtgccatgttttgggtttttaaaacatcagcagtctggatatttgaagaatgtacaggagaaaaaaacttaagttgaaaataccctgtccaaaacttactgatattgatggaaagggtcattattcagttttattggtggtataacaggtatttctatatgattaggctttgaaaaccgttaatgtattaaagactctatattttattgatactttaacagaaaattagtttgcccaaggatacaaagctgtaatgatagagctgggaccagaacctgtatgctagtactcggtccaattggcctatactggtttctcttcgtacttacttcgtggacctataataggatgaagatagagatgacaggcaaaacaattttttgaagaccctaaaacattttaagattactcttaaaaagagaattctcaaaataatggcgaaatttcaggttcttgtttccctggtgtctacattttacagaggaaagaacgaactaaataaaggaggaaaagcaaacaggccaagtttacacagctaagaaaaagagcagagcagggctagaaacctaaatcagttggacttaaaacttcacactcccaaacactatgctggattttttgggcaatgaggcttgaggaaacaggtcccccaaccgggaaaggaaaaaaattttattttattttggggcaagacaaagggggg

SEQ ID NO: 80495 - DNA, 448 bp, Homo sapiens
  sig_peptide (105)...(240): this location contains the signal peptide sequence, MLHWSTRVCACVCVVCFRARTCVLSCTYMGWCVQECVWCGVPGRV, Run with SignalP
  misc_feature (119)...(270): similar to gi1333929 in the genepept database release 114, Run with FASTXY 3.3t00, default parameters
aatctttttaaccagagaaatttccgttgtgaaaaatgctctttgcccgctaggtggcaacgcagtcccttcaaatagcataatccagggctgcaggtagcctgatgctacactggagtacccgtgtgtgtgcatgtgtgtgtgtggtgtgcttccgtgcgcgcacgtgtgtgttatcttgcacatatatggggtggtgtgtacaggagtgtgtgtggtgtggtgtgcccggccgtgtgttcatatgcgggagtgcgcatgctggtttaggagaaactctattgccctgttttgctctgttttccatgaattggcaaattggaagtacaatgatcactatctggactgtgtttagaatgaaggaaatgccgggcgtccttataagcctttcacgggatcttacagccacaagtctattgtatgtgctttagtgatgaaaagcagatgg

SEQ ID NO: 80496 - DNA, 1809 bp, Homo sapiens
  sig_peptide (52)...(187): this location contains the signal peptide sequence, MGPSTPLLILFLLSWSGPLQGQQHHLVEYMERRLAALEERLAQCQ, Run with SignalP
  misc_feature (130)...(1249): similar to gi442368 in the genepept database release 114, Run with FASTXY 3.3t00, default parameters
aagaggctgactgtacgttccttctactctggcaccactctccaggctgccatggggcccagcacccctctcctcatcttgttccttttgtcatggtcgggacccctccaaggacagcagcaccaccttgtggagtacatggaacgccgactagctgctttagaggaacggctggcccagtgccaggaccagagtagtcggcatgctgctgagctgcgggacttcaagaacaagatgctgccactgctggaggtggcagagaaggagcgggaggcactcagaactgaggccgacaccatctccgggagagtggatcgtctggagcgggaggtagactatctggagacccagaacccagctctgccctgtgtagagtttgatgagaaggtgactggaggccctgggaccaaaggcaagggaagaaggaatgagaagtacgatatggtgacagactgtggctacacaatctctcaagtgagatcaatgaagattctgaagcgatttggtggcccagctggtctatggaccaaggatccactggggcaaacagagaagatctacgtgttagatgggacacagaatgacacagcctttgtcttcccaaggctgcgtgacttcacccttgccatggctgcccggaaagcttcccgagtccgggtgcccttcccctgggtaggcacagggcagctggtatatggtggctttctttattttgctcggaggcctcctggaagacctggtggaggtggtgagatggagaacactttgcagctaatcaaattccacctggcaaaccgaacagtggtggacagctcagtattcccagcagaggggctgatccccccctacggcttgacagcagacacctacatcgacctggcagctgatgaggaaggtctttgggctgtctatgccacccgggaggatgacaggcacttgtgtctggccaagttagatccacagacactggacacagagcagcagtgggacacaccatgtcccagagagaatgctgaggctgcctttgtcatctgtgggaccctctatgtcgtctataacacccgtcctgccagtcgggcccgcatccagtgctcctttgatgccagcggcaccctgacccctgaacgggcagcactcccttattttccccgcagatatggtgcccatgccagcctccgctataacccccgagaacgccagctctatgcctgggatgatggctaccagattgtctataagctggagatgaggaagaaagaggaggaggtttgaggagctagccttgttttttgcatctttctcactcccatacatttatattatatccccactaaatttcttgttcctcattcttcaaatgtgggccagttgtggctcaaatcctctatatttttagccaatggcaatcaaattctttcagctcctttgtttcatacggaactccagatcctgagtaatccttttagagcccgaagagtcaaaaccctcaatgttccctcctgctctcctgccccatgtcaacaaatttcaggctaaggatgccccagacccagggctctaaccttgtatgcgggcaggcccagggagcaggcagcagtgttcttcccctcagagtgacttggggagggagaaataggaggagacgtccagctctgtcctctcttcctcactcctcccttcagtgtcctgaggaacaggactttctccacattgttttgtattgcaacattttgcattaaaaggaaaatccacaaaaaaaaaaaaaagggggcgccgtttaaaagaaacaaacttatcgcccgcgtgttg

SEQ ID NO: 80497 - DNA, 433 bp, Homo sapiens
  sig_peptide (27)...(162): this location contains the signal peptide sequence, MGIFKLIHLIAIMAVPVFETICKRVSVENITQQGHLNTQSSKVYA, Run with SignalP
  misc_feature (429)...(392): similar to gi2340133 in the genepept database release 114, Run with FASTXY 3.3t00, default parameters
cccacgcgtccgcccaaaacttggtcatgggtatctttaaattaattcatctaatagccatcatggctgtgccagtctttgaaaccatctgcaaaagagtatctgttgaaaacattacacagcaaggccatcttaatacacagagttctaaggtttatgctatgtgtgagacaagctgtactcctgttttaaaaaatcatacagggctgagaacaggataggacattttctgtttatttttctctagtttccctcttcctatctaagtagattctgcctacaaagtctatttaggtaggggctggacgtctgactttgtaggacaaagtctatctatttagtctatttagatagactttgtggctacaaagccagacgtgtagcatcttccaatctctttctgacctttctaccttcctttttttgagacaag

SEQ ID NO: 80498 - DNA, 386 bp, Homo sapiens
  sig_peptide (4)...(139): this location contains the signal peptide sequence, MRWTERVCFPLLPESLIILGGVLCIPPFIVSPPLPLGFTKESELR, Run with SignalP
  misc_feature (20)...(154): similar to gi3328684 in the genepept database release 114, Run with FASTXY 3.3t00, default parameters
aatatgagatggacggaacgtgtgtgtttccctctcctgcccgaatcactcatcattcttggaggggtgctctgcattcctccttttattgtctcccctcccctgcctttgggctttactaaagagtctgaactccgattcccatgctctcctgctacattaataaacagaacctgcttgggggtacgggactttactggaaacatgactttttggtgccggattggtttgacgggcatccagtcttctattttaacatctagcaaacctaattctgagggtactccctttttccgttaagtatgccgagcgcctcaggtgaaaggcttgactcacaccacaagtctcgctggaattcgggactgaacacctgaagaacagatccg

SEQ ID NO: 80499 - DNA, 370 bp, Homo sapiens
  sig_peptide (25)...(160): this location contains the signal peptide sequence, MEKKIHRLHRCLSYFSPLHFVPLLSSLLLPFFLANFSDNCLVVVF, Run with SignalP
  misc_feature (56)...(165): similar to gi1334275 in the genepept database release 114, Run with FASTXY 3.3t00, default parameters
tttaaatcttaattaattgccctaatggaaaaaaaaattcataggctgcacaggtgcttgtcctatttctctccccttcattttgttcctctcctttcctctttacttcttccttttttcttggctaatttttctgacaattgtttggtggtggtattttcaatagaaaagcggaccaaaggagtcaagtgagaagaaataaaggtcctggatagtttagaaaccaagtaatcaataccaaaataatcaataaccaagacatggctgtattataagaattagatataaatataaaaacatatttcattattattaaaataattcattttaagtacgaatgtaatcctatggctgtaagaaagaaacagaa

SEQ ID NO: 80500 - DNA, 1511 bp, Homo sapiens
  misc_feature (1)...(1511): n = a,t,c or g
  sig_peptide (1362)...(1227): this location contains the signal peptide sequence, MIQKILFKDLFRFLLVYLLFMIGYASALVSLLNPCANMKVCNEDQ, Run with SignalP
  misc_feature (1513)...(557): similar to gi5263196 in the genepept database release 114, Run with FASTXY 3.3t00, default parameters
ttttttttttttcaccgtcaatgaataaacatttattgagcaccggcaaatcccagacactacagaacacacagaaggcatggccccacgccgagggccccagccccttgcaaagctgccacgctgccaaaaatggtggcgcatgcagctcaggcgcaggctgaggctggggcttggccgggcagtgcacttggaacggggtcctaaggcctctgccaggttccagctggggcaggggtcacgtcgcttcctgagagcagagcaaataaataatggagaggcaggggctggggcctgaggtggaggggctctggcgttggcttatgtgactccataggagcaagacaggtggccgggagcccccaccccagggtggggaggcagagccaggggaccacagggtcctggggcctccctggcacctccactggtccctcgcctcttggggcccaaagcagggtgtggggggacacccccagaagggcacttgcttgaaatgcggcttggacttagaaatgagtgggcagagaagctggggctgcgcntgcagtccctagagcggggcgtcatcagtcctccacttgcgggggtaaccctgctggtggccatcgcagcgggggttccccatgctgtccagaggcaccaccacctcgtccgggttcgagttcttgttcagttccaccacgcggggtaccaccgaggaccagcgatccctgcggaggcggcccacggtatgcgagaagccataatactggtaggtctcattcttgcccgggtcctcgttgatgatgcccaagttctggttccagtgagaccagttcacctcatccaccctgaagcaccacctgcggtcaggagtgccgtccgagctcttgcccacggtgaccatctccccagagcggaaggccttcctcaggaatacggggaaggagcgctcaatgtccaggatggtggtggcccactgcagcttccagatgtgcttgctctccttggagacctggcccactgtctcgcccatgagggcaatgagcatgttgaggagcagcacaaaggtgaggatgatgtaggtcaccagcaggatgatgaagaccacggggtacttggtgctgctcagcatctccaggtcgcccatgccgatggtcagcttaaacaggtccaggaggaaggtgctgaaggtctcgctgtcacggcacgaggggtaagtgggcactgtgcagttggtctggtcctcattgcacaccttcatgttggcacacgggttcaggagggagaccagggctgaagcgtagccgatcatgaagagcaagtagacgagcaggaatcggaaaaggtccttgaagagaatcttctggatcatgatgctataggtccccgtcagcttcagcccacgggtgaagtaaagggcattcatccagcccaggaccagggcaaagaccatcacggccaggtaggcctcgatccctgccaggtagagggctgctgagacgatcaccaggacagagtagatgaag

SEQ ID NO: 80501 - DNA, 2672 bp, Homo sapiens
  sig_peptide (1478)...(1613): this location contains the signal peptide sequence, MWSHFWKVSTQGLFVAMFWPLIPQFVCNCLFYWALYFNPIINIDL, Run with SignalP
  misc_feature (335)...(628): similar to gi3319884 in the genepept database release 114, Run with FASTXY 3.3t00, default parameters
ggatttcgtttcctccggctgggagtggccgctctaggcagcgttgaggtcgcggggttgaggggggttgtgaaaggagagcggcctctcctctatggtcacggggccggggcacgcttcccccactctgtcttgttacttccggtagcgaagcctctccctcttcctctgctcccgcggggtctgtgctgagaataatggcccggttggcccgggacgagtggaatgattaatgatgttttgcagcagttttctacgtctgaaattttttatgtctctggaacccagaatttgctaagagatggaggaacctcagaaaagctatgtgaacacaatggaccttgagagagatgaacctctcaaaagcaccggccctcagatttctgttagtgaattttcttgccactgctgctacgacatcctggttaaccccaccaccttgaactgtgggcacagcttctgccgtcactgccttgctttatggtgggcatcttcaaagaaaacagaatgtccagaatgcagagaaaaatgggaaggtttccccaaagtcagtattctcctcagggatgccattgaaaagttatttcctgatgccattagactgagatttgaagacattcagcagaataatgacatagtccaaagtcttgcagcctttcagaaatatgggaatgatcagattcctttagctcctaacacaggccgagcgaatcagcagatgggagggggattcttttccggtgtgctcacagctttaactggagtggcagtggtcctgctcgtctatcactggagcagcagggaatctgaacacgacctcctggtccacaaggctgtggccaaatggacggcggaagaagttgtcctctggctggagcagctgggcccttgggcatctctttacagggaaaggtttttatctgaacgagtaaatggaaggttgcttttaactttgacagaggaagaattttccaagacgccctataccatagaaaacagcagccacaggagagccatcctcatggagctagaacgtgtcaaagcattaggcgtgaagcccccccagaatctctgggaatataaggctgtgaacccaggcaggtccctgttcctgctatacgccctcaagagctcccccaggctgagtctgctctacctgtacctgtttgactacaccgacaccttcctacctttcatccacaccatctgccctctgcaagaagacagctctggggaggacatcgtcaccaagcttctggatcttaaggagcctacgtggaagcagtggagagagttcctggtcaaatactccttccttccataccagctgattgctgagtttgcttgggactggttggaggtccattactggacatcacggtttctcatcatcaatgctatgttactctcagttctggaattattctccttttggagaatctggtcgagaagtgaactgaagaccgtgcctcagaggatgtggagccatttctggaaagtatcaacgcaggggctttttgtggccatgttctggcccctcatccctcagtttgtttgcaactgtttgttttactgggccctgtactttaacccaattattaacattgatcttgtggtcaaggaactccggcggctggaaacccaggtgttgtgactggcactgcccaggctgagactcttcaagtcccgctgacgtctgagctttgatgcttaagaggggtgaggcagggagcggacttcctattttctaccctcagtaaaacaaggtgctgctttgtatatcaaaagctccaaccatgtcctctccccctcagcctgtgggtggcacgagcaaggactgacatccgcacagggaggattgtctgtttggctgacacagcagcagcccttcccacccagccaccttcctcacagggactaggaggctcagtccccaacggctggcaagactcagggtcctcagtggacatggtgtgggtgacatcagaagggtgccacatcagtcccctccccaacctcagtgactgacagaggatccggatctcagagcctgagaccaggtttattggggcctggcctgtcctctaagtcaagtttaggaaaacaaggataagattctgtcataggcatagagagttgcacataaaaaataccgaagaaaacccaaaattcaatcaacaattctgtcttattgaagagttgctaggattcagagtaaaactcaaaggattcagtttgagcctagaatgatggttagacttgtagtcactgggcttttgttttgctttatggaaatcattgaaggtctggatccctttctctgaatggagagattgagagggatgtcgggcagttcccattagatttagtggccttcatgttattcagaattgttttggtgatacctcacccctgtaatcccagcactttgggtgggtgaggcaggcggatcacttgaagccaggacttcaagaccagcttggccaacatggtgaaacctcatctctactaaaaatacaaaaattagccaagtgtgatggcacatacctgtaatcccagctacttggaattggaaatcgcctgaacccaggaggcggaggttgcagggagggagactgcaccactgcacttcagcctgggtgacagagggagactctgtcttaaaaaaaaaa

SEQ ID NO: 80502 - DNA, 360 bp, Homo sapiens
  sig_peptide (181)...(316): this location contains the signal peptide sequence, MKMTVRAVAWSLPSLLLLLPDQNPMHLLSLAWCVVACRLLPGNAS, Run with SignalP
  misc_feature (347)...(257): similar to gi1087048 in the genepept database release 114, Run with FASTXY 3.3t00, default parameters
ggcacgaggaacaacatattccaattgttaagtgacacatgactgtatttcccctgccctaaatcaactcacagccagatactagataaccacagtccacctaggtgggcctacagcccacttgagtttttcaaactgattaatcctaaactgttcatcccatcctgctttgccttttccatgaaaatgacagtaagggctgtggcctggtctttaccctcattactgcttctgcttcctgaccaaaaccctatgcatctcttaagtctggcgtggtgtgttgtggcatgccgtcttcttccaggaaatgcaagtaatacacatttttcagtgatattggcctttctatgttgtcactta

SEQ ID NO: 80503 - DNA, 395 bp, Homo sapiens
  sig_peptide (201)...(336): this location contains the signal peptide sequence, MTAVNFRMVTWFVICLQQSTCIFEFAAAPSSGSAKTSLIGLHFSP, Run with SignalP
  misc_feature (384)...(247): similar to gi4154357 in the genepept database release 114, Run with FASTXY 3.3t00, default parameters
ggcacgagagcctaatcttcattgtacagggaaaaaactcagtgtagaagagttaaggagagtgctcaagagggctcttctgcactgagttttgtccctgtaaaaaacacagtagcgcagcattattcaaaagtctacactctttccaccaagctgctttgcctctttatacagctaagaggcagaaacaatattaaagaatgacagctgtcaatttccggatggtgacttggtttgtcatttgtttacaacaaagcacttgtatatttgagtttgctgctgccccatccagtggttctgcaaagacctcgctgatcggactccacttttccccaggtcctgagaatgccaggcatgtaaatctggagtccagaaaaatccatagagatgtaact

SEQ ID NO: 80504 - DNA, 1424 bp, Homo sapiens
  sig_peptide (3)...(138): this location contains the signal peptide sequence, MRALVLLGCLLASLLFSGQAEETEDANEEAPLRDRSHIEKTLMLN, Run with SignalP
  misc_feature (63)...(1424): similar to gi164861 in the genepept database release 114, Run with FASTXY 3.3t00, default parameters
ccatgagggcgctggtcctgctcggctgcctcctggcctcgctcctgttctcaggacaagcagaagagacggaggatgcaaatgaagaagccccattgagggaccgctcccacatcgagaagaccctcatgctgaatgaggacaagccatccgatgactactctgcggtgctgcagcggcttcggaagatctaccactcatccatcaagcctctggagcagtcctacaagtacaatgagctccggcagcatgagatcacagatggagagattacctccaagcccatggtactgttcctgggaccgtggagtgttggtaaatctaccatgataaactacctccttgggctggaaaatactcgctatcagctctatacaggcgctgaacccaccacctctgagttcacggtcctcatgcatgggcctaagctgaaaaccatcgagggcatcgtcatggctgctgacagcgcccgttccttctcaccccttgagaagtttggccagaatttcctagagaagctgattggcattgaggttccccacaaacttctggagagggtcacttttgtggatacaccaggcatcatcgagaaccgcaagcagcaagaaagaggctaccccttcaacgacgtgtgccagtggttcatcgacagagctgacctcatctttgtcgtctttgacccaacaaagctggatgtgggtctagagctggagatgctcttccgccagttgaaggggcgtgaatcccagataaggatcatcctgaacaaggctgacaatctggccacccaaatgctcatgcgggtttacggggccctcttctggagcttggcccctctcatcaatgtcacagagcccccaagggtttacgtcagctccttctggccacaagagtataagccggacacccatcaggaactgttcctccaagaagagatctccctcctagaagacctgaatcaggtgatcgagaacagactggagaacaagattgccttcatccgccagcacgccatccgggtccgcatccacgccctcctggttgaccgctacctgcagacttacaaggacaaaatgaccttcttcagtgatggagaactggtctttaaggacattgtggaagatcccgataaattctacatcttcaagaccatcctggcaaagaccaatgtcagcaaatttgaccttcccaaccgcgaggcctataaggacttcttcggcatcaatcccatttccagtttcaaactgctctcccagcagtgctcctacatgggaggttgctttctggagaagattgagcgggccatcactcaggagcttccgggcctcctgggtagcctcgggctcgggaagaatccaggtgctctcaactgtgacaaaacagggtgtagcgaaacaccaaaaaatcgctacaggaagcactag

SEQ ID NO: 80505 - DNA, 780 bp, Homo sapiens
  sig_peptide (85)...(220): this location contains the signal peptide sequence, MFAFLTLHFLWELVLSTFPSLALYSPALHYLESAIMTVSKCGHVR, Run with SignalP
  misc_feature (33)...(165): similar to gi5880794 in the genepept database release 114, Run with FASTXY 3.3t00, default parameters
ccaagttctagggtccagtggggattgggctatctcagggtcaagccagcaccctgtctgatccgccccccgccattcctgtacatgtttgcattcctcaccctgcacttcctctgggaacttgttctcagtacgttcccttctctcgcactttattctcccgccttacactatttggaatctgctatcatgacagtttcaaaatgcggccatgttagagcagtaggaagtggaggcttccacacttcctaagttataatctttgacccattctcagggatgtgttctcaaatagccatgcttgcattttgctgttgtttttactgggtttgtacattgcgaaggctctggttggcttcacaatatatcttgatgtatgctgcaaatctgaacatatatgaactctgttgacatggtccgtatgtattctagcaacaggtgagtgactgctccatatctctatacctcagttcctgtctgctgtatttcatacagtcctctttgagatctctgatgttatttcccaaaaaactttctcctgttacccagttgagccatttctggttggtagaacctcagtcactactgaagctgcttgcctgcagtttctgccctggtaggggtaacaggacagaagatgtacgtaccacacgccccactcctttgtaaaaagcaccctttgaaaattttctggaagcaaatcccagaaatccttgtcctgctaacacaggatgtgaaagaagctctctaatttaaaatgagaggcgaagctggctcaat

SEQ ID NO: 80506 - DNA, 340 bp, Homo sapiens
  sig_peptide (11)...(146): this location contains the signal peptide sequence, MVVLYIVRAYNHYILCCLSSSLYLVLILLVTVYLMLTTSSYNDVS, Run with SignalP
  misc_feature (2)...(231): similar to gi5360836 in the genepept database release 114, Run with FASTXY 3.3t00, default parameters
attttttttcatggttgtcctatatattgtcagagcatataatcattacatactatgctgtctctcctccagtctttacttagtcttaattctgttagtaaccgtatatttaatgctcaccactagttcttataatgatgtttctttagtcatttggattgcctcaagttttgcctctagtaaattctttaggaaaggcttaagggaatattcatatttcatgaattttcttgctcgttcataacattttgtctgtgttttttatatctaaagtttgtgtttgccagaaatagaatccttggctcactttttcttttcttgaatatcttaaatttggaac

SEQ ID NO: 80507 - DNA, 350 bp, Homo sapiens
  sig_peptide (190)...(325): this location contains the signal peptide sequence, MRLEELISFLSRLFHLTICTTGRSYLYCFPKALFGHYCIDGKLSG, Run with SignalP
  misc_feature (148)...(303): similar to gi1742750 in the genepept database release 114, Run with FASTXY 3.3t00, default parameters
tgtgaaactaaggctcacacctggttcttagaaggagactggtgtccacatctggcaggtcaacccaggccaaggttatgaccttgcctttgctttctacatcagcatccgcaaaatgactgctctgcctgacctttgacacaggagcctagaaaagtgggagatcccctcctacaggtcacatactggatgcgacttgaggaattgatatccttcctctccagattgtttcatctcactatttgcacgactgggagaagctacctctattgcttcccaaaggctctttttggccactattgcattgatggaaagttgagtggcaagacattttcagatcaaaaaaagaa

SEQ ID NO: 80508 - DNA, 377 bp, Homo sapiens
  misc_feature (1)...(377): n = a,t,c or g
  sig_peptide (46)...(181): this location contains the signal peptide sequence, MGLVLCRCQGCLCTPVMFLLEGGCIEEGVLHAGSSLLLLGLPFLG, Run with SignalP
  misc_feature (249)...(112): similar to gi60160 in the genepept database release 114, Run with FASTXY 3.3t00, default parameters
ggcagctctattcatacctgggtctaattgtcattctgtttttaaatgggactcgttttatgcagatgccaaggatgcctgtgcacaccagtgatgttcttgttggagggcggatgtatagaggaaggggtcctacacgcgggctcctctcttcttcttctgggccttcccttccttggcctgcttgggctcttccctagtttgccaaagaaagagtatcttaggtatcttaggacctttttagtaccagcatcctatggcttggtggtggctaacacttgccattggaaggtcggtctattttagaaatggaagagggagtnngngcngnggctcatacctggctctcctcatactaggttgtggagaacgtagaa

SEQ ID NO: 80509 - DNA, 411 bp, Homo sapiens
  misc_feature (1)...(411): n = a,t,c or g
  sig_peptide (148)...(283): this location contains the signal peptide sequence, MKSLDFSLLLKIPPLSYFKILYLLEAFCAFLTLFXFLFLFKXQTL, Run with SignalP
  misc_feature (411)...(170): similar to gi181405 in the genepept database release 114, Run with FASTXY 3.3t00, default parameters
cggacgcgtgggcggacgcgtgggcagacgtgtgccactgcacccagctatttttaccttaaattcttaaatatgtatgtctaaggttcattttgtcacttagtgtaaagtattaatataactttttattttaaacaaaagtgccttatgaaaagtcttgatttttctctgttgttgaaaataccacctttgtcatattttaaaatcttatatctactagaagctttctgtgcttttcttactctgttttgntttctattcttattcaagntccaaacattacataactttatgataatttcagcatctggtagattattcctggttttgcctattcatgttctcttaattttttaatactttctttattccaggaacattttattggacaaccaaatgaccaatctttag

SEQ ID NO: 80510 - DNA, 355 bp, Homo sapiens
  sig_peptide (140)...(275): this location contains the signal peptide sequence, MPLGVMPTFLLGILSPISPSCSSLNSSHSSQFKCHFLREVFPHHP, Run with SignalP
  misc_feature (43)...(92): similar to gi152933 in the genepept database release 114, Run with FASTXY 3.3t00, default parameters
gtaatatgctattatttctctttctgttttattcaactggagaaaaagatatggagagtcggaaagaatactgcattaacctattatgatctacatactgcaaataaaaattaaggctatcctttagattggttctaaaatgcctctgggtgtcatgcccacttttctgcttggaatattgtctcccatctcaccctcttgttcttcactgaatagctcccattcatctcagtttaaatgtcactttctcagagaagtcttccctcatcatcctaatctttacttaactttccaagtctttaaattaggttccccttgtaattctcccatataatatccagtgtcgacgcggccg

SEQ ID NO: 80511 - DNA, 376 bp, Homo sapiens
  sig_peptide (58)...(193): this location contains the signal peptide sequence, MGANRRALWVTLGFVSGALHTLISQNQVTSQSIMCCIFQSSLGCM, Run with SignalP
  misc_feature (378)...(245): similar to gi5306149 in the genepept database release 114, Run with FASTXY 3.3t00, default parameters
ccctgttgagcttgactctagtctggcacggtgaagagacatgaaaggacaaaggttatgggagcaaataggagggcactgtgggtcacacttggatttgtttcaggggcactgcacaccctcatcagtcagaatcaagtaacctcccaaagcataatgtgttgcatttttcagagctctctgggatgcatgaattaggtgctagtcttatgctatcacaagtcctgctcagagggattcagaggccatccagttaacagaatgtagggagagcttgaagagaggattgagaggaaccactgatacgtttaaaggaatgaaagattttatcatttgtattgagtttttagttttatttttatttttatttattttt

SEQ ID NO: 80512 - DNA, 406 bp, Homo sapiens
  misc_feature (1)...(406): n = a,t,c or g
  sig_peptide (126)...(261): this location contains the signal peptide sequence, MSRPWKKEESFTAGCSLLLGLCRDLALCLGGLCSAAWPDTSLSMA, Run with SignalP
  misc_feature (249)...(391): similar to gi3256425 in the genepept database release 114, Run with FASTXY 3.3t00, default parameters
aaatgatgctgtaaatgcatttacttattactccattgtaaggtagaagagtgcgttgctatcacgtgggggggtataaagtgcagtgaggattttcttgtaaatctcagatttggggcttggctatgtcacgtccctggaagaaggaggagtcatttactgccggctgttctctcctcttgggcctctgtagagatttggccctatgccttggcgggctctgctctgcagcttggccagacacatccctcagcatggcaagaagtgtggaaggtcaagaggatgtgcccacttggcctaatcctaacccaccagcacccctgttcttaaccatgtccctcatgtacctgggatccctgaattccctccccaaacaccctggaccctacttccagggcctgcgagn

SEQ ID NO: 80513 - DNA, 766 bp, Homo sapiens
  misc_feature (1)...(766): n = a,t,c or g
  sig_peptide (131)...(266): this location contains the signal peptide sequence, MQRPSAWWILFCSLNLLARFIQCLQIVNKEVHFFRYIKYYKFWEG, Run with SignalP
  misc_feature (92)...(180): similar to gi885671 in the genepept database release 114, Run with FASTXY 3.3t00, default parameters
ctcttccctcattaacttcaggtaagttgttaaagcaaatgttctggagttcagagtgttgcttttgataatgagaaaacaagtttagtcatcagaatctgtcatcttgtttataaaacagtcaaaccatatgcaacgcccttctgcatggtggattttgttttgttccttgaacctactggctcgcttcatccaatgcctacagatagtaaataaagaggtccatttttttaggtacattaaatactacaaattttgggaggggaggtagagtaggagggtggtgggcagaaggcagccgggccatttttttggcaactaattcaatatgagaaaaaagatggtattgctctcataaaagtaatttatattcattgttttcaaccaactgaaacattcagaaagctaaaaacatttcagtcaaattcccaccaccttgaaataatcagaagtatgttttggtgaccatcattcaagatacgttcttggccgggcgcggtggctcacgcctgtaatcccagcactttgggaggccgaggtgggtggatcacgaggtcaagagatcgagaccatcctggccatcatggcaaaactccgtctctactaaaaatgcaaaaaattagctgggcgtggtggcgggcacctgtagttccagctactcgggaggctgaggcaggagaatggcgtgaacccaggaggtggagcttgcagtgagccaagatcgtgccaaagcactccagcaaggatgacagagcttgacncgaaa

SEQ ID NO: 80514 - DNA, 614 bp, Homo sapiens
  sig_peptide (206)...(341): this location contains the signal peptide sequence, MQLRRCLTLRALILPIQLCRDRQCCLLVRCCFWSPRRRCHWSCLF, Run with SignalP
  misc_feature (196)...(297): similar to gi3786438 in the genepept database release 114, Run with FASTXY 3.3t00, default parameters
gcgagcgaatcatacatagcttagtttatcagacaagctgcttttcttgagcaaagaaagaactaggagagaaacggggctttggaaccctgatgcggcaatgctgaaagaggagaaatatcccaaggaagggaaaggtgtgttgcagaacgatgaaaaataggcggcttctcacagctgttctcaggggacgagacggggtgggatgcagctccgccggtgcctaacactaagggccctcatcctgccgattcagttgtgtcgggaccgccagtgctgtctcctcgtcagatgctgcttctggtctccccgcagaagatgccactggagttgccttttcaaggatggggacatttgaaggccctggacgctcagctctgaggctggctgggatctcactagcaccccctggtggaggccggagccaggctgacgcgggaaagtggggcacggaagcgctgcggattggaccggtggcagctaggccgaaacgcctgtatttaaagggatagtaactcggactcgttctgcaatatccccacaagggcctgactgagcgagcgagcatggacggccgcggggctttctggacagtggccattcccagagccagg

SEQ ID NO: 80515 - DNA, 849 bp, Homo sapiens
  sig_peptide (850)...(715): this location contains the signal peptide sequence, MAWTPLWLTLLTLCIGSVVSSELTQDPTVSVALGQTLRIKCQGDT, Run with SignalP
  misc_feature (850)...(451): similar to gi619634 in the genepept database release 114, Run with FASTXY 3.3t00, default parameters
ttttttttttttctgattgacaatgagaatatttattgagggtttattgagtgcagggagaagggcttgatgccttggggtgggaggagagacccctcccctgggatcctgcagctctagtctcccgtggtgggggtgagggttgagaacctatgaacattctgtaggggccactgtcttctccacggtgctcccttcatgcgtgacctggcagctgtagcttctgtgggacttccactgctcaggcgtcaggctcagatagctgctggccgcgtacttgttgttgctttgtttggagggtgtggtggtctccactcccgccttgacggggctgctatctgccttccaggccactgtcacggctcccgggtagaagtcacttatgagacacaccagtgtggccttgttggcttgaagctcctcagaggagggcgggaacagagtgaccgagggggcagccttgggctgacccaggacggtcagtttggtccctccgccgaaaacccaggtggtcctgcctgcatatgagcagcaataataatcagcctcatcctcagcctggagcccagagatggtcaaggaagctgtgtttcctgagctggagccagagaatcggcctgggatccctgagggccggttgttttgaccatagatgacaagtataggggcctgtcctggcttctgctggtaccaacttgcataataacttctgatggtgtctccttggcatttgatcctgagcgtctgtcccaaggccacagacacagtagggtcctgagtcagctcagaagaaaccacagaacctatgcaaagagtgaggagagtgagccagagaggggtccaggccat

SEQ ID NO: 80516 - DNA, 633 bp, Homo sapiens
  sig_peptide (3)...(138): this location contains the signal peptide sequence, MISRVIWGFSLSCSLWLSLALTLTLLHSCSPPPSLTLTAEYTVLV, Run with SignalP
  misc_feature (9)...(225): similar to gi4063296 in the genepept database release 114, Run with FASTXY 3.3t00, default parameters
acatgatatctcgggttatttggggcttcagtctttcttgctctctctggctctctctggccctcactcttactctcttgcactcttgctctccccctccctcccttactctaacagctgaatacacagtacttgttgatgtaccaaaaaggcattcaaccatttcgctattgatcgtcttttatttcctttttttattttttttcaaaataacactgctgtaatacatactggtgcttttatttatataggttggattcccagaaatactatgtaggcatatgtttcagaaatattacaagattactatccaaaatgaaagcgcccgttccagcgtcctctccagcactctttaatgcttgamaatatgamaggctaaaaattgcattgtattgcttgtyagtttamttgccttttgtctgagttcaaagaggtttgttgttgttgctgtccttgtttctgtttggatttttctctgatttgcctgttcttaccctttgctcatgtatctattgatgtttbtcattataaatbtgtagaaattcttactacatagtgcatattaatcatttgtagctctaatgtgttatgacgttttcatcttgacthtattgatgatatatctccctttaa

SEQ ID NO: 80517 - DNA, 457 bp, Homo sapiens
  misc_feature (1)...(457): n = a,t,c or g
  sig_peptide (403)...(268): this location contains the signal peptide sequence, MRLTVCTLYVICFHVFISRDIWNTLLLNNEINCICPISSHLYHIY, Run with SignalP
  misc_feature (455)...(346): similar to gi1657809 in the genepept database release 114, Run with FASTXY 3.3t00, default parameters
naaggccgcgctgnnnnnnaaactttagaagncgnncacntnnntgacaaacngacttaatataatcctggtctctgaggtgaatggctatttttaagttatccccattaggttatacttgcggaggctgctgttgcctgctgcctattccattaaaaactaactttatcactaattttaacatgaaacagatccatttggagaaaaatccattatgaatgagacagagttggctgttgaataacattggtgtaggctcaagtctggaataaatgtgatatagatgggacgatattggacaaatgcaatttatttcattattcagcaacaaggtattccaaatgtctctgctaatgaatacatgaaaacagattacatataatgtgcacactgtgagtcgcatttgcagaattatttttgccacctctagcactatctgaaaccaacactgaatagc

SEQ ID NO: 80518 - DNA, 440 bp, Homo sapiens
  sig_peptide (138)...(273): this location contains the signal peptide sequence, MVCFPIHGNLGLFWFLAFMHKVAINVLTVAFVFVITEMKTGVELL, Run with SignalP
  misc_feature (66)...(200): similar to gi2664260 in the genepept database release 114, Run with FASTXY 3.3t00, default parameters
gcggtggaattccaagtattaagggtattgttttatgaactgagaaatgtgtactctatcaatgatggataattaccatcatctcaaagtacttgagttttagccgtgtatacatcagtagttccatgttgccgagtatggtatgctttcccattcatggaaacctgggccttttctggtttttggctttcatgcataaagttgctataaatgttctcacagtagcttttgtttttgtaattactgagatgaaaacgggtgtggaattgctgaatcaggatagatgtacattttttgagagatggctaggcattttttccaaagtaatactgtggaaacacttagccaatgatgtgtgagttattccatgccttgtcagtatctggtgttaacagtttagcccttatggtgaatttgtggcttatcctctcagcaatgag

SEQ ID NO: 80519 - DNA, 712 bp, Homo sapiens
  sig_peptide (199)...(334): this location contains the signal peptide sequence, MFIWYISSACFWVLSVLMLVPVAFEMIFASSHIQCILRGNCNKTG, Run with SignalP
  misc_feature (1)...(98): similar to gi4704709 in the genepept database release 114, Run with FASTXY 3.3t00, default parameters
aattttagaattctaatagtctataagttacgtttctgctatatttgctgtatggtgtatctagccacccatcaatcttattttttctttaaaagtgaattgcagacttgcatgtgtcttcccctgcactcaatatgcatattattaaagtacagtgcaataactgctttttaaaatgattcttctactgctttttagatgttcatatggtacatttcatctgcttgcttttgggtattaagtgttttgatgctggtaccagtcgcttttgaaatgatttttgcttccagtcacatccagtgtatcctaaggggaaattgcaataaaacaggagatctaatcctatctggagaccacccttgagttaggtttttctctgttctgcatgtgaatgtggtgctgtggcattttgaaaggactgcaggggctcatcaaacttgagggtgaaaactgaattgttcagcctgtaaaataacagtgatggactccaccatctccattttttaagaaaaagaaacgctggtaccacagttgtacctgcccctcctctgcgggaaaaaaacgcctccaggaccacatcgcgacccgtcccctaagtgtcccctggagggccccacttatttctttaccgagccgtcctcctttgcaatttcaccctcccagcgttctacaacgcgctaccggaactccttcgccctcgccacactccccg

SEQ ID NO: 80520 - DNA, 1476 bp, Homo sapiens
  sig_peptide (265)...(400): this location contains the signal peptide sequence, MGADRGPHVVLWTLICLPVVFILSFVVSFYYGTITWYNIFLVYNE, Run with SignalP
  misc_feature (325)...(493): similar to gi4056668 in the genepept database release 114, Run with FASTXY 3.3t00, default parameters
atgtctgtaacaaagttccgcacactccctccgtgccacagagattgtgccaagattgaggcccaaaaagcggagagagtagatatgtggaacctgcctctggacagccgctacgtcaccttaactgggaccatcacacgagggaagaaaaagggtcagatggtggacatccatgtcacattgacagagaaagagctgcaggaactgaccaaacctaaagagtcatcaagggaaacgacgcctgaaggaagaatggcctgccagatgggagctgaccgtgggccccatgtggtcctctggacgctgatctgcctgcctgtggttttcatcctttcttttgttgtctctttctactacggcactatcacctggtacaacatcttcctcgtgtataatgaggaaaggaccttctggcacaagatctcgtattgcccttgcctcgttctcttctatccagtgctcatcatggccatggcttcttccctcggcctctacgctgctgtggtccagctctcgtggtcctgggaagcatggtggcaagctgcccgggacatggagaaaggcttctgtggctggctctgcagcaagctgggtctggaggactgttctccctacagcattgtggagttgcttgaatccgacaatatctcaagcactctctccaacaaggaccccatccaagaagtagaaacctccacggtctaaactcccaacaacttactccctcctctggccccagtagcctatatatcatcttaaaattccagcagattatttctttaaattaccccctactctccgcagttcttctgggaaatcagagtccatactgatcagttttaccatcttgagggttccaggagggcatggagcagacaagcaattgtgccaaagcagttcacccaatggacaaactctttttgattccctgccctaaaatcaccatttatttaggacaatggaactctgctgtgtgtcgttttgggagcctggaagtgttactggtgcctggaactgaggggagtatgtgactaaatgtgtcagggagaataaagaacctcggggtaaccaaatccaccaagataatagacagggatggagtgagacatttaggaagctggactaccacagtgtagcagaaggtaaagatttgtgtgtatcatttagatttagatttagctgcatagaattaaaaccctaaaatatcagtggcttaaacaagatagaagtgtatttctttcttgtgcagaagaagtctggaggcagaccatcctgggaccctgtgaagtaatccaggtcccaggcttcttctatttctctaccattagtaggatgtgacccttctcacccttatccccaacatcccagtgctgattacatcttcagccatcacatccatgtttctgataaaatagaggaaagggcagagaagcacacaccctttctggtcagggagacttccagaagtcccctcga

SEQ ID NO: 80521 - DNA, 1712 bp, Homo sapiens
  misc_feature (1)...(1712): n = a,t,c or g
  sig_peptide (13)...(148): this location contains the signal peptide sequence, MYVTLVFRVKGSRLVKPSLCLALLCPAFLVGVVRVAEYRNHWSDV, Run with SignalP
  misc_feature (4)...(354): similar to gi3123896 in the genepept database release 114, Run with FASTXY 3.3t00, default parameters
acctacacagcgatgtacgtgactctcgtgttccgcgtgaagggctcccgcctggtcaaaccctcgctctgcctggccttgctgtgcccggccttcctggtgggcgtggtccgcgtggccgagtaccgaaaccactggtcggacgtgctggctggcttcctgacaggggcggccatcgccacctttttggtcacctgcgttgtgcataactttcagagccggccaccctctggccgaaggctctctccctgggaggacctgggccaagcccccaccatggatagccccctcgaaaagaacccgaggtctgcaggccgcattcgacaccggcacggctcaccccatccaagtcgcagaactgcgcccgccgtggccacctgatccccagctgtgtctcctccagggccccagccatgtgttcgtcgccccgtgtgccccgtcctcgattgaggtctgagccgacgcccttgcccctgcccctacccctgccagcgcccacccccagccagggcccctcgccttcctcccctggacctggggggccagtcgggggtngggtgttggtggccaanagctgctgctgcccacgcccctgctgcgggacctgtacaccctgagtggactctatccctcccccttccaccgggacaacttcagcccttacctgtttgccagccgtgaccacctgctgtgaggcccgaccacccacccagaatctgcccagtccccacttcttccctgccacgcgtgtgtgtgcgtgtgccacgtgagtgccaaagtcccctgccccccaagccagccagacccagacattagaagatggctagaaggacatttaggagacatctgcctctctggccctctgagatatcccgatgggcacaaatggaaggtgcgcacttgcccctactattgcccttttaagggccaaagcttgaccccattggccattgcctggctaatgagaacccctggttctcagaattttaaccaaaaggagttggctccaaccaatgggagccttcccctcacttcttagaatcctcctgcaagagggcaactccagccagtgttcagcgactgaacagccaataggagcccttggtttccagaatttctagagtgggtgggcatgattccagtcaatgggggaccgcccgtgtctaagcatgtgcaaaggagaggagggagatgaggtcattgtttgtcattgagtcttctctcaaaatcagcgagcccagctgtagggtggggggcaggctcccccatggcagggtccttggggtaccccttttcctctcagcccctccctgtgtgcggcctctccacctctcacccactctctcctaatcccctacttaagtagggcttgccccacttcagaggttttggggttcagggtgctgtgtctccccttgcctgtgcccaggtcatcccaaacccttctgttatttattagggctgtgggaagggtttttcttctttttcttggaacctgcccctgttcttcacactgccccccatgcctcagcctcatacagatgtgccatcatggggggcatgggtggagcaaaggggctccctcaccccgggcaggcaaaggcagtgggtagaggaggcactgcccccctttcctgccccctcctcatctttaataaagacctggcttctcatctttaataaagacctgtttgtaccagaaaaaaaaaaaa

SEQ ID NO: 80522 - DNA, 400 bp, Homo sapiens
  misc_feature (1)...(400): n = a,t,c or g
  sig_peptide (238)...(103): this location contains the signal peptide sequence, MLGKVVWLFFYSLMHSAIRFYIGLYSLTYKPEHAAYGQEPAVVNM, Run with SignalP
  misc_feature (400)...(266): similar to gi2224518 in the genepept database release 114, Run with FASTXY 3.3t00, default parameters
gctgagcagagaacttagaccactgagcactccatgaatcagcccattgcctgagggaacagagaacttctttcagtaaataaggatgaagtatatactcatccatgttgaccacagctggctcttgcccgtaagcagcatgttctggcttgtaggttaaactgtacagcccaatatagaacctgatggcagagtgcataaggctatagaagaaaagccaaacgaccttacccagcattttctacagtcacaccccctagggagggagaaaaagagaatggaaaaaaaaaaataaaaataaaaaaaaaaaaaaaaaaaaaanggggggggccgtttaaaaaaaatctttggggggcccaatataaaccgggcgagccaaccaatattttttttcttaagg

SEQ ID NO: 80523 - DNA, 755 bp, Homo sapiens
  sig_peptide (51)...(186): this location contains the signal peptide sequence, MLTCLFSFQGCWRARGWQRLCEGRRGWPGVGQRTLKVSEPAPLRV, Run with SignalP
  misc_feature (27)...(146): similar to gi4982255 in the genepept database release 114, Run with FASTXY 3.3t00, default parameters
caggcaggcaggcaagagaccggcagctggggagccaagcagggctggggatgctcacttgtcttttctccttccagggctgctggagagccagaggctggcagcgactatgtgaaggtaggaggggctggccaggggttggtcagaggacactgaaggtctcagagcctgctccattacgggtgggcagagcccttcctcaagccttgttaggagccagacctcactgtgtattcccaggaggggaggttctcggagtcgaggcagcatttggatccagtttcattctcagcaccttcttcctacaccagccattattctttcctggccccaaactcagggcaacccaatatttgatatcatctgaccccactcacttgccagctggacggggccccaacagtgtctccatgtaaaggatgcagctttccaatcccacccaatctttgtgcacctactgtgtgctggcgctggaagcagggagcaggagaggatgactcagttctttatcacagataatgggcacagctcatatttatcgccagcttcatttatcctgggtactgagaacattgtaatgcacctttcacccttcacggcgtattgtgctttgacgcccgaactttgggaagccaaggaggactattaccttatctcagatgggggaccagtccggacaatcgaaggtcctcttttcttggtaccggcacattgttacccgattgggcggcccgctggttatcctttaatacaac

SEQ ID NO: 80524 - DNA, 764 bp, Homo sapiens
  sig_peptide (54)...(189): this location contains the signal peptide sequence, MQGHRWSLCVSLSSCGAFFFLQGHQPCWISSHYYSLGPPNQFGFH, Run with SignalP
  misc_feature (97)...(291): similar to gi2149415 in the genepept database release 114, Run with FASTXY 3.3t00, default parameters
cccacgcgtccggaccaactgagggaggctgaggaacagagagagacagccacatgcagggacacaggtggtctctctgcgtgtctctgtcttcatgtggtgctttcttcttcttacaaggacatcagccatgctggattagttcccactactactctctgggacccccaaatcagtttggctttcacatattccatcaaagaagagattgctcatttccttgcgaaactgtatacgtccaccgtaatgctatttttcacctctcggtcctttacaaaagggctctggcatcaaagggcagctggcggtggagacggccctcagagcaaggacatcagtgatgtggatcagcggctgcagctgaggagagcggactcagtcccagcccggtgaaggagggacatgaagtctcgggagaggcagctggcagatctagcaggggaccctctaaagtcccatgaaagcccccatgaccaaaaagggcagctctcaactcctgcccggcccatatatctaaagccatctaatgaaaatgcctattaggcaggaactttcctaaatccctttttagcccctatacctgacccctgggccccaaccatgacggggccacacatcaggatcaccacgctcgatcacatctaccccccgaccgcggacatcgcaacactctccagcgagggaccccacgaactcccaacccgcaacgcctcttcttccccccccccacctctaccccaagcgtcacccgcacaacgtcctcc

SEQ ID NO: 80525 - DNA, 412 bp, Homo sapiens
  sig_peptide (173)...(308): this location contains the signal peptide sequence, MFFFLLAFLLTLCFFPYMCIYLLITNIYLRVGRGSLQGNGFLSII, Run with SignalP
  misc_feature (411)...(281): similar to gi3318592 in the genepept database release 114, Run with FASTXY 3.3t00, default parameters
cccacgcgtccgggagaatgccccactacattgattttttgtgcattaagtattgtagcattattttctcatgaggtcatagcctgggacgatgaatcaaattctttaccagcagaccgtgtgggaagaacagccaccagtgaaccaaatacccagacaatatggaaataacatgtttttctttcttcttgccttccttctcaccctttgtttcttcccttatatgtgcatttatttacttataacaaacatttatttaagggtgggtagagggtcattacaaggaaacggattcctatctataataaaaaatctgattctgactgtaaatcttggaaatttctggagagggtagaaaaaaattaatgatggagtgaggggaaatgggtacaatatcaaggccacatatatg

SEQ ID NO: 80526 - DNA, 806 bp, Homo sapiens
  sig_peptide (59)...(194): this location contains the signal peptide sequence, MVYTIYLQYCLIFFPLRMHSLIAFKIKKRRENGIEGDGCSLGSLR, Run with SignalP
  misc_feature (53)...(175): similar to gi5668929 in the genepept database release 114, Run with FASTXY 3.3t00, default parameters
agtccctgtggtggaattcaagagaagagggagcagggagaaggtgaagaaggctatcatggtttacaccatatacctgcaatattgtttgattttttttcctttaagaatgcattcacttattgccttcaaaataaaaaagagaagggagaatggcattgaaggagatggttgttccttaggaagtctaagaatagagtttatatatcactctgaatttcttgatattgtatgtacagttggtgtgtatgtatgttatggggattttgctgaaaatatggtcagtagctttcatcatattctgaaagacaaccactgcttatgccttccaataaggggggtatttctgtctatgaactgggtctttatcaggaagatccggatgctttgcagggacattcagttgagtgttttggtacacagataccatctctccattaatgctgagttaaagcctttatatcttacagacaccaggcctttatcttccttaccagggaattcatatttagcacaggacatgtcaatggttgattgcaggtcagttttataaatatcacaaagcccggaccgcgaatcttgaaacggaattttcctagaaatggaaacaaatgataacttggtatgccccagtgtgggatttaagccccaactggttggaaccaagcccacaccttttcattttctggcagcaccacatttgaatgcgaggagaatacagtagtcccatcctcatccgagaagttccggagaaaccgggtcctaagagcccaaccacagcatcgagtctcaagactaacaggccg

SEQ ID NO: 80527 - DNA, 451 bp, Homo sapiens
  misc_feature (1)...(451): n = a,t,c or g
  sig_peptide (210)...(345): this location contains the signal peptide sequence, MRREATWAGKGLAALLWFLVDFAPNLGMWKATLSLVVGSWPQANC, Run with SignalP
  misc_feature (348)...(218): similar to gi2708522 in the genepept database release 114, Run with FASTXY 3.3t00, default parameters
agaggcgnnnnaatgggatcgatnacattagacagngcggnggaattccaagagaatgctgactacatggggatggtgtactgcttgtccttggcactttgggagcaggatggaaactggtgccatctgaacattttgagttatggccggatgcacacgccggtcttgctaaacaggtgtaccagaagccacaaaattctttatagttgatgagaagggaagccacgtgggctggtaagggcttagcggccctgctctggttcttagtggactttgctcccaacctgggaatgtggaaagcaacgctatcacttgtagtagggagttggccacaggccaactgtgggtttgcccagttcttaccctttcatttttgctatgaccccccccttgactggccctcatcagtgtaaggagtgagcttctatccttgcttatctgcctagcagtc

SEQ ID NO: 80528 - DNA, 379 bp, Homo sapiens
  sig_peptide (44)...(179): this location contains the signal peptide sequence, MMIGPDRKILLLLTLIMNVTVSFITNGKLTDSFWSRVVLTLQHHL, Run with SignalP
  misc_feature (38)...(147): similar to gi5533175 in the genepept database release 114, Run with FASTXY 3.3t00, default parameters
tttatttttccttcgcgcacatgggagaagacacaagtactatatgatgattgggcctgacagaaaaattctactattacttacactgattatgaacgtcactgtctctttcattactaacgggaaattaactgactcattctggagcagggtagtgttaacattgcaacatcacttaggaagcttattaataaacactttcagctgggtttttaaatgagcataataggagcaaaaaatgctttcaaatgataaatatgtgagcatatgagtgcccaccgcgctcacatttatgagtgaatgcttgacctatgcatgatggctgggacactccttagaaccagttgaagtatgctagcttacattctctacactgagg

SEQ ID NO: 80529 - DNA, 2820 bp, Homo sapiens
  sig_peptide (2389)...(2524): this location contains the signal peptide sequence, MPTKLSAVGILVGTLVAIGIFLILIFTHWTMSRKKDPDQPADSVP, Run with SignalP
  misc_feature (1)...(2539): similar to gi3523101 in the genepept database release 114, Run with FASTXY 3.3t00, default parameters
atggtccctgcctggctgtggctgctttgtgtctccgtcccccagtgcccacgcaggaagatagagcctggtgacaaggtgagaatcctcccacaggctctccccaaggcccagcctgcagagctgtctgtggaagttccagaaaactatggtggaaatttccctttatacctgaccaagttgccgctgccccgtgagggggctgaaggccagatcgtgctgtcaggggactcaggcaaggcaactgagggcccatttgctatggatccagattctggcttcctgctggtgaccagggccctggaccgagaggagcaggcagagtaccagctacaggtcaccctggagatgcaggatggacatgtcttgtggggtccacagcctgtgcttgtgcacgtgaaggatgagaatgaccaggtgccccatttctctcaagccatctacagagctcggctgagccggggtaccaggcctggcatccccttcctcttccttgaggcttcagaccgggatgagccaggcacagccaactcggatcttcgattccacatcctgagccaggctccagcccagccttccccagacatgttccagctggagcctcggctgggggctctggccctcagccccaaggggagcaccagccttgaccacgccctggagaggacctaccagctgttggtacaggtcaaggacatgggtgaccaggcctcaggccaccaggccactgccaccgtggaagtctccatcatagagagcacctgggtgtccctagagcctatccacctggcagagaatctcaaagtcctatacccgcaccacatggcccaggtacactggagtgggggtgatgtgcactatcacctggagagccatcccccgggaccctttgaagtgaatgcagagggaaacctctacgtgaccagagagctggacagagaagcccaggctgagtacctgctccaggtgcgggctcagaattcccatggcgaggactatgcggcccctctggagctgcacgtgctggtgatggatgagaatgacaacgtgcctatctgccctccccgtgaccccacagtcagcatccctgagctcagtccaccaggtactgaagtgactagactgtcagcagaggatgcagatgcccccggctcccccaattcccacgttgtgtatcagctcctgagccctgagcctgaggatggggtagaggggagagccttccaggtggaccccacttcaggcagtgtgacgctgggggtgctcccactccgagcaggccagaacatcctgcttctggtgctggccatggacctggcaggcgcagaggggggcttcagcagcacgtgtgaagtcgaagtcgcagtcacagatatcaatgatcacgcccctgagttcatcacttcccagattgggcctataagcctccctgaggatgtggagcccgggactctggtggccatgctaacagccattgatgctgacctcgagcccgccttccgcctcatggattttgccattgagaggggagacacagaagggacttttggcctggattgggagccagactctgggcatgttagactcagactctgcaagaacctcagttatgaggcagctccaagtcatgaggtggtggtggtggtgcagagtgtggcgaagctggtggggccaggcccaggccctggagccaccgccacggtgactgtgctagtggagagagtgatgccaccccccaagttggaccaggagagctacgaggccagtgtccccatcagtgccccagccggctctttcctgctgaccatccagccctccgaccccatcagccgaaccctcaggttctccctagtcaatgactcagagggctggctctgcattgagaaattctccggggaggtgcacaccgcccagtccctgcagggcgcccagcctggggacacctacacggtgcttgtggaggcccaggatacagatgagccgagactgagcgcttctgcacccctggtgatccacttcctaaaggcccctcctgccccagccctgactcttgcccctgtgccctcccaatacctctgcacaccccgccaagaccatggcttgatcgtgagtggacccagcaaggaccccgatctggccagtgggcacggtccctacagcttcacccttggtcccaaccccacggtgcaacgggattggcgcctccagactctcaatggttcccatgcctacctcaccttggccctgcattgggtggagccacgtgaacacataatccccgtggtggtcagccacaatgcccagatgtggcagctcctggttcgagtgatcgtgtgtcgctgcaacgtggaggggcagtgcatgcgcaaggtgggccgcatgaagggcatgcccacgaagctgtcggcagtgggcatccttgtaggcaccctggtagcaataggaatcttcctcatcctcattttcacccactggaccatgtcaaggaagaaggacccggatcaaccagcagacagcgtgcccctgaaggcgactgtctgaatggcccaggcagctctagctgggagcttggcctctggctccatctgagtcccctgggagagagcccagcacccaagatccagcaggggacaggacagagtagaagcccctccatctgccctggggtggaggcaccatcaccatcaccaggcatgtctgcagagcctggacaccaactttatggactgcccatgggagtgctccaaatgtcagggtgtttgcccaataataaagccccagagaactgggctgggccctatgggattggtaaaaaaaaaa

SEQ ID NO: 80530 - DNA, 712 bp, Homo sapiens
  sig_peptide (12)...(147): this location contains the signal peptide sequence, MTTTHVVEFVLFFMFPVLGVAGASWICVDSFYEILMFWPVFSYTF, Run with SignalP
  misc_feature (631)...(609): similar to gi172323 in the genepept database release 114, Run with FASTXY 3.3t00, default parameters
attgaaaatcgatgaccactacccatgtggtggaattcgtgcttttcttcatgtttcctgtgcttggggttgctggagcttcctggatctgtgttgatagtttttatgaaattttgatgttttggccagttttttcctacacattttcttatttttccccaaatccactctcctttgtggacatcaactttgagtatatgaggctttgtgaagcttgccacagctcacaggtcctctgtctccgtttgaggggtctctgtggccgtcttcaagtgaaccgatttcttcttttgcaatggtcactcaccctccaccccaccagatttggtgcggatttatttctgacactgacgctggtatcttcaaactttgattttggcctttctgattttccctggctctatttaatgcgtactctcttccctcttccttcctgaacatccggaacacgatccatatggctgttttaaagcccgtatcttctatttatatagactggaatgcttgtactgcctctgccgtaggccggctgaatatcctctatcctaaaaatatccacgaacgggcgcgaggtggataacctccctccaaaacgcgtaggttcccttgagagagggacaaaacaaagaacagcaagggccctcaccctacggccttggaagccacgcctgactcttgaccaaagtcgcactagccagcaaccacaaagtcc

SEQ ID NO: 80531 - DNA, 1517 bp, Homo sapiens
  sig_peptide (1516)...(1381): this location contains the signal peptide sequence, MEAPAQLLFLLLLWLPDTTGEIVLTQSPATLSLSPGERATLSCRA, Run with SignalP
  misc_feature (1518)...(1168): similar to gi1136571 in the genepept database release 114, Run with FASTXY 3.3t00, default parameters
cctgcttaaaagtttaaaaggaaaaaaacatgtttgtaagtccttctgcctggagtaatttctcttatataaagaagagatcttttcatatgtaatagtgtcctttcgggacagaaatagttgtattatgacacatatgcacaaggattagctctatagcgcgctgtacatggtgggtccagcttgctccccagtagttgtttgagtccagattctttggggtggatcctcttttcagaggagctctagcagagttttttttttttttacaggtgcaaagattcactttatttattcattctcctccaacattagcataattaaagccaaggaggaggaggggggtgaggtgaaagatgagctggaggaccgcaataggggtaggtcccctgtggaaaaagggtcagaggccaaaggatgggagggggtcaggctggaactgaggagcaggtgggggcacttctccctctaacactctcccctgttgaagctctttgtgacgggcgagctcaggccctgatgggtgacttcgcaggcgtagactttgtgtttctcgtagtctgctttgctcagcgtcagggtgctgctgaggctgtaggtgctgtccttgctgtcctgctctgtgacactctcctgggagttacccgattggagggcgttatccaccttccactgtactttggcctctctgggatagaagttattcagcaggcacacaacagaggcagttccagatttcaactgctcatcagatggcgggaagatgaagacagatggtgcagccacagttcgtttgatctccaccttggtccctccgccaaaagtgtaggatgagcccccatattggtgacagaaatacactgcaaaatcttcaggctccagtctgctgatggtgagagtgaagtctgtcccctgacccggtggcactgaaccttgatgggaccccgctttgcaaactggatgaaccagtaaatgagcagtttaggggctttccctggtttctgctggtaccaggctaagtaggtgctgccaatagtctgactggccctgcaggagagggtggctctttcccctggagacaaagacagggtgcctggagcctgcgtcaacacaatttctccggtggtatgtttgatctccaccttggtccctccgccgaaagtggcccccggaggccaattgtcacggtgttgacagtaataaactgcaaaatcttcaggctctaggctgctgatggtgagagtgaagtctgtcccagacccactgccactgaacctggctgggatgccagtggccctgttggatgcatcatagatgaggggcctgggagcctggccaggtttctgttggtaccaggctaagtagctgccaacactctgactggccctgcaggagagggtggctctttcccctggagacaaagacagggtggctggagactgtgtcaacacaatttctccggtggtatctgggagccagagtagcaggaggaagagaagctgagctggggcttccat

SEQ ID NO: 80532 - DNA, 1617 bp, Homo sapiens
  sig_peptide (3)...(138): this location contains the signal peptide sequence, MVMLAALAHHLFYWDVWFIYNVCLAKVKGYRSLSTSQTFYDAYIS, Run with SignalP
  misc_feature (3)...(552): similar to gi5669820 in the genepept database release 114, Run with FASTXY 3.3t00, default parameters
ccatggttatgttggctgccctggctcaccatttgttttactgggatgtttggtttatatataatgtgtgtttagctaaggtaaaaggctacaggtctctttccacatcccaaactttctatgatgcttacatttcttatgacaccaaagatgcctctgttactgactgggtgataaatgagctgcgctaccaccttgaagagagccgagacaaaaacgttctcctttgtctagaggagagggattgggacccgggattggccatcatcgacaacctcatgcagagcatcaaccaaagcaagaaaacagtatttgttttaaccaaaaaatatgcaaaaagctggaactttaaaacagctttttacttggctttgcagaggctaatggatgagaacatggatgtgattatatttatcctgctggagccagtgttacagcattctcagtatttgaggctacggcagcggatctgtaagagctccatcctccagtggcctgacaacccgaaggcagaaggcttgttttggcaaactctgagaaatgtggtcttgactgaaaatgattcacggtataacaatatgtatgtcgattccattaagcaatactaactgacgttaagtcatgatttcgcgccataataaagatgcaaaggaatgacatttctgtattagttatctattgctatgtaacaaattatcccaaaacttagtggtttaaaacaacacatttgctggcccacagtttttgagggtcaggagtccaggcccagcataactgggtcctctgctcagggtgtctcagaggctgcaatgtaggtgttcaccagagacataggcatcactggggtcacactcatgtggttgttttctggattcaattcctcctgggctattggccaaaggctatactcatgtaagccatgcgagcctctcccacaaggcagcttgcttcatcagagctagcaaaaaagagaggttgctagcaagatgaagtcacaatcttttgtaatcgaatcaaaaaagtgatatctcatcactttggccatattctatttgttagaagtaaaccacaggtcccaccagctccatgggagtgaccacctcagtccagggaaaacagctgaagaccaagatggtgagctctgattgcttcagttggtcatcaactattttcccttgactgctgtcctgggatggcctgctatcttgatgatagattgtgaatatcaggaggcagggatcactgtggaccatcttagcagttgacctaacacatcttcttttcaatatctaagaacttttgccactgtgactaatggtcctaatattaagctgttgtttatatttatcatatatctatggctacatggttatattatgctgtggttgcgttcggttttatttacagttgcttttacaaatatttgctgtaacatttgacttctaaggtttagatgccatttaagaactgagatggatagcttttaaagcatcttttacttcttaccattttttaaaagtatgcagctaaattcgaagcttttggtctatattgttaattgccattgctgtaaatcttaaaatgaatgaataaaaatgtttcattttaaaaaaaaaa

SEQ ID NO: 80533 - DNA, 444 bp, Homo sapiens
  misc_feature (1)...(444): n = a,t,c or g
  sig_peptide (250)...(385): this location contains the signal peptide sequence, MPSSFLALACFLFSMGLSASPYCLTTPPRKVSTCFIFKHPKREHL, Run with SignalP
  misc_feature (444)...(146): similar to gi58446 in the genepept database release 114, Run with FASTXY 3.3t00, default parameters
naactgaagcctgacgncagtggcaccggccctgaattcccgnnngannnangcgtccgggaagatgggcttggagaagctctttgcaggtctccatcttctcgtgttccaggtggatcacaaggcatttggccaagactcaggccacaggagaagcagtgccaagagacaggaaggaagtggctctgccctggtgtatccacaaagggcatgcaggcaaaggcccatgctaatctgagtcttggccaaatgccaagctctttcttagctttggcttgcttccttttctctatgggtctctcagcttccccatactgtctcaccactccccccagaaaggtctctacgtgtttcatattcaaacatcccaagagggagcatctgattggttcagtttattgctttgccacaaaaagcccccaggttctgctaaattttcagaaa

SEQ ID NO: 80534 - DNA, 411 bp, Homo sapiens
  sig_peptide (47)...(182): this location contains the signal peptide sequence, MSRSRLRLYLSELLAAFSFLERRSCSFLIPLLLFAVLFGWLFFCK, Run with SignalP
  misc_feature (9)...(78): similar to gi3322513 in the genepept database release 114, Run with FASTXY 3.3t00, default parameters
actagcgaagaggtccgctgaagatcatgagtatctcccaagtgccatgtcacgtagtcgtctcaggctttatttatctgaactcttagctgcattctctttcttggaaagaagatcttgctctttcctaattccccttcttctctttgctgttctctttgggtggctctttttctgcaaggaattggaagttagaatgcccaagcactcatggctgtgtctcctacatcactctgccctatgttttacttggaaacagtcatttgttttaagaaatagtcttttcaccaaatttatctattgagacatttcatcagtcctatagaggagaaatcaaaggtcagcattatcattgcctggtctaaatttgtaactccccagtcttgcaaaattttggagtttaactattta

SEQ ID NO: 80535 - DNA, 398 bp, Homo sapiens
  sig_peptide (109)...(244): this location contains the signal peptide sequence, MLLGLALISVHLLVFSPFIFSCLVYHLNILYLSHLLIDLFSCPIE, Run with SignalP
  misc_feature (76)...(195): similar to gi2896985 in the genepept database release 114, Run with FASTXY 3.3t00, default parameters
caatatagccctacaagcttttttatgcttagtgtttgcatgatatacctatataactttttctgtccttttgctttcaacctatttgtgcctgtatatgtaaacagcatgttgttgggtcttgctttaatctctgtacacttattagtgtttagtccatttatatttagttgtttagtctaccatcttaatattttgtatttgtcccatctcttaattgaccttttttcctgcccaatagaacaacaggatacacagcaaggaaagcaagccctctccataaggacagatgtagaaatctaggaaatgccattctttgtgctccctggggcacaaatctaatacatcataaataaggcactctagagtgggcaccatgccagccctgactgtttgtg

SEQ ID NO: 80536 - DNA, 398 bp, Homo sapiens
  misc_feature (1)...(398): n = a,t,c or g
  sig_peptide (58)...(193): this location contains the signal peptide sequence, MSFPYSFLGATLKVKLTWATFRVPLFSLNSHSFSSSLALPFMSYL, Run with SignalP
  misc_feature (157)...(252): similar to gi1498235 in the genepept database release 114, Run with FASTXY 3.3t00, default parameters
ntctaatctgttccccacattatacctttgtctcctttctaaagagggaatcatagcatgtccttcccctactcatttttaggggcgactttaaaggtaaagctcacctgggctacattccgcgtacctcttttcagcctcaactctcactcattttcctcaagccttgccctaccattcatgagctacttgatgtttcctaatcttaaatctcctttctcctctccctgcccttcctttctactcccattttacctgattaattccatatcatctctcaagacctaattatagccttttatgattcccattcgtgcaacctgggttaggagtccctcttgagcgagtgatttcttagtatcctgtgtatacctctactctagcacctattgcactat

SEQ ID NO: 80537 - DNA, 659 bp, Homo sapiens
  sig_peptide (68)...(203): this location contains the signal peptide sequence, MGRGSELPVCLAFLVCLMAALGCCEVLSTVHPEETVLRAPPTNFQ, Run with SignalP
  misc_feature (237)...(291): similar to gi4092530 in the genepept database release 114, Run with FASTXY 3.3t00, default parameters
tttcgtctgggatttgagccaagtcttccaacttcacaatagcagagtaagaagagctgccttgttgatgggacgtgggtcggagctcccagtgtgtcttgccttcctggtgtgcttgatggcagccctgggctgctgtgaggtcctgagcacagtgcatcctgaggagacagtgctgcgggccccgcctactaacttccagagatgtcagctgcagcagggcagcgccctggttagagagacggcatggggagttggcagggggaggccctcggagagatggcatggggagttggcagggggaggctctcggagagatggcatggaggggttggggcctgtgctcctaggtgcttaggcttgcaggtgactggaatcctgactaatatcataagaggagagttcttactaacaaattacttgaacaaagactttgtttgtgccttcattcgttcagcacatgtttacagtgtgcctgtgatgtcccaggcgcactgccctattcttgacatccttgtggtgggatcaactgcttgcctgtccatagcgcaggccattactagaggtgttttctggggggcgaacaccgttcttttgcagtgaataccggggacaaggcccgtcttgtgatgacccaaccgtgggttttcaaacacaag

SEQ ID NO: 80538 - DNA, 450 bp, Homo sapiens
  sig_peptide (34)...(169): this location contains the signal peptide sequence, MNKHFLFLFLLYCLIAAVTSLQCITCHLRTRTDRCRRGFGVCTAQ, Run with SignalP
  misc_feature (76)...(319): similar to gi298488 in the genepept database release 114, Run with FASTXY 3.3t00, default parameters
tgtttgaactttcgacccacgcgtccgctcaggatgaacaaacacttcttgttcctcttcctcctttactgcctcattgcggcagtgacatcacttcagtgcataacatgccaccttcgcacacggacagaccgctgtagaagaggctttggtgtctgtactgctcagaagggcgaggcatgcatgctcttaaggatttaccagcgcaatactctccagatatcatacatggtgtgtcagaaattctgcagagacatgacatttgatctcaggaatcggacttatgttcatacatgctgcaactacaattactgtaactttaaactctaagatatttgccctcctgaggtctcgctttggaatgtccccaatgttgctcatccttcacactctgctggcccttgcttcccttccgtgtctgtcctgacaatacccctgccctcgcattaa

SEQ ID NO: 80539 - DNA, 406 bp, Homo sapiens
  misc_feature (1)...(406): n = a,t,c or g
  sig_peptide (75)...(210): this location contains the signal peptide sequence, MIQPCQPCWSCALWNVLISCLSYECVCICSSYPGLTNLRSPVYKR, Run with SignalP
  misc_feature (30)...(121): similar to gi1296429 in the genepept database release 114, Run with FASTXY 3.3t00, default parameters
cagaaaacaagttttagggaggaaaaacctgccattatgcttgtttcagtcctcctcctctaccttttgggcttatgatccagccatgccaaccatgttggtcttgcgctctgtggaatgtcctgatttcatgtctttcttatgagtgtgtttgtatttgcagttcctatcctggactcaccaacctcagatctcctgtttacaaaaggctgatttgtttatctacatgccagagctctgagtaggctgtgtaaatggaagatgctctaaggcacaacccttttctcattcttattgagaatcctgaaaacatcttaaagattgtgtatgatacccatgccaaattctctcttctactctctatgtaaatttttaataatttttttcattgtactttttgttcatn

SEQ ID NO: 80540 - DNA, 1044 bp, Homo sapiens
  misc_feature (1)...(1044): n = a,t,c or g
  sig_peptide (242)...(377): this location contains the signal peptide sequence, MNVVSLVILFWAIYCVTICMDLYLKHFCKKFFKVFFKCVIICAFK, Run with SignalP
  misc_feature (266)...(416): similar to gi4154959 in the genepept database release 114, Run with FASTXY 3.3t00, default parameters
ctactgtgcacctgaaaacagcactcattttcactaacaagacatgcaagctagaatcaaattgctgttttgttttgttgcctgtcatgattgttagctgaaaccaaatcacaaggtcttttctccctctgtattatctcagcatacactgagcttgcaaacatatgaatttcacattgtcgtggaatcttacagcctgctacttcctaagttttctttagacaagctgccttggtgaccaatgaatgtggttagcctagtgatactcttctgggccatatactgtgtgactatctgcatggacctttatttaaagcatttctgcaaaaaattttttaaagttttttttaaatgtgtgataatttgtgcttttaaaagtatcttacacttttcacttatttgtacctttaaaaaaatctttttttttttttaaaccaaaggtttgcagtatcttcaaagtctgaattttgagcggatagggatgagccacctaaatcccctgaaaatttgcctgccctcaggggttaacttttttgctgcaatcacaaagtaggttatttacgctttcttgatgggagttattaaaaaaattttaatttagtgtcatcaagaatggaaagagggtaaaatttctttgaaattagtaacattataaaaggccaggcttgggggttgacacctgtaatctaaccattttggaaggttgaggtggaaggattgcttgaggccggaaattaaaagaccgccctgcccaacatggggagaccttattctacaataaaaaaaaaggggcgccctttaagagataaattttttgcccggggtgcaaggtaaacttttttatggggcccaaaaaaaatctcgggccgcgtttcaacgggggggcgggggaaangtctgccncgttgtctctactctctgttccgcactcacgcttcatacattcctagacgcccgcgcaagcaaagctcctccacttacttcgccttgtcaacatccgatcgccgctgacattgttacctacctcacgcaccgactccacca

SEQ ID NO: 80541 - DNA, 402 bp, Homo sapiens
  sig_peptide (54)...(189): this location contains the signal peptide sequence, MFLSASFLLALLVLHLFGGKVRRTRELGRCFENIVTKALLNDAQK, Run with SignalP
  misc_feature (9)...(108): similar to gi600040 in the genepept database release 114, Run with FASTXY 3.3t00, default parameters
gcaattccaactttcatgtgacgtatttcccctttttattgttgctgatttccatgtttctgtcagcaagttttcttctcgccttgcttgttcttcacttgtttggtggcaaagttcgtagaactagggaacttggaagatgctttgaaaacattgtcacaaaggcactgctaaatgatgcacagaagtggccagtgggaagaagtgatcccaaggacctgacactggttttcaacaacatctcagaaaactcgtcaagtggattgggtgccacgccagtgaacacaatgttttgatttaattatttttaaaagttgatgtggtgatggtgtggcttcccgaaatgggcagatattcaagtcagaagagcttttgcattttctcctgccaggaatgggggag

SEQ ID NO: 80542 - DNA, 398 bp, Homo sapiens
  sig_peptide (76)...(211): this location contains the signal peptide sequence, MQPRHKSFSFSPWPIWLALCSPPWRHCLSTMLGPSAVPEGFRPLS, Run with SignalP
  misc_feature (178)...(222): similar to gi2829296 in the genepept database release 114, Run with FASTXY 3.3t00, default parameters
tggtatatctgcttttctggccctgaaacctcctgtctacacacctggctgtgtcaataggacctgcctctcctaatgcagcctagacacaagtccttttccttctctccttggcctatttggttagcgttgtgctcgccaccctggcgccactgtctgtctaccatgcttgggccatctgcagtccctgagggcttccggccgctttcttcacagcttcccctttctcttctgagtgtctcttggttctagctgagggcctgcttctcacatctgcccatctctgttgaaaagactagtatttacccacatttctttattacattagtatgtcacaacaacccacacatttacgctttttcctctgcatatttacatttgagtctgtgaaatctaca

SEQ ID NO: 80543 - DNA, 1328 bp, Homo sapiens
  misc_feature (1)...(1328): n = a,t,c or g
  sig_peptide (410)...(545): this location contains the signal peptide sequence, MYLSNTTVTILANLVPFTLTLISFLLLICSLCKHLKKMQLHGKGS, Run with SignalP
  misc_feature (152)...(553): similar to gi1176401 in the genepept database release 114, Run with FASTXY 3.3t00, default parameters
cgttcgacccacgcgtccgctcctttgctgaccaaattctcactgctctggcggtctccagagttggtttgctctgggtattattattaaactggtattcaactgtgttgaatccagcttttaatagttagaagtaagaactactgcttataatatctgggcagtgatcaaccatttcagcaactggcttgctactaccctcagcatattttatttgctcaagattgccaatttctccaactttatttttcttcacttaaagaggagagttaagagtgtcattctggtgatgttgttggggcctttgctatttttggcttgtcatctttttgtgataaacatgaatgagattgtgcggacaaaagaatttgaaggaaacatgacttggaagatcaaactgaggagtgcaatgtacctttcaaatacaacagtaaccatcctagcaaacttagttcccttcactctgaccctgatatcttttctgctgttaatctgttctctgtgtaaacatctcaaaaagatgcagctccatggcaaaggatctcaagatcccagcatgaaggtccacataaaagctttgcaaactgtgacctcctttcttctgttatgtgccatttactttctgtccatgatcatatcagtttgtaattttgggaggctggaaaagcaacctgtcttcatgttctgccaagctattatattcagctatccttcaacccacccattcatcctgattttgggaaacaagaagctaaagcagatttttctttcagttttgcggcatgtgaggtactgggtgaaagacagaagccttcgtctccatagattcacaagaggggcattgtgtgtcttctagcagaaaacaaactggtggtgtatgaaacattttatatttcttactgggttttctgtaatatatgtatatgaataatttccacatgtatacctagaaaagtcttttacctaaagttagtctacaaaagtacatatatatagatggctgtggtgtgaccgtgtgtgcacatatgtgaatgtgtatatatcacgcaacaggagtgtcattcatgctgctggcccctggtgaagtgacaagtacaattaaaggtggctctgatccttttaaacacctaccaaaccctaaatttgattccaaaaggaccattctgcaaagagtttgcaaagatctgggcccacttgtgagcaccaacctttaaacatgatgcgccagtctcccaggaggccctactcattcccctacataactatttgatggccccacccctaccanccccgcttccccccacctgaaaaaagcaggccacagaagc

SEQ ID NO: 80544 - DNA, 804 bp, Homo sapiens
  sig_peptide (154)...(289): this location contains the signal peptide sequence, MHQLFGLFVTLMFASVGGGLGGIILVLCLLDPCALWHWVAPSSMV, Run with SignalP
  misc_feature (133)...(229): similar to gi5901804 in the genepept database release 114, Run with FASTXY 3.3t00, default parameters
tcactgtggtggaattcgccatgagcagccctggccccgggctgcatccctctctctccctacccctgcctttcctctatctggtctccctgcagcctggagagtgtgtttccactcatagccgagggccagcgcagtgccacgtcacaggccatgcaccagctcttcgggctgtttgtcacactgatgtttgcctctgtgggcgggggccttggaggcatcatattggtcttatgcctcctagacccctgtgccctgtggcactgggtggcaccctcctccatggtggggggcagagaagcctcgcagatcctcccctaccaccaccagggctcctgctgaagctaccctttctggactcccccccagactcccagcgctacgaggaccaagttcactggcaggtgcctggcgagcatgaggataaagcccagagacctctgagggtggaggaggcagacactcaggcctaacccactgccagcccctgagaggacacgctccttttcgaagatgctgactggctgcctactaggaagttctttttgagctccccattccctcccagctgcaagaagggagcccatgagcccagaaggaggcccctttccacaggcagcgtctccacagggagaggggcaacaggaggctgggaaatggtggggagtggggccgtaactgggtaccatagggggaaacctcaacaaatgcccaacccgactgggcctaaccagcctgcacatggggtaaaaaaaggccaaattgagggcacccaagtgaatccactggcccccacgtcaacat

SEQ ID NO: 80545 - DNA, 413 bp, Homo sapiens
  sig_peptide (126)...(261): this location contains the signal peptide sequence, MLWLLRWLIARLLEAWLARADSHVAFWQMPVASLTSAAPLIRLPH, Run with SignalP
  misc_feature (126)...(248): similar to gi5106163 in the genepept database release 114, Run with FASTXY 3.3t00, default parameters
aaaaactgcaattacttttgcgtgaacttgatacctctgatgtatgggaccccccctaccaggacttgcaaaatggaatctgagagccctttgctgccccagtgcacacttgcttgagtgggtggatgctgtggctgctgagatggctcatagctcgtctgctagaggcgtggttggctcgggctgacagccatgtggcattttggcaaatgccagttgcttccctcaccagtgctgctcccttaatcaggttgcctcacctgtctgagcttggagaccatgcttgtctccttggatctttgtgagggctaaagagaacatgttaggtgctactgcagcacctggcacgtagaggatgccccattggtattggcctgtccattccccaaatcatctcctgaggattttttgtt

SEQ ID NO: 80546 - DNA, 532 bp, Homo sapiens
  sig_peptide (202)...(337): this location contains the signal peptide sequence, MMLMSLGGLLGPPLSGFLRDETGDFTASFLLSGSLILSGSFIYIG, Run with SignalP
  misc_feature (97)...(335): similar to gi1086783 in the genepept database release 114, Run with FASTXY 3.3t00, default parameters
aactgatgtcattagtccatgcggtggaattcggaggtggggctggtgcccgtggtgggcggcgaagagagctgggggggtcccctgctggccgcggctgtggcctatgggctgagcgcggggagttacgccccgctggttttcggtgtactccccgggctggtgggcgtcggaggtgtggtgcaggccacagggctggtgatgatgctgatgagcctcggggggctcctgggccctcccctgtcaggcttcctaagggatgagacaggagacttcaccgcctctttcctcctgtctggttctttgatcctctccggcagcttcatctacatagggttgcccagggcgctgccctcctgtggtccagcctcccctccagccacgcctcccccagagacgggggagctgcttcccgctccccaggcagtcttgctgtccccaggaggccctggctccactctggacaccacttgttgattattttcttgtttgagcccctcccccaataaagaatttttatcgggttttaaaa

SEQ ID NO: 80547 - DNA, 1139 bp, Homo sapiens
  misc_feature (1)...(1139): n = a,t,c or g
  sig_peptide (309)...(444): this location contains the signal peptide sequence, MLSFISATCLLLCLNLFVAQVHWHTRDAMESDLLWTYYLNWCSDI, Run with SignalP
  misc_feature (141)...(380): similar to gi6002805 in the genepept database release 114, Run with FASTXY 3.3t00, default parameters
catagaggactgacgnctgtgcgcnccggncttgaagtcccgggtccacccacgcgtcggacaaattccgtggcagttagagaactaactgccaagatggagcgaagggaacatttaaccttgactttccacagtcctgaggttcccaaaataaaggggaaccggaaataccaaaggattatctccaatattccagggccttctttctcatctctgtctttaccatacttactggccttggctggctcttcagctcttggatccttaatcgaggaagcatgaccaccaacttggatctgaaggtatccatgctcagcttcatctcagctacctgcttgctcctctgcctcaacctgtttgtggcacaggttcactggcatactagggatgccatggagtcagatctcctatggacctattatcttaactggtgcagtgacatcttttacatgtttgctgggatcatctctcttctcaactacttaacttccagatcgcctgcctgtgatgaaaacgtcactgtgattccaacagagagatcaaggctgggggttggtccggtgactacagtatcacctgctaaagatgaagggccaaggtctgagatggaatctctaagtgtgagagagaaaaatttaccaaagtcaggactgtggtggtgataggaaaacctaactatagcttgtcttaaaagcaggggagaagctgagttgggaatggtcacataaattctgggaaactctcctaatatcatgtccatattacttgaggagacagcattaaagctgatgaaatgtcttttgcgtgcattggatccaaaatatatatgatagtcataaagtaaataactcacttaagaaaaacatttctaaaagaaaacaacaatgtttagagtcatgaatgaaagaaactagtgaaagatgcagtgtgtagaccagagacctctttgggtatcagggatctcatggaccagaatggcccgtggagaagaatgttaattacttctgtttggaattttctttattatgtgtggctttgggtatactcaggatggaaagcacttggacaaatactgttgaatctgaacttaatagcattaccagaaatggaataaatatcaatggatataagacctaaaa

SEQ ID NO: 80548 - DNA, 416 bp, Homo sapiens
  misc_feature (1)...(416): n = a,t,c or g
  sig_peptide (208)...(343): this location contains the signal peptide sequence, MSLITLGHIQLLHFFASIYQEVSRCHFNWISLIAGLNMFSYVHRS, Run with SignalP
  misc_feature (35)...(151): similar to gi2690057 in the genepept database release 114, Run with FASTXY 3.3t00, default parameters
ccccacgcgtccggcattttgctaaacatgatgcagtgtaaagaaacttattaatctttgttgcctacatgtccaagatttctctagggaacacatatacatggaattaatgggtcagggagagtgttctttttctgctttaggagacggttcttttcaggatggttgcacttcctgttgcagtgataagagtgccgctcttgtcccatgtctttgataacacttggtcacatccaacttttacatttttttgccagtatatatcaagaggtgtctcgttgtcattttaactggatatctctaatcgcgggcttgaatatgttttcatatgttcacaggagctccttgagttttctttcctgtgaattgccctcttacccttttctcattattctggcggagtgcctatctttatn

SEQ ID NO: 80549 - DNA, 614 bp, Homo sapiens
  misc_feature (1)...(614): n = a,t,c or g
  sig_peptide (40)...(175): this location contains the signal peptide sequence, MYVYALFPFLMTQFLPTCFFCLFGFILLLDIFFKCLVIFGLLLIL, Run with SignalP
  misc_feature (13)...(159): similar to gi967238 in the genepept database release 114, Run with FASTXY 3.3t00, default parameters
tttgtgtataagtctatatatgtatgtgtatgtatatatatgtatgtgtatgctttgttccctttcctgatgactcagtttcttcccacttgctttttctgtttgtttggcttcattcttttgttagatattttctttaaatgtttggtgatctttggcctactcctgatacttttaaaggggggggcactaaaaagcaaattggaagctctctgtgcatgtaatgtcctctgtctgggccattttcttaggaatattactgtcttttctcttgggctggtcatattttccagaaatggcttttcttgcctggaagacacaatcgtttctgctagtggtctaggagcagagtaagaataagattgagagtcttaatactcaaagtgatactttcatttaatctccatatttagtatcaatacaggacctctgccttcagctattcctgttgtctgcaagtctagaaacttttccctctnctaataacacacttgtagtagagtgcccagggttggggttgcttaactgctgcaagtcaaggaaggacaactgggagaatctcacgggcttcccaccccagactggcggatgaaaccttttctctttttaagccc

SEQ ID NO: 80550 - DNA, 957 bp, Homo sapiens
  sig_peptide (72)...(207): this location contains the signal peptide sequence, MFLEHAIHCSLLFLSQLPLLPPLVFLLLSHLLSEVPLIQQPPSLS, Run with SignalP
  misc_feature (39)...(180): similar to gi1490352 in the genepept database release 114, Run with FASTXY 3.3t00, default parameters
cgttcctctctgactctgtcatcttcaccctcctaccttccaccctctgtgccagcctcactggcttgctcatgttccttgagcacgctatacactgttccctgctgtttcttagccagctccctctcctccctcctttagtttttttgctcttgtctcatctgctcagtgaggtccccctcatacagcagcctccatccctgtctccatatcctgatctgctctctcccttttctgtaacacggttaccttctaacatactatgtaattaattctttatttattatctgtgttcctcactggagtgtaagtgtgacaggtacagggactgctgcctctgctgttcatcagtgtatcccaagcacttagaatagtaccagccacatggtgtatctctaacacatgtttgtagatgaatgaataaatgatttgctgtaatgtttcacgtgcatgaccatttttctcaggggattttatactgagtgtttttaagtatccctctcattcttgagattttgccgttctgattctgtctggtccataacccacatagttgcaaaacagacaggttttcatgaatcaattaatatagcaaacctttttgcatgtgtgtgtgattctataatttccctaacacaggagaatccagctttggcgggtgcaattaaaacatgtaaaaactgtacttcggacagcgtgagagagaaatttcttcaagaagcctgtaagtgtctagaaatttctgtggaactccatttgactttctatctgtgaaatccaaactgtctctgaagaaataagaaaaatagtggtttgacttttacgagacaactatgtttattattttgcccttgcacattaaatggctaaatttggccaagcccctatctccagaattttccaggtacccctcatgtttatgtgcacagcaaaaggagggcctttgctcatacttcg

SEQ ID NO: 80551 - DNA, 865 bp, Homo sapiens
  sig_peptide (114)...(249): this location contains the signal peptide sequence, MLSVSDRRQYITEGSRTWLAFTMMPFLLWLFYFISCWFSHPGKQM, Run with SignalP
  misc_feature (1)...(110): similar to gi2245471 in the genepept database release 114, Run with FASTXY 3.3t00, default parameters
cccagggtcaggccagcatcagaggcagggtctataccaaggccagcaaactttttctgtaaagggccagcaagtaaacattttaggctttgtggaccacgtggtctctgccaatgttgagtgtaagtgaccgcagacagtacatcactgagggcagtagaacatggcttgcttttaccatgatgccttttcttttgtggcttttctatttcatctcctgctggttctcccaccctggcaaacagatgtgggcttctcttgtagctcttctccatgagcaagctgagacttttctctctggaccccagatttgatatcaggctgaaaatatttcctccatggtgttccgtaaaattctagccgaacaaccttagcatcacattcacagaaatcatcatagtgttctggtttcagcgctccagacacgcctccctgcagccttagtcagagaagcctcggattttagctggttttcccgaggtctctgttactgccattctgcccttggaggctttctagaaacctcttttttccccatgccaaaccccccctctaggttctctttttttggttctgctatctggatgaactatttttttctaataatttttaccctgtggaagaagggatatgcatgaaaatcccgttttggcaagaatctttctggtctgggcacaaaaactggctgggggggagaattttaaatggtggggaagggcctgcccccccggggacccccttttttaccccaaatgggggggaaggccaattggcctcccgtaaggttggggggcccccttttcctttttcttaagccaacccttttagagggggtaaccccttttaaaaaggaggttttctggtt

SEQ ID NO: 80552 - DNA, 399 bp, Homo sapiens
  sig_peptide (16)...(151): this location contains the signal peptide sequence, MPGSATWLCPACPTLACPLPAQPLIMVPGSPQTGLAEAPKTHNRH, Run with SignalP
  misc_feature (19)...(115): similar to gi726048 in the genepept database release 114, Run with FASTXY 3.3t00, default parameters
cagggcccacagcagatgccaggcagtgccacatggctttgccctgcttgccccaccctggcctgtccactcccagcccagcctctgatcatggttccaggctcaccacagacagggctggcagaggctcccaagactcacaatagacacttaatgaatatttgtggaatgaatgaaggaattcttactgccgaggcctgaggtagcaggcaagttgctcagagggtcagatcttggtttgaatgaatgaatgaatgaatgaatgaacgagtgaatgaatgaatgaataaaggaatgaatgttctccagagtctgaaactatctatctggaaggactaacctccaaccaaccccactctccctaagctctggcactgaattcactggaaactttgccaa

SEQ ID NO: 80553 - DNA, 871 bp, Homo sapiens
  misc_feature (1)...(871): n = a,t,c or g
  sig_peptide (47)...(182): this location contains the signal peptide sequence, MYFGAYAFTVAPRLAILQVVNVISYKDIRHFYLRHWRNERNCICH, Run with SignalP
  misc_feature (134)...(186): similar to gi1673644 in the genepept database release 114, Run with FASTXY 3.3t00, default parameters
cggacgcgtggggttttcagtaaacatttgtcacacaaatgaacgtatgtattttggagcttatgcttttactgtggcacctaggcttgccatacttcaggtggtcaatgttatttcttacaaagacataaggcatttctatttgaggcattggagaaatgagaggaattgcatttgccatgttgatggtgcgctaatcaaagagcagtgagggcggagcaacggaggaagtgaaatgactgagtgaaccctggaggtgtgaaaggcttctccacccgacggtgggtgacatcagggcttgtgacgtttgcagttgaataactgaaggcagtagcaagtgggtagagtgggatggctcgcctgcggaatctggcatccgaggaaatcgccttgacaccttcctttcatggccgtgattacacttgtgctaaggttagggggaacagagccaggttcatctctgatatgaaaagggaagagcgattttgggggaagggaactagtctgggaaccttttggctaaattttagtcactttttaatctgtttaatatgctngccacggcgggtgctgtggctcaccccgtaatcccagcactttgggaggccaaggtggatggatcatttgagtcccggagttcgagatcggcctgggcaacatggcgaaaccctctctctataaaaataaataaataatacagaacattacccagaccttggaaggggtcccatgccttctgagtcccaggagggtgagctgtgcttgaccatgagggcatcactggcttctagctggggcaacagaagcagaccttatttgaacaaaaaaaaaaagaggcggcctcttaaggacccagtttaaagcccggcgc

SEQ ID NO: 80554 - DNA, 407 bp, Homo sapiens
  sig_peptide (60)...(195): this location contains the signal peptide sequence, MLLATSLPLPAHDFRHKDTLLEPTLLALFWVLHVTHLFPSTSIST, Run with SignalP
  misc_feature (60)...(215): similar to gi3834491 in the genepept database release 114, Run with FASTXY 3.3t00, default parameters
cagaggaccttctctcaacaagattctccacttgtgaactccagcccttcttcctatctatgcttcttgccacttctcttcctttaccagcccatgatttcagacataaggataccctgttggagcccacattacttgcccttttttgggtcctacatgttactcacctgtttccctccacttccatctctacctattatattcccttcatttttcagcatccaggtaaaatgatatttcctctaagaagcactttgtagtccaccaattaaggtagatttctcccactcctgtgacccatgaaaattttattgtactagctataataatctgacttatattgaacttagctatttatgaggttttctcaagctcactgtaatctccacaaaggtagccaccatgat

SEQ ID NO: 80555 - DNA, 419 bp, Homo sapiens
  sig_peptide (123)...(258): this location contains the signal peptide sequence, MVSLEFKRLRFPMLFAFGMLSPQSNRCPKIVHFPSRKGEKKSVEE, Run with SignalP
  misc_feature (5)...(115): similar to gi220696 in the genepept database release 114, Run with FASTXY 3.3t00, default parameters
cggacgcgtggggttccccagcaaggggatctataccgtttttcttcccagctcttgcttgctgtgtctggaaaacacatttgaaaggcgagaggtttgcattcgagagaggctggggcttgatggtgtccctggagtttaaaaggctgaggtttccaatgctatttgctttcgggatgttgagccctcagagtaacagatgccctaaaattgtacattttccatctagaaaaggggaaaaaaaatctgtagaagaatggattatgaaaaacaaatctaccctccaagaaggtggtcaacaaaacagcgtgactgagaccttcactcagaaattccacgatagcagacgtcacctttctcatgttcgtattttgttgtagaagacatttgggtgaatcattgacagtctttttttatag

SEQ ID NO: 80556 - DNA, 408 bp, Homo sapiens
  sig_peptide (7)...(142): this location contains the signal peptide sequence, MISIICSQLYLINTCWCVNRTRILNCQIYYILILFPCKYVKYLVE, Run with SignalP
  misc_feature (49)...(157): similar to gi1620170 in the genepept database release 114, Run with FASTXY 3.3t00, default parameters
ctttgcatgatttccattatttgtagccaactttatttgattaatacatgctggtgtgtcaatagaactaggatattaaattgtcaaatatactatattctgatcctctttccttgcaaatatgtaaaatatttagtagaaatgagatgtttatgctcttcaaacacacaaattattcttcagtctggaaagttacagtgatttctttattgaaccaactgtggttaattacgtagagtgacaaggaaattatttcaatattcagggtattatttctttatctcagtataagaatatatctagtatagtagcattactaatgaataagaccgttctgtttatgtgccaggttgtaaactaggtgcataatcctcatttaattatcagaataatggtgtgaaagtacta

SEQ ID NO: 80557 - DNA, 853 bp, Homo sapiens
  sig_peptide (208)...(343): this location contains the signal peptide sequence, MLLFYSIPFKGMVFLFEHVLLILEHTIKGEFLEILFYNSVYLDSA, Run with SignalP
  misc_feature (64)...(143): similar to gi4104826 in the genepept database release 114, Run with FASTXY 3.3t00, default parameters
aaaatattcaagtacattggcataactgataaagtataacaactatatttacactttatgtagtattcttgggtgactcagtacattaaaggaggctcatgtagcatttactttatatttttaaacaggggattattgtatgtttggatggtacaggatacgcacatgactcttcagtattcatatgtacccatctcattcagaaggatgttactcttctacagtataccattcaaaggcatggttttcctatttgaacatgttttactcattctagaacacacaatcaaaggagagtttttagaaatacttttctacaattctgtctatttagattcagctactaaaaccatcgtgcccatattgagatgctgagctgttgtttattacagcctatggattgcaggcaccattcagactgtgacatggggataatgcttacattttaaacatttttttgtggaaaatgtacaggatagtactgatgaggatgctcctttaaacaggccaggatcatacggaaggtaggacggcctttagaaacaatagagttgacttatttacatattttaaatactttcatgttgcatcacacagttaccatacagcagaaataattttcaatctaatgggctagggaatagcacttagaaacagtaaatagaaaccaaggtaagtcatgcttaactatcataaattttaaaatgaaaatattgagatatttaaggagcataaatgcagtatttttagaataattcatttctgactctaaaactggacttctgtattgccaatagcataacaaatttttgtagcgcggacaataaggagttttgttttcttgacattttat

SEQ ID NO: 80558 - DNA, 400 bp, Homo sapiens
  sig_peptide (253)...(388): this location contains the signal peptide sequence, MEQPVREMIPPLVIFPKSSLKWVSSFWLLLVPWCCHLHCPPLPLF, Run with SignalP
  misc_feature (92)...(180): similar to gi191854 in the genepept database release 114, Run with FASTXY 3.3t00, default parameters
ctggtcagtgtcccgcattgccagtcttcttggattccaggcctgtattttgaggcataagccccttttcccaatgttggtgttctgccaatggatagaacttaatccttatttatgccccctagttactcatggagacactgaggatgtttatctgcctttcagacctcctgggccctgaagggaaaaaactctgggttcttctgaagcttttagtgcgtagttcttcttttcctactaaattgtttccgtatggaacaaccagtgcgggagatgattccacctcttgtcatctttcctaagtcttccttgaagtgggtaagttccttctggctgttactggttccttggtgctgccacctccactgccccccactcccccttttttatagatacctag

SEQ ID NO: 80559 - DNA, 636 bp, Homo sapiens
  sig_peptide (16)...(151): this location contains the signal peptide sequence, MHVCMPLCLFLLSFSVSPDPRLLRMERLFRGCAQDCPFLALHQGE, Run with SignalP
  misc_feature (2)...(53): similar to gi854065 in the genepept database release 114, Run with FASTXY 3.3t00, default parameters
tgtgtgtgcctgcatatgcatgtgtgtatgcctttgtgcctgtttttgctctctttctccgtctcaccagaccctagattgttgaggatggagagactgtttcggggatgtgcccaggactgcccatttctcgccttgcatcagggagaactttggtgaggtgttggatctggctgcttctggggcaggctgctggctgcctgagcattaacagtcgtttcccaacccccaggttttctggttcacaaaattcctcaagctgggtcaatcctggtctctgggaagcttcagagctggcacctccccctttctaccctgcatgtccaaaaaggcactggcatgggagccctgtcacacttccttcagttatatctactttttaattataagagcgacatgtggccaggcacagtggcacaaatctgtaattccagcactttggaggccaagaccggcagattgcttgagtccaggggtttgagaccagcctaggcaacatggcgaaatcctgtctactaaaaacataaaaaactagccaggtgtggtgaggcacgcctatagtcccagctactccggaagctgaggggggagaatcccctgagctcagaagcccaggttgagagacccaaattgtca

SEQ ID NO: 80560 - DNA, 996 bp, Homo sapiens
  sig_peptide (135)...(270): this location contains the signal peptide sequence, MSNLQFIFKDFGILIKFWYLHIKFGFYITSCLLCFPPSFMLFFGF, Run with SignalP
  misc_feature (132)...(276): similar to gi4378776 in the genepept database release 114, Run with FASTXY 3.3t00, default parameters
cgttgtcagattatctttccctaaaggaataatttctattcctatcagctgtttatattcctgcctagtcaccatcactagatataattgattttcagtttttgccaatctgaggaacaaaaaatgacccttatatgtcaaatttacagtttattttcaaggattttgggattctgatcaaattttggtaccttcatataaaatttggcttttatatcacatcttgtcttctctgctttccaccctcttttatgttgttttttggcttctggccgcatgactataatctccgcttttgtattcacatcaccttctgtcatttttgaccttgcctccgtcttacaaggatccttgtaattaattatattgggcctgctgagataatccaggatattcttcctactcaagttcctcaatttaatcacatctgcaaaaactgccttttgctatagaacaatgacaggagattagaatgtaaacatatttgggggaccgttattcagcttaacacaatacgtcccccttcatcaggtggagcttattttccctccttccttgagtgtgggctggacttagtgactaacttccaaagaacagagtatggaaagggaggaggagagtaacttcatagtacagaaacctggaaacactgtcttggccaggtggtcaaagttaatatcatcaagtcatgttgatagcatatactcccaatatactgtgatgagaagggcaattcacctctgtggtattctcaaaacctataacccaatctagtctaaacatgaaaaaaaaaaaatcaaactaaaattgaaggacattctataaaacacctgatcagtattcctcaaaactatcaacgtcgtggggaacaaggaaagattgaaatactgtaacagaccagaggaaactaaggaaacttaattgatgactgaatgcagtgtgctgtgttgaactggatcctagagaaaatagacattagtggaaaaactactgaaa

SEQ ID NO: 80561 - DNA, 408 bp, Homo sapiens
  sig_peptide (5)...(140): this location contains the signal peptide sequence, MLPVLLLMLVRVSVGQALPLFLFLGGNTSPYMSQGNWPFSTYKPL, Run with SignalP
  misc_feature (9)...(54): similar to gi1707068 in the genepept database release 114, Run with FASTXY 3.3t00, default parameters
caaaatgttgccagtattgctgctcatgcttgtgcgtgtttctgtggggcaggcgcttcctttgtttttgtttttggggggaaacacaagtccgtacatgagccaagggaactggcccttctctacttacaagccactagacaggtattttgtttctggagcccttaggatatacaggtacatggtgacctgtgctgacaactacttgacattttctctttctgtagtactggttctctctccctgcttttgtctatttctgaaatgtgaatggcacacagaaaacttgaagtacacagcctaaagtaccatattgttatttggttccagcaagggataacttgccattttctaaagttttttcaaaataaatttggaacatataggtagagagtttgcgaattccac

SEQ ID NO: 80562 - DNA, 636 bp, Homo sapiens
  sig_peptide (159)...(294): this location contains the signal peptide sequence, MVFSPYCLLSTDILFNLPSYLFIIYLYLPTLCAPEGRALICCGHC, Run with SignalP
  misc_feature (90)...(267): similar to gi3738201 in the genepept database release 114, Run with FASTXY 3.3t00, default parameters
atttgctccttggcctgatggactaccccagcctctgctgaagcctcccttattcccttccccacccaccatggtggcgctgaggcaggctcactgagtctgcagtcagcatcctggctgttgtgaattactcacctccattcaggcactccctctctatggtattttctccatattgcttattatcaactgacatactatttaatttacctagctatttgtttattatctatctctatctcccaacattatgtgcaccagaaggcagggctttaatctgctgcggtcactgctgtttccttagtgcctggcacaaagtgagaatttaataaatatttgttaacttggagaatgaatgagcttctgtagaaccaggtaccattgatttctttacaattcctagccgttaaaacagtgctctgattgtagggggtgctcagcaagtagtcactgatacttcagcttaagacagattactgatatggagaggtggagacccatcggactgtttttgaaacattgctatgctgaggggtgaacataacctggccccttagaaatatccgacccttaagaaggtttggcctctctggcccaagcatgggaggggcccccatctgggctccactttgagta

SEQ ID NO: 80563 - DNA, 637 bp, Homo sapiens
  sig_peptide (339)...(204): this location contains the signal peptide sequence, MMVTVIWLSLKLFVCRGENTCMPMLWEGFDVYLILGEEEVHTFSV, Run with SignalP
  misc_feature (46)...(140): similar to gi2072774 in the genepept database release 114, Run with FASTXY 3.3t00, default parameters
cacagactcggtgcacacagaaaagcaggtgctggtccacagtctcgtcccacttacatggtaatggctaaggaatctttgttgatctttcctttttcttctttgtacttgatcaaatgtatatcaagtgaagctgtaaaatatgtggtttcaagtagattgctcaaagaggataaaagactgcccatgactccttcatgtccgacagaaaatgtgtgcacttcttcctctcccagaatcaaatatacatcaaacccttcccatagcatgggcatgcaggtgttctcacctctgcacacaaacagcttgaggctcagccaaataaccgtaaccatcatgtctctgctttgctggggttcactatgtccctggccaagcccctcttccctgtactaagataaggcccatgtgacaaaaccgggactcctggccctgaggttcaccctcctctaccaagagcaaatcttggagctttgggcatcccaaaccaatcttcctggagtctcactctggtggccacgccggaaggccatagcaccgatttagatcaccgccgctctggccttttggtttaagcatttttcctgcctttcttcccgtgtgggtgggatacgggctcccaccggacccctggcct

SEQ ID NO: 80564 - DNA, 413 bp, Homo sapiens
  misc_feature (1)...(413): n = a,t,c or g
  sig_peptide (255)...(390): this location contains the signal peptide sequence, MLWKAHFSLVTASVWPGSHTWRVSLWGRTGHWADGIIYIXKGTRF, Run with SignalP
  misc_feature (354)...(265): similar to gi4007684 in the genepept database release 114, Run with FASTXY 3.3t00, default parameters
ctttcacatacatatagtccatggctgttttcttgcagagttgagtagttgtaaaagagacttatgtggcccacgggccaaaaatatttactatctgggcctgtacaggaaacgtttgctgactgttgccgtggcagatctgatttgattcctgagacagctcaatgggatactgtgattgtgtctgttttataccacacacctagtaggtagcagagccaggactcagtcgaataaggtctacacttggtagtatgttatggaaggcccatttcagccttgttactgccagtgtgtggccaggttctcacacctggagagtgagtctgtggggaagaactggccactgggctgatggaataatatacattntgaaaggtacccgttttgactacattcccagctccctcagg

SEQ ID NO: 80565 - DNA, 884 bp, Homo sapiens
  sig_peptide (135)...(270): this location contains the signal peptide sequence, MITIAPWLMERWVTVCITLGALGNLGRSGIFYQLGLRGPPAGPWR, Run with SignalP
  misc_feature (24)...(194): similar to gi172655 in the genepept database release 114, Run with FASTXY 3.3t00, default parameters
accacacctggccccttgcaaagttattgagaggatcaaataataagagggcggaaaggggagacggtgtggtgtctgaggaagaaaacaaaaggaatcgaataaaagcaaaaggatttgttttaggcagaacaatgataacaattgctccttggttgatggagaggtgggtcacagtctgcatcacccttggcgcccttggaaacttaggtaggtctggcattttctatcagttgggtctgcgaggaccacctgctggtccttggcggggctcatgagagtgagatggagaaggtgaaaggacccagcaaactagagtgtcaggtggcctctgtgtgtggctttcagtcgtcatcagtctgtggctccctcatttggacctcttgagagcccagattggaggcatcagccattgctgctggccccacatccagatcacactgagtgcaactgtctcctcctccccacacacacacatcgtcttcctctacgtcaccggcatctcccgtctggccatatcccaatgtatatggcctttcccatcaggcagcctgagggatcctgttgaaatggagccaggatttgtcatgccactgcctaacaccatgcaatcatgtctcattttgctcggaagaaagttccgacttcttacctggcctacttacaagtggccccttgtcctttccacgccagccttgcctcttgcttcccgaaggggaacaatgcttgaccctgtctcacaaacattgatactgctgacccccctgctcataaaagtctatctgcaaaaccctgggactactcttttctgtccctcttaactaggaacccaccccctcagaaaaccgttccggccagtcggccctcccaagctggtctttttc

SEQ ID NO: 80566 - DNA, 887 bp, Homo sapiens
  sig_peptide (431)...(566): this location contains the signal peptide sequence, MFWTMIILLQVLIPISLYVSIEIVKLGQIYFIQSDVDFYNEKMDS, Run with SignalP
  misc_feature (11)...(643): similar to gi2895095 in the genepept database release 114, Run with FASTXY 3.3t00, default parameters
agaacaggactctgaagttgatcctgagaagttttccagtaggatagaatgtgaaagcccaaacaatgacctcagcagattccgaggcttcctagaacattccaacaaagaacgcgtgggtctcagtaaagaaaatttgttgcttagaggatgcaccattagaaacacagaggctgttgtgggcattgtggtttatgcaggccatgaaaccaaagcaatgctgaacaacagtgggccacggtataagcgcagcaaattagaaagaagagcaaacacagatgtcctctggtgtgtcatgcttctggtcataatgtgcttaactggcgcagtaggtcatggaatctggctgagcaggtatgaaaagatgcattttttcaatgttcccgagcctgatggacatatcatatcaccactgttggcaggattttatatgttttggaccatgatcattttgttacaggtcttgattcctatttctctctatgtttccatcgaaattgtgaagcttggacaaatatatttcattcaaagtgatgtggatttctacaatgaaaaaatggattctattgttcagtgccgagccctgaacatcgccgaggatctgggacagattcagtacctcttttccgataagacaggaaccctcactgagaataagatggtttttcgaagatggagtgggggcagatttgattactgccctggagaaaaggcccggagggtggagtcctttcaggaagctgcctttgaagaagagcattttttaaccacaggcaggggtttccttacgcatatggccaacccgagagcccccccacttgcagacacatttaaaatgggggcctctgggagattaagccctccaagcctcacggctcggggggcct

SEQ ID NO: 80567 - DNA, 407 bp, Homo sapiens
  sig_peptide (129)...(264): this location contains the signal peptide sequence, MLVCLIVHHSPPYTLFTFIHYFFLLLLGLGTFNCPIFKFTCSSAC, Run with SignalP
  misc_feature (21)...(191): similar to gi557280 in the genepept database release 114, Run with FASTXY 3.3t00, default parameters
atttcccataaaatgtgggcagtgttctaccattatttcttcaaataagctatctccttttctctctttctttgtgtctcttcatcttgctctctttgttttgctcctctgagactctgaaaatatgtatgttagtctgcttgatagtgcaccacagccccccttatactttgtttacttttattcattattttttcttactgctcctgggattgggcactttcaattgccctatctttaagttcacttgttcttctgcctgctccaatttgctgttgaaaccatctagtgaaattttcacttcagccattgtattttttaagtatcaaaaattttgtttggctactttttgtaatttctacctctttgttcgtagtccctgcttgtttatacatcattctcctgat

SEQ ID NO: 80568 - DNA, 998 bp, Homo sapiens
  sig_peptide (826)...(691): this location contains the signal peptide sequence, MFLQLLLATLQSGRKKCSCSYCTSNPQGGKYAFFSGVRLGLASKM, Run with SignalP
  misc_feature (863)...(792): similar to gi43705 in the genepept database release 114, Run with FASTXY 3.3t00, default parameters
caccggctgcaaggccctgcttcattcacagaaacgctggctcgctcgctagcctttttattcacacaaacagcatttcattcacattttgcggtttttgtctgcatctaatgaagatctcgctttgggaatgatagggctgtttcgctacagatctggggaggactctgataaccatcaaaatcatctatggggtgtgcaattgctgttgctatgcaagctagggaaagggaacaaatgagtgccgtgtagctgttctgctagggctgcggcacaggaggcgagccgtggggacgcgtttcctgtaccggggacgccgcggctcctctgcgctcttgcgtcctaggggttggcctcacccgctcgcccgccatgagtggcgctcattaaactctgctccatagagcagggttcaagactcaggacctcacgtgccccacatgttcggtcatgggagtgagaggactcagggtgacctgagagtgtgctagagctgaatttattcgcttgctcagaagttgcgggaaaactttgatagtgagtgtttcactgtggagcaggtgatcctaatgcatgaggaagcctggcagagcccactgaggtcaagagtcagagggcttcagtctcgggcagacctctggggacagcgaaagccttgctctcctaactgagaggaagaaggcctgtgcattttacttgcaagcccgagcctgactcctgaaaagaaggcatattttcctccttgtggatttgatgtgcaataagaacagctgcattttttccttcctgactgcagggttgcaagcagcaactgaaggaacattgaaatgtatttgtagcatttcttaggcgtttttccagagcttaaacacattcagtaggattaaagcttcaaatgcagccccttttttggaatggatttctggagcctgttgccactcgtgaaagaagcactcttcttttttggaagtggatattcgaattccaccgcagtggac

SEQ ID NO: 80569 - DNA, 2040 bp, Homo sapiens
  sig_peptide (1197)...(1062): this location contains the signal peptide sequence, MVLPVAGKAVLFCSVSGEGWMRPLPSSPPRLRPALSLGHSAGRGL, Run with SignalP
  misc_feature (2041)...(1687): similar to gi4140326 in the genepept database release 114, Run with FASTXY 3.3t00, default parameters
ttttttttttttctacaagtcttgtttattgaaaggatctgaaaagcgtaataaggctttcaatgacatttaatacattttcaagaaattaatatgaaacattaaaatttacttcaaaaatccaaagttttctagatcattcccatctcacgctgctttagaggtcagttcacaccttctgtgttcagatgagcggctggaattctgaacactgccgtcttccagccctaacgctgggcgctggtccctctctcctaagcccacggctgggcttcccctgtgcccagggtcatggcggacttcaagccaggccggctgcccagaatcacactcagggtttttggacgctcaagtccacagatgctgaggtgcccagacgagggtgagcagggagacacatgcctcggagaacgtgcccaggctgggccaggcggctgcgggaagctcctcacgggcagaggagaacgtcttgtgccttccttatcgatctccagcagatgagggcaacttcgtgtgcaaaactcagagagcagttactcaaaaaaaagacacccgggcagcagtaaccaggacaccagggtccgaccacggcctccacacacctgtgcccgtggaagacgcgggcgccggggtaggcagcatccacgtgctccacagctgctggtgctgggcaggctggagactcacgggagaggcaggaggagaatcagcgtgttgagtccctcgctgtgttagtgtgaaaaattctcattacagttgcaaataaaagggatcacgatcactagccccggaaaccctcatctcccggaccatcaggatcgcactgaacagaatggtcccctaatggtccctgaggacagcgtcttgcagaacataaatgtaaacattgaatggcagacgactcccttccccttgaaatcttcacaaaagtgtgtacgagaaagtatgtacatcagcacttcagaaagtttaaaagagtctctaaaaagtatatacaggatttaaactaccttcctgggagcagaagctacgtgaggaatgtgtgggtcgctggcgatgccagcccccttcccgctgagtgtcccagactcagtgctggcctcaagcggggagggctggatggcaggggacgcatccaaccctctccagaaactgagcagaacaaaaccgccttgccagccactggcaagaccatgctttcaatggcgcctccgccaggggcttccctgcagaagttttaggggaagaggtgcaggtcaaggggaaaagcatggcagctcaaggaaggtttttggctgagacatttattatcaacattgaaggacaggtcgagtcattctgactcctctgaatttcaaccgactgatttgcggaaaaatatcctggcatggaaattgcggcagctggaggccgcgctccagggacccaccgcggggtgtcagcaggacagaagcactcccagcccatttctcacgcttctttagaaatgcaaaaaaagtcagacattttaaaaaaacagctgatctggacaaaaggcagacccaggctctaacccagctacagaaaggaagtggccgtgccactgagacaggcggtcacagacacacgcagattggtctgtccccagagggcgcttggagggcagcggaaggattcgggcctggataggggcttgacctagccctcctcctcctcctcctcctcctcctcctcgaagtgggcttgcttcttccggacgttccaatgcaggcactgggcgaggctctcaaaccagtcgctcacggggtcccgcacacagatggaggggagtgggtagcatgaggtagtgatgctgatgctgtctccatggcggatctcttgtctcttccgtccatcaaaggacacccatgctgtgttccttgcttcaggtgacagcatgatcttcagctcgacccctgcggggaccacgatgggccggaaggacagcgagtgggggcagatgggcgtgatcatgatggccggcacgttggggtggatcatggaggccccggcctcggccgc

SEQ ID NO: 80570 - DNA, 857 bp, Homo sapiens
  sig_peptide (191)...(326): this location contains the signal peptide sequence, MTAGVLWGLFGVLGFTGVALLLYALFHKISGESSATNEPRGASRP, Run with SignalP
  misc_feature (50)...(169): similar to gi476170 in the genepept database release 114, Run with FASTXY 3.3t00, default parameters
acaagcgccgcccacgcgtccggagttatctgttttcaaaaaattctcagatttccttatccaaagtgcagttttaagtgacagtggtaactatttctgtagtaccaaaggacaactctttctctgggataaaacttcaaatatagtaaagataaaagtccaaggacctgatggctatagaagagacctcatgacagctggagttctctggggactgtttggtgtccttggtttcactggtgttgctttgctgttgtatgccttgttccacaagatatcaggagaaagttctgccactaatgaacccagaggggcttccaggccaaatcctcaagagttcacctattcaagcccaaccccagacatggaggagctgcagccagtgtatgtcaatgtgggctctgtagatgtggatgtggtttattctcaggtctggagcatgcagcagccagaaagctcagcaaacatcaggacacttctggagaacaaggactcccaagtcatctactcttctgtgaagaaatcataacacttggaggaatcagaagggaagatcaacagcaaggatggggcatcattaagacttgctataaaaccttatgaaaatgcttgaggcttatcacctgccacagccagaacgtgcctcaggaggcacctcctgtcatttttgtcctgatgatgtttcttctccaatatcttcttttacctatcaatattcattgaactgctgctacatccagacactgtgcaaataaattatttctgctaccttctcttaagcaatcagtgtgtaaagatttgagggaagaatgaataagagataccagggctcaccttcatctactgcgaagggaggt

SEQ ID NO: 80571 - DNA, 452 bp, Homo sapiens
  misc_feature (1)...(452): n = a,t,c or g
  sig_peptide (32)...(167): this location contains the signal peptide sequence, MLGRGYFIHRRELRSILILICLAAGNFIKIGIFSPWHLETTILLN, Run with SignalP
  misc_feature (29)...(109): similar to gi5533187 in the genepept database release 114, Run with FASTXY 3.3t00, default parameters
aatagataacgctatgancttgactaacgtcatgcttggacgagggtactttatacatagaagggaactgagaagtatcttgattttaatttgtttagcagctggaaattttataaagatagggatcttttcaccttggcacttagaaacaactatcctgttaaaccataacagacaatatgcactaaatcatgagatgacaacacgcctaactcaaatgcttttgctgcttgctgatgttaaaagtagcagtttagtcccttcaccaaaaatttaaccatagctaattaaatgcatattatcatacaatatagtatggcttttgtctgttttattttgttcagttcaagaagagattgggaagatggttagcaaaaataaactatatttggtatatgaatatgtttgcgatgaatgggaatttactacatatggaatagtttcattttgag

SEQ ID NO: 80572 - DNA, 2093 bp, Homo sapiens
  sig_peptide (1304)...(1169): this location contains the signal peptide sequence, MTLCCPWATMHPSTVLRMVWSLRSRARRWGSVRTGLSWSSSSDSR, Run with SignalP
  misc_feature (381)...(1352): similar to gi3878000 in the genepept database release 114, Run with FASTXY 3.3t00, default parameters
cgagctccaagttgcaggccctcttcgcccacccgctgtacaacgtcccggaggagccgcctctcctgggagccgaggactcgctcctggccagccaggaggcgctgcggtattaccggaggaaggtggcccgctggaacaggcgacacaagatgtacagagagcagatgaaccttacctccctggaccccccactgcagctccgactcgaggccagctgggtccagttccacctgggtattaaccgccatgggctctactcccggtccagccctgttgtcagcaaacttctgcaagacatgaggcactttcccaccatcagtgctgattacagtcaagatgagaaagccttgctgggggcatgtgactgcacccagattgtgaaacccagtggggtccacctcaagctggtgctgaggttctcggatttcgggaaggccatgttcaaacccatgagacagcagcgagatgaggagacaccagtggacttcttctacttcattgactttcagagacacaatgctgagatcgcagctttccatctggacaggattctggacttccgacgggtgccgccaacagtggggaggatagtaaatgtcaccaaggaaatcctagaggtcaccaagaatgaaatcctgcagagtgttttctttgtctctccagcgagcaacgtgtgcttcttcgccaagtgtccatacatgtgcaagacggagtatgctgtctgtggcaaaccacacctgctggagggttccctctctgccttcctgccgtccctcaacctggcccccaggctgtctgtgcccaacccctggatccgctcctacacactggcaggaaaagaggagtgggaggtcaatcccctttactgtgacacagtgaaacagatctacccgtacaacaacagccagcggctcctcaatgtcatcgacatggccatcttcgacttcttgatagggaatatggaccggcaccattatgagatgttcaccaagttcggggatgatgggttccttattcaccttgacaacgccagagggttcggacgacactcccatgatgaaatctccatcctctcgcctctctcccagtgctgcatgataaaaaagaaaacacttttgcacctgcagctgctggcccaagctgactacagactcagcgatgtgatgcgagaatcactgctggaagaccagctcagccctgtcctcactgaaccccacctccttgccctggatcgaaggctccaaaccatcctaaggacagtggaggggtgcatagtggcccatggacagcagagtgtcatagtcgacggcccagtggaacagtcggccccagactctggccaggctaacttgacaagctaagggctggcagagtccagtttcagaaaatacgcctggagccagagcagtcgactcgagtgccgaccctgcgtcctcactcccacctgttactgctgggagtcaagtcagctaggaaggaagcaggacattttctcaaacagcaagtggggcccatggaactgaatctttactccttggtgcaccgcttctgtcgtgcgttgccttgctccgtttttcccaaaaagcactggcttcatcaaggccaccgacgatctcctgagtgcactgggaaatctgggtataggtcaggcttggcagccttgatcccaggagagtactaatggtaacaagtcaaataaaaggacatcaagtggatacctgacttctcaggatccttattctagctacaagtcaaagataactcctggtccagacaaaacacctggcctatcacaagctgactaaaaatctgcactttgggccagcgcaggcaacagtaactctgacaggttcaaattagacctcacactttctactcatattctagtcactggacccatctgaatcagtaatccctactgcccggtcctggagtaacttcttagagatattataacaagtggcaaaaataaaagagggatttgctaagaatatcagaaaaggagtgttccaatttgaagagtattacaattgaaataacatcaaatatgtcacactaagcagccagtaacagaataaataattacaacg

SEQ ID NO: 80573 - DNA, 1273 bp, Homo sapiens
  sig_peptide (514)...(649): this location contains the signal peptide sequence, MSSSPGLLFSSLSHLLLNSSTLALLTHRLSQMTCLQSLRLNRNSI, Run with SignalP
  misc_feature (508)...(887): similar to gi3335110 in the genepept database release 114, Run with FASTXY 3.3t00, default parameters
tcacactctacaagtgctagctattgctattctcctctcctgcctaggctgggggcctctagaagtacaatcgcctgggtcacatatggttggggctcaggaatgggagttctatagtttttggttctgttcctgaagcagccactttgtgtatgaccttaagcaagttctctaactctctgaaccttggagttcctcacctgtaaaatggggacgataataaacccacctttccagatggccccaagccctgagtttggcccacattttatgatcaatgtgtgaccgccattattacggatcattagtcttggtccatgtggttcagaacatagaactgctgcctgcctgacctcagtaattcatgcagagaaacagcatttggacctcccagtacagttcattttgtagaatttttacactgtgtggatataagtggctgtcttggaggtccctaggcttgctaagcacagaggcctcagacccccagactggacagtgccccacccccagatgtcaagttcacctggcctcctcttctccagcctcagtcaccttctgctgaacagctccaccttggccttgcttactcacagactaagccagatgacctgcctgcagagcctcagactgaacaggaacagtatcggtgatgtcggttgctgccacctttctgaggctctcagggctgccaccagcctagaggagctggacttgagccacaaccagattggagacgctggtgaccagcacttagctaccatcctgcctgggctgccagagctcaggaagatagacctctcagggaatagcatcagctcagccgggggagtgcagttggcagagtctctcgttctttgcaggcgcctggaggagttgatgcttggctgcaatgccctgggggatcccacagccctggggctggctcaggagctgccccagcacctgagggtcctacacctaccattcagccatctgggcccagatggggccctgagcctggcccaggacctggatggatccccccatttggaagagatcagcttggcggaaaacaacctggctggaggggtcctgcgtttctgtatggagctcccgctgctcagacagatagagctgtcctggaatctcctcggggatgaggcagctgccgagctggcccaggtgctgccgcagatgggccggctgaagagagtggagtatgaggggccgggggaggaatgggacgggctaaagggggacctacatcccgggaacaccaagaggccactgg

SEQ ID NO: 80574 - DNA, 631 bp, Homo sapiens
  misc_feature (1)...(631): n = a,t,c or g
  sig_peptide (33)...(168): this location contains the signal peptide sequence, MVLSVPVIALGATLGTATSILALCGVTCLCRHMHPKKGLLPRDQD, Run with SignalP
  misc_feature (62)...(180): similar to gi2960130 in the genepept database release 114, Run with FASTXY 3.3t00, default parameters
tttcgtccagcccctcgccgggagcgggcaccatggtgctgtcggtgcctgtgatcgcgctgggcgccacgctgggcacagccaccagcatcctcgcgttgtgcggggtcacctgcctgtgtcggcacatgcaccccaagaaggggctgctgccgcgggaccaggaccccgacctggagaaggcgaagcccagcttgctcgggtctgcacaacggttcaatgttaaaaagtccacggaacctgttcagccccgtgccctcctcaagttcccagacatctatggacccaggccagctgtgacggctccagaggtcatcaactatgcagactattcactgaggtctacggaggagcccactgcacctgccagcccccaacccccgaatgacagtcgcctcaagaggcaggtcacagaggagctgttcatcctccctcagaatggtgtggtggaggatgtctgtgtcatggagacctggaacccacagaaggctggcagttggaaccaggcccccaaactccactactgcctggactatgactgtcataaggcagaatgtttgtgactcgcctggaagctgtgaccagcatccacgacggatgctgtgactggtacgtnctaaggaggtggcca

SEQ ID NO: 80575 - DNA, 2549 bp, Homo sapiens; identical to SEQ ID NO: 80486
  sig_peptide (1528)...(1393): this location contains the signal peptide sequence, MSDISPLLYEIWLGDTSAGFFTFCVTVLHVLLLLSSVLHFLCPRD, Run with SignalP
  misc_feature (1871)...(1707): similar to gi214636 in the genepept database release 114, Run with FASTXY 3.3t00, default parameters

SEQ ID NO: 80576 - DNA, 866 bp, Homo sapiens
  sig_peptide (289)...(424): this location contains the signal peptide sequence, MPCTTILRIWTPFPALLFGPHCQFTPVGIFILEGGNCSNREARDF, Run with SignalP
  misc_feature (17)...(76): similar to gi4210381 in the genepept database release 114, Run with FASTXY 3.3t00, default parameters
ttcttgattgtcgaactcaagtgttgattgtaaaaatttcgtttccctccaaatttggacttgtaattgccattcattatctcagcagccaaccacctttacaaaaatgttgataccagtcttctgtgagcacccaccttcttagggtgtgttgatttccatagattttactcctcttgttatttccataggtgtgagatgcacaatgcgaaacctaggccccagcttttacaccatgatgcgcagggttgtactttttgtactgaactgataggtggcctagtggttatgccctgtactaccattttgaggatctggactccgtttcctgccttgctctttggaccacattgtcaattcacaccggtgggtatattcattttggagggtgggaactgcagcaacagggaagccagagacttccttctccttggtcaccaccaaaaccaacacttccaaaatttcagcctagccacattcctcaaggaaccggttagagctggttgcagtagtgggttctgaacacttattaacataagaaattacttacagcttttttaagagaaatttttacagatgctaatattgaaatcatttgcgttctacacccctttgtataaaggttaaacattcagttactattaatttggataccccaatttgtagagatgctaaactttttaaagccttaaaagccttgtggaaaaactggacttcccttgaactggtattgggtccctagaaatgaactgggggtgtggtttagagggaccccttctacactttgagaggtggagatagacaacccaacaacaacttaaggcttttcgacgggggggtcaccaagactccgcacccctgtactc

SEQ ID NO: 80577 - DNA, 497 bp, Homo sapiens
  misc_feature (1)...(497): n = a,t,c or g
  sig_peptide (250)...(385): this location contains the signal peptide sequence, MSRGHRSAAGRAAQRLHLLLLLSNVFRREGWNLFPSCPGAIPVPS, Run with SignalP
  misc_feature (473)...(357): similar to gi3323395 in the genepept database release 114, Run with FASTXY 3.3t00, default parameters
gcggccatgatnatgatagcgtacgcacgagcgaccggnccggaattccggggacgacgggaggcaggagggcgttcctgctgcggaggacacactgctgagtcattgaacccctctcggtgttcggccctcccccccagacttgggggactgctctcccatgtctctccagggagaccgctcatgggtcagaggaaggaaacagatggaactgaataggtctgttctctgagatgcccgggaggggtgatgtccaggggacacaggtcagcagctgggagggctgctcagaggcttcatctacttttgctcttaagcaacgttttcaggagggagggctggaatctgttcccctcctgcccgggcgccattccagttccatcccttctgccctctgcatggctgcacaagacccttgagccctttcctacacgcccgccccttcatccctccaagacccaactgccctggtattttctgtgggggagcctcctccn

SEQ ID NO: 80578 - DNA, 348 bp, Homo sapiens
  sig_peptide (198)...(333): this location contains the signal peptide sequence, MPLILAFIKLFNKCLECFVSTRGIECYRSFGSRHQAAYNQGSKNQ, Run with SignalP
  misc_feature (13)...(118): similar to gi3953464 in the genepept database release 114, Run with FASTXY 3.3t00, default parameters
ggtggctgcagggaaagaaaaaaacagattgctaccttcagatgtttgaggtacaacattttcttgattggcgtagcacaatcatttcccaaactgcttcctatttctgaatggcttttttaaaaagctttattttgtgttctcaaagcttaattattttaagtgacgaagagtgttaccgtgttgtaaaatagcatatgcctcttattttggccttcatcaaactgtttaataaatgtttagagtgttttgtaagtacacgtggaatagagtgttacagaagttttggttccagacatcaggcagcttataatcaaggttccaaaaatcaagaattcttaagctggg

SEQ ID NO: 80579 - DNA, 404 bp, Homo sapiens
  sig_peptide (49)...(184): this location contains the signal peptide sequence, MKFLICLRSHFPFFFNSAIEMCFSKLKIFKIACNMNFTSYISTFF, Run with SignalP
  misc_feature (40)...(186): similar to gi606881 in the genepept database release 114, Run with FASTXY 3.3t00, default parameters
cttgaagaaaaatatgtggctgttatgaagaaattacagtttggtaagatgaaatttttgatttgcttaagatctcactttccatttttttttaacagtgctattgaaatgtgttttagcaaattaaagatttttaaaattgcttgtaacatgaattttacttcatacatatcaacattttttatcatctttgcctcttgaatttatggctgtatttttagttataaactgtgacttcaatagaaggactgtaagagcctagaaaaaataaatccaagccaagtgtctacaaaacaggcagaaaatgtttttccttatttacctcttcatttctgtacatcctggcctgaaggaagccaagacccagaactttgaactaagtctgttactcttgccattttaga

SEQ ID NO: 80580 - DNA, 533 bp, Homo sapiens
  sig_peptide (93)...(228): this location contains the signal peptide sequence, MMKSLRVLLVILWLQLSWVWSQQKEVEQNSGPLSVPEGAIASLNC, Run with SignalP
  misc_feature (66)...(527): similar to gi3821889 in the genepept database release 114, Run with FASTXY 3.3t00, default parameters
ctttttatgatttttaaagtagaaatatccattccaggtgcattttttaagggtttaaaatttgaatcctcagtgaaccagggcagagaagaatgatgaaatccttgagagttttactagtgatcctgtggcttcagttgagctgggtttggagccaacagaaggaggtggagcagaattctggacccctcagtgttccagagggagccattgcctctctcaactgcacttacagtgaccgaggttcccagtccttcttctggtacagacaatattctgggaaaagccctgagttgataatgtccatatactccaatggtgacaaagaagatggaaggtttacagcacagctcaataaagccagccagtatgtttctctgctcatcagagactcccagcccagtgattcagccacctacctctgtgccgattattcaggaaacacacctcttgtctttggaaagggcacaagactttctgtgattgcaaatatccagaaccctgaccctgccctgtaccagctgagagactct

SEQ ID NO: 80581 - DNA, 423 bp, Homo sapiens
  misc_feature (1)...(423): n = a,t,c or g
  sig_peptide (95)...(230): this location contains the signal peptide sequence, MRKRERNAEWRTGFWHSFLSLLVLPVIKNPSVWTQCPFMAWQESS, Run with SignalP
  misc_feature (8)...(71): similar to gi1019071 in the genepept database release 114, Run with FASTXY 3.3t00, default parameters
aagtagggaaaagggacagcactcaggtgggaaactcagaggtttagctgtcactgggagacagccaaatgggagaggaagggaaaggtggaaaatgagaaagagagaaaggaatgcagaatggagaacggggttttggcattcttttctgtccttacttgttctacctgtgataaagaacccatcagtttggacacagtgtcccttcatggcctggcaagaatcctcagtaggacacaacctcctacgtgggagtggtgattcagaggaaacacatggtgaggataattaatttggaggttgaccatgttctgtgtgggtgtttacctctttcagaacatgtagctgaaagttcagcgtgtactattgaaaagctttcttgcaacgntgctggcttgtctttgtcttgagactaaagcatcc

SEQ ID NO: 80582 - DNA, 850 bp, Homo sapiens
  sig_peptide (227)...(362): this location contains the signal peptide sequence, MFQGSNILFLLPSPGITSINDRTYFLFVMRSNWLFLLTCLIAFQK, Run with SignalP
  misc_feature (75)...(148): similar to gi146962 in the genepept database release 114, Run with FASTXY 3.3t00, default parameters
aaacattttgaatacttacaattggttattttccaggaaatattgggaccttgccttgaaatttagtatggtttatgacttggtttatgacaccagacagaagctacagatatgaatcctctaaccacctgttcctattttcctacccttcattaatttgacttttgacttttgataaagttatcacatattaaaatatacgtgggtgctaagccttatactgtgaatgttccagggttcaaatattttatttttactgccttccccaggcattacctccataaatgatagaacatactttctttttgtcatgagaagtaattggttgtttcttttaacctgtctcattgcattccagaaaaataataaatctttaaaattattaaaataatgagcaacagttatagacattgttgggttaaccttgggagtccaaagctcatcctaagaggaattaataatatatctttttttttttgggcccaggcgggggggctaaggcctgaaaccccagcacttgggaagcccaaggcagggggataacctgaggccaggagttcaaaaccagccggaccaacagggggaaccccggtttttactaaaaatacaaaatttagcggggcgggggggctggcgcctataacccccgctcctcagggggctggggcagaaaaaccgttggaccccgggaagggggggtgtcacggaccccaaaccggcccttggactcaagccgggggagacgaacgggacccctcccaaaaaaaaaaaagggggggcccttaaggggaaccattgtaccgcggcggcggggggatgagccttttaagggcaccaaaccccgggcggc

SEQ ID NO: 80583 - DNA, 355 bp, Homo sapiens
  sig_peptide (95)...(230): this location contains the signal peptide sequence, MRDYLVFSLCVLLWFRAVIFGLLKDSISELLSGGELCGPCLAHSI, Run with SignalP
  misc_feature (158)...(243): similar to gi531162 in the genepept database release 114, Run with FASTXY 3.3t00, default parameters
ccactgctcaggaattttcagggacaaacctgcttgctagtggatggcaagttcttagatggctgagattgcagcctctgactccctcatttagatgagagattaccttgtgttttccctctgtgtgctgctctggttcagagctgtaatcttcggacttttgaaggacagcattagtgagttattaagtggaggtgaactctgcgggccttgtttggctcattccattgtaatcaacttccctggaggcctcatttaaagttctaagagctatgctgcctctgctcagaacacctgtccattgagtacaaacttgctgtcattctctgaggtcaataagagacaaggggcaggc

SEQ ID NO: 80584 - DNA, 396 bp, Homo sapiens
  sig_peptide (49)...(184): this location contains the signal peptide sequence, MLAPAIINSWLFFIYTLTQSPGSPPDFVTAGLRRHIVLSAITSVY, Run with SignalP
  misc_feature (28)...(133): similar to gi2114253 in the genepept database release 114, Run with FASTXY 3.3t00, default parameters
cgttttcaaagcatatatttagattgagagattagtagattaacttccatgctggctccagcaattatcaactcatggctgttttttatctatactcttacccagtcccctggatccccaccagattttgttacagccggtctgagacgtcatatcgttttatctgcaattacttcagtatacatctccaaaggaaaatggcccaataaaacacataaccacagtactattactgtaccttaagaattgataattcctcattatcataaaagagcaaatgttgacattttcccagttgtctcctacattttgttttacaattagtttgtttgagatttcctatgtttaaacttttgaaataaatatctttggaccaaacagatatactattttggg

SEQ ID NO: 80585 - DNA, 859 bp, Homo sapiens
  misc_feature (1)...(859): n = a,t,c or g
  sig_peptide (117)...(252): this location contains the signal peptide sequence, MIPAFGIFRLLIIILIIVLDMGFALYRRFFVPEDGSPVSFAAHIA, Run with SignalP
  misc_feature (3)...(391): similar to gi10879 in the genepept database release 114, Run with FASTXY 3.3t00, default parameters
cagggtcccttgccagctccatctttgacccactcagatatcttgtgggagcttcaggaggagtctatgctctgatgggaggctattttatgaatgttctggtgaattttcaagaaatgattcctgcctttggaattttcagactgctgatcatcatcctgataattgtgttggacatgggatttgctctctatagaaggttctttgttcctgaagatgggtctccggtgtcttttgcagctcacattgcaggtggatttgctggaatgtccattggctacacggtgtttagctgctttgataaagcactgatgaaagatccaaggttttggatagcaattgctgcatatttagcttgtgtcttatttgctgtgtttttcaacattttcctatctccagcaaactgacctgcccctattgtaagtcaattaataaaaagagccatctggaggaaataaaaaaaaaaggaagactctatgaagaaacagagaagtctcagcaaaggctaacaattttatatagaggacaaaacagcattaaactcatcagttgcaaagattgcctataaaaggaccttaggatttaaggaaggggcttcttataanaaaaacaataaacaaaaacaaaaaggggggggccgttttaaagaaccaattttatctccgcgcgggtggggaaaaataatttttttattggggcccaaaaataaattcccgggcccgggtttaacacggggggggggggggaccgncccgnccgccgnnggggcttcccccccgtcgccccctcgtccgccggcgtccccgctcggcggcctccggccccgcggtcccgcgggcccggccccggcgggtagccg

SEQ ID NO: 80586 - DNA, 466 bp, Homo sapiens
  sig_peptide (191)...(326): this location contains the signal peptide sequence, MRVWRCRLAHRGGWMVQELWFRDGYMIWRLAISYVRIGIQMACRT, Run with SignalP
  misc_feature (121)...(170): similar to gi3342174 in the genepept database release 114, Run with FASTXY 3.3t00, default parameters
cgcgtccgatagttttatcttgtttacataaaattctgactaggacagaattttccttctcttttattaaacctctatgtcttacttttcaagaacaagatgacctgtggtcattttctgtgtacatgggacagcttaggttcagggtcgggctcaggcagcagtggtgtagtatgaacttgggcagcagatgagggtttggaggtgcaggttggcccacagaggtggatggatggtacaagaactatggtttagagatggatacatgatctggagactagcaattagctatgtcagaatcggcatccagatggcttgtagaactgggagcaggggattgttgtgagtgtcttacactaagcttgatagactggaggttcaagctgagaagaggtggaatagctgaaaacaggaataagctaggtcccacagtttaggctgttcagtgatgtatagggtccccaag

SEQ ID NO: 80587 - DNA, 864 bp, Homo sapiens
  sig_peptide (12)...(147): this location contains the signal peptide sequence, MLSILLATLTLSLKEKRGERSIHQPEPSEKSVCLPVSGADPFRGS, Run with SignalP
  misc_feature (114)...(357): similar to gi5926744 in the genepept database release 114, Run with FASTXY 3.3t00, default parameters
cagaaccaggaatgctgtcaatactgttggccaccctgaccctatccttaaaagagaaaagaggggagaggtctattcatcagcccgaacctagtgagaaaagtgtctgcctccctgtttcaggtgctgatccttttagaggcagccgtggaagaggaaaagagatcagaagagaaaaggatattggtttgctggaacatgtgggacaagaagttcccagaagaatttgtgagcaacttcccgacagtaaggccctggctagacctcaggatggtccctgcctcctggacattaggaagcccaaaggccagaacaaaaacacatgcctagtgggggaaggctcactaagagggcaccaagtggggcaaatacccctggtaacccatttatggaggctgccacagaaatgctagttggaaattttcctccttcagtctatcatgaatttcttttttctcttttgagatgaagtcgcccgggctgcagttcagtggtgcagtctcggctcactgcaagctctgcctcccgggttccaacgattgtcttgtctcggcctcctgagtagctgagattgtaggcacgcgccatcatgcccgactaatttttgtatttgtggtggagaatggggttttgccgtgttggccaggctggtcttgaactcctgacctttggaggaaccacccatcttggcctccagacgggctgcgatggaagcttgagccactgtagctcgatgtaccgtgaatattagctttagggcagttttaagtgggggagactttaacaggacagtttacacgtataatcccaaacaccccccgggctgcgcctggtggagaggaaaatgtattgattatgaaaacc

SEQ ID NO: 80588 - DNA, 746 bp, Homo sapiens
  sig_peptide (49)...(184): this location contains the signal peptide sequence, MKILVAFLVVLTIFGIQSHGYEVFNIISPSNNGGNVQETVTIDNE, Run with SignalP
  misc_feature (55)...(498): similar to gi1189 in the genepept database release 114, Run with FASTXY 3.3t00, default parameters
ggcacagggcagctttacttactccagcaccttcctctcccaggcaaaatgaaaatacttgtggcatttctggtggtgctgaccatctttgggatacaatctcatggatacgaggtttttaacatcatcagcccaagcaacaatggtggcaatgttcaggagacagtgacaattgataatgaaaaaaataccgccatcattaacatccatgcaggatcatgctcttctaccacaatttttgactataaacatggctacattgcatccagggtgctctcccgaagagcctgctttatcctgaagatggaccatcagaacatccctcctctgaacaatctccaatggtacatctatgagaaacaggctctggacaacatgttctccagcaaatacacctgggtcaagtacaaccctctggagtctctgatcaaagacgtggattggttcctgcttgggtcacccattgagaaactctgcaaacatatccctttgtataagggggaagtggttgaaaacacacataatgtcggtgctggaggctgtgcaaaggctgggctcctgggcatcttgggaatttcaatctgtgcagacattcatgtttaggatgattagccctcttgttttatcttttcaaagaaatacatccttggtttacactcaaaagtcaaattaaattctttcccaatgccccaactaattttgagattcagtcagaaaatataaatgctgtatttataaaaaaaaaa

SEQ ID NO: 80589 - DNA, 389 bp, Homo sapiens
  sig_peptide (194)...(329): this location contains the signal peptide sequence, MCGWCPGFWPLAFTLHPWTRYVKPVNEHSWVLSIQSNTLNWSLHS, Run with SignalP
  misc_feature (10)...(96): similar to gi2584803 in the genepept database release 114, Run with FASTXY 3.3t00, default parameters
ctgtgattgtctatttctcctcttagttctttctgttccagtcacattttggagttgtgttctttggtgcttttatgtttagcattgttgtgtcatcccattaacctcaccacttggtcactgagctgtccctccatctctaatgagtcctcctgcctgaggccgtgctgtcagatgtgaacagctgtagcagatgtgtgggtggtgccctggcttctggcctctcgcattcactctgcatccttggactcgatatgtgaagcctgtgaatgaacatagctgggttttgtctatccaatctaacacacttaattggagtttgcattccacttacatttaatatgcttgctgacacatttggtttaaagctaccatttgcctctgtttcc

SEQ ID NO: 80590 - DNA, 395 bp, Homo sapiens
  sig_peptide (68)...(203): this location contains the signal peptide sequence, MNKIVFCFLLLLGGCREESIVLDGIFKLIRTFFCRGRENETKFFK, Run with SignalP
  misc_feature (78)...(110): similar to gi1185291 in the genepept database release 114, Run with FASTXY 3.3t00, default parameters
cttctgataatgtcacccaaaaaggtttttctacagaccaaaccgattaagacctcaggggagatatatgaacaaaattgttttttgttttttgcttttgttggggggttgtcgggaggagagtatagttctggatgggatttttaaattgattaggacctttttttgtagagggagagaaaatgaaactaaattttttaaaaatactgtgatacgtaaaagatatgtcttttacaagcttccattatatatttatgaacccttatatccttggttccttacaatcaaaaaccatgtgccttaccgagaggaacacagctatttctttgaaaagaaagaagttgatttggcaactctaatagtttatatcttactatatgtttctgaaatgagac

SEQ ID NO: 80591 - DNA, 389 bp, Homo sapiens
  misc_feature (1)...(389): n = a,t,c or g
  sig_peptide (6)...(141): this location contains the signal peptide sequence, MWWCPXSVFIYFVFSHTHKKKPLPPMHQEAPALPALLTGLTLPQQ, Run with SignalP
  misc_feature (389)...(185): similar to gi406261 in the genepept database release 114, Run with FASTXY 3.3t00, default parameters
ctcaaatgtggtggtgtcctggntctgtgtttatttattttgtgttttctcacacacacaaaaaaaagcctcttcctccaatgcatcaggaggcaccagccctgccagcccttctcactgggctcaccctgccccagcaaccccccggtgccacccttaagccacactgtcttctctgtaagcagcctgccagcagcagccccagcactttgcaatgggcgtgtgtgtggcggtgggagggggggnctaaaatcccttcattttcctaccctgccctgcccaggtccagatgtacctgacatgaaaacactaatcgctgagcggcacttgaggactggctttgggcaagaacccttttccccaaataaagtagaacctaccccgttgcc

SEQ ID NO: 80592 - DNA, 409 bp, Homo sapiens
  sig_peptide (18)...(153): this location contains the signal peptide sequence, MFLYPFHFSSLVITALFFLTYPPHNIIYVRWKIAPNFSKPLWGGK, Run with SignalP
  misc_feature (371)...(271): similar to gi2194194 in the genepept database release 114, Run with FASTXY 3.3t00, default parameters
caaagaccttggcaataatgtttttatatccatttcatttttcctcattggtcataacggctttattctttctcacttatccaccccacaacataatttatgttaggtggaaaattgcccctaactttagtaagcctctttggggtgggaaaatcctcacctgtatggaggcattgccccttgattcttggtttctgaaccacattcctgcagagtggtgccctgcgggaatcttggtattatactttaaggcaacttccttcccatttaagaaattaaaaagatttagacaaagaaaaatgacagagtggtgttgaggagtggtgttggcaaagcttgtagtcttcacagtatgggaagggaaaaatagttttaggctctttccctatttgccaggccagtcattaag

SEQ ID NO: 80593 - DNA, 387 bp, Homo sapiens
  sig_peptide (4)...(139): this location contains the signal peptide sequence, MVLFYSILFLKTSYIGGMTILFSGSALYESLTILPFVMLELMSTA, Run with SignalP
  misc_feature (358)...(289): similar to gi1850595 in the genepept database release 114, Run with FASTXY 3.3t00, default parameters
tttatggtacttttttatagcatattgttcttaaaaactagttacattggtggcatgactattcttttcagcggtagcgcactttatgaatccttaactatattaccatttgtcatgctggaacttatgagtacagcgaattctcactaattgaccaatttttgaagaagctgtaatatttatttttttatgaaaagtggttttactttttcagtacacacacaattaggtccattctccaagaaaggattttagattatctaccttagtgaatgcatagaaatgatttagcaaaatactaataaagtttcttagttgttgggatgttaaaaggcttcttttctttctatgggctatattatataggggcactttttaaccaagcct

SEQ ID NO: 80594 - DNA, 395 bp, Homo sapiens
  sig_peptide (57)...(192): this location contains the signal peptide sequence, MHLNAHRALFVLFCLSLFFMWMRIDRHDRLHTPCGQEPCSFHFCV, Run with SignalP
  misc_feature (2)...(79): similar to gi2587024 in the genepept database release 114, Run with FASTXY 3.3t00, default parameters
tttcgtgtttttgctgctcccgaatttccacctcccatcatccacgcatttcacagatgcatctgaatgctcacagagctctatttgtgctcttctgtttgtccctgttttttatgtggatgcgtatcgaccgccatgatagactgcacactccctgtgggcaggagccatgttcatttcatttttgtgtcccaggcataatgtaggtgcgctcacctcatctctcccatatcttgaacctgtgaatctcagtggactcttttcagcagatgaacctgtataagtctttcctgtcttgaaaggacagatgggtggcccccatcctccactgagcttcctgttgaactccctttgcaggtgacgtcaaaatagaagaagccctcattcaccatatt

SEQ ID NO: 80595 - DNA, 403 bp, Homo sapiens
  sig_peptide (125)...(260): this location contains the signal peptide sequence, MALQWSVLGQASFLLLLGHLIFFYLDVKKIPSLSWRFSNFTRMHL, Run with SignalP
  misc_feature (47)...(192): similar to gi4558469 in the genepept database release 114, Run with FASTXY 3.3t00, default parameters
ggtggggttgcaggggcaacctgcctgggtttatatacatgggtcacataaattaaaattcctttgctcagaattcatggacattgcttcagtgtcttatggcattgaacgtggtcagctgaacatggcattgcagtggtcagttttagggcaggcctcatttttacttcttttaggtcatttgatttttttctacctggatgtcaagaagattccttctttatcctggagatttagtaatttcaccaggatgcatcttgattttatcttaggatgtattttgactttttcaaatggcagttccaagactttaattcaagaagcctttcttctgtgtggttttgaatagttttctgttatatttggtggggttctcctctccagagtatgaatgaagcgcgtg

SEQ ID NO: 80596 - DNA, 470 bp, Homo sapiens
  misc_feature (1)...(470): n = a,t,c or g
  sig_peptide (85)...(220): this location contains the signal peptide sequence, MWMSVCLSAFICTRILMDYGLLHIVHITRVICMNTHERYVSKHYG, Run with SignalP
  misc_feature (31)...(186): similar to gi1333929 in the genepept database release 114, Run with FASTXY 3.3t00, default parameters
ccatctggtggaattcctggaatgtaggcagtggagattgcggttgccctgtgggcatgtgtacatgcgtgtgtatacctacagatgtggatgtctgtatgcctgtctgcatttatatgtacacgtatcttgatggattatggattattacatattgtgcatataactcgtgtaatatgcatgaacacacatgaacgatacgtgagcaaacactatggatccatatagtgtgtgattctgcacctgctctgctgcaaacaggtcctgaggagacacttcatcttcagacacatctgcatgtgcagacggaacatgaacagtctcgtagagagggggccccagcaagtttccaaagcacccccaccctgctggaaacactctccagccacaacctcaggagagtcatgctangacgcggngggcgtgccgtgagaggacagcangcgtgagtggatctccaggcaccctcg

SEQ ID NO: 80597 - DNA, 646 bp, Homo sapiens
  sig_peptide (64)...(199): this location contains the signal peptide sequence, MAYFFILLGLFCVALRRIFCFFFLLLCLFLEYSFPPLLFQTLLHL, Run with SignalP
  misc_feature (162)...(304): similar to gi5701569 in the genepept database release 114, Run with FASTXY 3.3t00, default parameters
atttattataaaggaaaaggcatattcttattaagctgataatctttacataaatactgaagcatggcatatttctttattctacttgggctattttgtgttgcattaagaagaattttttgtttttttttcttgttactatgcttgtttctggaatactcctttcctcccttactcttccaaactctactacatctaaatttatcctatttttcaagggtttgatcacatattacatcatccaggaagtggctctcctattccctcttctccaaaatgtatattttttattctgggaactcttgatcctttgcctctagaccgtaagccctttgtaggcatgtctgtatctgagtttttaaaaaattttttcttcttttcccactcccagaataacaccctgtgcctagctcataaaaatgagcttagcagctagagttagtgtggttgctgtagaagatctctgatacacatatggcagtttgatgctgaatagtttttggaaattaaaaaacatgtagcaatttcaccaatgtcagtgactaacatagctgtaattagtaaattatcaaaacaattcttttttttttcttttttacagaggggcttgtctctggaggcttcaggcttggagttaggggcgtga

SEQ ID NO: 80598 - DNA, 878 bp, Homo sapiens
  sig_peptide (130)...(265): this location contains the signal peptide sequence, MAHTSWLIIHCCSPRNAFILRAARCLLWFQLTAHCCVQSSPPAVV, Run with SignalP
  misc_feature (28)...(261): similar to gi552417 in the genepept database release 114, Run with FASTXY 3.3t00, default parameters
ctctccagtccggtggaatttgagcctctcaggctggtaagttttgtttcagaaccgcttcctcaagcttcttttgcctttaaaagcttcctcttgccccagcctcccagggaatgcctgtggtctgtcatggctcacacatcctggttgataatccactgctgttctccacggaatgccttcattttgagagctgctcgctgcctgttgtggtttcagttgacggcccactgctgtgtgcagagttcaccacccgctgtggtgtgcagtgcagcagctgacctgcctgccttgtggttttctaatcccattgaggggacgtcttaggtgttctcaccaagaatgcacagcaacagtgctgggtgggccacatcctccctcacgtttggtgccaccagttttatagattttggctactgtgggtgtgcgcggtggttttaggctgacgccccccttccatttcatcatcctgaagtccctatataaccatctttcatcgaggagagccagacatcatgcttgacaaaggggcagcaccctgcgctcagagggcaaccagtcgtctggacattgtttgaacccatcagacttcatgaccctggacagcctacaaaaaagccatttcagctttgaccagcccttggcaggagaagcccatcgaatatattgcccaccctcttgggacctcatggccccttgtcaagaaacaaaacccacgctattcctcccaacaacaagacactttcttgagttaacctttcacaagtacagggcgggaccttacaccagtccctgcccgccctggtgcatgtaactttaacaacagcttctccatccggggaaccgccgggtgcacccctcgcccaagttaaggcact

SEQ ID NO: 80599 - DNA, 1928 bp, Homo sapiens
  misc_feature (1)...(1928): n = a,t,c or g
  sig_peptide (487)...(622): this location contains the signal peptide sequence, MVIALIIFLRSPAMAGGLFAIEREFFFELGLYDPGLQIWGGENFE, Run with SignalP
  misc_feature (514)...(1341): similar to gi4092503 in the genepept database release 114, Run with FASTXY 3.3t00, default parameters
caaactctgaatgaactgtggttgttctacaatgatttacactgttatttggcgagcccctgagctataaaattaaaaaatgacagactacttccatggtgtatggttttgttcacccaagaatgactcataaatcaatgcaggagcagttagcagaccacggctgtatggctcagtgtttttaagagtgaaagagaaaattctattttaactaaaactaaggcttaatttttaaatccacagaggtaccaaggcgccctctaatggtgaactcaaacaatgctctattttgtaatgagctacagtttcagttagaaattgtggtaaattcgttagggaattatgaacagatttttttctttttttgtaaaggctttataatttcttaatggttggccatcagttttgtctcttctatgcattttcaggctgtattctacaaggcttcttgcctattggtgaagggttattgggggtttgtctgtaatggttattgcactgattatttttcttaggtccccagccatggctgggggattatttgccattgaacgagagttcttctttgaattgggtctctatgatccaggtctccagatttggggtggtgaaaactttgagatctcatacaagatatggcagtgtggtggcaaattattatttntnccttgttctcgtgttggacatatctaccgtcttgagggctggcaaggaaatcctccgcccatttatgttgggtcttctccaactctgaagaattatgttagagttgtggaggtttggtgggatgaatataaagactacttctatgctagtcgtcctgaatcgcaggcattaccatatggggatatatcggagctgaaaaaatttcgagaagatcacaactgcaaaagttttaagtggttcatggaagaaatagcttatgatatcacctcacactaccctttgccacccaaaaatgttgactggggagaaatcagaggcttcgaaactgcttactgcattgatagcatgggaaaaacaaatggaggctttgttgaactaggaccctgccacaggatgggagggaatcagcttttcagaatcaatgaagcaaatcaactcatgcagtatgaccagtgtttgacaaagggagctgatggatcaaaagttatgattacacactgtaatctaaatgaatttaaggaatggcagtacttcaagaacctgcacagatttactcatattccttcaggaaagtgtttagatcgctcagaggtcctgcatcaagtattcatctccaattgtgactccagtaaaacgactcaaaaatgggaaatgaataacatccatagtgtttagagagaaaaaaataaaccaataacctacctactgacaagtaaatttatacaggactgaaaaccgcctgaaacctgctgcaactattgttattaactctgtatagctccaaacctggaacctcctgatcagtttgaaggacattgataaactgtgattttacaataacattatcatctgcagttactgtttacaagactgcttttaccttaaactttgtagatgtttacatctttttgttgtgttttaagatgatgttggtaatttgtgcctttagctctgttttattagacagagttaaagcatgttgtcttctttgggattacactcaggggtctgaaaggcagtttgatttttatttttaacacacttgaaaaaaggttggagtagccagactttcatatataacttggtgattatcaacctgttgtgtctttatttaattttacatctttttgaagcactgccacaggttattagccaaggtggccttccttcacagtcatgctgcttttttgaaaggtgaatttcaacacatttagtgcctctttcatttctcagtatatatttcaagagctcgtgatgaaatc

SEQ ID NO: 80600 - DNA, 3644 bp, Homo sapiens
  sig_peptide (985)...(850): this location contains the signal peptide sequence, MFWFLNIFILILSKHSSKSLSLQLPEVLLLFLCQFCLRLHPVRGL, Run with SignalP
  misc_feature (2)...(2623): similar to gi2792366 in the genepept database release 114, Run with FASTXY 3.3t00, default parameters
cctgtctctcttcgggtctcgggcccttgggcgcagcggggcgcgcgccatggcgaaggcgaagaaggtcggggcgcgaaggaaggcctccggggcgccggcgggagcgcgagggggcccggcgaaggccaactccaatccgttcgaggtgaaagttaacaggcagaagttccagatcctgggccggaagacgcgccacgacgtgggactgcccggggtgtctcgcgcacgggccctcaggaagcgtacacagactttactaaaagagtacaaagaaagggataaatccaatgtattcagagataaacgcttcggagaatacaacagcaacatgagccccgaggagaagatgatgaagaggtttgctctggaacagcagcgacatcatgagaaaaaaagcatctacaatctaaatgaagatgaagaattgactcattatggccagtctttggcagacatcgagaagcataatgacattgtggacagtgacagcgatgctgaggatcgaggaacgttgtctggtgagctgactgctgcccactttggaggaggcggtgggctccttcacaagaagactcaacaggaaggcgaggagcgggagaaaccgaagtcccggaaagagctgattgaagagctcattgccaagtcaaaacaagagaagagggagagacaagctcaacgagaagatgccctcgagctcacggagaagctagaccaagactggaaagaaattcagactctcctgtcccacaaaactcccaagtcagagaacagagacaaaaaggaaaaacccaagcccgatgcatatgacatgatggttcgcgagcttggctttgaaatgaaggcgcagccctctaacaggatgaagacggaggcagaattggcaaaggaagagcaggagcacctcaggaagctggaggctgagagacttcgaagaatgcttggaaaggatgaggatgaaaatgttaagaaaccaaaacatatgtcagcagatgatctgaatgatggcttcgtgctagataaagatgacaggcgtttgctttcctacaaagatggaaagatgaatgtcgaggaagatgtccaggaagagcaaagcaaggaagccagtgaccctgagagcaacgaggaagaaggtgacagttcaggcggggaggacacagaggagagcgacagcccagatagccacttggacctggaatccaacgtggagagtgaggaagaaaacgagaagccagcaaaagagcagaggcagactcctgggaaagggttgataagcggcaaggaaagagctggaaaagctaccagagacgagctgccctacacgttcgcagcccctgaatcctatgaggaactgagatctctgttgttaggaagatcgatggaagagcagcttttggtggtggagagaattcagaagtgcaaccacccgagtctcgcagaaggaaacaaagcaaaattagaaaaactgtttggctttcttttggaatacgttggcgatttggctacagatgacccaccagacctcacagtcattgataagttggttgtgcacttatatcatctttgccagatgtttcctgaatctgcaagtgacgctatcaaatttgttctccgagatgcgatgcatgagatggaagaaatgattgagaccaaaggccgggcggcattgccagggttggatgtgctcatttatttgaaaatcactgggctgctatttccaacttccgacttctggcacccagtggtgacccctgccctcgtgtgcctcagtcagctgctcaccaagtgccccatcctgtccctccaggacgtggtgaagggcctgttcgtgtgctgcctgttcctggagtatgtggctttgtcccagaggtttatacctgagcttattaattttcttcttgggattctttacatagcaactccaaacaaagcaagccaaggttccactctggtgcaccctttcagagcgcttgggaagaactcggaactgctcgtggtgtctgctagagaggatgtggccacgtggcagcagagcagcctctccctccgctgggcgagtagactgagggccccaacttcgacagaggccaatcacatccgactgtcctgcctggctgtgggcctggccctgctgaagcgctgcgtgctcatgtacgggtccctgccatccttccacgccatcatggggcctctccgagccctcctcacggatcacctggcggactgcagccacccgcaggagctccaggagctgtgtcagagcacactgaccgaaatggaaagccagaagcagctctgccggccgctgacctgtgagaagagcaagcctgtcccactgaagcttttcacaccccggctggtcaaagtcctcgagtttggaagaaaacaaggcagtagtaaggaggaacaggaaaggaagaggctgatccacaaacacaagcgtgaatttaaaggggccgttcgagaaatccgcaaggacaatcagttcctggcgaggatgcaactctcagaaatcatggaacgggatgcggaaagaaagcggaaagtaaagcagctttttaacagcctggctacacaggaaggcgaatggaaggctctgaagaggaaaaagttcaaaaaataaattacattttataaataaggcaaggaactggacattacctcacatctgcaattccaaccctctgggaggccaaggcaggaagattgcttcagcccaggagttcgagaccagcctgggcaacacaggaagaccccgtctctaccaaaaaaacataaaaattggccaagtgtggtggcacgcacctgtagtcccgactactcgggaggctgaggcaggaggactgcttgagctgagtccaaggttacagtgagccgtgattgagccactgcactccagcctcggccacagtgcaagactgtgtcgcttaaaaaaaaatttttttttttgagacggagtttcacttttgttgcccaggctggagtgcaatggtgccatatcggctcaccgcaacctccacctcccgggttcaagcgattctcccgcctcagccccccgagtagctgggattacaggcatgtgccatcacgcccagctaattttgcatttttaatagtgacggggtttctccatgttggtcaggctggtctcgaactctcgacctcaggtgatccgcctgcctcggcctcccaaagtgctgggattacaggcgtgagccactgcgcctggccattgaatcagctattgaagcttgtgtgtgcatcatgaagttcttgtgctgtggcttttagctccatcaggtcatttaaggtcttctgtacactctttattctagttagccattcatctaacctttttcaaggtttttagcttccttgcgatgggttagaacatgctcctttagttccgagacgtttgttattaccaacctttggaagcctacttctgtcaacttgtcaaactcattctccatccagctttgtccccttgctggcgagcagctgcgatcctttggagaagaggcgctctggtttttggaattttcaggttttctgctctggtttctccccatctttgtagttttatctacctttggtctttgatgttggcaacctacaaatggggttttggtgtggctcgtgcc

SEQ ID NO: 80601 - DNA, 457 bp, Homo sapiens
  sig_peptide (81)...(216): this location contains the signal peptide sequence, MCSILRFIRTCLVILYMFVYSRFPMYFLILLFFHLDRLFCFMLMR, Run with SignalP
  misc_feature (96)...(211): similar to gi2636134 in the genepept database release 114, Run with FASTXY 3.3t00, default parameters
ccagttccagggtcgacccacgcgtgcgattttggatttgctgaggggcagtagaaggactatatactctaaagaagttaatgtgctccattttgagattcatcagaacctgtcttgtaatactttacatgtttgtatattcccgctttcccatgtactttttgattttgttattttttcacctagatagattgttttgcttcatgttaatgagaggatttagaaagccttaaattgttggcccatgtaactattccttgagtggttttaacaaggcatttttaaaatttacataattttatatgccttcaggatatacacactaaagtagagaagaatttgttaaatgagaagaaaaaaggaaactacaatagacaagattgattaattcacgttagcattgaaaacctacataccctagcaaagtgggaccaaacagcataccatctatataccc

SEQ ID NO: 80602 - DNA, 664 bp, Homo sapiens
  sig_peptide (127)...(262): this location contains the signal peptide sequence, MTSILSQLPRYQSLFGLLLPGFFFPVFFFPCISMLAKYMCSLGLH, Run with SignalP
  misc_feature (19)...(332): similar to gi2688690 in the genepept database release 114, Run with FASTXY 3.3t00, default parameters
ctctcaactgtggtaaaaatcttttcaccacatttaccaacgtattttacctctcagtttcggggtggtcacttactatctttattattgtctctttatttgagtgtctcgacaacatgtctctctatgacatccatcctctctcagcttccaagataccaatctctctttgggctcttattaccaggctttttttttccagtattttttttcccatgtatttccatgcttgcgaaatacatgtgttcccttgggttacattctcacttctcttttactgagctgctcctgagggaaattatttatcactttaattccacactcatttttaagcaaatgattctcacgctgttggacaccaaactcttatgattatatgcctactataatctctacttacatttgccaaatacacctcaaagggaacatgtcaaaaatggagccatcgttattcccctcagcccatttcataaaactgcacattttcataataaaggcttttacgcgtgggccaaaaggcaatactgtcctacgctggcacacttcaaagccctaaaaatctgaagacacccttccttggacttcttccctcttttcctttcaaaaccccacccaagggctcaaattcattgttatccttaatcaaatctcctcttcaatccgg

SEQ ID NO: 80603 - DNA, 394 bp, Homo sapiens
  sig_peptide (71)...(206): this location contains the signal peptide sequence, MGYTLRQKELQRNLKLFLIMVVLVVYLDWFFETIIYIFYMYTLGS, Run with SignalP
  misc_feature (56)...(246): similar to gi972716 in the genepept database release 114, Run with FASTXY 3.3t00, default parameters
tgctttttttaattaaactcagcagaattattttaactggcaaaagcaaaggaatttgtctggtcttctaatggggtataccctaaggcagaaggaactgcaaagaaaccttaaattgtttttaataatggtagtgttagtagtatacctggattggttttttgaaaccattatatacattttctatatgtatacgttaggatcaagcaaaaacagtagttgtgttaatggcactggaaacaaggatatcagcttaaaagagataccaatataaaggccaatatagtaggtaaacaattttttggtgggggaaatacatatcataaagctgtttttaaaaagaaaaagaagattaatacacatcttataatcctaattttgaattgggaatacg

SEQ ID NO: 80604 - DNA, 364 bp, Homo sapiens
  sig_peptide (35)...(170): this location contains the signal peptide sequence, MSLFLLPLKRIVFIDHFTCLHEKSPWYKASACCVGHVGIQLVNIY, Run with SignalP
  misc_feature (130)...(191): similar to gi44325 in the genepept database release 114, Run with FASTXY 3.3t00, default parameters
cctttggaggctgtattgcaaggagcaggtttctatgtctctatttcttctgccattgaaaaggattgtttttattgatcactttacatgtctccatgaaaaaagtccatggtacaaggcaagtgcatgttgtgttggccatgtcggtattcagcttgtaaatatctatcattgtcagagcttgcatttaaggaataaattcctagtcacagccatagtcatattttggggatgtcaaaactggcctcagaatacagaataagtaccatttcccattgttgaaagtacactttgcttctttattacatttgcttctttatcttctctataggctatggtaactgtatttcttcttttcaggctg

SEQ ID NO: 80605 - DNA, 741 bp, Homo sapiens
  misc_feature (1)...(741): n = a,t,c or g
  sig_peptide (309)...(444): this location contains the signal peptide sequence, MCLHFLGSEQHMAAHVRVCMCFHNHILSQLLLCLWSNFNSFSCCT, Run with SignalP
  misc_feature (122)...(212): similar to gi5690331 in the genepept database release 114, Run with FASTXY 3.3t00, default parameters
gctaaaaaaaggctggaagaggggagaaccctggcactgcgggtggggctgggaggagcccaggcaaccttactggtgagaatctcatggctcttcaaggggaatatgatgatgatttccctggggtttctttcaatactcagaagccgccccgagttggaaagcacatgcatacttggggaggccaggggaggaaaaggggggcggctcactctgacagtaaatgaagaaagtggaaacaaattcaaggagcaggcagagctcccggtttcaccagagcccaacggttggtaataatgatgagaacaatgtgccttcacttcctgggatcagaacagcacatggccgcacatgtacgggtatgcatgtgcttccataatcatatactttcccagcttctactctgcctgtggtctaatttcaactccttcagctgctgtacccacccataaaattatgagtgtaaaagcactttgcaaaccctgatactctatgaagaagtaaaaagtagtgctgtaattattatcattattatgtccaatgggtgaggtttccgctgcccacctgtcagctatgtgaggcctaaagagagggagggctaggccattcctcaactttctgaggtcccgggcccttttcccctttcatctggccccaaccttgcttggctaaacgggatgccccnnggggaaagccccaaaaaaggggggtttatggggaccccaaaaaaacccgggtggg

SEQ ID NO: 80606 - DNA, 740 bp, Homo sapiens
  sig_peptide (239)...(374): this location contains the signal peptide sequence, MRIHPPLPTPLPVWELLVCRANVLMFLVFLVPLTLLGSRGMPWHI, Run with SignalP
  misc_feature (18)...(101): similar to gi4098456 in the genepept database release 114, Run with FASTXY 3.3t00, default parameters
attactgaaatgcaccatgctgtttgaagactctttgcctttgctcttttaagtcattgattcaccccaatttaacagtctggcaagattctactaatccatcaagcacccctcatgtatgaacccttccttcattccactccctgagagaagtgaccaatcccttgcctgtggtaccactgtaaggtctgtttgcacagtatgtttgcacaaatgccactgtatgtagtttgctaacatgagaattcatcctcccctccctactccccttcctgtctgggagctccttgtatgtagggccaatgtgttaatgtttttggtgttcctggtacctctcacacttcttgggtccagaggaatgccctggcacatagaactgctcttacctgcgctcttcagagactggttctagcccttctccctggagttattctaatatatttttaaaaagcataggtgatgagctctggagaagcaaatatcaaaatttcctggttgaatctaaaaacgcgagctgaattatgaagaaaaactgctttagctggatgggctaccttcctctctgtccctgagttcctgcctgtccctaaatttatgactttcataaataccttgtagcactaacacagtgctgggcacatggtaagggacagagtcacatggaccctttatttatttaaaccattttattgggggttttattctttaaaaaactgctggaaaatttgggggggaaaaag

SEQ ID NO: 80607 - DNA, 749 bp, Homo sapiens
  misc_feature (1)...(749): n = a,t,c or g
  sig_peptide (229)...(364): this location contains the signal peptide sequence, MLIYILLLERILVKCVLFRVNAVLIYVNMCNMSFFFSVRTMFLRS, Run with SignalP
  misc_feature (223)...(345): similar to gi3769504 in the genepept database release 114, Run with FASTXY 3.3t00, default parameters
gagatagagaggagaaaacaatggggaaggagccattccaaagaaaagctgagagtaccaaatagctaggtaaggttctggacagctgtggatcatcttatgtgtctgaggaaggcaaaaggttgagagctaaggagttagtgtgccttattttcattatttcttaaattcctatttatcccactccagcctccccttaccttcaatccccataagcaagtatttagcatgcttatatatatccttttgttggaacgcattcttgtaaaatgtgtattgtttagggtgaatgcagttttaatttatgtaaatatgtgtaatatgtcttttttcttttcagttagaaccatgtttttaagatccaaccaggttgcgaagagtacatctcttctaggtttcccactgcttcagaatgggggaccacgtgctttacatggcagtgcctaagggggacagtgacaaagctgattgcaactatggggtcgagggactggggatgggtagatatcattaatcttgggtcaccctgtaagggagacaactgacttggccacatccttcacaaacacctgcataacaaccttttacttccaaatgccccttaggaggggaaaggcgcttaagtatcccggaggggagtttggtacaatttcaaaataaatggcccccttttttgggggggggtccgccctcccggccaattcttggttttgggggcccccnagggagggatccctatttgacggggg

SEQ ID NO: 80608 - DNA, 1652 bp, Homo sapiens
  sig_peptide (70)...(205): this location contains the signal peptide sequence, MLLNLLIPFVLTVGSGSKDSPWLEQPEVQLLLQTVINVLLPPRII, Run with SignalP
  misc_feature (405)...(301): similar to gi296961 in the genepept database release 114, Run with FASTXY 3.3t00, default parameters
gctttaaaagaagattttcctttaagccatgtgatctccccattcaccaatcaagagcgaagggaggggatgcttttaaatctgctcatcccatttgtgctcacagtaggatctggaagcaaagatagcccatggctggagcagcctgaggtgcagctgctgctgcagacagtcatcaatgtactcctcccaccgcggatcatcagcacatccaggagcaagaacttcatgttagagagctccccagcccactgctccacccctggggatgcggggaaagacttgcgcagggaagggctggctgagtccaccagccaagcagcatacttggtgaggccagtccagtcctgctcccataggcttcccaatccctttccctctttgactcctactttcccgttatcctatgctgcctttaacctggtcgtgacccggggagcaatggaaagccactctttggccctgaatgaactgggccagcaggaaaagaccactcttgccatagcgctgagaataagtggcactggcagtggggaatttcaaaatgagaaagtcttgcctgatatttttcaattcaccaaagcagatattggtgagaagtataagatgaacacaaacacactgatgaaaatgagtccttggagtttggagtatggaggggtgtttgaactgccttataatgggatgtgtttgaaaatgaggggattgacaatgaaaatgaaaaaggagaaaaagacacaaggaatgcatgtacctaggactaacccatatggatgctcagttggccaagcgctgaaggtgattctcgtctgctttgagaggcagctcggaagccagtggtactggctgagcctccaggtgaaggagatggctctgcggaaggtgggaggcctggccctttgggatttcctcgacttcatcgtgcggacccgaatacccatctttgtgcttttgcgccctttcatccagtgcaagctgctggcccaaccagcagagaatcatgaagagctttccgcccggcaacatattgccgaccagctggagcggcgcttcataccacgccctttgtgtaagagctcgctcattgctgagttcaacagtgaactaaaaattctaaaagaggcagttcatagtggatcagcctaccaaggcaagacatccatcagtaccgtgggcacctccacctctgcttaccgcctgagcttggccaccatgtcccgctctaacacgggcacgggcactgtctgggagcaggacagtgagccatcccagcaggcttcgcaggacaccctgagtcggactgatgaggaagatgaggaaaatgactctataagcatgcccagcgtggtaagtgaacaagaagcttacctcctgagtgccattggaaggaggcgattctccagccatgtctccagcatgtctgtacctcaggctgaggtgggcatgctacccagccagagtgaacctaatgtcctcgatgactcccagggcctggccgccgagggcagcctctctagggtggcaagtatacagagtgaacctggtcaacagaacctccttgttcagcagccgctggggaggaagaggggcctgaggcagctaagacgtcctctactatcacgtcagaaaactcagactgaacccattgtatt

SEQ ID NO: 80609 - DNA, 407 bp, Homo sapiens
  sig_peptide (88)...(223): this location contains the signal peptide sequence, MHFCLVLLITEQSLGKEVHPLRLVSFRFDSKNLPASMLSLPSGFK, Run with SignalP
  misc_feature (113)...(265): similar to gi5764470 in the genepept database release 114, Run with FASTXY 3.3t00, default parameters
aatacatcctcccttctttgacttgttttcctggtttgcccaatccaactgcacaatgaatgccctgcactattatttaactatttcatgcacttctgtcttgtcttgctaattacagaacaatcactgggaaaggaagtacatccactcaggctggtttctttcagatttgactcgaaaaatttacctgcctcaatgctcagcctccccagtggctttaaaggacctaaactcagcaacgttgtggtttcacttaataagatgttgatgtcagtattcaaacttattaaaatactagattaatctcctcctccctgtttatctaaatctgcttaatttgcagcaaaataataacgaatactaggaatggcatgtttaaagcacaattgggccctgctttatcatgt

SEQ ID NO: 80610 - DNA, 420 bp, Homo sapiens
  sig_peptide (69)...(204): this location contains the signal peptide sequence, MAKWQRAAWPEGMLTLWCYFMATALSATLVPDTLYFLLGENNIPA, Run with SignalP
  misc_feature (371)...(314): similar to gi414511 in the genepept database release 114, Run with FASTXY 3.3t00, default parameters
aatacatgcctgggctgctggagaactggggtgcgcactgggcaccccagggagggagggacacagagatggctaaatggcagcgagctgcgtggccagagggcatgcttactctctggtgctattttatggcaacagctctaagtgccactttggtacctgatactctttatttcttattgggagagaataacatacctgcaaagaaggctgagaaatattctcgaagatgagacacacagaagccacggagaaaaagggattaagtgatggagtcaaaagtgagaagcctcagtcatgttcctgataagaacggaaggtatttgggcagacagccaagcccgcattgactgacacagggccgtaacaggagagatttcttcacagacagaactgttttccaaagcaagctgcagaggc

SEQ ID NO: 80611 - DNA, 1151 bp, Homo sapiens
  sig_peptide (99)...(234): this location contains the signal peptide sequence, MIFGTDCCALSKYMWAFVFFLIKARWREKNPCFDDSLRPEQCLLD, Run with SignalP
  misc_feature (68)...(184): similar to gi1786500 in the genepept database release 114, Run with FASTXY 3.3t00, default parameters
ttgttaattagttcatcgtggtgggagtgttgagtggagaactaggcaggagatgaagctcaaaaagcatgcttatttaggttttgaagacattttacatgatatttggaacagattgctgcgctttatccaaatatatgtgggcttttgttttctttcttatcaaagctcggtggagagaaaaaaatccatgctttgatgattctttaagacctgagcaatgtctattagacgaaggcagcttagaaaaaagatattcaatgtagttcaagttaaaaacaaaagaaaactaatatttaatacggttaaaaatgagattgtgttcaccttataggtttgttttcaaggtaaatatttaaactgagtaaatcattttttcctaaaactacttggtgagtatcatcatgcccttcattgccacataaatacaaatttgagtttaaaatcttagattacaatgtagaagctaatcaaagcagttcactgttgttattttttatttatggacaataaaattcactcttttgtggtggatagttctgagtcacataaccactaccagaatcaggatacagaacagtttactcacccctacctgattccccggcgaataaaatgtgggataaggggggataatgggtggggcgtttggatcggtatgcgtatgtttttggggggcggcccgcaaataggcctatttctcgggggcgggggtgggaattttttttttttaggtgcccccatcccaccccggcgggcggtttctacgagccgtcgggccaatatggttggttcacccggtacgcgggactgaccgctctgcgccgcctcgtttccctagtgcgattggcgcgaacgtggccgcgccgtcgttcgacgcgtggacgcgatgtgtgccgctggcgcgcttactcgcgatggcctccgctgggcgcgctgagtaccgaatccgcgcgggccgcacgcgacgcgatgcgtggcgcctcgactttcggtgagggctggctgtacagacgcgcggaggtgtggatcggcagacgacgcgcgggtgggtgcgatacggtcggtgcggtatgctggcaccgggcgggatgggctgcgcctcaatcgtgacggtgctcgaccgagacggtcagatagcctccggggcg

SEQ ID NO: 80612 - DNA, 401 bp, Homo sapiens
  sig_peptide (156)...(291): this location contains the signal peptide sequence, MFRGLFLLPAPTFDPFYCLLVSQPLNKNNEERGEEQLTHWAGLNG, Run with SignalP
  misc_feature (390)...(304): similar to gi2622779 in the genepept database release 114, Run with FASTXY 3.3t00, default parameters
attacataccctgcttccaattgttttaaagattaagttacaaaaaaaaagtcaagtgcctaatattccaggcatataatttgttggtgcaaggtacttaccagagtgtctggcacacagtaaatacccagtaccggtagctgcaattattaataatgttcaggggtttgtttcttctgcctgctcccacctttgaccctttctattgcttattagtttctcaaccactaaacaaaaacaatgaggaacggggtgaagagcagttaacccattgggcagggttaaatggcaaaataaattactgaaattaagttagagattatatatggatttaatttttctggtttttgcctgtctcctgtcataaataattgggagtttaatatattatcatcaatggc

SEQ ID NO: 80613 - DNA, 3719 bp, Homo sapiens
  sig_peptide (976)...(841): this location contains the signal peptide sequence, MQIFLLLYALGRFVLLVTFSPLVLSLSYPVLVSFYLRYPSVLFVF, Run with SignalP
  misc_feature (94)...(1617): similar to gi3859084 in the genepept database release 114, Run with FASTXY 3.3t00, default parameters
gatgaaagggtccttcaggcactcatgaaaaggttttatttaccatggacctcacggccaccgataatagtttctgagtgtcggaatgagatatatgatgtaagacacagagctgcttatcatccagactttccaacagttctgacagctttagaaatagataatgcggttgcggcaaatagcctaattgacatgagaggcatagagacagtgctactaatcaaaaataattctgtagctcgtgcagtaatgcagtcccaaaagccacccaaaaattgtagagaagcttttactgctgatggtgatcaagtttttgcaggacgttattattcatctgaaaatacaagacctaagttcctaagcagagatgtggattctgaaataagtgacttggagaatgaggttgaaaataagacggcccagatattaaatcttcagcaacatttatctgcccttgaaaaagatattaaacacaatgaggaacttcttaaaaggtgccaactacattataaagaactaaagatgaaaataagaaaaaatatttctgaaattcgggaacttgagaacatagaagaacaccagtctgtagatattgcaactttggaagatgaagctcaggaaaataaaagcaaaatgaaaatggttgaggaacatatggagcaacaaaaagaaaatatggagcatcttaaaagtctgaaaatagaagcagaaaataagtatgatgcaattaaattcaaaattaatcaactatcggagctagcagacccacttaaggatgaattaaaccttgctgattctgaagtggataaccaaaaacgagggaaacgacattatgaagaaaaacaaaaagaacacttggataccttaaataaaaagaaacgagaactggatatgaaagagaaagaactagaggagaaaatgtcacaagcaagacaaatctgcccagagcgtatagaagtagaaaaatctgcatcaattctggacaaagaaattaatcgattaaggcagaagatacaggcagaacatgctagtcatggagatcgagaggaaataatgaggcagtaccaagaagcaagagagacctatcttgatctggatagtaaagtgaggactttaaaaaagtttattaaattactgggagaaatcatggagcacagattcaagacatatcaacaatttagaaggtgtttgactttacgatgcaaattatactttgacaacttactatctcagcgggcctattgtggaaaaatgaattttgaccacaagaatgaaactctaagtatatcagttcagcctggagaaggaaataaagctgctttcaatgacatgagagccttgtctggaggtgaacgttctttctccacagtgtgttttattctttccctgtggtccatcgcagaatctcctttcagatgcctggatgaatttgatgtctacatggatatggttaataggagaattgccatggacttgatactgaagatggcagattcccagcgttttagacagtttatcttgctcacacctcaaagcatgagttcacttccatccagtaaactgataagaattctccgaatgtctgatcctgaaagaggacaaactacattgcctttcagacctgtgactcaagaagaagatgatgaccaaaggtgatttgtaacttaacatgccttgtcctgatgttgaaggatttgtgaagggaaaaaaaattctggactctttgatataataaaatgagactggaggcattctgaaatgaaagaaactcctttatatatccaaccacaatcaaacatataaataagcctggaaaaccaactacaacctgcaatttaagattactattactttaagaaaatcaatttcatagtattggttttaaatctttttaagtttttttaatacgatctatttttataggttctttttcagaagtaaaattttgtacatatatacatgtacatatctgtttagtttgggttcatttctataacattttgtaagaaaataaaagtttgagcacctgattatatttagttttgcttttccagatattacattctatagttaccaaaaatggttgaagggagggatttctcattgcagagggtggggtgcaagggaataagacacttgtacggaacactgaagctttgccaacttctacacatgccttttttgcagtcctttaactgtccaccctaccaagagcttataaccagtatcagaactggataatgacgcagtttttcactctgacctccatcatgcttgcctgatttaaaagccctcagtttgcagtccagggactgttcaggcttgtcctcagctgagaggacacaggctagagggactgtgcagaaccaggctgggagaagggctgggaaaactgggagtggagggtggatcctcatggagcaggagagtagctcatggctccaggagcctgaggccatgcagttgatggtgagctgacatcaattctaagactcatcctaattgaggggtgttaaaaagtgtgctgcttagaatgaccaaatatagttattgtaaaaaatgatatttatgaactttttattttagaaaacatgaattttattgctccctgtattatttgtttgatactaggattcatgctaaactttttaagaatgtattggatatcaagaagcattccttacattagtagcaataaatattagaataaatatgaaattgaactattttcagaaaaagggcagtatattaagagcagggactgttctctagttattgaggaaaactggactttgtttgtgtttttggtggaggaagaagtttaagatactttagtcttaaattgaggtttgccaaatgagaagttcaaaaacttgggctttctaatcagaatttccaggaggaggaaagtgtgtgctgaatattttaaacatttcccactgatcatacaaagtctgatttttaaatttacacttataatgcctttgtattaaaattatttttaacatgtgcttttccaaattaaaaatgaagtagagtataccaaatgcataaactttcatttttaatttggaaaagcacatgttaaaaatgaagtagaagataccaaatgcctaaactttcattagctaaggaactcatggctgaaatttggtgaagttttgaatggttggctctttcataccgaatgggagacataatccctaggtatcccagcatctttggtgaattgaagaatattcattgctttgggctcaccaaggtttgatttgacctatcataggggaaaaaatctgcccttatgggtccagtagggatcaactactaagaggcgagattaaaaggaaaccggccttctaaaattgggggaactgcaaaataacgcctaggattgatgtggaaacacaacaacgaggcgcgggtcgatggtaccgcgtgtcgtaccgggtgggcaacgtaatctttgttgtgggcgcgacgggctgcttgcgggcgtctgggccgatagggaaactctcgcggcgatcggatggaggggattggcggggaagggtgcacttgtaagagaagcacgccgaccaatacgtatgtgacggggaggcggtgtggagggggtggtatctataaggcacgcccggcaggtaacgcggctgtcgagtgggaagatccggtgatgtcgcggcggggtgggatgtgacgggagcgaagccattgtggtc

SEQ ID NO: 80614 - DNA, 440 bp, Homo sapiens
  misc_feature (1)...(440): n = a,t,c or g
  sig_peptide (30)...(165): this location contains the signal peptide sequence, MLWIFAYFRIISSMFTETTVLKIVLAIRTGPDRINCEQKTWINIR, Run with SignalP
  misc_feature (39)...(161): similar to gi3341550 in the genepept database release 114, Run with FASTXY 3.3t00, default parameters
ttcctgtttnnggnctgtcacgcgtccgaatgctctggatcttcgcttatttccggattatatcctctatgttcacagagaccactgtgctgaagattgtcttagcgataagaactggcccagatagaattaactgtgagcagaaaacctggatcaacattagggagctggaggacagtcttccaagaattgatcctgttacccttatatccacgtttccctgtgatgtggtcacaatactagagacggttttcttttcaaaacacattattcatttttagtgacaccaaatttcagtgagcgttattctctgaacattttttatgctaaaacactgaattgtggctttcctgtactgtaatatatctggtggttatttgggtttttatagtctgattttttttttttaaacaggggaaggttttagttggtttaactgc

SEQ ID NO: 80615 - DNA, 801 bp, Homo sapiens
  sig_peptide (662)...(527): this location contains the signal peptide sequence, MYRSVLFVFPQGFRLPFMLFEASKTFLDYWEAVRSSKVQNKKHGF, Run with SignalP
  misc_feature (689)...(593): similar to gi4376537 in the genepept database release 114, Run with FASTXY 3.3t00, default parameters
actttttgggacatataattttaatgtactgtgactctgccatctagctattattattttttatacaagatttggaaatatctctctcattcagatattttaaatgtaatagcatttgatatgatatactcgcacctaataatctggtctccactaaggacttattgtaattaaaaagttaaacaagttagctgatggacaataaatctgttttaaggagggaagagaaaacaggcccttgtaaatattagctcttaagtgccagctactttatatgcaatatcatttgaaagatctcctaccatactaaataaagaattggaggccattatccctatattataattaaaggtgggggaggggagaagatcctcacaagaattcacaaagctagatattattacccttcctctctatttctcaacagatgagaaaagtgaggccaaaagaagctaagcaatttgttcaaggccatcatgcagctatgtagtggggtggatccgggttaattctaactgactccctgaatccatgctttttgttctgaaccttgctgcttcttacagcttcccaatagtccaagaatgtctttgaagcttcaaaaagcataaaagggagtctaaacccttggggaaaaacaaacaaaacagatctatacatatacatgtatatataattcccctccccacaccctcatgccatgagctttctttttaagctcttcttagtgcagctttcagtccttgggcccaaatgcatagcactaggtcaactctgggaaggctcagaaaggccctggat

SEQ ID NO: 80616 - DNA, 605 bp, Homo sapiens
  misc_feature (1)...(605): n = a,t,c or g
  sig_peptide (233)...(368): this location contains the signal peptide sequence, MCPFMPPPGLLRLFQIVFWVEHPGSVNPFERSTIIGRSAKLKKDL, Run with SignalP
  misc_feature (53)...(85): similar to gi3377939 in the genepept database release 114, Run with FASTXY 3.3t00, default parameters
cccgtatgacaacgcgtacgctttttctggtctctcgcttcttgatatcatacctgagttttctaatttagatactcccctctgcacttctaatttgacagtctaagcttctgggtacctgaatatcagaaaaccaagcttacataaattgcatatgaaataaggattcctagtctctaagaacttgagagaaggcatatggcctaagaacccaagctttagtgaatgaccaatgtgtccatttatgccacctcctgggttattgaggctattccagatagtcttttgggttgagcaccctggttcagtgaatccatttgagagaagcacaattataggaagaagtgcaaaattgaaaaaggatctgaaaagtcattgggagcctgggcaacaggctctacaacagggtcttttgtagagaccctatctctacaaaaaatagaaaaattagccaggcatggtggcttgtgtgcatgtagtctcagctactcangaggctgtggtgggaggatcacttgaatccaggaatccaagtctgcagtaggtcatgattgcaccaccctatgctgtgcaagagagcaagaccctgtctcanaaaaaaaaaa

SEQ ID NO: 80617 - DNA, 3089 bp, Homo sapiens
  sig_peptide (2962)...(2827): this location contains the signal peptide sequence, MPYVTEATRVQLVLPLLVAEAAAAPAFLEAFAANVLEPREHALLT, Run with SignalP
  misc_feature (3091)...(2096): similar to gi458888 in the genepept database release 114, Run with FASTXY 3.3t00, default parameters
gaattccggcgcaggcgcccgagccgagcgccgagcagggagcgggcggccgcgctccgggccggggtcccgggggagcagatcctcagaatggcccttggtgctgcaggcgcggtgggctccgggcccaggcaccgagggggcactggatgactctccaggtgcaggaccctgccatctatgactccaggtcttcagcacccacccaccgtggtacagcgccccgggatgccgtctggagcccggatgccccaccagggggcgcccatgggccccccgggctccccgtacatgggcagccccgccgtgcgacccggcctggcccccgcgggcatggagcccgcccgcaagcgagcagcgcccccgcccgggcagagccaggcacagagccagggccagccggtgcccaccgcccccgcgcggagccgcaggtgagtgggaggcccggcgaggagggggcgtgcaggggcgggcctgggggaaccgcagggaccagattcgggagctggtccccgagtcccaggcttacatggacctcttggcatttgagaggaaactggatcaaaccatcatgcggaagcgggtggacatccaggaggctctgaagaggcccatgaagcaaaagcggaagctgcgactctatatctccaacacttttaaccctgcgaagcctgatgctgaggattccgacggcagcattgcctcctgggagctacgggtggaggggaagctcctggatgatgtacgtcccggcccagcccagcaaacagaagcggaagttctcttctttcttcaagagtttggtcatcgagctggacaaagatctttatggccctgacaaccacctcgttgagtggcatcggacacccacgacccaggagacggacggcttccaggtgaaacggcctggggacctgagtgtgcgctgcacgctgctcctcatgctggactaccagcctccccagttcaaactggatccccgcctagcccggctgctggggctgcacacacagagccgctcagccattgtccaggccctgtggcagtatgtgaagaccaacaggctgcaggactcccatgacaaggaatacatcaatggggacaagtatttccagcagatttttgattgtccccggctgaagttttctgagattccccagcgcctcacagccctgctattgccccctgacccaattgtcatcaaccatgtcatcagcgtggacccttcagacccagaagaagacggtcgtgctatgacattgacgtgaaggtggaggagcccattaaaggggccagatgagcagcttccttcctattccacggccaaaccagccaggagaatcagtgcttctggacagtaagatcccatgagccgattgagtcccataaacccagctccaagatcccagagggacttcaatgctaaagtttcttccagagacccccaaaggctatgtccaagacctgctccgctcccagagccgggaccttcaaggttgatgacagatgtagccggcaaccctgaagaggagcgccgggcttgagttctaccaccaagccctggtcccaggaggccgtcagtctgctacttctacttgcaagatccagcagcgcaggcaggagctggagcagtcgctggttgtgcgcaacacctaggagcccaaaaataagcagcacgacggaactttcagccgtgtcccgggccccagcattttgccccgggctccagcatcactcctctgccaccttggggtgtggggctggattaaaagtcattcatctgacagcagccgtgtggtcattggaaactggggaggggagggggagagaaggggaagggaagaaggtggggaggcagtgggtccctcgggacgactccccattcccttcccttggattcttctccttactcaattttccctagacctaaaaacagtttggcagaagacatgtttaataacattttcatatttaaaaaatacagcaacaattctctatctgtccaccatcttgccttgcccttcctggggctgaggcagacaaaggaaaggtaatgaggttagggcccccaggcgggctaagtgctattggcctgctcctgctcaaagagagccatagccagctgggcacggccccctagcccctccaggttgctgaggcggcagcggtggtagagttcttcactgagccgtgggctgcagtctcgcagggagaacttctgcaccagccctggctctacggcccgaaagaggtggagccctgagaaccggaggaaaacatccatcacctccagcccctccagggcttcctcctcttcctggcctgccagttcacctgccagccgggctcgggccgccaggtagtcagcgttgtagaagcagccctccgcagaagcctgccggtcaaatctcccccctataggagccccccgggaggggtcagcaccaggaggggagggggggtcagggccagcccccgggggccctgggggtgatctctgtggtgacagggcaggattgaactcctggaaatggactggaaagaaggcctgccagccagagatggcattcatgcgacagcggttgaggacttcgggcccaggccttgtccacacggtggtaaggaagaagagagtgtccacagggtgcttcttcgagaccacgtccatgagtcgcacctgggaaggggcctctgctcgcacagcgagccaggccagcctcgtcccagggtaccgtcgctctaactccgctgctgcagccttcaccccaagaaatgggtctggagctccacggccaccttctcgtggcccgtagaccagcaacagggtgagcaatgcatgttctcgtggctccaggacattggctgcaaaggcctcgaggaaagccggggctgcagcagcttcagccaccaggagtggcagcaccagctgcactcgggtggcctcagtgacatagggcataggtaggatttccaaccggctcagtggccgcagcaggctgaccctgcgagccagggcccgccggtgcccacgctgtgtcacacattccaacagcaggtccagggtgtactccatgccccgtgctgggtcg

SEQ ID NO: 80618 - DNA, 1544 bp, Homo sapiens
  sig_peptide (112)...(247): this location contains the signal peptide sequence, MQWKVTLTSRWGLLRHCQVLAGLLHLGNIQFAASEDEAQPCQPMD, Run with SignalP
  misc_feature (88)...(531): similar to gi603688 in the genepept database release 114, Run with FASTXY 3.3t00, default parameters
caacccgtgccccgtcgtcctctggaacatgagactgccccagagcagcaggaggggatagataggatggcctggcagtcgagaaagggaggccacttcagggaggtagcaatgcagtggaaagtgaccctcacctccagatgggggctgctcagacactgccaggtcctagctggactgctgcaccttggcaatatccagtttgctgcctccgaggatgaagcccagccctgccagccgatggatgatgccaagtactctgtcaggacggcagcctcgctgctggggctcccagaggacgtgctgctggagatggtgcagattaaaaccatcagggcaggcagacagcagcaggtgttccggaagccctgcgcccgagccgagtgtgacacccgtagagactgcctggccaaactgatctatgcgcggttgtttgactggctggtatcagtgatcaacagcagcatctgtgcagacaccgactcgtggaccactttcataggcctgctggatgtgtatggatttgaatcatttcctgacaacagtctggaacagttgtgcatcaactacgccaatgagaagctgcagcagcattttgtggctcactacctaagggcccagcaggaggaatacgcagttgagggcctggagtggtcattcatcaactaccaggacaaccagccctgtttggatctcattgagggaagccccatcagcatctgctccctcataaatgaggaatgccgcctcaatcgacccagcagcgcagcccagctccagacacgcattgagactgccctggcaggcagcccctgcctgggccacaataagctcagccgggagcccagcttcattgtggtgcattatgcggggcctgtgcggtaccacacagcaggcctggtggagaagaacaaggaccctatcccacctgagctgaccaggctcctgcagcaatcccaggaccccctgctcatggggctgtttcctactaaccccaaagagaagacccaggaggaaccccctggccagagcagggcccctgtgttgaccgtggtgtccaagttcaaggcctcactggagcagcttctgcaggtactacacagcaccacgccccactacattcggtgcatcatgcccaacagccagggccaggcgcagacctttctccaagaggaggtcctgagccagctggaggcctgtggcctcgtggagaccatccatatcagtgctgctggcttccccatccgggtctctcaccgaaactttgtagaacgatacaagttactaagaaggcttcatccttgcacatcctctggccccgacagcccatatcctgccaaagggctccctgaatggtgtccacacagcgaggaagccacgcttgaacctctcatccaggacattctccacactctgccggtcctaactcaggcagcagccataactggtgactcggctgaggccatgccagcccccatgcactgtggcaggaccaaggtgttcatgactgactctatgctggagcttctggaatgtggggcgtc

SEQ ID NO: 80619 - DNA, 713 bp, Homo sapiens
  sig_peptide (95)...(230): this location contains the signal peptide sequence, MDTPSSLGLHLVLFLSVTHLQGLDFAYNLGEALQRAKVLIEGLPI, Run with SignalP
  misc_feature (128)...(409): similar to gi5306148 in the genepept database release 114, Run with FASTXY 3.3t00, default parameters
taaccagtctcccattgctgctgctccctccctctgtgcagatgtcctatacacttgggccctgcctgacatcctgtgctgcagtgactgccacatggacacaccctcctcacttggcttgcacttggttctctttttaagtgtgacacatctacaaggactagacttcgcttataatttgggtgaagctttgcaaagagcaaaagttcttattgagggcttgcctatctcctttaaccttaaattgcatttttttggtcagtccttctatctaattaattttctttttgtttgttttggccttaactactatagtgatgaatatatttacctgtgggtattgattctcatatcaatggttatgcacattattattagacagctcgtgatatgttacataaatgttatatgtagtactttttaaggtataagtagtaaagccatatgtttctacaacaacataaaatgcaaagatgttagaccctgcttaaaagtcccatgtgtctgcctgtgatcctcatgattatggattgcatggagtctgtaatcatatcagagtgcccaatagaactagactatcacaaaatttatgattctctgattttaaaattatatcaaagagatcaccattagtgatttagtttcttttgtgtttgttattccttagaaaggtcttttttttctttgaaaaatgcctgaaggttgaaagttat

SEQ ID NO: 80620 - DNA, 453 bp, Homo sapiens
  sig_peptide (28)...(163): this location contains the signal peptide sequence, MILPLPLFLRCLPQLLHASATFFQALCVWSSLPAPTTPQTVPFQN, Run with SignalP
  misc_feature (59)...(170): similar to gi5104833 in the genepept database release 114, Run with FASTXY 3.3t00, default parameters
aaatctgcattttaacaactgtcccaaatgattctgcctctaccccttttcctaagatgcttgccacagctcctgcatgcgagcgccaccttcttccaggcattgtgtgtgtggtcttctctgcctgcccccaccaccccgcaaactgtccccttccaaaacaccctcctttttcacctattagaagcaaagcatttcttgacaaattcagccacactgatttctttcttctcaactcccactgcaattagtcatgtcaccttttacatgtactattcaataaagcttgtggataaattgctatcaattgatcttattcatttgttctagggaaagtctagtgttgagacagcacgcaaggttaaatgatttacaaatgttaagtgtgtggaatgtgaatctggagccatggttattaaccccaaagaaccccagctcaccatgtttaaactg

SEQ ID NO: 80621 - DNA, 401 bp, Homo sapiens
  sig_peptide (295)...(160): this location contains the signal peptide sequence, MALLALPQVWCWSHLVLFLQGRTQHPNIDTRSLQQPASIKDPRVC, Run with SignalP
  misc_feature (403)...(173): similar to gi2621766 in the genepept database release 114, Run with FASTXY 3.3t00, default parameters
ttattttcatttccaaatccttagtaccttgtacaagtgcccatcagacagcaaaaacttggcaattgttgaatgaacaaatgcttttttgtcttgtataccctaaaagaccatggattctaccggcctccattaattgactgtcctccgtgcctcagtgcgcatacacgcggatctttgatgctggctggctgttgcagactcctggtgtcaatattgggatgttgggtcctcccctgaaggaaaagcaccaaatgtgaccagcaccacacctgtggcaaagcgagcagagccatggttggcggctctctttgtgcatcttggggcggttcacctgtggctttatcaaggcccccttctttccatgagtggatttctctatgcctttgtggacaggcttt

SEQ ID NO: 80622 - DNA, 4718 bp, Homo sapiens
  sig_peptide (3024)...(2889): this location contains the signal peptide sequence, MAAGVSSVLLLLFTLMESGLKHRVWESWQLFTSWLAFCSPSFSVV, Run with SignalP
  misc_feature (2)...(2875): similar to gi2853301 in the genepept database release 114, Run with FASTXY 3.3t00, default parameters
gatcaccatcaccgagaccacctcacacagtactcccagctacactacctcaatcaccaccaccgagaccccctcacacagtactcccagctacactacctcaatcaccaccaccgagaccccatcacacagtactcccagcttcacttcttcaatcaccaccaccgagaccacatcccacagtactcccagcttcacttcttcaatcaggaccaccgagaccacatcctacagtactcccagcttcacttcttcaaataccatcactgagaccacctcacacagtactcccagctacattacctcaatcaccaccaccgagaccccctcaagcagtactcccagcttcagttcttcgatcaccaccactgagaccacatcccacagtactcccggcttcacttcttcaatcaccaccactgagactacatcccacagtactcccagcttcacttcttcgatcaccaccactgagaccacctcacatgatactcccagcttcacttcttcaatcaccaccagtgagaccccctcacacagtactcccagctccacttctttaatcaccaccaccaagaccacctcacacagtactcccagcttcacttcttcgatcaccaccaccgagaccacctcacacagtgctcgcagcttcacttcttcgatcaccaccaccgagaccacctcacacaatactcggagcttcacttcttcgatcaccaccaccgagaccaactctcacagtactaccagcttcacttcttcgatcaccaccaccgagaccacctcacacagtactcccagcttcagttcttcaatcaccaccactgagacccccttacacagtactcctggcctaccttcgtgggtcaccaccaccaagaccacctcacacattactcctggcctcacttcttcaatcaccaccactgagactacctcacacagtactcccggcttcacttcttcaatcaccaccactgagaccacctcagagagtactcccagcctcagttcttcaaccatctactccacagtcagcacatccacaactgccatcacctcacattttactacctcagagactgcggtgactcccacacctgtaaccccatcttctctgagtacagacatcccgaccacaagcctacgaactctcaccccttcgtctgtgggcaccagcacttcattgactacaaccacagactttccctctatacccactgatatcagtaccttaccaactcgaacacacatcatttcatcttctccctccatccaaagtacagaaacctcatcccttgtgggcaccacctctcccaccatgtccactgtgagaatgaccctcagaattactgagaacaccccaatcagttcctttagcacaagtattgttgttatacctgaaaccccaacacagacccctcctgtactgacgtcagccactgggacccaaacatctcctgcacctactactgtcacctttggaagtacggattcctccacgtccactcttcatactcttactccatcaacagccttgagcacgatcgtgtcaacatcacaggttcctattcctagcacacattcctccacccttcaaacaactccttctactccctcattgcaaacttcactcacatctacaagtgagttcactacagaatctttcactaggggaagtacgtctacaaatgcaatcttgacttcttttagtaccatcatctggtcctcaacacccactattatcatgtcctcttctccatcttctgccagcataactccagtgttctccactaccattcattctgttccttcttcaccatacattttcagtacagaaaatgtgggctccgcttctatcacaggctttcctagtctctcttcctctgcaactaccagcacttcttcaaccagctcctctctgaccacagctctcactgaaataacccccttttcttatatttcccttccctccaccacaccctgtccaggaactataacaattaccatagtccctgcctctcccactgatccatgtgttgaaatggatcccagcactgaagctacttctcctcccaccaccccattaacagtctttccctttactaccgaaatggtcacctgtcctacctccatcagtatccaaactactcttactacatatatggacacttcttccatgatgccagaaagtgagtccagcatctcacccaatgcttccagttccactggcactgggactgtacccacaaacacagttttcacaagtactcgactgcccaccagtgagacctggctgagcaacagttctgtgatccccctacctcttcctggcgtctctaccatcccgctcaccatgaaaccaagcagtagcctcccgaccatcctgaggacttcaagcaagtcaacacacccatccccacccaccactaggacttcagagacaccagtggccactacccagactcctaccacccttacatcacgcaggacaactcgcatcacttctcagatgaccacacagtccacgttgaccaccactgcaggcacctgtgacaatggtggcacctgggaacagggccagtgtgcttgccttccggggttttctggggaccgctgtcagctccagaccagatgccagaatgggggtcagtgggatggcctcaaatgccagtgccccagcaccttctatggttccagttgtgagtttgctgtggaacaggtggatctagatgcagaagatttttgcagacatgcagggcttcaccttcaagggtgtggagatcctgtccctgaggaatggcagcatcgtggtggactacctggtcctgctggagatgcccttcagcccccagctggagagcgagtatgagcaggtgaagaccacgctgaaggaggggctgcagaacgccagccaggatgtgaacagctgccaggactcccagaccctgtgttttaagcctgactccatcaaggtgaacaacaacagcaagacagagctgaccccggcagccatctgccgcgcgccgctcccacgggctatgaagagttctacttccccttggtggaggccacccggctccgctgtgtcaccaaatgcacgtctggggtggacaacgccatcgactgtcaccagggccagtgcgttctggagacgagcggtcccacgtgtcgctgctactccaccgacacgcactggttctctggcccgcgctgcgaggtggccgtccactggagggcgctggtcggggcctgacggccggcgcgcgctgctggtgctgctgctcgtggcgctgggcgtccgggcggtgcgctccggatggtggggcggccagcgccgaggccggtcctgggaccaggacaggaaatggttcgagacctgggatgaggaagtcgtgggcactttttcaaactggggtttcgaggacgacggaacagacaaggatacaaatttctatgtggccttggagaacgtggacaccactatgaaggtgcacatcaagagacccgagatgacctcgtcctcagtgtgagccctgcggggccccttcaccaccccctccgccctgccccggacacaagggtctgcattgcgtccatttcaagaggtggccccaggacgcgggcagcccaggctcctgctgttcttgggcaagatgagactgttcccccaaatcccatccttctccttccaacttggctgaaacccacctggagacgcagttcacgtccaggctcttccactgtggaatcttgggcaagtcagtaacgagcctcagtttcctcacctgcaaaacgggtacagcattcctgtatgatacgtcacgccgttgttgtgaaaaccacatagacttggtcaattctcggtcctactctgccctcccgtctcagccctcgtgttgccattgcctctctcggatcctccaatcctcacgtccttcacctggtctctggccctggttcttattttctctcaattccctactgcctgtttcttactttgaacctggaggcagcctgcagccccatcccatctcctgccctctcctgatctaactccctgctgcatctcttgctcccattccttagacgtcctccccttttgaccccgttccttcatccatcctgcaccccagtcccccagccctaaatcctccctcctctcctcacatcctggcccctagcaaggtatagatagcctctgtgtcttaggataccccgggtgctgttccctcggtcatcctgttgcccagttccccgtttctcttgctctcattcctgtatcctttccccttttgagcccgtccattcatcggttctgcccccgactcccccagccctaaataccccagctgctgttccccccatcaccctgctgcccaattctttattctccacccctttctctcacccctggagccctgcgggtgggggcagggcatgagttccccagtccccaaggaaaggcagccccctcagtctccctcctcctcattcccttccatctccctcccctctgccttttaaacccatcccctccgattcccctcctcccccctctctccctggtgtcaactcgattcctgcggtaactctgagccctgaaatcctcagtctccttggcggggaagattggctttgggaacaggaagtcggcacatctccaggtctccatgtgcacaatatagagtttattgtaaaaagcaaaaaaaaaa

SEQ ID NO: 80623 - DNA, 423 bp, Homo sapiens
  sig_peptide (19)...(154): this location contains the signal peptide sequence, MLSTSVSAILLSICLRAPCFLCPDLKMLGWQDMALGPLRKTGKRT, Run with SignalP
  misc_feature (368)...(311): similar to gi2440230 in the genepept database release 114, Run with FASTXY 3.3t00, default parameters
agccgggctgagccactcatgctgtccacctctgtctctgccatcttattatcaatctgtttgagggcaccttgcttcctgtgccctgatctcaagatgctaggatggcaggatatggctctgggacccctaaggaagacaggtaagaggacatccctcagaagatcctgtccctccccatcaggggaccctcactttcccacccaccagtgctgctgtgtcccacaattctgagggcaccgttcacattgtgctatatgggaatagtaccccctggggttgtgcagaggccaggaagtctgtgccagcagataagtaggagggcagaatcggacacttttctgtgttctaggcaaacaatagagacctttccaggaagctcgggggaaggagctgcctgtaagaggatccccgcggagatcc

SEQ ID NO: 80624 - DNA, 450 bp, Homo sapiens
  misc_feature (1)...(450): n = a,t,c or g
  sig_peptide (312)...(447): this location contains the signal peptide sequence, MRRRSCIVSKQLWCPVTVLEGLTSSXNAGGLVLRNCMGAFSLLHA, Run with SignalP
  misc_feature (32)...(122): similar to gi4927795 in the genepept database release 114, Run with FASTXY 3.3t00, default parameters
tatttattagccaaattttttagaaactgcattagaattctgtatattcagaaatggagatgagaatgtaaacaaattattacatcattcacctagacagcatttcccggaaccgcataggccattgacattatgctgtttccccatgtgctgaaggccctggcataatccgagcatgctctaatgtcttctgtgaacctccttctcagctcagcagcagatgcggccagcaaggcggatctccatcagcatctctccgctcctccttaagtctaaaactctcttttctcttggctcttcttattcgagtgatgaggaggaggagttgcatagtaagtaagcaactttggtgtccagtgactgttcttgaaggtctgaccagctcanaaaatgctggaggcttggtactaagaaattgtatgggggcttttagcctcttgcatgccatct

SEQ ID NO: 80625 - DNA, 1365 bp, Homo sapiens
  sig_peptide (1336)...(1201): this location contains the signal peptide sequence, MLWLLFFLVTAIHAELCQPGAENAFKVRLSIRTALGDKAYAWDTN, Run with SignalP
  misc_feature (1282)...(805): similar to gi5817160 in the genepept database release 114, Run with FASTXY 3.3t00, default parameters
ttttttttttttcacaatcaaaaagagatgattattactttattaagttagcacagattggacttttacaaattgtagaaatggtcaacaaatagaattgtcctattaggggctgatattcagaaaatatataatcaactgttggtgtgataacaggataaaattccaccctgtatatgagtaattccatttttatccatccatttacaataattacttctcacttttgtttacttagtcatatacagagtgatataagtgatcgtcaaaaaggatccattttcaatgatttctacaccatattatatgtattctccactggaaaatttatttttccttaggtctttgaagtgtgaaaatatatacatatgcctgatcttatttctaaaaatgcttaaatcaataactacaaataccacatgaccacatttatacactatactgtcagaaaaatattttagaatattttgagtcgtgaatagcttatgatttcagtggtgttggtgggtataattgattgcttttcactttcaagcacattcaaaatttattacaaaagaagaatggtgaaacaaaatatatgatctgctcttggtatttcaggatgctcagcagtcacacagaaacaaatgtttaatttcttgaggaagcagaacaacagcccttcagagaggggtgagcctctcatcctctgtcatgaaggcatcattaatatgccctcccttcatgtccaggggatcagaggggatgccattttcaattgtgatcatgttttcacacttattcttcagcgtcatccacttcagatggttctttgttctttcttctacgttgccagatccctgataaaatcagtagtgcaattgcaactatgatgatgcaaaatatcacaccaaatataataatccagatgggcacagatgggtccatgggtggtgcaagtgtggaagggatttttaaaaattccagagtttggtcatttagaaagaaggcattgttgatccggttcttgttcattcttatggctgattgcacctcaacagcaggaagggtgtgattttttgaagggtctgtaaccacaaaccagaatgataccctctgggttacattgcaaagtaggacatgggaaatttctgttgcttctctgttgggaacttttctcatggagaaagctaccatcgctttgaagaggtattcttcattggtatcccaggcatatgctttatctcccagagctgttctgatactaagtctcactttaaaagcattttctgcacctggttgacagagttcagcatgaatggcagtcaccagaaaaaagagcagccacaacattctttcagggtggaaaaccggacgcgtggg

SEQ ID NO: 80626 - DNA, 428 bp, Homo sapiens
  sig_peptide (74)...(209): this location contains the signal peptide sequence, MMRSSQIQVLSVFCSAFVACGFVIPSSGNGGCSPRHNGPLRKKGD, Run with SignalP
  misc_feature (16)...(99): similar to gi2621242 in the genepept database release 114, Run with FASTXY 3.3t00, default parameters
gtggggggaaattatctccacaaaacaaaaagtccgacaataagcaataagctgtccagggctgatacagggcatgatgaggtcatcacagatccaggttctttctgtcttctgctctgcattcgtagcctgtggctttgtcattccctcatctggaaatggcggctgcagccccaggcacaatggcccgttgaggaagaagggggacgatgtgcagtgtcaggttattttatcaggaaagttcaaagcttctcagaaatcttctgttggaattctacctgggtgtcataggccagaacacaacccaaataaccaggaaaaatgtgaaagtgagaaaatagatcgtccacccctaacaatggaggcagcaagtgagaggggattgggaatgtgtgttgatttcctcaacagtgtttgacataaccact

SEQ ID NO: 80627 - DNA, 385 bp, Homo sapiens
  sig_peptide (94)...(229): this location contains the signal peptide sequence, MGLLWLITLLLQKSQFILISLQRTSLATLLKESSAFPSSIILVLF, Run with SignalP
  misc_feature (100)...(287): similar to gi3861042 in the genepept database release 114, Run with FASTXY 3.3t00, default parameters
cttggtcccaaattatgctctgacactgaagtatcccagccccctttcccagtggtgtctggtaatggcttgaattcgccaggaccttaccacatgggtctcctgtggctcattacattgttgctacagaaatctcaatttatactcatctctttgcagaggacttccctggccaccttattgaaagaaagtagtgcttttccttccagcatcatccttgtcttatttttcttcaccgaaccctcagtacctgacatacttcctgacatatttatatctgttgtctctatttaccatttaaatataaactgtgctagcaggaattttcattttgttctctgctgtgaacagtgcatggtccatagtagaaactcaaatatttttt

SEQ ID NO: 80628 - DNA, 407 bp, Homo sapiens
  sig_peptide (251)...(386): this location contains the signal peptide sequence, MCWLLLWIKEWKIIKTCTVLVLVELRSLQSRGKREDTSNQHPLTQ, Run with SignalP
  misc_feature (2)...(52): similar to gi166290 in the genepept database release 114, Run with FASTXY 3.3t00, default parameters
aattattatgttgtatattgttttaattttgcatattttatctaatttgtctcataacgactatatgagggaggtagggcttatccacattttaggtgagagaaataagcctcagagaggttaagtagtttgttcacagtaacactgcaaacagtagtagaagcaagaattgaagtaacgcattgttctcttagctacatgttatgaatatttaattactctttcacttcatatttagagactatcttctatgtgttggctattgctatggataaaagagtggaaaataataaaaacatgcacagtccttgtccttgtggagcttaggagcttacaatctaggggaaagagggaagataccagcaaccagcacccattaacccaagtgattatttaatcacccttgt

SEQ ID NO: 80629 - DNA, 384 bp, Homo sapiens
  sig_peptide (62)...(197): this location contains the signal peptide sequence, MFFYISIGVLFPFNSLLEQPETFLCHISSAVLCPIELAASLVLQL, Run with SignalP
  misc_feature (337)...(247): similar to gi2983584 in the genepept database release 114, Run with FASTXY 3.3t00, default parameters
attccttgttttattcagtgatttgaattagatttttacttgtctttggttgaaacactagatgttcttctatatctcaattggggttttatttccttttaattctttgttggaacagcctgaaacttttttgtgtcacatctcttcagctgtcctttgtcccattgagttggctgccagcctggttctgcagcttgggttgactgacatttttatttggtaacttgaaccaattgcttatttataataggtacaaaccctcatgggatttagtgtttgacagcaattgttgcagctgagtagtttgaataggctaaaacagaaaagtttccaaaagatgacagaaataatgtgaaactcaggaaaaatggagtataaatgact

SEQ ID NO: 80630 - DNA, 399 bp, Homo sapiens
  misc_feature (1)...(399): n = a,t,c or g
  sig_peptide (3)...(138): this location contains the signal peptide sequence, MSSLLCLAGLIGGCCPHFSFHTPVAQPAEALMLETLGACREGPGQ, Run with SignalP
  misc_feature (100)...(202): similar to gi2398712 in the genepept database release 114, Run with FASTXY 3.3t00, default parameters
aaatgagcagcctgctttgtctggcagggctaattggaggctgctgtccacatttctccttccatactcctgtagctcagcctgcagaggctctaatgctggaaaccttgggggcctgcagggagggacccggtcaggctacccctcggttcccaatgcacagtgccaggaagggtcatttcatccctgccccgctatgcttgctcaggtctgagacagtggggtcagccccctgacagcacctgctgactgcagggcccctcctgatggcagggtgaccaagagttacccctctctggaagaaccagctgaagttgggtgtttaatgcagccacagatcctgcctcctatactcagaanaggctgaaaagcattcccatctggaaattagtccgtagg

SEQ ID NO: 80631 - DNA, 603 bp, Homo sapiens
  sig_peptide (29)...(164): this location contains the signal peptide sequence, MLGGNFLMFLPPLQRLCSNLLSYVIPNDFSVMSCFIKASLNYTLL, Run with SignalP
  misc_feature (367)...(247): similar to gi2633213 in the genepept database release 114, Run with FASTXY 3.3t00, default parameters
gggaaggaggtagttggtttacttgcgaatgcttgggggtaattttctaatgttccttccaccattacaaaggctctgctccaatctcttatcatatgtaattcctaatgatttctctgttatgtcctgttttattaaagcgtcattgaactataccctattgatttagatttcacagacaattgaaatttaaattgactccaaattgaatgtctccatgtaatctctgttctgcaataaagatagataaaatgcttctatttttgataacaagttatactggaggcacattttaattttgggagggaagaaaaaaatgttgacggagtcttgactttctttgaaaagtggctgatggttcaaggcccaggaggttgttttttgtttttctctggggcatggtgctggagctataaaattctggaatgtctggactgactcacaggtgggagaggaaggtgatagagtctgatccattaattaattaattgggggatccatccacaaatccatccatttctctggggagcacagcatgcaaggtgagaggaaagagtgagccatagctctcatgatgggcatgactccaagctcacgtgattt

SEQ ID NO: 80632 - DNA, 382 bp, Homo sapiens
  sig_peptide (27)...(162): this location contains the signal peptide sequence, MCVFVCFYLFLRCIGLSRYLSVHSLLCHCCPDGCVQVAELNKYEL, Run with SignalP
  misc_feature (6)...(82): similar to gi333056 in the genepept database release 114, Run with FASTXY 3.3t00, default parameters
caaagttatgttttaagatttgctttatgtgtgtatttgtctgcttctatctgtttctccgttgcattggtttatccagatatctttctgtacattcactgctgtgtcactgttgcccagatgggtgcgtgcaggtagctgaactcaataaatatgagctaagtgaatgaatgaatgttcctaaatggtgggttattttgtcttttgagcagctgacagtgattctgatcttacaatctaaaagctacaattaagttaaataatacatagttttaggaatttttcttaatttattttcagtgctcctatttttgaatatactcttgcatttttcctaaagtgatatttaaaaactgttacaggaaagcatttttatcagtta

SEQ ID NO: 80633 - DNA, 1929 bp, Homo sapiens
  sig_peptide (1381)...(1516): this location contains the signal peptide sequence, MTVSFCCCWILAVLPSPPLYQDLVGSKLEIQAAGDPMPAASRLFH, Run with SignalP
  misc_feature (1499)...(1310): similar to gi1574001 in the genepept database release 114, Run with FASTXY 3.3t00, default parameters
ttcctgctggtgctcgcggccaacgtgatcttggcgcgggcgctcaaggcgccctgtggccctttcccgggccctgcaaccgccggcgcgcaccggcgcgcggccaagaccatggtcctggggttcctgctggtcttcgccctcagtctggcgcccaaccacctgctgctggcgccctaggtggctgggggggaagacaacggagaccggtgtcgcgccgcctccacgctcgacatcctgcacaccctcagcctggcgctgctgagcctcaacagctgcctggacccactcatctgctgcttcttcgtgcgcctcttccaccaggactgctgctgggcactgagctgccgcctggtgaagggggcgcccagggcgcatggggcctccttggcctcctcttggagagtctcctggcctcccctcctgtctcacccccctgtcaccctcccagtggcatccagggtggagaaagctctttggaaagacctagattctaatcctgacgcaaccacatactacccctgtagctgtgaacctccgggctcatctgtaccaaggacatagaacattctttgtaacccgaatgttccctggatgttgccagcttttggatacaaataatataccactgtgttttttttaaacctcttgggataaaacccaaagtccttatcatggcctacaaggccctgtctgatttggctcccctttctctccctaacccaccacccctgcgtctccctgcaggcagtcaccttcttaggcccgggaaaatgccggtctcctactcttcatggcctttgtacctgacttggccaggaatgatctctgttcctctctttcactaagttagttcttcttcaccctcacttcctctaaagtaactccttatagggaagcctttcttggctggcaacacacacacacacacacacacacacatacacacacgactgaatcagatcggattgctctttgatagctcttttcataattgtaatcaagcaattaattgggtaatgcgttgttgttgttttctttctctcttgccagaatgtattcatgttgacccataagacattatcatttttataagtccccaaaagttgaatattggaaattttatttccacccaattcaacttaataaattctgtgtttaccttgctcactgctgtatctcctgtggttggtactgtgccttgcatataataagagctcagtgtatcagatgcgtgagtgaaaactgaatatcattaatctaaattgcttaagtactcactcagacattccagtctctgatagcttttcctcaagtgtttctgagattctccaagcttgtcttacccacccccgaccatgccttcctagcccagtcctgatgactgtctccttctgctgttgctggatacttgcagttctgccatcacctccactgtaccaagacttggtgggaagtaagctggagatccaggctgctggagatccaatgcctgctgcctccagactctttcatgagcgccaatctctgccaggggctccggctaccagtgcttccccttctgtgctttgacaactctgcagtctgcttctaatgggaaagggcaccactctcctcagccacattattggggccccacagcaagactgcttgggtctcaaggaaatcgagcttaatgaatgagagcaaaccccttttcatttggggcattggcgccctgtcagggaagggtccatcaatcagccaccatgtcttacctgcctttaggtcctattgctgagtttgacttctaaggatacatttggtaaattcctttttttcttgatgaattacctcttattggtccctaattccttctttaactttttttctttttccattttaaaagccactataggttccttaaaagtaaatttcaaggccgtggaa

SEQ ID NO: 80634 - DNA, 443 bp, Homo sapiens
  sig_peptide (284)...(419): this location contains the signal peptide sequence, MLKIGMHCIYLFLKSLVNVLMAVRSARKKPNIITWDCVGIVVLCG, Run with SignalP
  misc_feature (446)...(246): similar to gi5801919 in the genepept database release 114, Run with FASTXY 3.3t00, default parameters
ccggacgtaatttccgggtcgacgatttcgtggttcttctgcatcttctatttttttccaccagtatgaattttgagttccaaaacattaacttaatatctgtttataaattggagatgtgtaatgttttgtacatatatcatttacagtctcttttctccaagaattaataggtgttgtgaacacatatagaattgtgcccacatatttcatgatcaagtaaacatgcccagtagtacttttaaggggaggaagggagagtgttggaaaagaaatagagtagatgttaaagataggaatgcactgtatatacctctttctgaagagcttagtaaatgtcctgatggctgtcaggagtgcacgtaaaaaacccaacataatcacctgggactgtgttggaattgtcgttctgtgtggaatagttgtgtgacctggggcaaaag

SEQ ID NO: 80635 - DNA, 891 bp, Homo sapiens
  sig_peptide (481)...(346): this location contains the signal peptide sequence, MHFLATFALFFIFGVFFLFAVLTNLLLAEEVNIRGGNFLGSFLVH, Run with SignalP
  misc_feature (70)...(403): similar to gi2298412 in the genepept database release 114, Run with FASTXY 3.3t00, default parameters
tttcgtgaaaaaaggaagatggcaagaatattgttacttttcctcccgggtcttgtggctgtatgtgctgtgcatggaatatttatggaccgtctagcttccaagaagctctgtgcagatgatgagtgtgtctatactatttctctggctagtgctcaagaagattataatgccccggactgtagattcattaacgttaaaaaagggcagcagatctatgtgtactcaaagctggtaaaagaaaatggagctggagaattttgggctggcagtgtttatggtgatggccaggacgagatgggagtcgtgggttatttccccaggaacttggtcaaggaacagcgtgtgtaccaggaagctaccaaggaagttcccaccacggatattgacttcttctgcgagtaataaattagttaaaactgcaaatagaaagaaaacaccaaaaataaagaaaagagcaaaagtggccaaaaaatgcatgtctgtaattttggactgaacgttttaagaaatttgttaccttacagaagagcaagggcttaggggttggaggtggcagataaaagaggattttcaactcaaatcttgtttcctgctggcctggtctgcccacgagctagagcggggaaatgttgagctcaaatgggtaaattgagaccagaaaattattttttcaacctagagaatctcctcttacagggggatgcatataacagatcatgtatgtgtagttatttctaaagtagtaattctttccccagctctttgatttgccatatataaataggggggggtcggtatgtcttccctttagacatgatgttttctactcgatttgtctctctggccaattgaattattaataaaaggtctgtattatcaaaaaaaaaa

SEQ ID NO: 80636 - DNA, 439 bp, Homo sapiens
  sig_peptide (77)...(212): this location contains the signal peptide sequence, MSCHCLSPWVPNLCAFHFPPFRVLFWLSLASLSGFIVVLSGEEQG, Run with SignalP
  misc_feature (2)...(129): similar to gi221043 in the genepept database release 114, Run with FASTXY 3.3t00, default parameters
tcccgggtcgacgatttcgtggtttagagacacaggcctgggttgccttccgttgttggggtggggggatcataagatgtcctgccactgtttaagtccttgggtccctaacctgtgtgctttccactttcctcctttcagagtcctcttttggttgtctcttgcatcactttcagggtttatagttgtacttagtggggaagagcagggaaagaggagtctgtgccatcatgtcaggactagaagtctaccatttctatctaatatccatttatatggaacaaggaaggcttgtaagtatagtttgccacctcgtggttttcactcagtgtggtaatttaacaaatactcatcaaatgagtaaccaaagtgtggccaccttttccttcttaacagttgcggaagattattgtattagtcatttcaggctgccattaca

SEQ ID NO: 80637 - DNA, 792 bp, Homo sapiens
  sig_peptide (157)...(292): this location contains the signal peptide sequence, MLKTHLLAPKWGKVLFFLLLLPLHCRAHLPALPRAAAQGWQAGEQ, Run with SignalP
  misc_feature (159)...(318): similar to gi2702312 in the genepept database release 114, Run with FASTXY 3.3t00, default parameters
gtacctcccggatagacgattgcgagcctggcacaaagtctggcagctggtgttgagttgatgagttggagggcaggaggcattgctacggaggtgagtggagttgggtaaatagatgtacgagactacctgggactcttcccttatctgagcattatgctcaagacccaccttctagctccaaagtgggggaaagttctcttcttcctcctgctgctgcctctgcactgccgagcccatctcccagcactcccaagggcagcagcccaagggtggcaggcaggagagcagagtccagctgtcagaggccacctcaggaaggagctgctgtgtggcttgaacagtgttcttcaggcagtgtggctcagcatccccgaggtatcatggcagggagcctacggctcgttctggagtagcagccagaaaactttgctcgcagacttggctttgctgcttactatctgtgtaccatcggacactgtgctgagcctctctgtgccttgcctcgttacctgttcagtggtcttggtaaaccttgtcttgcccatctcacaggactgctataatgtgtgcaaagatgctttgttctaggagaatcttgcataaaaccatgatccttttcttggatattatcaaacaaatgaaactcttatcaaaaaatgaaacgggccatattctattgtcctcaagagacatctgcccctggaacgggtttggggattggcgaccatgacggcctgccagttcagggccatacctttatgctggccacacactcgcccacccgcgcct

SEQ ID NO: 80638 - DNA, 654 bp, Homo sapiens
  sig_peptide (19)...(154): this location contains the signal peptide sequence, MASHGEEDRHWLRACTWIWALSLTLSVSSSVGWRRGGCRWLGRRN, Run with SignalP
  misc_feature (43)...(124): similar to gi4557172 in the genepept database release 114, Run with FASTXY 3.3t00, default parameters
tttcgtggcgtgtgtaatatggcatcccatggggaggaggataggcattggttaagagcttgcacttggatttgggctctgtcacttactctgtcagtttcttcatctgtgggttggagacgaggaggatgcaggtggctgggaagacgaaacgccacggtgcctagaaacagcccacacggtacctcatgtcttcactgcgtgttggatatacctgctaagtgtggaaggaagagaagcggggaggggacatttcagtcccttttactcttctgtactgcttgaaaatatgtcagcgaccatgtgtgacatgtataccatagatagtgttagttccctagtgctgccataactgaccacaaaccagggggctgacaacagcagaaattgagtctctcccagttctggaagccaaaagcctgcaatcagggcatcagccgggcagtgccacctccaagctccagaggaggatccttcctcacctcttccagctgctgttggctcctgacgttccttgcccagtgggcccatctctgcagactctgcctctgtgttcccatggccatctctctcttcttcttacggagacatgagtcattggatttaggggccaccctatgtccaatatgattgtatcttgaagcccttaacttt

SEQ ID NO: 80639 - DNA, 681 bp, Homo sapiens
  sig_peptide (191)...(326): this location contains the signal peptide sequence, MCVCLLYLCIHLLSLSLSHYGWLSSPEPTGRKTGRKDQEQAGTPQ, Run with SignalP
  misc_feature (213)...(306): similar to gi5725347 in the genepept database release 114, Run with FASTXY 3.3t00, default parameters
taccgctccggaattactgggtcgacgatttcgttaaaaatatagcaggtgcctgggattcaaaactgagcaaaacttgctctctgcctctaaatagtttctgaagcactaggggagagagatggttaaagcataaataaatgctttatctcaagtcatgcttctaacagacgagcagaaccaccaggagatgtgtgtgtgtctgttgtatttatgtattcatttactctctctctctctctctcattatggctggcttagcagcccagagcccacaggcaggaagacaggcaggaaggatcaggagcaggctggaacccctcaagcatgtctttttatcttaaggtccccctacagtcatctatcaggggttaacacaattcttcttttgagccatctcccttcttatgaaagcctcagtgttgaagcaggaagcgtttctcccttatagtcatttctatctactctcttatataccagtaagacctgtattataaagaattacgtttatgataagcagatatgcaaatttattctaatatgtattgcctaatttcttgaatacactctagctgcatttattaacatattttatttagtcatctgtgcagctagtaaaaataattggctatctgtgaattagcacaatacaagttaaaatgtgagttcattagttctcaa

SEQ ID NO: 80640 - DNA, 867 bp, Homo sapiens
  sig_peptide (403)...(538): this location contains the signal peptide sequence, MAGLKRRVPLHSLRYFISMVGLFSKPGLLPWYARNPPGWSQLFLG, Run with SignalP
  misc_feature (87)...(168): similar to gi551747 in the genepept database release 114, Run with FASTXY 3.3t00, default parameters
tttcgtcttagagaaggaaggcggcgggtgtcagggctatgagtgcttttaaggaaggtctccatagaaggttcccccagcaaagtagggaggggtactccccgagaggagtcgaggtgccggagcctgctgcctcgccgacgctgggaggagccccgtgtcccgccgcgcttgccaagggttggctgcgcgtgcggcgggagtagaggcgccttgcgcaccaggaagtgactgtttccccgccgcagcaaaccaggccatccgctggccttttagtttgccgcctcagaaaactccctactatgccaaactgtccgcggggcggggaatggaggaggcaggcggggctggagacgggacccgacggtgactgcgcaaggtggatttcagtgtgttctttggatggcaggccttaagagaagagtcccactgcacagcctcagatacttcatctccatggtgggtctcttctccaaaccaggactgcttccctggtatgccagaaatccaccaggatggtcacagctctttctaggcacagtatgtaagggagatttcacccgtgtgatagccacgaaatgtcagaaaggacaaaaaagtcagaagaaaccaggccatcttggaccactagatggttcctggcaggaaaggctggctgatgttgtgacaccactctggaggttgagctatgaagaacagctcaagatgggaacgttgtctgtgtgcagtctaatcatctgaaaaacatccctgagaaacacagtcaagtggcgcaggtaaaatggaacaagagctggttgagaatggcctggagcattgttgtctacaacagcaacatccctgacattgtgataatagagccaattc

SEQ ID NO: 80641 - DNA, 413 bp, Homo sapiens
  sig_peptide (126)...(261): this location contains the signal peptide sequence, MSLCLAFLLHWGHFRTCPLSHVEMHLYPKRCPQRNAESRWSPALV, Run with SignalP
  misc_feature (304)...(143): similar to gi3880441 in the genepept database release 114, Run with FASTXY 3.3t00, default parameters
tttcgtttcgtgctgattctaactcggcctgtttccttagcatctgttccttcagtagggaacttttcatgcgctcctgttcactagtgtccaaagctctcagggttcgggcataaaggacgacaatgtcactgtgcctggctttcttgttgcactggggacattttcgtacttgtcctttaagccacgtggaaatgcacctatacccaaagagatgcccacagcgtaatgctgagagccggtggtccccagcattggtccactgttccagacatattgtacaagtgtccccttcttcctcatccatagaagcagaaggtagcagaggctcagacttctggggagatggctgtttggggagggtcttgcctccatcgatacatgtaacttcttgctctgctgagacacctgcc

SEQ ID NO: 80642 - DNA, 1404 bp, Homo sapiens
  sig_peptide (165)...(300): this location contains the signal peptide sequence, MFVIAFLSPLSLIFLAKFLKKADTRDSRQACLAASLALALNGVFT, Run with SignalP
  misc_feature (33)...(633): similar to gi5103807 in the genepept database release 114, Run with FASTXY 3.3t00, default parameters
cggcgggcggtggctttggggccgaagtgggcgtgcggctcgcgctgttcgcggccttcctggtgacggagctgctccccccgttccagagactcatccagccggaggagatgtggctctaccggaacccctacgtggaggcggagtatttccccaccaagccgatgtttgttattgcatttctctctccactgtctctgatcttcctggccaaatttctcaagaaggcagacacaagagacagcagacaagcctgcctggctgccagccttgccctggctctgaatggcgtctttaccaacacaataaaactgatcgtagggaggccacgcccagatttcttctaccgctgcttccctgatgggctagcccattctgacttgatgtgtacaggggataaggacgtggtgaatgagggccgaaagagcttccccagtggacattcttcctttgcatttgctggtctggcctttgcgtccttctacctggcagggaagttacactgcttcacaccacaaggccgtgggaaatcttggaggttctgtgcctttctgtcacctctactttttgcagctgtgattgcactgtcccgcacatgtgactacaagcatcactggcaaggaccctttaaatggtgaaaatgggcagatgaatagcaataagtggacctttgttactcttctgagttagaaaaattctaatttagtacactctgaacaaagcttattatacttacttaagatgtgttttgatttggtgttcagaaagcaacctgacaatgataatactgtaactatgataaaattgagaataaaaagattttatttagaaatcataagtctggaattgaggttattttagccccacagtagagtatcctggagggccaggtcctctatgctatgtgtatgtaataggatttaggagcctaatattaagagaagaccttgtttccactctcttcagatgtactagttggatccatgattggaatgacatttgcctatgtctgctatcggcagtattatcctcctctgactgatgcagaatgccataaaccatttcaagacaaacttgtactttccactgcacagaagcctggggattcttattgttttgatatttaaaaattgaatctggccgggcgtggtggctcatgcctgtaatcccaacactttgggaggctgaggagggtggatcacctgaggtcaggaccagcctggccaacatggggaaccctgtctctactaaaaatacaaaaattagccaggagttgtgtgccgtaatcccagctacctgggaggctgaggtaggagaattgcttgaacctgggagctggaggttccagtgagccgagatcgcaccactgcactccagcctaggcaacagagtgagaccccgtct

SEQ ID NO: 80643 - DNA, 465 bp, Homo sapiens
  sig_peptide (289)...(424): this location contains the signal peptide sequence, MMSGWLLRAAICRGLLSSESLTFTSAPHSISIAVTCRDGNLQTGY, Run with SignalP
  misc_feature (467)...(71): similar to gi3930525 in the genepept database release 114, Run with FASTXY 3.3t00, default parameters
attcccgggtcgacgatttcgtttcgccattcgtgctttaacagtgctaaaatacagtcaagttatcatctatgaagggaaacaaaagtctctagcttttctgggatatgccctttataatatattctatgattcactatgacacgagcagcaagacactgcaatgtggtatgatttataggctggattaaatttttagctatttccttctcatccagcaagtcactagcagtttgtttgtgcaagtttgtggcatcaaaatgtgcacctgatttaataaggagattcatgatgtctggatggttgttaagagcagcgatatgcaggggactgttgtcatccgagtctctgacgttcacatcagcaccacattctatcagtattgcagtaacttgtagagatggaaatttacaaacagggtaccgccctacacatgtagtattcttgtccacagccagatgaagg

SEQ ID NO: 80644 - DNA, 874 bp, Homo sapiens
  sig_peptide (815)...(680): this location contains the signal peptide sequence, MRIPKVAPPLAVMRCLTSLLVCLGTGSGGTMEASIPACLSLQVRL, Run with SignalP
  misc_feature (95)...(174): similar to gi3135881 in the genepept database release 114, Run with FASTXY 3.3t00, default parameters
tttcgttgcggattgcaggactgtgtctgagctgtaggtgcacatttaccgagtgtgcacagtgtggatttcaagacttagagatgagacagccagttcctgtcctgcccaagggtcgggcagggatacgcatcaaagaccctgggcatctttcccagcccgggcggtgcccccagccatcgcttctcagcaggacagccggcagggcacctgtcgtcttcgtccaccagcatcacgacctgtttgggggagaagtagtatttccacaccccactcagggcgatagcgtttgaggaagaagagaaagagagacttttggctttcctgatttcaatctttctgaaggtggacccatcactggggaaaaaaatgggtttttttggaaccaagaaagcagcctcggcctccaatgcctgaccaggctctggccagggtataggatcctggcaaggatgctgagctgtgttgggcaggaagccacttcctccctctaaacggcagggtccagctctctcttcgtcgctttcttaagttgagggagctgctatgccaagggcaagcaagaaacaggcccctgagcccccaggttcacggctgggctttgaagcaggagtttcctcttcgccctcgggccacacctctggagggtgcctctgcagcatttccctcctcgggcaggagcctaacttgcaaggacaaacaggcaggaatgctggcctccatcgtgccaccagatcctgtccccaagcaaaccaggagggaggtgaggcatctcattactgcaagaggaggggccacctttggaatccgcatggctggggtttgcgtgtgcttctaaaaccacaactggccccctccctctcttagattttaa

SEQ ID NO: 80645 - DNA, 871 bp, Homo sapiens
  sig_peptide (138)...(273): this location contains the signal peptide sequence, MASEPCWWAGMLPCACAGLRRCSHSRFLQRGHGLHSLMGSLPAPI, Run with SignalP
  misc_feature (55)...(224): similar to gi262179 in the genepept database release 114, Run with FASTXY 3.3t00, default parameters
tttcgtcctggctaggggtacccacaccaggattgcctttgctgtcaggaagcgcaggatccactagagagatgtgaaaagatgacagggcatcctgggcctccacttggtccagtccccaccctcaggaagcctggatggcttcagagccatgctggtgggcagggatgctgccgtgtgcctgtgcaggcctgcgaaggtgttctcatagcaggtttttgcaacgtggccacggcctgcactccctgatgggtagcttgccggctcccatttctccaccctggactcatccatggggaatcatacttccatggccaatccgtggccatccctcagtccccattaggctgtgaccagccctctggtttccaagaatgccgtgcttcatccctatgacactttccccttcctaaaggacctgttcaaccttctgcttatttgctccttgtacccctttcctttgcctcttttctgatcttttgaccttggctctttaattattttctttttgtcctttaacggggtagtttgggccagggggctgctaggtggtactgttaggctccaggagaaacatccacatgagataactgaagatcttccctccatctccctcctcaccatctctcccatgaaatcattcacggctttgcttccggccctccccgccagcttaaaccatcaaccaagcggacatcgccacccatggctggttcattgggcttatgtgcgccctcgcccttctggggctgatcctgctcaacggctgttttattaaaaggagtgccggcggccagtaccccatttgagcaagggaaggggttccccttggcctgaaaacccagagaaaaggaggctgattggctctacg

SEQ ID NO: 80646 - DNA, 918 bp, Homo sapiens
  sig_peptide (138)...(273): this location contains the signal peptide sequence, MASSPWGCVCGLLLLLLPLLGTGPALGRGFPRPLENSEIPMIPGA, Run with SignalP
  misc_feature (186)...(453): similar to gi1562534 in the genepept database release 114, Run with FASTXY 3.3t00, default parameters
attcccgggtcgacgatttcgtgcgcggcgatcggctgcagggacgcgcgcaaggtgaacacgggggctgcggcgcgcaggctcatccagtgaggactggaaggtgggggctttaggcccaggcatcggagtagaccatggcctccagcccatggggctgtgtatgtggccttctgctgttgctgctgccactcctggggactggccctgccctggggaggggctttcccaggccacttgaaaactccgaaatccctatgatccctggagcccaccccaagggctctgtgggctcagagccccaggcctttgacgtgttcccggagaaccccagagctgacagtcacaggaactctgatgtccgccacgcccctgctgaagagatgcctgagaagcctgtagcctctccccttggcccagccctgtacgggcccaaagcagcacaaggagctcagagagaacgactcccagtaactgatgacctccagatggctcaaggaccaagctcccacggctggacaggacctctggactcacaagagcttctggagcaagaagcagtggctccccacccagtgggccaccctcatctcactttcatccccacaactcccagacgtcaactcagggtagccacagttcctccctccctgcagcatgaaggccaagagggacagtggccacctagagatgagggtctgaaggccaaaactaagagcagggtcccacccacttctccctcagaccaccagggcccaccccacacccttgtttcccactcaggtactgtcaagaggccagtgctggaaggacagggtgggtttgaggaacacttgcaggaggcagctcaaggtccccactttacccaacaggaaccagcaaccccctgatgttggttaaaaacccccagttgaaggg

SEQ ID NO: 80647 - DNA, 1301 bp, Homo sapiens
  sig_peptide (1159)...(1294): this location contains the signal peptide sequence, MSFFLILGVGSCLSYSLVPLIILSFCHFYPESVGCPDAPSPRVRG, Run with SignalP
  misc_feature (888)...(787): similar to gi1055354 in the genepept database release 114, Run with FASTXY 3.3t00, default parameters
aatacagtcgttctcttcaagtttgtaaggctcactgcagttccacatccaggtcccaggcaggtggaaaggtaaaagaatgtcttgcagctgatattgcagctgttcccgttttaaggcgttttctccaacaacttccacctgtgttccattggtcagaacctagccacatgaccatacctatttagaaggcatgctggaaaacgtagcttttctattaatggctgtgcgtattagtctgttctcacactgctatgaagaaatatccgagattaggtaatttataaagaaaagaagtttaattgactcacagttctgcattgccagggaggcctcaggaaacttacaatcatggtggaaggcgcctcttcacaaggcggcagtagagagaatgagtgcaagcaagagaaatgccagatgcttatgaaaccatcagatctcatgagaactcactcactatcacaagaacagcatgggggaactgcccccatgatcccaattaccctccacctggggcccgcccttgacccgtgggaattatggggggattatattcaaggtgagatttgagtggggacacagagccaaaccatatcatctgtgggccatagcatctgcacttgggcttctccccagggagacatacttgcaggtgtccctgtaatgtctcttaatgtgtctaagtaccacgtccacagtttgttagccagcctcttgctcaggaagctccatgccctgtgttacacctgctctgagtctcattagaatccttagaattagggagcagcacccctgggctttggcagaggcagagaagtcactgcagatcccccattgtcagcgatcacttcaaagcccacgggggcagacactgaacatgcatgaaggcattgtctttgcccttgagaaacttcacctcaccatgcaccagctttaaatactgctgtcaatgctgaatggagtggccagtttttgtcctggacagtctttatatagactgtacttcttacataagactgtgctcttgaagtactatttgccagtaaaagaaacccaactttcttggtaaaatggctgattccagtcggaaaatgtcacacgacagggacgttaatccattagtctatttttttcacttgtatttgtctttttctttatatgtccttctttctcattttgggcgttggttcatgtctttcctattctctagttccactcataattctttcattctgccatttttatccggaaagcgtaggctgcccagacgccccgagcccacgcgtccgcggacgcgtggg

SEQ ID NO: 80648 - DNA, 850 bp, Homo sapiens
  sig_peptide (125)...(260): this location contains the signal peptide sequence, MFKAARKARLRWPFLFWVFSVMECFSLNCDDYSDHFQIAFRKNTQ, Run with SignalP
  misc_feature (7)...(74): similar to gi553603 in the genepept database release 114, Run with FASTXY 3.3t00, default parameters
tttcgtctcagtcccacctggctgagatgggaatggctgtatgggttgtctgaattcgggctttccctgagccaagcgcacacctcccttccctgctcacagcagctgttttcagagactgaggatgtttaaagctgccagaaaagcacggttacgttggccattccttttctgggtgttttctgtcatggaatgtttttccctgaactgtgacgattacagtgatcatttccaaatagcatttaggaaaaatacacagtacccacatgacaaagtgcatttatgaaatgtctgtttcgtgccaagagctagccgtacattcacttatttaatcctaaaaataggctaccgtgataatgcatctttgtccccgtttacagtaacgggaacaggctcagaagcttcaagtaacttgccttaggtcagaaacttagttggggtttgaagcgcctccaaacgcttgctttttctgtggaaatgtgcgggctgccgagggttttctgcaggactttccgctctgcagcgatcttactgaagttgcaggaaaaccctgtggcccttgccttccatggggatgaccgtgaggatggtggcctggaactgcatgggactcacttagaacttgttaacacggctcccgaggccacctgtgctgtggcaccctggcttgcaggtgtggcagggatgccgcggtccatgcatgctggtgcccttttttccacatggttttatctgggcccgccagatgcctcacaggcttggcttcccttcagtataggtgggaagtggctttgggctttcatgaaggatcattttgcttcgaagggcttgggttgaacaattcaattac

SEQ ID NO: 80649 - DNA, 815 bp, Homo sapiens
  misc_feature (1)...(815): n = a,t,c or g
  sig_peptide (13)...(148): this location contains the signal peptide sequence, MRPLKPGAPLPALFLLALALSPHGAHGRPRGRRGARVTDKEPKPL, Run with SignalP
  misc_feature (14)...(199): similar to gi5104510 in the genepept database release 114, Run with FASTXY 3.3t00, default parameters
cggcttgcgaacatgcggccccttaagcccggcgcccctttgcccgcactcttcctgctggcgctggctttgtccccgcacggagcccacgggaggccccgggggcgcaggggagcgcgcgtcacggataaggagcccaagccgttgcttttcctccccgcggccggggccggccggactcccagcggctcccggagcgcagaaatattcccaagagactctaacttaaaagacaaattcataaagcatttcacagggccggtcacattttcaccagaatgcagcaaacatttccaccgactctattacaataccagggagtgctcaacgccagcttattacaaaagatgtgctagattgttaacaagattagcagtgagtccactgtgctcccagacctagcaaaactaccctacatttcctaagaatgtacatctaatttgaagaaaaagtgcctcaaatcatgcaaaatgtaaaaaaagatgaaatttatatttttatggatattaagatgagtaaaataagagacttcccagaaataactggttagctgtttcctgtcatagaatggagnctttcttgctttatctttttgtgtatacagtaatttataattttgtaaaacagagtttgaatcgcatattgaaaattagatattaaaaattgtgtgattgtattttatttttactagatatattattttctttatatgggtaacattctaattaaacatttaattgtgtaaattatatctgtgagtgccagtgagaaataatgatctttttgatatgactgttagcatatatgtgncatac

SEQ ID NO: 80650 - DNA, 702 bp, Homo sapiens
  misc_feature (1)...(702): n = a,t,c or g
  sig_peptide (37)...(172): this location contains the signal peptide sequence, MSFGPYFYVCFIPILLYSLNTKGYGNPYPCFPSTPPKFPFGQPRE, Run with SignalP
  misc_feature (1)...(112): similar to gi168566 in the genepept database release 114, Run with FASTXY 3.3t00, default parameters
gtatatgatggtcacacaggatttaaggctacacttatgagttttgggccctatttctatgtctgtttcattcccattctcctgtactcactaaacaccaaggggtatggcaacccctacccctgctttccctccactcccccaaagttcccatttggccagccccgtgagagaagccagccccagccccaacctctcctccctctcccttggttctgcagggcagtcctcgcctgctgggaagggttaacaaggagtgtttgtagcagccgctgtctccaaggagaggggaggaaagcaaagtggggaggccggcagccaccccaggctctgtggccgcagccagcagagggtaggaggcagccagcttgatctctccagctctggggaaagagaggagtgtcctcacttccatctggcctcagaggggtgaactccaagtggactgggcagcctgagagcaaggttgctgcagggccaccagggaaagctctggcaaggactgaggaatgtgggggggcaggggctgggccaggcctggcagctgaagccagtggcaagtagcagcactggaggtcccgggctctcagcgagtacacgggaacctcagaatcaggaagaacccagccgagacccagcatcancgggaggaaagaggcngcanntggagaagggangtgcccacctcctgcctgctgggtc

SEQ ID NO: 80651 - DNA, 845 bp, Homo sapiens
  sig_peptide (163)...(298): this location contains the signal peptide sequence, MLLSLGHLFYCFRSSRFLQCILPCSFPLIPFIILVLLYSVFAFSC, Run with SignalP
  misc_feature (118)...(315): similar to gi3322288 in the genepept database release 114, Run with FASTXY 3.3t00, default parameters
cgaccagctggtggaattccttcagttgattttcttcaacaatattgaacttcctgcctgatccttccttaaccttgagccttcactattttctttacctggaacattctctattttcatttgggcaagccctactatttcattctttacatcgctcctgtaatgctactttctttgggacatcttttctattgcttccgaagttcaaggttcctgcaatgtatattaccatgttctttccctttgataccttttatcatactagtacttctttattcagtgtttgccttttcctgttggatggcaagttttgatgagggcaggcttttgtgtgtccagaagcccccacaatgctgttatgtaggtagtgcgcaataaatattcgtagaatgatttcaggtgaaacaaactcttttctcctgatatacaaggctctatttaaaactcaccagaatgttgtatgaaagttggataatgcaagtgtcgttggactttatgtctgctttgatgcagagcagaggaagatgcctctgggaatgattgaccctgtgtgggagccattaatgacggaagccctaactatctctgactgggggctattatataacggggctcattttaaagaggggaccctaatattgcaaattcaagggaaccctgagaggggcgaattggcgtcactaataggaaggactttccccgctgttcctttacggacacaaccgggaagagagaggctaaagaacggtcccccagccccactggagccagaaaaaaaaaaaagccctcggggggccaagggaagggccccaaaagaaagaaaggggcgggcttacccttctttt

SEQ ID NO: 80652 - DNA, 855 bp, Homo sapiens
  sig_peptide (296)...(431): this location contains the signal peptide sequence, MQFVLLRTLAYIPTPIYFGAVIDTTCMLWQQECGVQGSCWEYNVT, Run with SignalP
  misc_feature (131)...(503): similar to gi410311 in the genepept database release 114, Run with FASTXY 3.3t00, default parameters
gaacagcgcggtggaattccggaattatacagaatgcacctgtgtccaaagtcgccaagtgatcactccacccaccgtgggacagcgaagtcagctccgtgtggttattgtcaagacttatctcaatgagaacggctatgctgtgtctgggaaatgtaaacggacctgcaatactcttatcccattcttagtttttcttttcatagtcaccttcatcacagcatgtgcccaaccatcagctatcatagtaacactcaggtccgtagaagatgaggagagaccttttgcactgggaatgcagtttgttttgttgcgaacacttgcatacattcctactccaatctactttggagcagtcattgacaccacctgcatgctctggcaacaggaatgtggtgtgcagggttcttgctgggagtacaacgtgacgtcgtttcgttttgtgtattttggtttggctgccgtcctcaaatacgttgggtgcatttttattcttttggcctggtactccataaaagacactgaggatgaacagcctaggctgaggcagaaaaaaatttgcctgagtacccttagtgatacaatgacacaacccgactctgccggagtagtatcatgccctcttttcacccccgacggagaaatccacaaaaagactggcctgcgcaaaagggatccgggagggaccacagaacctaccccgggccccttacgcaagaggccattatgtactttggaggccccccgtctgccaaacaaagccccgttcactttggaactcgcccttctgagagttcggctataagggtagaacctcaattgagctgatctgcgctagaacaccgggcgctttcc

SEQ ID NO: 80653 - DNA, 862 bp, Homo sapiens
  sig_peptide (126)...(261): this location contains the signal peptide sequence, MKQLSPLPLPWVLCFLWKPSKLSVLSFASPPSTKPSQQAGLVCSL, Run with SignalP
  misc_feature (376)...(168): similar to gi1850976 in the genepept database release 114, Run with FASTXY 3.3t00, default parameters
gtggaattcgagacttaaatcctcaacacctcttgcacagattgctccaaggctttcctgaccgagtttccctgaccttgggctctcccctctccatgaagcttttgtacaaggattgtttcagcatgaaacaattgagcccattgcctttgccctgggtcttgtgtttcctgtggaagccatctaaactcagtgtgctcagctttgcttctcctcccagtacaaagccctcccagcaagccggactggtatgctccctgattcgcgtgtccaccagctccactccagcgtgtactttctaccttcctgttaatgcaaagtgccgatcctgtcctttgaacaatccaccttgggaggtaccttggattaactagagcccaactctccctttctagatgatgggaagacatacagagtaaagaacctgctctgaattccattacacaatgagatgatcttcagcttctccaaccaacctgaagcccgtgtcctctggcgtctggtactcagatgtcacgaagcacgccattggactaagatggtggtttcgcatagtgccaagcacctaacaggcatcactatatacttgctgatgtgtgaattctgttttactccagtgattcagctctgccaggccattgtttcacttacctgcctcctgaaactctgcaagacttggtagaaaatgaatcatcaatttgacttgttgtttcttcaaaactttgactgtgaccttgaaactgtggttctgaaaacaagtgaatctgatttcgtctccttgggccagtgtaagatctcttctgttcaacctatatgtttggattcattcactggcccaagtgaatctgatttcgtctccttg

SEQ ID NO: 80654 - DNA, 1000 bp, Homo sapiens
  sig_peptide (523)...(388): this location contains the signal peptide sequence, MHLFPVLFQPLQNCLPFFIGEPFHSCFLKVFLDITIIVFLGFLYF, Run with SignalP
  misc_feature (87)...(196): similar to gi388233 in the genepept database release 114, Run with FASTXY 3.3t00, default parameters
ggaatttctggtggaaaagtgacaagagagcaacaagtcctacttgctcaagaagttaatgactttatacgcaggattaggcttatagagcccatgaagcagaatggaacagaaggagctgcacccaacagagcaggcggctggaggagcggcacaagaaagcctgggataaagttgattttccatatctggatgtgtctggcagcatcaaccatatagctgcaaaccagggtcgatttcaaagcccagggcctggccacacgtgtccaacacctatgaacttcttatggagattgttcaccacggagcatgaagacagagcgggtgactggaggtggctccccaagattatggtgtcacacctgaatacatatgtaagcgaaacgaggaaataaagaaagcccaagaagactatgatcgttatatccaggaaaaccttaagaaagcagctatgaaaaggctctccgatgaagaaagggaggcagttttgcaggggctgaaaaagaactgggaagaggtgcataaagaattccagtccctctcggtctttatagattctataccaaagaagatccgcaagcagaggctggaagaagaaatgaaacaactagaacacgacattggcataattgaaaagcacaagattatttatattgccaataagtaagaatggatctttaaagtataacaatttcaatgtaggggaaaaaaacatggaaaatataaaaaactccaagtttttcaaaaaggaaaatactatgaagagaataaaaatagtcttaatcagaatgcttaggcaatatgcaaagaataattgagttattcacttacacaagaagaaattttgtttttactagtgtcacgttttccacatataaactattaaatttgagaatatgtgttccagttccacaatgtaattcattattattatgtacttgtttcacataaacattaatttctaggtcctgaaaaataaagtcagcactcagaacttcaa

SEQ ID NO: 80655 - DNA, 7719 bp, Homo sapiens
  sig_peptide (2025)...(2160): this location contains the signal peptide sequence, MVFTVTLKLALDTHYWTWINHFVIWGSLLFYVVFSLLWGGVIWPF, Run with SignalP
  misc_feature (3)...(2397): similar to gi5689373 in the genepept database release 114, Run with FASTXY 3.3t00, default parameters
ggcagaggaatctgttcctcaaggcattcacggacttcctggccttcatggtcctctttaactacatcatccctgtgtccatgtacgtcacggtcgagatgcagaagttcctcggctcttacttcatcacctgggacgaagacatgtttgacgaggagactggcgaggggcctctggtgaacacgtcggacctcaatgaagagctgggacaggtggagtacatcttcacagacaagaccggcaccctcacggaaaacaacatggagttcaaggagtgctgcatcgaaggccatgtctacgtgccccacgtcatctgcaacgggcaggtcctcccagagtcgtcaggaatcgacatgattgactcgtcccccagcgtcaacgggagggagcgcgaggagctgtttttccgggccctctgtctctgccacaccgtccaggtgaaagacgatgacagcgtagacggccccaggaaatcgccggacggggggaaatcctgtgtgtacatctcatcctcgcccgacgaggtggcgctggtcgaaggtgtccagagacttggctttacctacctaaggctgaaggacaattacatggagatattaaacagggagaaccacatcgaaaggtttgaattgctggaaattttgagttttgactcagtcagaaggagaatgagtgtaattgtaaaatctgctacaggagaaatttatctgttttgcaaaggagcagattcttcgatattcccccgagtgatagaaggcaaagttgaccagatccgagccagagtggagcgtaacgcagtggaggggctccgaactttgtgtgttgcttataaaaggctgatccaagaagaatatgaaggcatttgtaagctgctgcaggctgccaaagtggcccttcaagatcgagagaaaaagttagcagaagcctatgagcaaatagagaaagatcttactctgcttggtgctacagctgttgaggaccggctgcaggagaaagctgcagacaccatcgaggccctgcagaaggccgggatcaaagtctgggttctcacgggagacaagatggagacggccgcggccacgtgctacgcctgcaagctcttccgcaggaacacgcagctgctggagctgaccaccaagaggatcgaggagcagagcctgcacgacgtcctgttcgagctgagcaagacggtcctgcgccacagcgggagcctgaccagagacaacctctccggactttcagcagatatgcaggactacggtttaattatcgacggagctgcactgtctctgataatgaagcctcgagaagacgggagttccggcaactacagggagctcttcctggaaatctgccggagctgcagcgcggtgctctgctgccgcatggcgcccttgcagaaggctcagattgttaaattaatcaaattttcaaaagagcacccaatcacgttagcaattggcgatggtgcaaatgatgtcagcatgattctggaagcgcacgtgggcataggtgtcatcggcaaggaaggccgccaggctgccaggaacagcgactatgcaatcccaaagtttaagcatttgaagaagatgctgcttgttcacgggcatttttattacattaggatctctgagctcgtgcagtacttcttctataagaacgtctgcttcatcttccctcagtttttataccagttcttctgtgggttttcacaacagactttgtacgacaccgcgtatctgaccctctacaacatcagcttcacctccctccccatcctcctgtacagcctcatggagcagcatgttggcattgacgtgctcaagagagacccgaccctgtacagggacgtcgccaagaatgccctgctgcgctggcgcgtgttcatctactggacgctcctgggactgtttgacgcactggtgttcttctttggtgcttatttcgtgtttgaaaatacaactgtgacaagcaacgggcagatatttggaaactggacgtttggaacgctggtattcaccgtgatggtgttcacagttacactaaagcttgcattggacacacactactggacttggatcaaccattttgtcatctgggggtcgctgctgttctacgttgtcttttcacttctctggggaggagtgatctggccgttcctcaactaccagaggatgtactacgtgttcatccagatgctgtccagcgggcccgcctggctggccatcgtgctgctggtgaccatcagcctccttcccgacgtcctcaagaaagtcctgtgccggcagctgtggccaacagcaacagagagagtccagactaagagccagtgcctttctgtcgagcagtcaaccatctttatgctttctcagacttccagcagcctgagtttctgatggaacaagagcccaggctaccagagcacctgtccctcggccgcctggtacagctcccactctcagcaggtgacactcgcggcctggaaggagaaggtgtccacggagcccccacccatcctcggcggttcccatcaccactgcagttccatcccaagtcacagctgccctaggtcccgtgtgggaatgctcgtgtgatggatggtcctaagcctgtggagactgtgcacgtgcctcttcctggcccccagcaggcaaggaggggggtcacaggccttgccctcgagcatggcaccctggccgcctggacccagcactgtggttgttgagccacaccagtggcctctgggcattcggctcaacgcaggagggacattctgctggcccaccctgcgcgctgtcatgcagaggccattcccccaggcctgtgtcttcacccacctgccgtcattggcctttgctgtcactgggagagaagagccgtccagggacccatggtggcccacatgtggatgccacatgctgctgtttcctgcttgcccggccaccacccatgccctccatagggtgaggtggagccatggtggtgcgtcctttactcaacaaccctccaatccggatgctgtgggaagggccgggtcactcggataccatcatccctgcggatgcaccgccgtaccctgctcatctgggagtggtttccctgcggttacgtccaagcccgcctgccctgtgtgttggggctggctgagtttcggtctccccatcaccggccgcctcgtggagaaggcagtgccacgtgggaggacaaggccacgccggcagcttccagccctgccgcagaagtgccaggatgtccatcagccactcgccagggcacggagccgtcagtccactgttacgggagaatgttgatttcgcgggtgcgagggccgggagacagatacttggctgtgatgagcagacatcctctgtccccgtggaggggtcaacaccaaggtggtgttcgtgcaccagaacctgtctcgggctgacgggggtggcacacaggacacgggtggatcccaacaggcagcaccgcacctccgcccgcctcccgcactgcagctccgcccgccgggctctgcgtctccacgtcccctcgtcccatccccacgtcccctcatcccgtcacctcgtccccacatccccttgccccgtcacctcgtcctcatgtccccttgtcctgtcacctcgtccccacgtcccctcgtctcatccccacgtcctctcgtccccttgtcccgtccccacataccctcgtccccatgtccccacgcagggctctccttcgtcttaggatctgtccagcgctgctctgggtgggttagcaaccccagggctgctgtgataggaagtccctgttgttctccgtactggcatttctatttctagaaataatatttgacatagccttaatggtccttaaagaagacatttcagtgtgagattcagacttcagacgctgaaactgctgcctttcaggaaagcaccaccaacgctggaggaggagccggccctcacgcccgccccgcgccacgctgtggaacggggctccggcaagtgaaacccagagggtgtttccgaggtgctcgacagtaggtatttttggaagctcagatttcaccatttgattgtataatcttttacctataaaatatttatttgaagtagagggtaaatcagcggtaagaacagtgaacacagtggttgggataaaataaggtgacaaacatcacaccaaagatgagggtagcgagcaactggcttgagcagacagaacggggaagactccactctgtcccgaggggccagccgcaggcgtccccagggccaccctgccctgaggtccttgtgtggccgccctggcttggcagccctgcccacgctgcccccgcaaacaatggtgtgtgcgtttttacagccctttttaggaacccaatatgggcataaatgtaacacctgtagcgggggcagattctctgtatgttcagttaacaaattatttgtaatgtatttttttagaaatcttaaaattgcctttgcactgaagtattttcatagctgtttatatctcttttattcatttatttaacatactgtctaattttaaaaataggtttttaaagctttcatttttaagtttatgaaattttggccactttacatttagattctggtgagagttttgactgaatgttccaatctctgatgaatgcgaattttcagatttgattttattctctacacacacctcttcttttcttggtatttctggtggcagtgattagttgaacagcacatttaaggcacgataatttgctacactttttctttacaatttgttgcaatttcatctgctttctatgtttcattgttaattgccatccttcagccttaaaaatagaagattctcacgtgaaggtttagtaagtttgggtcccagctctgcctgtgtggagatagtcaccatgtacctctgacaacaagttttagtgtgaaagtcactaaacttttacacactcccaaacgtctttttaaaaattgcttgggaaattattaaatgaatgtgcctgatgatttgaaatagacaaggggcacgagataaaaaaagaaaaggatgagaagatcctcagtgaatgacgttgcagggtcttcatgcaattttccacctcgcagtagttagtatttacttgccttaaactaactttgaagcaagtaatgtcaactttgagcactttgttgagttttgaaaaatcttatttgttgctgcacaggttaataaattatcaatttgtaattcagcatgttggtcagagacacggtcactgattcacacccagtccctgccacagaccgtctcagacacgcacagtgggcctgctgcatgattcacacccagtccctgccacagaccgtctcagacacgcacagtggggcctgctgcatggattcacacccagtccctggccacaagaccgtctcagacacgcacagtggggcctgctgcatgcgtgttaacctgggcttttggctccacgctcactcatagccatgtccacatgggggcttgcacacaggatcactcacatatgtacatgtacccaccacaaacgtgcaagctcctgcacacatgcatgcacacaaacgtgtacacaagtgtgagctcctacacgcatacacacacacacgtgtacatgcaccaaagcatgtgtgacctacagacatgcagaacatgcacgtgtacacataccacagacacgcgtgtgcatgctcctacacaatacatatgcacatatcatgaacagcataagttcctacacacggacgtgtgatacacacatgcatgtacaggtaagcacacatgtacaagctcctacaggcttgctctcacacacgtgtatgcacagcagagagacgtatgagcttctactgcacacatgcacacacacacgcacacgtacattcactacaaacgtgcagcctcctgcacacgtgcacattcatgtgtacaccacaaatgagttcccagacgtgtaaacacacgtgcacacatcgtacacatgtgagctcccacacgtacacacagatgcacatggacacaccccaaacacgcacaggctcctacacacatgcacacacgtgtacaccacaaacgagctcccagacatgtaaacacatgtctcccacacgtgagctcccacacatgtacacatgcacatgtacgcaccacaaacacatgcgcaggctcctgcaggcgtgaatacacacatgcacacacatatacacacacgtgccacaaacaagtgcacactgtcctggtgtcctgcactgcatcctgcctccttgctgaggggcccctgtgagaggcctctggatgggcatgggaagatgggctccctggcccccagcccatgcctccctgggatgaagagtccccctcctggcagaatgtctgggctttgcagagcaggccccgggggtgaagtcgcagcttcacttacaccagctgctctgtgagcaaggcttggtgccctggacaaggcccttcccctttagggaggtccagcctcgcaagctgaaacctcccctcggctcagccctataccaggcggccacagcaggactggccacacccacgccgcacctcatccgtgcacgcgtcggagcacggccagccttccgccacgagccagctgggaagggccgcggctgcctaaagccccagtcaacccagcctgtgtctgagcagacagggcgaacaagcaggccacaccgtctcgagggaggaggccagatgcggccagcgtctccaacagggtgaccatccgctcggcttgctgagcgtttaaacaaatgtttagacaggctgtggggactcccctgagttgagccttggccaggggtccggtgctgtcgcgggaaacctccagccttgttcttcaaaccactcagctcatgtgttttgcactgactagtactgaataatacaaccactcttatttaatgttagtattatttatttgacaactcagtgtctaacagcttgatatgcaggtccttgcatcctacatttctttaggaagttacccatttgtaacttttaaaaacagggggaaatttcaggttggggcaatgcaatctttttgtttttttaagctaaaggtgggtgaactggaatgaaaatctttctgatgttgtgtctataagcagccttgatgggatatgttagaagtgtcatgaaagtgtgattctacttttgcagaaaaatctaaagatcaatttatatagctttattttttactttatcaaagtatacagaattttaatatgcatatattgtgtctgacttaaaattataatgtctgcgtcaccatttaaaatgtctgttcattatgtaatgtaataaaagaaggtcttcaaaaatgtatttaacatgaatggtatccatagttgtcatcatcataaatactggagtttatttttaaattattaaacatagtaggtgcattaacataaatcagtctccacacagtaacatttaactgataattcattaatcagctttgaaaaattaaattgttaattaaaccaatctaacatttcagtaaagtttattttgtatgcttctgtttttaacttttatttctgtagataaactgactggataatattatattggacttttctctagattatctaagcaggagacctgaatctgcttgcaataaagaataaaagtctgcttcagtttctttataaagaaactcacacaaaaaaaaaa

SEQ ID NO: 80656 - DNA, 1583 bp, Homo sapiens
  sig_peptide (1366)...(1231): this location contains the signal peptide sequence, MSFSAYQTAFICLGLLVQQIIFFLGTTALAFLVLMPVLHGRNLLL, Run with SignalP
  misc_feature (1464)...(625): similar to gi3126975 in the genepept database release 114, Run with FASTXY 3.3t00, default parameters
ttttttttttttctcaggaacaagtttattgcagggaacacactaacctctttcataatagccaaaggcataaaaactacaaaaatatctggctctcgagtgtgggcagctcagtgtgggacctggtctgagtcatgacttgggctgccctgcaggccagaggcccgggagctttccggccactccccagagaggtccgtggcgctgagggggtgaggaagtgccttggctgcttccacagcgtgaaggccaaggctgaggtggagctgggctggagtggttccagagaaggcttcatcgaggcccttcaaggctgatggcagagccagggtagggagacgcctggatgtggctgccctggctcaactggctcctggaccaaggccctaacccaccagtttctttctccagaacccctgctggctctcccatagccaagtgggtggagcagagccctcctgaggctcccagtgcagacagacctccacccaaccacagtgatccggaggacctgctggctgcatggctggtgtgatgctgggaggagagccggggagggaggaggatggtaggcaggaacatgcctcagcacagatgggcaggtgggttgaccttccctgccctcagggctgggcaccattggcacccaacagggccgtcttgcggaagacctgcagggttgggttgtgcagcagcgtgtaggccagaccccagcgagccctgccgcggctggccccgggcctagctcccttggccatggagtcctttgtctgtagcagctgcatcccttcgtcttcctcccctggtctgaggctgtcctggggggctgccatggtcctgggtaggaggctctgcgcttgcaggagcagggagcagaaggctgtcatggctggatgcgactggctgacttcaatcttcaagaagtttcggtacgtgtagtagccggggtcgagagtggcggctctcggtggcagcaggctgaggtccatctggccaaggtggatggcgttgtagagggcagagaggagcactcgccaggtggccaccatggcacccaccagcacattgagggggaagagaagaaaggtggctgcatagagcactcgccggttggtcagctgtgggtgtccatcatgagtctccaggaagacccaatgggctgccatgttctgcaggatcacagccagggccaaagtcagccagaagggccacgaggactccagggaacggaagagcaggaggttcctgccatggagcacaggcatgagcaccaggaaggccagggccgtggttcccaggaagaagatgatctgctgcaccaggagcccaaggcagataaaggctgtctggtaggcactgaagctcatccaacagaatatggcttggcgggagggatggggactccgatgcaagggactcaagtccagggcagctcctcggtgcagagctcgaaggttggtcctggggtggcagccagggaggcagagacctcagggagcaacacactaaacctaaatcctcctctgggccagcaactggccaacctcccggtagaatttcaccgaattcgaccaggctgatcc

SEQ ID NO: 80657 - DNA, 1493 bp, Homo sapiens
  misc_feature (1)...(1493): n = a,t,c or g
  sig_peptide (1111)...(976): this location contains the signal peptide sequence, MMLAFTMWNPWIAMCLLGLSYSLLACALWPMVAFVVPEHQLGTAY, Run with SignalP
  misc_feature (1351)...(827): similar to gi4980872 in the genepept database release 114, Run with FASTXY 3.3t00, default parameters
ttttttttactccgtgtgcagtgttttaatttatccatgtacataggcaattatcataatttgaaggacactttttacttattagactataagaaaaactgtacagaaagtttatactataaaattacatccctaagtgattagggtcctcagtaacacagaaataagaaattgaaaagggtcattgctcggcaatccacataactacagagtagagcgcaagctattgttcgtgatcagaaagagacttcataaaaacatcttcacatattccctagcattatgccctactagtaaaaggaaggcctatgacaatgccattgtttattttgtgtaacgcagcccttctatttccctcaaaagtttttttttcctgctataagataaagaaaaggctgtatccctaagatatatacctaatgaagattatctcaacagaagctccaacgttttccatttttcactgtctttcctgaagttcacctggatgttccacagcaattttctaaccctttcattgttgattagcctactaaaagtagaattctttagcaacacacaatacaaaagacacaggctaaaacaggcctcacaaatacactttgaaataggtatatttggatataaatataactttccagtccattattttttctaatgactaaaactctaaatttttaaaaatggaagttttcaaaccaacgatgtgttaagcccattctcatgacacattcattttaacttctcattcagtatgggaaaattttatttcttccctttgtcttgcagaataatttaggttcccaccctgggcacgattcaccaaatagagtaagaccacagataaaagtgacaaagaaacacaggcaatgaagaacacttccaaaaacaaatacccccgagaatccagtatcataccagcaatgatggaaatgatggccaacccaagattctgaatggactgcatgaagccatatgcagttcccagctgatgttcaggaactacaaatgccaccattggccacaatgcacaggcaagcaatgagtaggagagtcccagaagacacatagcaatccaagggttccacatcgtaaaggccagcatcatgtgggacacaagagtggctgctactgcgcaaagaacccagatgatgttcttccctgttttatccaccaggagcccaaacaccggggacatgggagctgatatgacatatacaacactgttaattgcacttgctgcctgggaagaaaatccaaatttctctgtaaagaaaactttcccaagtccaataaaagggaacacagcaacataatagcagacacagatgataaatataagccacaggggtaaggagaagtcctttacatcagttaatttaataacttcacctgtttttccttgttctttatgcggacgcgtgggtcgaccgggattccgggcggtccgagggcgtcagtnnnnnnnnnnnnaggggtttccgggttttcaa

SEQ ID NO: 80658 - DNA, 1949 bp, Homo sapiens
  sig_peptide (919)...(1054): this location contains the signal peptide sequence, MFKNTSGYTERVAVWLGVEIFCLLMMSSVLVPLFYFLMLFGNFLQ, Run with SignalP
  misc_feature (9)...(533): similar to gi458247 in the genepept database release 114, Run with FASTXY 3.3t00, default parameters
ggaattcgaaacatgtaaatgaaagatttcaagatgaaaaaaataaagaggttgttcttttgtgcattggcgtcacttcaggagttggacgactgctctttggccggattgcagattatgtgcctggtgtgaagaaggtttatctacaggtactctcctttttcttcattggtctgatgtccatgatgattcctctgtgtagcatctttggggccctcattgctgtgtgcctcatcatgggtctcttcgatggatgcttcatttccattatggctcccatagcctttgagttagttggtgcccaggatgtctcccaagcaattggatttctgctcggattcatgtctatacccatgactgttggcccacccattgcagggttacttcgtgacaaactgggctcctatgatgtggcattctacctcgctggagtccctccccttattggaggtgctgtgctttgttttatcccgtggatccatagtaagaagcaaagagagatcagtaaaaccactggaaaagaaaagatggagaaaatgttggaaaaccagaactctctgctgtcaagttcatctggaatgttcaagaaagaatctgactctattatttaatatcttacatacctccaccagactggacttgctttttgaattttaagcaagtttcctttccttttatacaaattgcaaatttcatatttttttaatcacatcctaggaatagcacaataattgggaaatagaacccttatcactagaagaaccattttctgccactaaatatctctgatgtttccatgagtctgagggcagagactctggtatatgaaaacgtctgaaagtcacatattgtgaaaatttgaagctatctcagtaaaaagcagctttggaaactgtgaatgatctttagcttgtacaaatgtttaaaaatacctcaggctatactgaaagggttgcagtttggttaggagtggaaatattttgtttgttaatgatgtcttcagttctggtacctctgttttactttcttatgctctttggaaactttttgcaaaatttaagcctgggttctagataataccagatctacctaaacctcaagtctatgttaaagttgctttcctgctgttaaataagctatgatattaagatattctgacttgctccagtgtcaagggaccttctgggagcaggtgctaacatagtgttcagaatcaatatgtgagatgaaaaggatcccctccaggaggatcctgagctgttcagaaatcatttaagtttacagcgttgttccctttgcgtttgcagtgcgttttactcaagtagccagaaacaccccacgtttctgaatttgtttaaactgtaacaataaagtaaaatagaatccatgaaagatattctggcgattgtaacttagaatttttctgacttctggatttgttggcactagaacctgatatttaaacaaagtcttactgagcagctatcaagtggcagttacaggcacaaattggtggaggctggaggatggggaggggagcaaaaccctttatatttgtgaagaaaatatctgtagctgatagaaataattgcttaaattggtttatgaaattaatgagtctgaaaaggttaaaagcacttataaaaagaaccaagtcctacatttccagaactttctggcaaaaatttgcactcatattatttatcctatgaacattcccattgtttttttttgctatttatatacagattatcataagaaagctctcagtttgaggacccaaaataaaaccaaagtcatgccatgacccatactcatttacaaaaacaagaacactttcctctatccctaaaattatgctttagtacttgaggcctttaaaagttagtgcttttgattgtgaagacattcagcaacttactttgtcatacatgcagttgcaccttacc

SEQ ID NO: 80659 - DNA, 497 bp, Homo sapiens
  misc_feature (1)...(497): n = a,t,c or g
  sig_peptide (129)...(264): this location contains the signal peptide sequence, MTMVRVWCMARVRIQSVTRVRAQCVTRVRTQCVTRIKAQCVTRIR, Run with SignalP
  misc_feature (456)...(181): similar to gi1113115 in the genepept database release 114, Run with FASTXY 3.3t00, default parameters
tagtgacgattcgaaagnggcggaattccaactgcgagaaaggggatagagatcttaaggcccagagaggtatctttccctagttttgtgtacttattaatggatggcaggtatgagagattgagcctatgactatggtcagggtgtggtgtatggccagggtcaggattcagtctgtgacaagggttagggctcagtgtgtgacaagggttaggactcaatgtgtgaccaggatcaaggctcagtgtgtgaccaggatcagggttcagtgtatacctagggtcagggcccagtgtgtgaccagggtcagggctcagtctgtgaccagagtcagggcccagtgtgtagccaggctcatggctcagtgtgtgaccaggatcatggctcagtgtgtgaccaggatcagggcttagtgtgtggccagggtcagggctcagtctgtgaccagagccaggctcatttagagacagccctctcacacttggttgctaccatca

SEQ ID NO: 80660 - DNA, 479 bp, Homo sapiens
  misc_feature (1)...(479): n = a,t,c or g
  sig_peptide (172)...(307): this location contains the signal peptide sequence, MLRHLRLAQCPGPGLLLPALTSLLPLAATQATVEMTVSMAQVGAD, Run with SignalP
  misc_feature (79)...(276): similar to gi4768972 in the genepept database release 114, Run with FASTXY 3.3t00, default parameters
ggtggtgagccgtgtgcgccaggccatgcccaagaacaggctcctgctagctggctccggatgcgagtgtgagccagaatgccctgggccctgggggtgggtggatgtgcaggatccaggctcctaggccctagcttgggtcctgtctccttgttctgcctcttctgggacatgctgaggcaccttcgcttggcccagtgtcctggtccaggcctccttctgcctgctctcacctctctccttcctctggcagccactcaagccacagtggagatgaccgtcagcatggcccaggtcggggctgacgcggccatggtggtgaccccttgctactatcgtgggcgcatgagcagtgcggccctcattcaccactacaccaaggtgtgtgtgaggcctgagaccaagaggaggctctgcccagggagaggagaaatgggagcctggaataaggtggggcttcacatgaacgcagctatagn

SEQ ID NO: 80661 - DNA, 706 bp, Homo sapiens
  sig_peptide (12)...(147): this location contains the signal peptide sequence, MAGSSEWNPDSRPASFAGWRAWLPWMVVSLPSLLLQCHTVPGQSR, Run with SignalP
  misc_feature (80)...(219): similar to gi2394276 in the genepept database release 114, Run with FASTXY 3.3t00, default parameters
tcagcgtccccatggccgggtcttctgagtggaaccctgattcccgccctgcctcgtttgcaggctggagggcctggctcccctggatggtggtcagtcttccctctctcctccttcagtgccacacagtacctggccaaagccgtcatgctgcccgactcagcttgctttatttagtccaggcaaagtggtggaaaatgaaaaaactggccttttgtggctttacagtgcacatttgaccaagggaagaatcagcccagaaatgtacactgatgagtctgctatttcttgctagctatctactgtccttgacgtctactgcgtcagccatagcacacagaagatgtctggtcctagacactgcaccgtaccagtgtcttgtgggtgtttggggcctgtgagcagagcaggagagattccaggtgccattgagagtgatggtacaaattcaccatcaggagccccaagagtcctgcaagccacattataaatgctttggctagccctggggagatgaagggagtatgactgggaggcttatcaggatcacatcttaaagagaaccaatgggttttatacattttaaagtatatttgtaatctcagttttaaaatcacattactggttaggcgtggtggctcacacctgtaatcctagcactttgagatgtttggggcctggagctcaccagctccagtctgcaccc

SEQ ID NO: 80662 - DNA, 1496 bp, Homo sapiens; identical to SEQ ID NO: 64774
  sig_peptide (496)...(631): this location contains the signal peptide sequence, MHVVIVLKALVAVQILLSIKEYTLERNHMHVISVIKVLVKAQTSL, Run with SignalP
  misc_feature (1)...(1272): similar to gi5453423 in the genepept database release 114, Run with FASTXY 3.3t00, default parameters

SEQ ID NO: 80663 - DNA, 431 bp, Homo sapiens
  misc_feature (1)...(431): n = a,t,c or g
  sig_peptide (320)...(185): this location contains the signal peptide sequence, MHVQWSLTTVLRLPLSFWHKKLHLYLNLEILSSENQALNQINNKL, Run with SignalP
  misc_feature (340)...(269): similar to gi927433 in the genepept database release 114, Run with FASTXY 3.3t00, default parameters
ccgcgtcgacccatgcgtccggcttcatccaggaaaagcaaccattttctttgcataagcaacatttcagtggattttcactgatgtgtggtgacagaaaaatggacttgaaggaaaaaaatgcaccaagagtctgtttagctctggccatggttctggatgaaatttattatttataaatttataatttattatttatctggtttaatgcttggttttcagaggagagaatttcaagattcaaatacaaatggagtttcttgtgccagaatgaaagcggcagccttaagacagttgttaatgaccattgaacgtgcatgtatagtttgaattctaaccaggaaattgataatgaacaacaattttatgttactatagaactactttttttaagctgaaaataccttgaaatgaatttatgtcagacacan

SEQ ID NO: 80664 - DNA, 639 bp, Homo sapiens
  sig_peptide (238)...(373): this location contains the signal peptide sequence, MAMLRVATFLTRLQMIVTSVLLAGSLYLPFGLRALRMQTAMFVRP, Run with SignalP
  misc_feature (23)...(197): similar to gi5725167 in the genepept database release 114, Run with FASTXY 3.3t00, default parameters
ggcgaacgggaaagccattcagctggctgtgacagtggcagcagcgggcagtaccgtgggctccaacagcattggtggtggctccagcatcatcactgggagcttgggctcctgggttcctgctcagcagctatggtcagtaccttctgagatggcctcctctgatcctcacctcttggtattcatggccttgtgaaatcccctttgcttgagtaacttgctgccaaccaatagaatatggcaatgttgagggttgctacctttctgactaggttgcaaatgattgtgacttctgtcttgctggcaggctctctctatttgccttttggtttgcgtgctctgaggatgcaaactgccatgttcgtgagacctgcatggcgaggaattgagggcagactctgtccaacagccagtgagaaactgaggtccaacatgcctacacggagctgaatcttaccaataactacatgaacttgaaagtgtatccttcccttcagatgagtgtagcctgagtgacaccttaactgaagcctatgagaggccctgaagcagaggaaggacccagctagctcacacctagatttctgatgcatagaaactgtgagatagcatgggctattttaagccaggtatgagatg

SEQ ID NO: 80665 - DNA, 401 bp, Homo sapiens
  sig_peptide (225)...(360): this location contains the signal peptide sequence, MRGFFRSEAQPLCCCWCNLLCCGRVVVVSLSSIEGIEGACVAGNG, Run with SignalP
  misc_feature (373)...(287): similar to gi1220350 in the genepept database release 114, Run with FASTXY 3.3t00, default parameters
gaatattccagtgactcttttcctgcaggaagtttttgttcagtgactcatatatctactacaggccagccattttgttgatcacataatactcaaaataagatttttatcttctgaaatattttatttaaaagatgaaaaccttttccttcattattgctatgcagcaggtaaaaaggaagtgttagaatcatgattgtaatttgtattactgttttaaagtaatgcgtggcttctttaggagtgaggcacagcccttgtgctgctgctggtgtaacctgctttgttgtgggcgtgttgtcgtcgtttcactctcatccattgagggcatagaaggcgcctgtgtagctggaaacggtccctcaaggaggcgcagtggattgtgctatgctaataataaa

SEQ ID NO: 80666 - DNA, 529 bp, Homo sapiens
  sig_peptide (265)...(130): this location contains the signal peptide sequence, MTCSLLSLLDAVCSSFVQAFCSRDPERWPAISPHSLSGAFYFLNV, Run with SignalP
  misc_feature (401)...(370): similar to gi1314485 in the genepept database release 114, Run with FASTXY 3.3t00, default parameters
ctgatttaaggaagaacatgcacagttctacgaacatgcagttctacaaacatgaacaattcattcagcagtcagatcttcctcaaaactggaagttttgatggatagtcacaaggaggttgtcctagcaaacattcaaaaaatagaaggccccacttaaactgtgaggggaaattgctggccaacgttcaggatctctagagcaaaaagcctgcacaaaagaactgcagactgcatctagcagtgataaaagagaacatgtcatacccaagctgatcttatcccaggaatccaaggttggttaaatagcaacactcagagatcaggagtaaaacatcacgtgcagctcagtactgaactgaagaaggaaccagcaccctacttctccccgataggacagcattttcaccaaggcaggacggcctgcatcacgaggctgtggcctccctccccagaccccttacctctgccccgggcctccttgagttttgcagggatccactccatagctctggcagagattttggtt

SEQ ID NO: 80667 - DNA, 347 bp, Homo sapiens
  sig_peptide (187)...(322): this location contains the signal peptide sequence, MTTTIFTCKMGYWSREFLFFLLPKELANQNRRSRFWSSTSAVLIF, Run with SignalP
  misc_feature (169)...(297): similar to gi3257378 in the genepept database release 114, Run with FASTXY 3.3t00, default parameters
gtcagtatagacatcctacagcccccatttgggaatgtggctctgtgagatttttcacatcttggtcattgacctgctacagatatgtcagaggctctaggaagaaatagaatctgatggcagaatctgtaagtgtaaataagcatcttatgagtgagagatcaaggccacaaagtatccagagccatgaccacaactatatttacctgtaaaatgggatactggagtagagaatttttgttctttctcttacccaaagagctagcaaatcagaacaggcgatccaggttctggagctccaccagtgcagttctgatttttatttagaatcaacccgagtctctccg

SEQ ID NO: 80668 - DNA, 359 bp, Homo sapiens
  sig_peptide (59)...(194): this location contains the signal peptide sequence, MRGIIHYVLFCDWLCSFSIICLRSTRGMHGAGYCFLIGVVFRPAA, Run with SignalP
  misc_feature (77)...(190): similar to gi4378894 in the genepept database release 114, Run with FASTXY 3.3t00, default parameters
cagacttttattgatccaggttctgtgtctgtaatttggcctttgataggaattgcctatgagagggataattcactatgtattgttctgtgactggctctgttcatttagcataatatgcttgagatccacccgtggcatgcatggagccgggtactgttttcttattggagtggtcttccgtcctgcggctgtaccatctcttgcttctttattcaccgggggacggatattcggaacattttagcattcatctaattttaagcccactacttttatcctgatccaaagttcatgctacaaaccagtgctgttttcattgccactttccccccatgttctacatcttatttacggcc

SEQ ID NO: 80669 - DNA, 697 bp, Homo sapiens
  sig_peptide (138)...(273): this location contains the signal peptide sequence, MNPFFWSHPSLLGSEGRILWLWGLLEIKLFLLHMTRLHVLQSLNL, Run with SignalP
  misc_feature (20)...(96): similar to gi6019413 in the genepept database release 114, Run with FASTXY 3.3t00, default parameters
caactcttaagggatcagagggccaggaaaaggatttaggaatgttggcttggcagggtctgattggagagctgcacatttgaccatttgtggaaaggtatattgatgcagattgtagcctcagatcttctgggccaatgaacccttttttttggtcacatcccagtcttcttggttctgaggggaggattctttggttgtggggattgttagaaatcaagctttttctattgcacatgaccaggctacatgtcttgcagtctctgaatctgttacacctaaaaggtacttgacattttgttattgacagagtaggcccagtttgggctgggcctgtggttgtagcttctctatttgggtttctaaattatgggctccaagccacttaaggaggaaaatcttaaaaaccaggattactctgtgttgtcattttattaaaacataatttgagggaagccatatttgtcttggaaattagcttggttaatttacatgaatattagaatgtgccatggtctttactataattggatcattttaggttaccttatcacctacctttgacccaggtatcctgcccaggaggagagccatgctggctgggtaccaaccaattgccatgcccaaggagaatcctggataaaggtagatgggttaggccttgtaaacaaggggcctccttccctcagggattaca

SEQ ID NO: 80670 - DNA, 697 bp, Homo sapiens
  misc_feature (1)...(697): n = a,t,c or g
  sig_peptide (107)...(242): this location contains the signal peptide sequence, MSLRAPSVRIFVYLLFRLHTQRGLLAGRRQWGPCPLSFSHFLHLS, Run with SignalP
  misc_feature (1)...(92): similar to gi4587306 in the genepept database release 114, Run with FASTXY 3.3t00, default parameters
caagcagcaaattccagtttctgggaaatagtggaccagatcgtctccatggagcagctggtcctaacatattggccggcaaggaataactgactcctctggcctcatgtctcttcgggccccctcagtgaggatctttgtgtacttgctattccgtttgcacacccagcgtggcctccttgcaggcaggaggcagtggggcccctgcccactcagcttctctcattttcttcacttatcagtcttgtcctgttccactcaaatctacactgagggcagttggcctggatgggcttcactaggggccccgtctgtgcactgggcccgtttcccctgctggctgcaagccatgggttctttttctcctctctgcccctcatgctgaccttctagatgccactcccaaatccccttcactccatacccaccaggcttcatgcccacccaggcctctggcaccctcagtgcagcccatgattgggaactcaccatcagcagtcagtggctcggtttaagagagggccgcagagggaactgggtcctgatgtggacttggatgccctggggggatagntctgctgacactgtggcctgaaatanaaaaagtgctgagcaagcagtgtatgctggagcctcagtagaccatctgcacaatggggacgtggagaggatggttggattatgcctctgcatgtca

SEQ ID NO: 80671 - DNA, 822 bp, Homo sapiens
  sig_peptide (158)...(293): this location contains the signal peptide sequence, MSPSLHLCFLPSSFFCKCLFIPVYICKHYFKYWGYNDEKNAQSVL, Run with SignalP
  misc_feature (71)...(206): similar to gi1498235 in the genepept database release 114, Run with FASTXY 3.3t00, default parameters
ggagactctgctgaatagagatatgctctgtcatacttatttagaaattttaaaatttgggaattaggtaactcttcaattcttcacatttagttctgcttctatcgcttattccttatcattcatttgctattccatttttcatatcaatttctatatgagtccctccctccatctctgcttccttccttcttcctttttctgcaaatgcttatttatccctgtttatatttgcaaacactattttaaatactggggatacaatgatgaaaaaaatgcccagtcagtcttaatcttcacagagcttataattaactagggaatcaaaattatatagacaatcccaagatattgtcacaaacaggatcacagagcaagcccaaagtgatgatagggctaccccacctgggagggaacccaacccattctagaggggaaaaaagacttctcagcggatatgacctcaaaattctagttaaaaacgtagtatagtaatgaagtagtggaatgtggaaatctgtattgaggactaaacattaatgatctacagagcaagaagaattgcctttattttcacatgtttgcttgaaattgtagcttaaacctcaatcaataagtacatgtagctctactgatgcattagtaaaaaaaatctataaacaaacccagtgaagattatattgtaatatcatttaataaaaattattattacctaccccacttggcccaccctctcccctttttgactcaggccattctttggcctgctttaacaaatattccagactgggtaatttatacaaaaaaaagttgcccccccgc

SEQ ID NO: 80672 - DNA, 388 bp, Homo sapiens
  sig_peptide (88)...(223): this location contains the signal peptide sequence, MTALILLSSPLAWVSGTLASFLGSPKRVSYPALPSLRIAPVYLSF, Run with SignalP
  misc_feature (85)...(281): similar to gi5105844 in the genepept database release 114, Run with FASTXY 3.3t00, default parameters
gaagttgtcttatattgctaagggcagaactgtgcccagacagaagtaggcaaaccgaatttctcttgtgttcccttactctttttcatgactgctctcattctgctctcttctccactagcctgggtgtctgggacgcttgcgtcgtttctaggctctcccaaaagagtctcgtatccagcccttccctccctgagaatcgccccagtctatttgtccttctcccctcccctagttctgttaaaaatgacctcatttgtgtctcattctgatcaggtcttgggctcttctttacaaaggggcaatcctagtctgtcaactgactcgtgttcatgggtttataccctcttcccagccaggttacccctgagcttaaacatggcctcat

SEQ ID NO: 80673 - DNA, 660 bp, Homo sapiens
  sig_peptide (11)...(146): this location contains the signal peptide sequence, MKVWLIFPLFLGAGMKLLSLAWGRKNSCVLSLRRSTWPGAVAQTI, Run with SignalP
  misc_feature (110)...(170): similar to gi5678945 in the genepept database release 114, Run with FASTXY 3.3t00, default parameters
caggcaatgaatgaaagtttggctaatttttccactgttccttggagctgggatgaagttactttctttggcttggggaaggaagaattcctgtgtcctgagcctcagaaggtctacctggcctggggctgtggcccaaaccatagatggagtcagagagctgaacttttctgctgaggttggcttccgttccccagctcgctggccgggttcctgccctgttcttcccttctgtagtgggattgacattcaaggacatttcgttaagctgaggctcacactgaggagaaaaataaatgtgtgggtggccccagaccttccctttccatattttcctttccaaactccatgaattagtgaggcctgacttcagcatcttgccatccgggaaggaaccggagatgggggagacaaggctgtttccttcttcctcgatgacactgtgcatctgtgcccccacctccatctcagtgctcaggggaaggctttggggatcattctgtcatatagctgggcccagatgctattttgggagcacatattttattcagattgggggaaaaactggtagagaacaagatgggcccctaatagagcccggggggatccactaacttcccggccccctggtccatgggcgggaaccattcttgttacccc

SEQ ID NO: 80674 - DNA, 702 bp, Homo sapiens
  sig_peptide (8)...(143): this location contains the signal peptide sequence, MLWVKIFLLSPVPFLGLLQIVNKIIVSMKFSLCCSFLNDYAPERM, Run with SignalP
  misc_feature (8)...(98): similar to gi205828 in the genepept database release 114, Run with FASTXY 3.3t00, default parameters
gctctgtatgttatgggtaaaaatcttcttgctttcaccggtcccttttcttggcctattacaaatagtaaataaaataattgtatcaatgaaattttcactttgttgttcttttttgaatgattatgcacctgagagaatgttgttaaaatagcaacatattggatatggtcaaaatgaacattttgctatgagcctttaaaaccaaacctgagtaatacaagcaatatataaacggtatagtagactctgtttgagtccattaggtcctgactgaagactgaaaaaacagtaaaagtggaatcctggaagctaataatagtttgtttggtagggggtcttttgaactgagagcagtaggaggaagacaaatgtgtgaaatgatgggcaatataatgatagggtacagcgaggatggattaactattggtagctcttgtaacaaagaaagaaaagctaattttggagacaaacaaaaaggctggtagagtaaaagtaataatttaaaaaaaaaaaacctctattcttgagctgggtgtggtggcttatgcctggagcccaaaactttgggaggcttgggaggccgatcacgaaatcaggaaagggaacttatcggcccacagtgggaaacctgtgtcttaaaaaaaaaagaaattggggtggaaggggggggcccccgtgatccccagtactggagggtgg

SEQ ID NO: 80675 - DNA, 382 bp, Homo sapiens
  sig_peptide (53)...(188): this location contains the signal peptide sequence, MCSVSAGTLPLLGELLSLTVAKTNSAGCHHCQSGEGSLSTHTCIL, Run with SignalP
  misc_feature (372)...(278): similar to gi3093367 in the genepept database release 114, Run with FASTXY 3.3t00, default parameters
caagaacactctcttggagtctggatcgggactcctttcctgcaacaaaaccatgtgcagtgtgagtgcaggaacattgccgctgcttggagaattgctgagcctaactgttgcaaaaacaaattctgctggctgccatcattgtcaaagtggggaaggctctctgtctactcacacatgcatattggagctcttgctctacttggcttacctcttctattttcttagttttcttgcaacattatgcatgtctaaattcctttccttattagcaaatggagaactttgctcttggctggggcgctgagtctgatagttacatggagtttcacaaaagaataggctgcagggcaaaggggaaactgaaggcataatcttgggg

SEQ ID NO: 80676 - DNA, 478 bp, Homo sapiens
  sig_peptide (315)...(450): this location contains the signal peptide sequence, MHLRPLASLPQCPLYSTLLFLIDSYLPFKNPLRWPQSNTFHKASK, Run with SignalP
  misc_feature (286)...(174): similar to gi2226269 in the genepept database release 114, Run with FASTXY 3.3t00, default parameters
attctgtgttgtatggtctagttgtgtttctggtgctgtgcttgactctcatagtggaaatgaaatggtgcctttacctcggcagtgacaaggttaacactgagaatgctaattgcaggttggggtgggatcagcaaaagatagcctgagtgagcaaaatatgcaacatacttaccagtggtggtgtaaacagcagtcatagccaagaggatgaagattgccaggtaaaggtccaatcccaaggccagcttgatgaatatggctccagcaaatatgtctgcctaaaaagggaacagtcaggatgagaaagaaacatgcatttgaggccactggcttctctgccccaatgtccactctactcaacccttctttttctgatagactcctacttacccttcaagaatccactgagatggccccagagtaataccttccataaagcctcaaaaaacgatttttactctcttcactctcttct

SEQ ID NO: 80677 - DNA, 704 bp, Homo sapiens
  sig_peptide (109)...(244): this location contains the signal peptide sequence, MLMLILVTGVSSLRNMIMCDYISRAKLKSSHIVLSYCTLKQEYDD, Run with SignalP
  misc_feature (127)...(309): similar to gi2702431 in the genepept database release 114, Run with FASTXY 3.3t00, default parameters
gagaaccccataaggtacagctagggaaagatatcttgcgataaataagatttgccatgtggaaaactgacccaccatcagtgataactgctatggcattttggtaagatgctgatgctaattttggtaacaggagtgtcatctttgaggaatatgattatgtgtgattatattagcagagcaaagctgaagtctagtcacattgtactctcatattgtaccctgaagcaagaatatgatgacagcaggggagtgatgaacttggaggctagagaagagggaagcagaggcttctactgcctcggctgcattgatactggcttgcaaactcccggaggaagaggcccatcatctgctttggtgacttcagtgcaccttgcttgcgaagagtacagtaagcattcatttgttaaatgaatgaataatattaacgtatggtattattgaggtagagataagggagatttggcttaatcgcttgaccccaaggcatacttaggaaggtattattattattattattttttgagatggaggctccctctgtcaccaagctggacgatctcagctcactggaacctccgcctcctgggctgaacaattctgctggctaaactcccaggactggggttacaggcaacaccaccaacctggttaatttttgattttaaaaaaaagggttcaccttatggctaggtggccga

SEQ ID NO: 80678 - DNA, 366 bp, Homo sapiens
  sig_peptide (67)...(202): this location contains the signal peptide sequence, MEYLLHSLSFHNQLFTYLLPLIHWLLLECTQHRALHLVDPQGMLM, Run with SignalP
  misc_feature (28)...(124): similar to gi4115804 in the genepept database release 114, Run with FASTXY 3.3t00, default parameters
agaattacctggtgaaacctctctgacctctatagtcataaacagtcccctttttttctacttctgatggagtatttacttcattctctctcttttcacaatcagctgtttacatatctgttgcctctgattcattggctgctccttgaatgcactcaacacagggcattgcatctagtagaccctcagggaatgctgatggaacttgtcaagggaatgaattttggatggtgaagttaccacagcagtgaatctgttgctttcatttgaagtccattcacaggtcccactgaggtctgagaggctctgactacaagaaagggtttggagtctggcatccttgggtctagatatctgccctgtgcc

SEQ ID NO: 80679 - DNA, 429 bp, Homo sapiens
  sig_peptide (179)...(44): this location contains the signal peptide sequence, MLNTFISLLLWGTARWGDVKKNFLQNKAVASPGKQGPGPALTLMT, Run with SignalP
  misc_feature (344)...(221): similar to gi1589848 in the genepept database release 114, Run with FASTXY 3.3t00, default parameters
tccttcgccgctgaagaccagaggatggaggcctgtgctgtgtgtcatgagtgtcagagctggccctgggccttgctttcctggactggccactgccttattctgcagaaagtttttcttgacatctccccacctcgctgtgccccagaggagcaaactgatgaatgtgttcagcatgtaccacctttcttgtgggaaggagcatgggttccaggtccctgcctgcttccagaccctctgtggaagctgccgctggcactcagcttccttttccggggtatgagcaactgtgtctccaagcagaatgcctttgtccacggggtggggaggagctggaagactgcaggcctccaggttctttctctcaggtttctgttccctttggcgtccacaggacatcagaaaccagcgggggggttccctgccccc

SEQ ID NO: 80680 - DNA, 711 bp, Homo sapiens
  sig_peptide (333)...(468): this location contains the signal peptide sequence, MMPTNLAHLVFWQALLASGRFSLMEHYPPNVQSNRGITHYMLPRG, Run with SignalP
  misc_feature (2)...(152): similar to gi11662 in the genepept database release 114, Run with FASTXY 3.3t00, default parameters
tttttttttaataatgttgttttttcagtttgtgattttcgttatttatacgaagagcgagctggttttcttaccaaactggaaacctagctgtttgaactatgatgacatatctaacatattctacctttttggagtttatcttgaaccaagaaaaattatgggaggaaataacagctcattgcttgattaatgattcaaatttttaaaatgtttctcatgaaatgaaagaatggcagatgttaatattgttattatcttaatggccatgactcaattgaccctagaatgagatttcatttgtcacatagcatctgcaaggctgaattttcatgatgccaaccaatctggcacatcttgttttctggcaagctcttctggcctctggcaggtttagcctaatggagcactatccacccaacgtccagtccaacagaggaatcacacattacatgcttcccagagggtacatcctggggctgctttacagctctgctggcaacacaggaacttcccgtccacgaagaacccactatggtacttgaccagcaggtgggggttaccccttatctctgaggagccgacaggaagaaaacaagacgttagcaaacgttgatccaagaggagaaacattcagtaagtgctgttatcacagaaccataaaaacccctttggcagaacccagggaagaagcaaagggttccgaaagaa

SEQ ID NO: 80681 - DNA, 382 bp, Homo sapiens
  sig_peptide (192)...(327): this location contains the signal peptide sequence, MSVIKLLSERLFLVLEPSGSLVAQSQSPALELPMWRWPSSLLTVC, Run with SignalP
  misc_feature (1)...(116): similar to gi4731386 in the genepept database release 114, Run with FASTXY 3.3t00, default parameters
gcatattttaactttaaagggaagtttggcagcaccccacaaaagagggtgcccccactgtctgtttcagccacaggatgtaaaagtacctgttgcctgaaccctcatctatgctgcgtggctgctgaacttggccatccacaggtagactttggtagcttggtgtcatccttaatttgatgtatcctatcatgagtgtgatcaaactgctttctgaaaggcttttcctggttttggagcccagtgggtctcttgtggcacagagccagagccctgctttggaactgcccatgtggaggtggccatcttccctcttgactgtttgcattggccggctccacccccaggtggcccagaaacctgttgcagctggggtggccac

SEQ ID NO: 80682 - DNA, 375 bp, Homo sapiens
  sig_peptide (70)...(205): this location contains the signal peptide sequence, MVVASLPFILSRLLLLIWCHFGLGQQWWATYLMSVPLTSPCLSVY, Run with SignalP
  misc_feature (334)...(310): similar to gi1574467 in the genepept database release 114, Run with FASTXY 3.3t00, default parameters
cagccattaagataagacctaataagtgagagatacagttcccaagagtttacagatccaggtgttcacatggtggtggccagtctaccgtttatcttgtcaaggttgttactgctaatttggtgtcactttggtcttgggcagcagtggtgggcgacgtatctaatgagcgtgccattgacttctccatgtttgtctgtgtacgaggggtgcaggttgtctgtaatccactaaagtgtcagccacacccagctttagtaactcgctaatcgcacaccctgggtgtatcagccaggggctgctacagttaatggtacacagttgatggtacacaggctgaaaatgataatgaatcaagaccctactacatttccc

SEQ ID NO: 80683 - DNA, 390 bp, Homo sapiens
  sig_peptide (94)...(229): this location contains the signal peptide sequence, MFFLLCRQAHSLSVLPICLHLPLCPRVPTAPVTPDLKPKMVGGAG, Run with SignalP
  misc_feature (58)...(259): similar to gi555435 in the genepept database release 114, Run with FASTXY 3.3t00, default parameters
aacaaattaatttcctgcccatttcaaaaccacagccctagtatgtccactgtgtttcaggcatgtgtttgcatgtatatggagggagggaccatgttcttcctcctgtgccgccaagcccatagtttatctgtgctccctatctgcctccaccttccgttatgtccaagagtacccactgccccagtcactcctgatctgaagccaaagatggtaggaggggcagggccgacaagggaccgtggctactcgggacccaggcttcccctccagtgtgaggaagaagctctgacctatagagagatgaataggtactggggcttggtccctgccttcccagcagggaggaaagatgggattgagctgggggctgcactgataagatttcta

SEQ ID NO: 80684 - DNA, 440 bp, Homo sapiens
  sig_peptide (254)...(389): this location contains the signal peptide sequence, MQAEHVNSSFVCSPKILIPFSLGSLLALSLLHTLAFGPTFNTLYF, Run with SignalP
  misc_feature (9)...(41): similar to gi290898 in the genepept database release 114, Run with FASTXY 3.3t00, default parameters
ggattgattgccgggtcgccccacgcgtccgcaggaaaattgggactttgagtttttattttgtcttcatacagcgttttcttgtgatttttgtgttctgagttgcaaatacttctaaatttcaggtttatcttttaaaatagctgtatagatttctattataaaatagagttcaacctgctttgaggctttcttgttttgcttaagccgtattaaaatacagtttcgtggtattaatatttttctacttttcatgcaagctgagcatgtaaacagctcgtttgtttgctctcctaagatcttgattcctttttctttgggaagtctgttagcgctgtcattactccacacattggcatttggacccacttttaacacactctattttggagagacttcagatagtggacaaactagagaatttataatgaaactcaccc

SEQ ID NO: 80685 - DNA, 624 bp, Homo sapiens
  misc_feature (1)...(624): n = a,t,c or g
  sig_peptide (53)...(188): this location contains the signal peptide sequence, MHFLACKKAFLCLLVHRCLLFPPAQSSFMWSERIHDSVSSMPLLT, Run with SignalP
  misc_feature (146)...(272): similar to gi405966 in the genepept database release 114, Run with FASTXY 3.3t00, default parameters
caagtacataagaaactagatcatccccttcttctgagcacctgtaagcagcatgcactttcttgcctgcaagaaagcctttctgtgccttctggtacacagatgtcttctgtttccaccagctcaaagcagctttatgtggtcagaaagaatccatgactcagtttcttctatgccattgctcaccacagagctggaaaggattgttttgccatgttctgttctttggtgtcacatgcagggtttcagggacaaatggctttccctccttcataggatcagcctgaagagtctgatgatctggctccttaaatttttacctatctcctcttatctttgatccttgattcgggaagccttctgtttcaagccttccatcataggcttcatcaccttgcaacaactagggtatataaataagtttgctctaccacagtgtatttaatcctcaccagccaaattatgaataagacaccgctccccatttagtgttctcatgtccctgcctcattaatcccatccaactttgcccggttcccctttaaagctaggnttttggggcttttgccccctttatttttccccggcccctattttttgtcctaaaccctaggctttgggggg

SEQ ID NO: 80686 - DNA, 382 bp, Homo sapiens
  sig_peptide (72)...(207): this location contains the signal peptide sequence, MSLCIYTLTCTVVLITFPWEMRVLLLYWLMFKFVHVCVWRAASQS, Run with SignalP
  misc_feature (25)...(80): similar to gi1490352 in the genepept database release 114, Run with FASTXY 3.3t00, default parameters
cttagtttgttttttagatggatagacatcttttgcttctctgtgtgtatatacacaaagagaagcggaagatgtctttgtgtatatacacactcacatgtactgttgttctgataacgtttccatgggagatgagagtattgcttttgtactggctcatgttcaagtttgtgcatgtttgtgtttggagggcagcatctcagagctttcctcttggacgtgtgtaaacatgcagggtgttaagaacatggggcggtttcagtcatttaggttttttttatatttcagcaaaaattaagaacaggatgatcatcatgaatgttttgagaaaaagtaatagtcaaatatgttttaagtcattttattggaagaaagtaatctg

SEQ ID NO: 80687 - DNA, 852 bp, Homo sapiens
  sig_peptide (18)...(153): this location contains the signal peptide sequence, MLWKRELSSTTWTWNMIHVLLFKAVAPGLPPSLAHCCLCLFTIGT, Run with SignalP
  misc_feature (87)...(210): similar to gi4261700 in the genepept database release 114, Run with FASTXY 3.3t00, default parameters
gacttggaacatgatccatgttgtggaaaagagagttatcttccacaacatggacttggaacatgatccatgttttgctctttaaagctgtggcccctggcttgccaccctccctagcccattgctgcctctgtctcttcaccataggcacttctgccaaactagtggagaagtcttggtctaaactgctaataatgctcttccctaaagaacaggataaaagatccaaaatactttttcttaaattcctgtcaagcctggggtccaccccgtaccccttcccacatgaacgctggaactgagatggcttccccatcatcgtctggattttcatttaacaaagtacttgttgtaaatgtgtacttcttgcctaacgtgaggaactaaaaacttgtccatgcataccccagtcctgtagaaataactgttctcgggctttaggttttccagatttccctcagagctctagaaactgagcgatggacagttgctctgcttcttcaggttggaactctggatacatccttggttcctgaaattccaaacttaacacctatagttctctcaggctttttttgaaaagttccttcggttctatttctattccactctatttaactattattgggcggcacccccaatggttccttttctctccacatccctggaacttgcctgtacccaggacatgcctttgctggcccaaaccgtgacgaacgtgcccttcactggcacaaccctgggagaatgggcatcttctccaaagcggacgaccccttatcttgtggatcggcacctcactacctgcttcctactatactggggccttcccaccttcgcgtccccgccaac

SEQ ID NO: 80688 - DNA, 437 bp, Homo sapiens
  sig_peptide (73)...(208): this location contains the signal peptide sequence, MWMIFPFVLMFISCPSISARIRTDEVAIYRLCIFTLGNYKPFPGS, Run with SignalP
  misc_feature (73)...(153): similar to gi1235639 in the genepept database release 114, Run with FASTXY 3.3t00, default parameters
taccgcgcctaagttccgggtcgacccacgcgtccgctacgcttgtaccatccagactgcttgttccttgagatgtggatgatttttccatttgtcctgatgtttatttcatgcccatcaatatcagcccgtattaggacagatgaggtggctatttacaggctgtgcattttcacacttggtaattataaacccttccctggttcggtcagagtcgtggagatccattttggcaattagcagtttagtatttgtttaatgggaatgtgagagagtgttccggcacatcagtgctcccctaaatgatttgcctctctcctctggagctggcaggcttgggcctttttcatggtaggtgaggcctgatggggagaggctggagagggggagaagggagcattcagcagttcagcagcctgcctgccactcccctcccc

SEQ ID NO: 80689 - DNA, 738 bp, Homo sapiens
  misc_feature (1)...(738): n = a,t,c or g
  sig_peptide (323)...(188): this location contains the signal peptide sequence, MNVICLTLCLVSSKCSVGGTASFVLLCFSLPVSSRRRAFQESQGW, Run with SignalP
  misc_feature (738)...(516): similar to gi2655041 in the genepept database release 114, Run with FASTXY 3.3t00, default parameters
atggtcaccacattttaccatcagcagctggacactagccctaagagcctagagggggtctgggctggaggtgctcatgtgagcactgcggcttgggagccacatcctgagagcccccgtgtggctgcagaagccatgaagccaggttctgtatgtggcagcccagaggggccgcccctgggctctgtccagccctgtgattcctggaaggccctcctccgggaagagaccggtaatgaaaaacacagcaaaacaaaactggcagtgccgccgactgagcacttagagctcaccaggcacaaagttaagcatattacgttcattatttcacttaatcctcacaaaagcccccttggggaaggtacttccaccacatcaaagtcactgcccaaggtccctgctgagtgatcaggaagctcggctccaaaataaccatgagctgtggaaagctgcactcaaccagagaccaaatcagaactccagaagtcagagtccagcgggtgttgcctgcgctccaaatgcctgatgcccaccccatcccgagcaggtccgtcagcttggctgggctgtcccaccctccaggccacactggccaatcccccttccttcctcggggtgggctgggtcggcgcaggtcccctagttcacccagggctgcaaaaaatgtgttttgacagcccggagggctgacgtgcggacgcgtgggtcgtcccggcantaccggaacgaaatnacgtt

SEQ ID NO: 80690 - DNA, 416 bp, Homo sapiens
  sig_peptide (68)...(203): this location contains the signal peptide sequence, MLKWHCQESICLLSSAMPSSLWASLPGKSRSWWQRWLPAAPTIFL, Run with SignalP
  misc_feature (68)...(199): similar to gi487443 in the genepept database release 114, Run with FASTXY 3.3t00, default parameters
cccacgcgtccggtttcaaataactgaaaagtgtatgggcgatagtttcaggcatggctgagtccagatgctcaaatggcattgccaggaatccatctgtctcctttcctcagctatgccttcctctctgtgggcctctttaccaggcaagtcccggagctggtggcaaagatggctgcctgcagctccaactatattcctactggtttggcatctgaaacagaaagagcaagtctcctttccatgagttctagcaactgcccgcggattgattctcatgggcttggcttttatgatgagcctgttaggaaaatggagtgctctcacgggcccagccttactcataggccccgccctggaaccaggagctgggatcagacccgaacacacagacttttgaagaaaggaaggtggtt

SEQ ID NO: 80691 - DNA, 1706 bp, Homo sapiens
  sig_peptide (457)...(592): this location contains the signal peptide sequence, MVLLVVGNLVNWSFALFGLIYRPRDFASYMLGIFICNLLLYLAFY, Run with SignalP
  misc_feature (19)...(831): similar to gi4929551 in the genepept database release 114, Run with FASTXY 3.3t00, default parameters
ttccgggtcgacccacgcgtccgcaaacactttggtctcttctacgctatgggcattgcattgatgatggaaggggtgctcagtgcttgctaccatgtctgccctaattattccaacttccaattcgacacctccttcatgtacatgatcgctggcctgtgcatgctgaagctctatcagacccgccacccagacatcaatgccagcgcctactctgcctatgcctcctttgctgtggtcatcatggtcaccgtccttggagtggtgtttggaaaaaatgacgtatggttctgggtcatcttctctgcaatccacgttctggcctcgctagccctcagcacccagatatattatatgggtcgtttcaagatagatttgggaattttccggcgggctgccatggtgttctacacagactgtatccagcagtgtagccgacctctatatatggatagaatggtgttgctggttgtggggaatctggttaactggtccttcgccctctttggattgatataccgccccagggactttgcttcctacatgctgggcatcttcatctgtaaccttttgctgtacctggccttttacatcatcatgaagctccgcagctctgaaaaggtcctcccagtcccgctcttctgcatcgtggccaccgctgtgatgtgggctgccgccctatattttttcttccagaatctcagcagctgggagggaactccggccgaatcccgggagaagaaccgcgagtgcattctgctggatttcttcgatgaccatgacatctggcacttcctctctgctactgctctgtttttctcattcttggatttgttaactttggatgatgaccttgatgtggttcggagagaccagatccctgtcttctgaacctccaacattaagagaggggagggagcgatcaatcttggtgctgtttcacaaaaattacagtgaccacagcaaagtaaccactgccagatgctccactcaccctctgtagagccaactctgcattcacacaggaaggagaggggctgcgggagatttaaacctgcaagaaaggaggcagaaggggagccatgttttgaggacagacgcaaacctgaggagctgagaaacacttgctccttccatctgcagctttgggagtgcaacagggataggcactgcatccaagtcaactcaccatcttggggtccctcccaccctcacggagacttgccagcaatggcagaatgctgctgcacactttccttcaagtgtcaccctgcccaaaaaaggccagcagcttggacttcctgcccagaaactgtgttggcccccttcacacctctgcaacacctgctgctccagcaagaggatgtgattctttagaatatggcggggaggtgaccccaggccctgccctactgggatagatgttttaatggcaccagctagtcacctcccagaagaaactctgtatatttcccccaggtttctgatgccatcagaagggctcaggagtggggtttgtcacacattcctcttaacaagtaactgtcactgggaccgagtcctgggtgcttacatattccttcgtgtcttcatctcactgacctgtgtggacctcatcactctgactctgccttcttggaaaggccctgtcactccacagatgtctggccagcttcaaggcagaaggaaaaacaggaaaagctctt

SEQ ID NO: 80692 - DNA, 1128 bp, Homo sapiens
  sig_peptide (625)...(760): this location contains the signal peptide sequence, MDPPCPWLHPAAWPLQTPLALPLLGTGSSPMPIFRWRPPVHLLSM, Run with SignalP
  misc_feature (22)...(145): similar to gi28572 in the genepept database release 114, Run with FASTXY 3.3t00, default parameters
tttcgtggcttgatgaattaccacacagtgaacacacctgtgtacccaccacctggatctgacacccagacgctggcaggcctcccccaattaccatgcgcttcatctccccaaaggcgccctgtctgcatttctccacggatcatacgcctgtcggcccttgtgcctggcttcacgctatatcacttctgagagtcattcgtgttgcctgtagcagtgggctgttctttttatgctgtgcaagtgtcaaccgtaggaacctgccaccatttatgcccatgctctggggctgctccccgcctggggctgtcatccacagcctttacaagcattcctggtgaagcagagtcacaggcatctggcccaatctgttcaaatcattctaaatgttggcatctgttacgttctggtgccccaggccacacctggatcaccccgaactccctgcggaagtacctgttgctgcctcctgagagtcctctagcttaagagtcttggttttccgaccagaccctcagtcccctaaccccagagtggttcccaggaccccagaccaccagctctcctgtcttccaggctagactcgacctctcatgctcagagggtcatgtggacctctggcctatggacccaccctgtccctggcttcaccctgcagcgtggccattgcagacaccacttgccttgcccctcttgggtacaggctcttcccccatgcccatcttcaggtggagacctcctgtgcatcttctaagcatggctcagggcccctcctttttggctggggcggccagaggagacaaggccaagggtgcaccgaggaggcatggtgctaactttgccctaacacgctgggcctacccaatcagggccttgaatttgctggggggcaggcaaacatggtgacgttcaagattcccactttgcttgttgggcctcgctcaccagcctcttggcacatgatgggcgcttaaaaacaatttaagcggggggagcaccctcttgggcccaactaatccgcgcgggacaccccccgcgacacgacggcccatacgttccccgcctccgcgctcgctgcgcgggcggccactcgccgcttcgcccccggcccgccccgcacgggcgggc

SEQ ID NO: 80693 - DNA, 320 bp, Homo sapiens
  sig_peptide (125)...(260): this location contains the signal peptide sequence, MLPPLCWCCVRTMTCCIGTSTGMDGRPPSPWRRIPCWTQTCSCRN, Run with SignalP
  misc_feature (185)...(235): similar to gi305340 in the genepept database release 114, Run with FASTXY 3.3t00, default parameters
tttcgttggagggagccgctctccaaatgcctccaccctgctgcctcacttccactgagcacccctttgacgaatttccccaggtgacaggcgtgggaattcttcgtcccactgttactctttgatgcttcctcccctgtgttggtgttgtgttaggacgatgacatgctgtattggcacaagcacggggatggatggaagacccccgtccccatggaggaggatcccctgctggacacagacatgctcatgtcggaattcagcgacaccctcttctccacactttcttcacaccagccggtggcctggcccaatgtatt

SEQ ID NO: 80694 - DNA, 851 bp, Homo sapiens
  sig_peptide (258)...(393): this location contains the signal peptide sequence, MGDFAGVDFVFLVVCFAQRQGAAEAVGAVLAVLLCDTLLGVTRLE, Run with SignalP
  misc_feature (852)...(529): similar to gi2911500 in the genepept database release 114, Run with FASTXY 3.3t00, default parameters
ttttttttttttgcaaagattcactttatttattcattctcctccaacattagcataattaaagccaaggaggaggaggggggtgaggtgaaagatgagctggaggaccgcaataggggtaggtcccctgtggaaaaagggtcagaggccaaaggatgggagggggtcaggctggaactgaggagcaggtgggggcacttctccctctaacactctcccctgttgaagctctttgtgacgggcgagctcaggccctgatgggtgacttcgcaggcgtagactttgtgtttctcgtagtctgctttgctcagcgtcagggtgctgctgaggctgtaggtgctgtccttgctgtcctgctctgtgacactctcctgggagttacccgattggagggcgttatccaccttccactgtactttggcctctctgggatagaagttattcagcaggcacacaacagaggcagttccagatttcaactgctcatcagatggcgggaagatgaagacagatggtgcagccacagttcgtttgatgtccaccttggtcccctggccgaacgtccacacgtaagtactcagctgttgacagtaataagttgcaaaatcttcaggctgcaggccactgattgtgagagtaaattctgtcccagatcctctgccgctgaaccttgatgggaccccactttgcaaactagacgccttatagatcaggagtttaggggctttccctggtttctgctgataccagggcaaccagggactaatactctgactggcccggcaagtgatggtgactctgtctcctacagaagcagacagggtggaaggagactgggtcatctggagctc

SEQ ID NO: 80695 - DNA, 393 bp, Homo sapiens
  sig_peptide (74)...(209): this location contains the signal peptide sequence, MVVLIRLGTCTKVVRGWCTGIVVLHRAGVTKGLRIKVAMERARKK, Run with SignalP
  misc_feature (383)...(296): similar to gi1572744 in the genepept database release 114, Run with FASTXY 3.3t00, default parameters
tttcgtgggaccccagctgggtttggtgcctgcggatgtttttcagtcccaatctgcctgctacctgaaccttatggttgtgctcatcagactgggtacatgtacaaaggtggtgagaggctggtgcactggaatagtggttctgcaccgagcaggtgtaaccaaaggacttaggatcaaggttgctatggaaagggctagaaaaaaaccgaagcagctgactgtggctgtactctaaggtgggcagagagggaaacatctacaaaagggggttctgcatgtagacaccaagagaacagagggctccatgaatgatgatcctgaggaggctgaatgatgtgtataacatggggaggtattatagtatcggggcagactagagcttatggttag

SEQ ID NO: 80696 - DNA, 413 bp, Homo sapiens
  sig_peptide (143)...(278): this location contains the signal peptide sequence, MSASVNITITITVLLPFVRSFHKYVQSGCSEPSVGSRAAQRRPER, Run with SignalP
  misc_feature (386)...(225): similar to gi450503 in the genepept database release 114, Run with FASTXY 3.3t00, default parameters
agcgtggtggaattccagtttccccagctgtgaaatgaggatgatgacaggacctgcctcacaggcttgcagtgaggataaaatgagttgatatgcatggaatgcacgcagcagggaccggcacggaactgacattgagtggatgtcagcctctgtcaacattactattactattactgtattattgcccttcgttcgttcattccataaatatgtgcaaagcggctgctctgagccttccgtgggcagcagggcagcacagaggaggcctgagcggtggtgctggggagaggatggcgtaaggcaggcctcgtggacgcagccggaggcctcaccatcagcataagcgaccacggtgggcttcagaaggagcgatgagacaggattcaccccattgccatttgcttttctat

SEQ ID NO: 80697 - DNA, 345 bp, Homo sapiens
  sig_peptide (52)...(187): this location contains the signal peptide sequence, MGEVPLLLCTFQNWLFTAHSPVEQNRGPRTPTFCHFHITEFAVNL, Run with SignalP
  misc_feature (10)...(85): similar to gi1142588 in the genepept database release 114, Run with FASTXY 3.3t00, default parameters
agtgcttcttatgccttttgtgctatattctctttttgtagtttctggccaatgggagaggtcccattgctgctatgtaccttccaaaattggcttttcacagcccacagccctgtagagcaaaaccgaggaccccgtaccccaactttctgtcactttcacatcacagagtttgcggttaacttggcagccattcctctcattgattcccctgacttttgagacataaaagaattttttagcccctctttttcaagaagggtggttgaaggatccttttccagctgtatccttctgttccaattttgtaatttgcttcagagataccccacccataccttttag

SEQ ID NO: 80698 - DNA, 959 bp, Homo sapiens
  sig_peptide (242)...(377): this location contains the signal peptide sequence, MCLLFLLPRFPVSWRAGVDGAAPSSQDLWRIRSPCGDCEGFDVHI, Run with SignalP
  misc_feature (290)...(802): similar to gi3947589 in the genepept database release 114, Run with FASTXY 3.3t00, default parameters
cttcatctcctggaccgagccctactgacacctgggccctgcttctcgcccattcaccaggtctctctcctcctgggcgagccgttcttcactaccagcctgctgccgtggcacaacctctacttctggtacgtgcggaccgctgtggaccagcacctggggccaggtgccatggtgatgccccaggcagcctcgctgcacgctgtggttgtggagttcagggtgtgcagggaacagcaagatgtgcctcttgttcttgctgccacgcttccctgtgtcctggcgggcgggtgtggatggggctgctccttcctcacaggacctgtggcggatccggagcccctgtggtgactgcgaaggcttcgacgtgcacatcatggacgacatgattaagcgtgccctggacttcagggagagcagggaagctgagccccacccgctgtgggagtacccatgccgcagcctctccgagccctggcagatcctgacctttgacttccagcagccggtgcccctgcagcccctgtgtgccgagggcactgtggagctcaaaaggcccgggcagagccacgcagcggtgctatggatggagtaccacctgaccccggagtgcacgctcagcactggcctcctggagcctgcagaccccgaggggggctgctgctggaacccccactgcaagcaggccgtctacttcttcagccctgccccagatcccagagcactgctgggtggcccacggactgtcagctatgcagtggagtttcaccccgacacaggcgacatcatcatggagttcaggcatgcagataccccagactgaccactcttgagcaataaagtggcctgaggggctggggttctgagtggctcatggctttctaggggggaaggctgaaggccctcctctcctctctgggagctgctcggcctcagggatgggaaagactgcgccgtgt

SEQ ID NO: 80699 - DNA, 1072 bp, Homo sapiens
  sig_peptide (49)...(184): this location contains the signal peptide sequence, MVPGAAGWCCLVLWLPACVAAHGFRIHDYLYFQVLSPGDIRYIFT, Run with SignalP
  misc_feature (169)...(527): similar to gi5911884 in the genepept database release 114, Run with FASTXY 3.3t00, default parameters
gggggcggcgagaggaaacgcggcgccgggccgggcccggccctggagatggtccccggcgccgcgggctggtgttgtctcgtgctctggctccccgcgtgcgtcgcggcccacggcttccgtatccatgattatttgtactttcaagtgctgagtcctggggacattcgatacatcttcacagccacacctgccaaggactttggtggtatctttcacacaaggtatgagcagattcaccttgtccccgctgaacctccagaggcctgcggggaactcagcaacggtttcttcatccaggaccagattgctctggtggagagggggggctgctccttcctctccaagactcgggtggtccaggagcacggcgggcgggcggtgatcatctctgacaacgcagttgacaatgacagcttctacgtggagatgatccaggacagtacccagcgcacagctgacatccccgccctcttcctgctcggccgagacggctacatgatccgccgctctctggaacagcatgggctgccatgggccatcatttccatcccagtcaatgtcaccagcatccccacctttgagctgctgcaaccgccctggaccttctggtagaagagtttgtcccacattccagccataagtgactctgagctgggaaggggaaacccaggaattttgctacttggaatttggagatagcatctggggacaagtggagccaggtagaggaaaagggtttgggcgttgctaggctgaaagggaagccacaccactggccttcccttccccagggcccccaagggtgtctcatgctacaagaagaggcaagagacaggccccagggcttctggctagaacccgaaacaaaaggagctgaaggcaggtggcctgagagccatctgtgacctgtcacactcacctggctccagcctcccctacccagggtctctgcacagtgaccttcacagcagttgttggagtggtttaaagagctggtgtttggggactcaataaaccctcactgactttttagcaataaagcttctcatcagggttgaaaaaaaaaaaa

SEQ ID NO: 80700 - DNA, 435 bp, Homo sapiens
  sig_peptide (82)...(217): this location contains the signal peptide sequence, MLVLLPRSKAMPLLSVNVTLAFFPRNKEIVKYLLNQGADVTLRAK, Run with SignalP
  misc_feature (139)...(304): similar to gi5911312 in the genepept database release 114, Run with FASTXY 3.3t00, default parameters
ccgggtcgacccacgcgtccggtgagactgtttgcccttccatgtccttcttaaatgctcatagactgagctttgtagttaatgttggttttgttgcccaggagcaaagccatgcctttgctttcagtgaatgtaactctagcattttttcccaggaataaggaaattgtgaaatatctgctaaaccaaggggccgatgtcactcttcgtgcaaaaaatggatacacggcctttgacctggtgatgctgctgaatgatcccgacatatttgggggtgagttgattggttttttgtcggtggtcacggaacttgttcgactgctggcatctgtcttcatgcaggtgaataaggacataggccggcggagccaccagcttcccttgccccactcgaaggtcccgacagccttggagcatcccagtgctgcccgatga

SEQ ID NO: 80701 - DNA, 396 bp, Homo sapiens
  sig_peptide (161)...(296): this location contains the signal peptide sequence, MALGFGRLLALMVMIWLHTGQTDTHMLQSPATPASRVASKIRLSL, Run with SignalP
  misc_feature (309)...(42): similar to gi5295937 in the genepept database release 114, Run with FASTXY 3.3t00, default parameters
acaggtttatgagaaagcaagcttaaggcctttcgtttagcctccgcagccccagacccactctttctcccaagcaagcaaaggggtgatgcagagcagccgggccaggcggatccagggccagcttcttccggccgggagcaggacacacaccaatcccatggcactgggctttgggaggcttctggcactgatggtgatgatttggctccacacaggacagacagacacgcacatgctgcagtctccagccacacctgccagtcgtgtggcctccaaaatcagactgagtctgtccacgagggcatcataaactggttcataggagctccatttttctttcaaaaaaggcacgttaaatccacttacgaagaaagtgtgttcatggaatccggg

SEQ ID NO: 80702 - DNA, 3545 bp, Homo sapiens
  sig_peptide (781)...(916): this location contains the signal peptide sequence, MLWGSGKCKALTKFKFVFFLRLSRAQGGLFETLCDQLLDIPGTIR, Run with SignalP
  misc_feature (679)...(3279): similar to gi3688110 in the genepept database release 114, Run with FASTXY 3.3t00, default parameters
ctggtctacaagaactcgaggcctcactgaaacggattgcaaatacaaagaaactttattttaaaaacgtgtcttggtctcccaagaagagggcaattggattgctcagccagaatgaagagtagttttacagaaaaaagaggacaatattgggatcacctttgacctttccatttggaaataatattttctattgtgttatagaaaggtgggaagctttcatccagaacaatgaatttcataaaggacaatagccgagcccttattcaaagaatgggaatgactgttataaagcaaatcacagatgacctatttgtatggaatgttctgaatcgcgaagaagtaaacatcatttgctgcgagaaggtggagcaggatgctgctagagggatcattcacatgattttgaaaaagggttcagagtcctgtaacctctttcttaaatcccttaaggagtggaactatcctctatttcaggacttgaatggacaaagtctttttcatcagacatcagaaggagacttggacgatttggctcaggatttaaaggacttgtaccataccccatcttttctgaacttttatccccttggtgaagatattgacattatttttaacttgaaaagcaccttcacagaacctgtcctgtggaggaaggaccaacaccatcaccgcgtggagcagctgaccctgaatggcctcctgcaggctcttcagagcccctgcatcattgaaggggaatctggcaaaggcaagtccactctgctgcagcgcattgccatgctctggggctccggaaagtgcaaggctctgaccaagttcaaattcgtcttcttcctccgtctcagcagggcccagggtggactttttgaaaccctctgtgatcaactcctggatatacctggcacaatcaggaagcagacattcatggccatgctgctgaagctgcggcagagggttcttttccttcttgatggctacaatgaattcaagccccagaactgcccagaaatcgaagccctgataaaggaaaaccaccgcttcaagaacatggtcatcgtcaccactaccactgagtgcctgaggcacatacggcagtttggtgccctgactgctgaggtgggggatatgacagaagacagcgcccaggctctcatccgagaagtgctgatcaaggagcttgctgaaggcttgttgctccaaattcagaaatccaggtgcttgaggaatctcatgaagacccctctctttgtggtcatcacttgtgcaatccagatgggtgaaagtgagttccactctcacacacaaacaacgctgttccataccttctatgatctgttgatacagaaaaacaaacacaaacataaaggtgtggctgcaagtgacttcattcggagcctggaccactgtggatacctagctctggagggtgtgttctcccacaagtttgatttcgaactgcaggatgtgtccagcgtgaatgaggatgtcctgctgacaactgggctcctctgtaaatatacagctcaaaggttcaagccaaagtataaattctttcacaagtcattccaggagtacacagcaggacgaagactcagcagtttattgacgtctcatgagccagaggaggtgaccaaggggaatggttacttgcagaaaatggtttccatttcggacattacatccacttatagcagcctgctccggtacacctgtgggtcatctgtggaagccaccagggctgttatgaagcacctcgcagcagtgtatcaacacggctgccttctcggactttccatcgccaagaggcctctctggagacaggaatctttgcaaagtgtgaaaaacaccactgagcaagaaattctgaaagccataaacatcaattcctttgtagagtgtggcatccatttatatcaagagagtacatccaaatcagccctgagccaagaatttgaagctttctttcaaggtaaaagcttatatatcaactcagggaacatccccgattacttatttgacttctttgaacatttgcccaattgtgcaagtgctctggacttcattaaactgggcttttatgggggagctatggcttcatgggaaaaggctgcagaagacacaggtggaatccacatggaagaggccccagaaacctacattcccagcagggctgtatctttgttcttcaactggaagcaggaattcaggactctggaggtcacactccgggatttcagcaagttgaataagcaagatatcagatatctggggaaaatattcagctctgccacaagcctcaggctgcaaataaagagatgtgctggtgtggctggaagcctcagtttggtcctcagcacctgtaagaacatttattctctcatggtggaagccagtcccctcaccatagaagatgagaggcacatcacatctgtaacaaacctgaaaaccttgagtattcatgacctacagaatcaacggctgccgggtggtctgactgacagcttgggtaacttgaagaaccttacaaagctcataatggataacataaagatgaatgaagaagatgctataaaactagctgaaggcctgaaaaacctgaagaagatgtgtttatttcatttgacccacttgtctgacattggagagggaatggattacatagtcaagtctctgtcaagtgaaccctgtgaccttgaagaaattcaattagtctcctgctgcttgtctgcaaatgcagtgaaaatcctagctcagaatcttcacaatttggtcaaactgagcattcttgatttatcagaaaattacctggaaaaagatggaaatgaagctcttcatgaactgatcgacaggatgaacgtgctagaacagctcaccgcactgatgctgccctggggctgtgacgtgcaaggcagcctgagcagcctgttgaaacatttggaggaggtcccacaactcgtcaagcttgggttgaaaaactggagactcacagatacagagattagaattttaggtgcattttttggaaagaaccctctgaaaaacttccagcagttgaatttggcgggaaatcgtgtgagcagtgatggatggcttgccttcatgggtgtatttgagaatcttaagcaattagtgttttttgactttagtactaaagaatttctacctgatccagcattagtcagaaaacttagccaagtgttatccaagttaacttttctgcaagaagctaggcttgttgggtggcaatttgatgatgatgatctcagtgttattacaggtgcttttaaactagtaactgcttaaataaagtgtactcgaagccagtaagtgctctgggacctcattattttaagcctggtagttaaaaaaaatcttgcaaaaggatgccaaagaagataaggacgtggaaagaagtttaatttgatgattaaaaacatgcaacagttttgtgtcttagctctcctactaggattatcggcgccttgaaggaattctcattcatctttgtgttacctttggtctgggtcacaccaactggtata

SEQ ID NO: 80703 - DNA, 396 bp, Homo sapiens
  sig_peptide (179)...(314): this location contains the signal peptide sequence, MEGSRNTPLWVLPIISLWISLTASQAGCVGWLKVRLKIELCLARI, Run with SignalP
  misc_feature (4)...(61): similar to gi179611 in the genepept database release 114, Run with FASTXY 3.3t00, default parameters
gacacttcattaccacggccgcccgggcagcaggcggctggcctcccggggggctttccttgcagatctaggaggattgatccctggaaaggagccagttctcggctgctccccctcccttaggctccactctgaggaaggggccactcaggggaatggtccggctgagaagtcagggatggaggggtccaggaataccccgttgtgggttctgcctattataagtctgtggatcagtctcacagccagccaggcaggttgtgtgggttggttaaaggtacgcctaaagattgagttatgcttagctagaatcacagactatcagagctggaagaaatcttgagcattggctagccctagcctgggtctgtcatatgatagatgacgaaaataagt

SEQ ID NO: 80704 - DNA, 666 bp, Homo sapiens
  sig_peptide (129)...(264): this location contains the signal peptide sequence, METFPLLLLSLGLVLAEASESTMKIIKEEFTDEEMQYDMAKSGQE, Run with SignalP
  misc_feature (129)...(249): similar to gi5457477 in the genepept database release 114, Run with FASTXY 3.3t00, default parameters
ccgagtctgagatctcttctctcaatggcattggagctggctgtgcctgaggcagacctggaccgtggacatggggcaatgccttgagcggaaggggaagccactgaagagattacactacatctgagatggagacctttcctctgctgctgctcagcctgggcctggttcttgcagaagcatcagaaagcacaatgaagataattaaagaagaatttacagacgaagagatgcaatatgacatggcaaaaagtggccaagaaaaacagaccattgagatattaatgaacccgatcctgttagttaaaaataccagcctcagcatgtccaaggatgatatgtcttccacattactgacattcagaagtttacattataatgaccccaagggaaacagttcgggtaatgacaaagagtgttgcaatgacatgacagtctggagaaaagtttcagaagcaaacggatcgtgcaagtggagcaataacttcatccgcagctccacagaagtgatgcgcagggtccacagggcccccagctgcgagttttgacagaaaccctggcataagctgctgtgagagcctagaactggaaaatacagtaagagacttgcctcagtcaactctggccgaggtggtctttgaggaggcgtcctcactggaggcttga

SEQ ID NO: 80705 - DNA, 356 bp, Homo sapiens
  sig_peptide (143)...(278): this location contains the signal peptide sequence, MCDVLKLPSNLLSCFCLPCVFSLHTGMAHGNSASNLNPFVMWTHG, Run with SignalP
  misc_feature (38)...(196): similar to gi5105826 in the genepept database release 114, Run with FASTXY 3.3t00, default parameters
cttttaagtatctttttaaaatctgcataattcaaactgcttcctaagtttagtgatgtttattatgaggaagaggaaacagataaatccttgtaatgccatccatctaacgcttttctccttgtttcgggccacctgctcaatgtgtgatgtattaaaattgccttctaacttactgtcctgcttctgccttccttgcgtgttctccttgcatacagggatggcacatgggaactctgcctctaatctcaatccctttgtaatgtggacacatggtagtccaactgataatccgcctttaccttggtgattcagttgtttaaagaaaagtttttctgttgtgcatggtggcccac

SEQ ID NO: 80706 - DNA, 2682 bp, Homo sapiens
  sig_peptide (1402)...(1537): this location contains the signal peptide sequence, MGLFFFFSGVGSFVGSGLLALVSIKAIGWMSSHTDFGNINGCYLN, Run with SignalP
  misc_feature (4)...(1666): similar to gi2208839 in the genepept database release 114, Run with FASTXY 3.3t00, default parameters
gcggccgcggcggcggctggggcgttcgcgggccggcgcgcggcgtgcggggccgtgctgctgacggagctgctggagcgcgccgctttctacggcatcacgtccaacctggtgctattcctgaacggggcgccgttctgctgggagggcgcgcaggccagcgaggcgctgctgctcttcatgggcctcacctacctgggctcgccgttcggaggctggctggccgacgcgcggctgggccgggcgcgcgccatcctgctgagcctggcgctctacctgctgggcatgctggccttcccgctgctggccgcgcccgccacgcgagccgcgctctgcggttccgcgcgcctgctcaactgcacggcgcctggtcccgacgccgccgcccgctgctgctcaccggccaccttcgcggggctggtgctggtgggcctgggcgtggccaccgtcaaggccaacatcacgcccttcggcgccgaccaggttaaagatcgaggtccggaagccactaggagattttttaattggttttattggagcattaacctgggagcgatcctgtcgttaggtggcattgcctatattcagcagaacgtcagctttgtcactggttatgcgatccccactgtctgcgtcggccttgcttttgtggtcttcctctgtggccagagcgttttcatcaccaagcctcctgatggcagtgccttcaccgacatgttcaagatactgacgtattcctgctgttcccagaagcgaagtggagagcgccagagtaatggtgaaggcattggagtctttcagcaatcttctaaacaaagtctgtttgattcatgtaagatgtctcatggtgggccatttacagaagagaaagtggaagatgtgaaagctctggtcaagattgtccctgttttcttggctttgataccttactggacagtgtatttccaaatgcagacaacatatgttttacagagtcttcatttgaggattccagaaatttcaaatattacaaccactcctcacacgctccctgcagcctggctgaccatgtttgatgctgtgctcatcctcctgctcatccctctgaaggacaaactggtcgatcccattttgagaagacatggcctgctcccatcctccctgaagaggatcgccgtgggcatgttctttgtcatgtgctcggcctttgctgcaggaattttggagagtaaaaggctgaaccttgttaaagagaaaaccattaatcagaccatcggcaacgtcgtctaccatgctgccgatctgtcgctgtggtggcaggtgccgcagtacttgctgattgggatcagcgagatctttgcaagtatcgcaggcctggaatttgcatactcagctgcccccaagtccatgcagagtgccataatgggcttgttctttttcttctctggcgtcgggtcgttcgtgggttctggactgctggcactggtgtctatcaaagccatcggatggatgagcagtcacacagactttggtaatattaacggctgctatttgaactattacttttttcttctggctgctattcaaggagctaccctcctgcttttcctcattatttctgtgaaatatgaccatcatcgagaccatcagcgatcaagagccaatggcgtgcccaccagcaggagggcctgaccttcctgaggccatgtgcggtttctgaggctgacatgtcagtaactgactggggtgcactgagaacaggcaagactttaaattcccataaaatgtctgacttcactgaaacttgcatgttgcctggattgatttcttctttccctctatccaaaggagcttggtaagtgccttactgcagcgtgtctcctggcacgctgggccctccgggaggagagctgcagatttcgagtatgtcgcttgtcattcaaggtctctgtgaatcctctagctgggttcccttttttacagaaactcacaaatggagattgcaaagtcttggggaactccacgtgttagttggcatcccagtttcttaaacaaatagtatcacctgcttcccatagccatatctcactgtaaaaaaaaaaattaataaactgttacttatatttaagaaagggaggattttttttttttaaagataaaagcatggtcagatgctgcaaggattttacataaaggccatatttatggtttccttcctgaaaacagtcttgctcttgccatgttctttgatttaggctggtagtaaacacatttcatctgctgcttcaaaaagtacttactttttaaaccatcaacattacttttctttcttaaggcaaggcatgcataagagtcatttgagaccatgtgtcccatctcaagccacagagcaactcacggggtacttcacaccttacctagtcagagtgcttatatatagctttattttggtacgattgagactaaagactgatcatggttgtatgtaaggaaaacattcttttgaacagaaatagtgtaattaaaaataattgaaagtgttaaatgtgaacttgagctgtttgaccagtcacatttttgtattgttactgtacgtgtatctggggcttctccgtttgttaatactttttctgtatttgttgctgtatttttggcataactctattataaaaagcatctcaaatgggaaaaccaaaaaaaaaa

SEQ ID NO: 80707 - DNA, 331 bp, Homo sapiens
  sig_peptide (188)...(323): this location contains the signal peptide sequence, MLILISCPCLDFFWALRLIGKIRQTDIKIYQRETVQGLAKGQIPP, Run with SignalP
  misc_feature (1)...(59): similar to gi6019395 in the genepept database release 114, Run with FASTXY 3.3t00, default parameters
attcactgcaggaaaacaaacaaacaaacgaaaggaaacaccaaccctgcccctggctaattgcaaccaagtgggtttcaaagttcaatgcaatgttgacttcaggttcagccctcaagttcttagctagctcacaagattttcccaaacagcaaaagttgtcagttaggtgattaggccatttgtgatgttaatcttgatctcctgtccttgccttgatttcttctgggccctgaggcttattggtaaaattagacaaactgacatcaagatataccagagggagacagttcagggcctggccaaaggccaaattcctccttggccaaaa

SEQ ID NO: 80708 - DNA, 393 bp, Homo sapiens
  sig_peptide (116)...(251): this location contains the signal peptide sequence, MLFPQLHLFKGPLPCLLRFLTLGLGVPGSSPDIREDGEKNFDLDM, Run with SignalP
  misc_feature (355)...(166): similar to gi5139695 in the genepept database release 114, Run with FASTXY 3.3t00, default parameters
cattctgggtgacagcaagactccatctaagaaaacggaggaaaaaagtccgatgggggcgccaaagggaacacaaaaggtaaagacttgggtatttgggaaacctttttgaagcatgctatttccccagttacacctttttaaggggccccttccttgcctcctccggtttttaacactggggctcggggttccaggctcaagcccggacatcagggaggacggggaaaaaaactttgacttggacatgactgaaaaggaggggcaaatggccctttccaaaggggatgcctccggggaggggagggggcctggggggtcaaagggaaccgagcctaagggccctgggggggaaagctttccccagccagcccagttgtcccctcaggaggg

SEQ ID NO: 80709 - DNA, 359 bp, Homo sapiens
  misc_feature (1)...(359): n = a,t,c or g
  sig_peptide (43)...(178): this location contains the signal peptide sequence, MHVVFPPVSPLLCLPSLSLSPAQSVTPSLPLLQWAVLVSQTLKWH, Run with SignalP
  misc_feature (362)...(303): similar to gi3860022 in the genepept database release 114, Run with FASTXY 3.3t00, default parameters
aaaaaaggtatatttccttccttctatttctgtgatgctcatatgcatgtagtcttccctcctgtctccccacttctctgccttccttctctttccctttcaccagcacaaagtgtaacaccctcactcccgttgctacagtgggctgtactagtttcacagaccttgaaatggcacatacacgggaaaggtgtttcgacacagttcctatggactgttggtgccggatgcttacacggtcacaccctggtcgctcatccagcttaagcagtcagtgaatccctgctgagaatgacctctgactgttgctaccctgggagacactgggcgagggtcacatgggcaaggggctggtggan

SEQ ID NO: 80710 - DNA, 633 bp, Homo sapiens
  sig_peptide (137)...(272): this location contains the signal peptide sequence, MFRFYLWVICHFTSVPSFPHMFLGLISLATLWQSFLHHPPHQNEL, Run with SignalP
  misc_feature (629)...(545): similar to gi2301070 in the genepept database release 114, Run with FASTXY 3.3t00, default parameters
gtcttggtggggaagcagcttgaatgtagaatgtactgccaggcagtacatactacacaaatgacaaagaccagtgccataggagtccggaagagattggtctagtgtggtcagtgaggttagtgtcataagacctatgtttagattttacttgtgggtaatctgccatttcacctctgtgccctcatttcctcatatgttcttaggactaatttcacttgccaccttgtggcagtctttcctgcaccatccacctcatcagaatgaattatgaagctccttcctctagttcacctgtgtcaccgtcaggccttagtaccactcagtaactgttggtttacgctgtgcttcccctaaaatggtagcttttccaatgcaccatgccctttgttcatgttcttgtagccttggtacctaaagcacagtaagttattggttcattagtgctttatatgcttttaagttttgaacaaatattactcaggattggttatattgccttggcgaaaaaaagagtttgaactggaattgaattgaaaatgtgatttggttttgggttttttttgtttgcttgcattgcaacaggctttgggaactttcatagtatacgctattaaacatggaacttttttg

SEQ ID NO: 80711 - DNA, 378 bp, Homo sapiens
  sig_peptide (147)...(282): this location contains the signal peptide sequence, MPVPNPILVLFLIELPTMLMQKWMVKLPLLSRRISTTEPSLLRLR, Run with SignalP
  misc_feature (297)...(135): similar to gi2760967 in the genepept database release 114, Run with FASTXY 3.3t00, default parameters
agcagtgaagccagccagagccacatgatgaaaaaagtctccatcacccaaacacctttaaaagaaaacaagaaagctcctttcttcacatgagtgtgagcaagcactaaacctctacagtgccaagcaactgagatttaggtacaatgccagtacccaatcccattctcgttctctttctgatcgagcttcccacaatgttgatgcagaaatggatggtgaagttgccactgttatccaggagaatcagcactactgagccctcactactccgactccgggaactggttgctcaccacggaagcatcctccacctaggctctccctgattcctgaacccttgccctgcccatcagcaaactgatcaccgcaggaact

SEQ ID NO: 80712 - DNA, 666 bp, Homo sapiens
  sig_peptide (279)...(414): this location contains the signal peptide sequence, MFLLFWFILSEGCPLLEQLNISWCDQVTKDGIQALVRGCGGLKAL, Run with SignalP
  misc_feature (303)...(642): similar to gi6010699 in the genepept database release 114, Run with FASTXY 3.3t00, default parameters
taatttccattttttgtctagagagctttgagatatgtgataagtacaaaaggaatataaatctgaaaaacattataatgctttgtgtttgttggttaagctggattttagatgttcctgctaatggtatagtcccatgtgaataccacatcgataaatctaaatatacattaggtaaatatgttttttcttgtgggaaaaaatgggaatgtttccattcctttactaaatagccaataaattgagacgttggtgtttttggaattggatttagtgatatgtttctcttattttggtttatcctaagtgagggatgtccactgttggagcagttgaacatttcctggtgtgaccaagtaaccaaggatggcattcaagcactagtgaggggctgtgggggtctcaaggccttattcttaaaaggctgcacgcagctagaagatgaagctctcaagtacataggtgcacactgccctgaactggtgactttgaacttgcagacttgcttgcaaatcacagatgaaggtctcattactatatgcagagggtgccataagttacaatccctttgtgcctctggctgctccaacatcacagatgccatcctgaatgctctaagtcagaactgcccacggcttataatattggaagtggcaagatgttctc

SEQ ID NO: 80713 - DNA, 387 bp, Homo sapiens
  misc_feature (1)...(387): n = a,t,c or g
  sig_peptide (182)...(317): this location contains the signal peptide sequence, MTWVISSVWLLFHVLXWSKMGQRRNEVKWMNECIFKFISNDALPL, Run with SignalP
  misc_feature (21)...(147): similar to gi1430949 in the genepept database release 114, Run with FASTXY 3.3t00, default parameters
actttacatattaatgctgccatactgtatgtactgttttgtatctggcttccctcactcaacacttgttagtgacattcatctgtgttgttgggtttagcagaagttcattcattttcattgttgtgtggaattacatcttgtgaatattcccacagtttatttctacattctgtgattgatgacatgggttatttccagtgtttggttattatttcatgttctttngtggagcaagatgggtcagagaagaaatgaagtgaaatggatgaatgaatgcatttttaaatttatctctaatgatgccctcccactccttaatgccttggccctggcgtccctggagccagatccctccccaatctgaactccttggacagcccctac

SEQ ID NO: 80714 - DNA, 1307 bp, Homo sapiens
  misc_feature (1)...(1307): n = a,t,c or g
  sig_peptide (784)...(919): this location contains the signal peptide sequence, MQTLRGVLATLGVGAAFLGITCSTAQENELIPSIIRYKSLCVLCH, Run with SignalP
  misc_feature (766)...(915): similar to gi3004482 in the genepept database release 114, Run with FASTXY 3.3t00, default parameters
gcggaacccaagttgtcatcaggcttcacctcactcccggtctagtaatgtacttaagagaatacccaggttggtgtgctccagttctcctcttgaatgtcagcagtgatacacagtctggtgcaatgcaacagaacccactccaatgacatgaggcaattatgatctttttgttttaattggatagaatcctgcctctgaaacttcacttcatttgtttccaaagtctgatatttttctccaataaatgtccttattcttcatccttgaaacattaatactgtccaatctgtcctttaacataggaaccctgtccttttatgactgccttttgcaaacatagccccatgtcaatattgtgtatatatctgggttttaaaatctatgaggacatggatgagtcttacactccctagtattgcccacatgacactcctgttttctgcaaggagggcagaggtgttcccagatagaataagtgagacaaaaaaaaaactctttagctctaaggttcccttttctgctatggcatacccctgatatatagggagaattgaagcatcaactcaaatccttttattcactatttaagtcacaatatgtaggccaatcacatttctcagctattagccactgcacattctttgcctctatgcagttttcctacagtacattttacccctggaaacacctccaaagcagtccttttcacttctaccttgggagatgctgattccttcagctcaaatttcctgaggccctggggtcttcctttctccaaaaatgcaaaccctgcggggggttttggcaaccctgggtgtgggagctgcttttcttggcattacctgttctactgcccaagaaaatgaactaattccttccataatcaggtacaaaagtttatgtgtgctctgtcattctcaaaatggacctgtctcaaccaattgacacttaacaagggaanaaaatccaagacaagttagttaaaaaacaatcaaatgtaatagtcataaaaacaacaaattacagcccaagtttatatcaagctgactttgttccagacgctgcattaagtcttttaatgcagtatcccatgtaccttctgaaccacctgaaaggttgatgttaaggaaaatagcattttgtaaatgataaaaatgtgtctaattcacttgtgaatctaaaataaattgctagcaaataagagaaaatttcaaaagcaagagtatgttatcacctccatgtgtttaagtgctcatccataatcacagcaaaatgataaatcacaaattatatgtatgattttt

SEQ ID NO: 80715 - DNA, 371 bp, Homo sapiens
  misc_feature (1)...(371): n = a,t,c or g
  sig_peptide (17)...(152): this location contains the signal peptide sequence, MGALDFLLISSYCPAVLLILYSSHCPILKKILNPRHVVSYENIFT, Run with SignalP
  misc_feature (373)...(332): similar to gi972711 in the genepept database release 114, Run with FASTXY 3.3t00, default parameters
aagagnntnggtaactatgggggccctggattttcttcttatttcttcttattgcccagcggtgcttcttattctctattcttctcattgcccaatattgaaaaaaatcctgaatccaagacatgtagtttcatatgaaaacatttttaccttgacatctcagaatattatccaattacatagaggtagtaggagaagctctgcctgaggccccggtacccatgagttaagtggctgcgtaaggctcatgttgggcttcgtgcctgacaggngtgtgatgagctgagtctacactgacaccacagtttaaaaacggctaaaacacccggaggaagaaatgtgccgcacaccggggaagaattccggttgan

SEQ ID NO: 80716 - DNA, 451 bp, Homo sapiens
  sig_peptide (233)...(98): this location contains the signal peptide sequence, MNSLLWLKLFAAWCFLKDFSLNNRAKTQTAFIQNKRKSYPELNLH, Run with SignalP
  misc_feature (8)...(87): similar to gi1236970 in the genepept database release 114, Run with FASTXY 3.3t00, default parameters
ctgactaccagattcaatgtccgtcgccgtacatcgtagagactggctaaaccctgcctttacccaacctagtaacatcgcggcagattctcatatgaaggtttaactcgggatatgattttctcttattttgaatgaaggctgtttgtgttttagctctattgtttaaagaaaagtcctttaaaaagcaccaggctgcaaacagcttcagccacaagaggctattcataaccacttcttggctctgggtgtcactgcggtttgtagctgcttgtgctgaaggaggcctccccagaaacagtgccatcccccagaaacaatgctgcccccagaaacaaagctgcccccagagacgatgccagtgtgagtgctggcgtctgtctgagctcattatggaagttaccaggtatttggtaaatgattttttgtgaaccaacattaacatgccaag

SEQ ID NO: 80717 - DNA, 338 bp, Homo sapiens
  sig_peptide (32)...(167): this location contains the signal peptide sequence, MAPLYLGNYQTLFLKLISISVLAFLFRNVWSNIGCHFSSWVTMVI, Run with SignalP
  misc_feature (62)...(193): similar to gi3676422 in the genepept database release 114, Run with FASTXY 3.3t00, default parameters
cgcgtcgccaggataatgaagtatgcataaaatggcacccctctatcttggtaattatcagacactgtttctgaaacttatttccatctccgtgttggcttttctcttccggaatgtatggtcaaatataggatgtcatttctccagctgggtgaccatggtgattttgctgctgactactggaagggaagcacggattactcagctgaaacctgatttcctttcctcagttatctgtcttcaaatcagtttaccgattgttggtgattcttcatgaaaagcagtaactttaactggcttaaataaagagaaaagtggacttcacactttcaaattcc

SEQ ID NO: 80718 - DNA, 340 bp, Homo sapiens
  sig_peptide (113)...(248): this location contains the signal peptide sequence, MAGLWFVVAACAEKCLSLPWSLRQLEVAPRSRQGRGRAGAASFLL, Run with SignalP
  misc_feature (226)...(36): similar to gi3064222 in the genepept database release 114, Run with FASTXY 3.3t00, default parameters
ccagcctttaagcaaaacttttaaaatgagctccatgaagctacagcctctgcctccacactgcaggcagcttccgtgggggatgccacgtgcttctgcatcgggctgtggcatggccgggttgtggtttgtggtggcagcgtgtgctgagaagtgcttgtccctgccctggagcctccgccagctggaggtggcaccacgcagccgccagggcaggggcagggcaggggcagcatctttcctactggttctgttaactggcttttctcagagagtgccagcgagagcagatgaatgccttaccgttttcggcacgactttaacaatctgctcaagctga

SEQ ID NO: 80719 - DNA, 1084 bp, Homo sapiens; identical to SEQ ID NO: 64472
  sig_peptide (37)...(172): this location contains the signal peptide sequence, MAAALWGFFPVLLLLLLSGDVQSSEVPGAAAEGSGGSGVGIGDRF, Run with SignalP
  misc_feature (220)...(764): similar to gi687880 in the genepept database release 114, Run with FASTXY 3.3t00, default parameters

SEQ ID NO: 80720 - DNA, 391 bp, Homo sapiens
  sig_peptide (177)...(312): this location contains the signal peptide sequence, MLSYAHITLAVLRIPSATGCWRAFFTCASHLTVVTVFYTALLFMY, Run with SignalP
  misc_feature (3)...(385): similar to gi293756 in the genepept database release 114, Run with FASTXY 3.3t00, default parameters
ccatgatcaaggtctgttttatctccagcgtcacgttctgtggctccaacgtcttgacccacttcttctgtgacatttcccccatcctcaagctggcctgcacggacttctccactgcagagctggtggatttcattctggccttcatcatcctggtgtttccactcctggccaccatgctgtcatatgcgcacattaccctggctgtcctgcgcatcccctcggccaccggctgctggagagccttcttcacctgcgcctctcacctcaccgtggtcaccgtcttctatacagccttgcttttcatgtatgtccggccccaggccattgattcccggagctccaacaagctcatctctgttttgtacacagttatcacccccagtgtatt

SEQ ID NO: 80721 - DNA, 1528 bp, Homo sapiens; identical to SEQ ID NO: 80488
  sig_peptide (891)...(756): this location contains the signal peptide sequence, MPTLGDALILYLHLVLGVAGVLQPPGPRPSQALGPTGDRAPGKWN, Run with SignalP
  misc_feature (13)...(263): similar to gi28969 in the genepept database release 114, Run with FASTXY 3.3t00, default parameters

SEQ ID NO: 80722 - DNA, 726 bp, Homo sapiens
  sig_peptide (248)...(383): this location contains the signal peptide sequence, MFLIVLPLESMAHGLFHELGNCLGGTSVGYAIVIPTNFCSPDGQP, Run with SignalP
  misc_feature (104)...(143): similar to gi5912360 in the genepept database release 114, Run with FASTXY 3.3t00, default parameters
cggcggaaacatggcggtcgcggccgggccggtaacggagaaagtttacgccgacactggcctgtattagcgcgtatggcctcgggccctcgttccccaaggcgtgccgcctccctgttctcagtcgcaggctgaagccttgtctgctctcctcctttttggtttggttttggaactgactccgagggttgggagagcgcgttggtggcgacggccgagtcagccaacaaatggaattttcttgagcatgtttctaatcgttttgccattggaatccatggctcatgggctcttccatgaattgggtaactgtttaggaggaacatctgttggatatgctattgtgattcccaccaacttctgcagtcctgatggtcagccaacactgcttcccccagaacatgtacaggagttaaatttgaggtctactggcatgctcaatgctatccaaagattttttgcatatcatatgattgagacctatggatgtgactattccacaagtggactgtcatttgatactctgcattccaaactaaaagctttcctcgaacttcggacagtggatggacccagacatgatacgtatattttgtattacagtgggcacacccatggtacaggagagtgggctctagcaggtggagatacactacgccttgacacacttatagaatggtggagagaaaagaatggttccttttgttccccgccttattatcgtgt

SEQ ID NO: 80723 - DNA, 539 bp, Homo sapiens
  sig_peptide (439)...(304): this location contains the signal peptide sequence, MSAFSHLKHFLLQILIEHFVLGIVTMISIKTPRKQKNKNSNSLSC, Run with SignalP
  misc_feature (45)...(194): similar to gi4530163 in the genepept database release 114, Run with FASTXY 3.3t00, default parameters
acctaactaggaaaaaataaatttttttaaatgaccaagctcattttgaagctgctcggtgtcacataaacactgaggcctgcctgcctcaactaaagcagccacttgaaatgcagctccagctgctcattcttctgtttatcaaaacagggcaaagccgcccaggaaactcgcctcagcaaggtgacctgacctcaggcccatcacagtcacaaatctgcatttccaataaaaaataatcacaacgaagaaaagcacccaggtaaccagttatggaaaagcaaaggattgatgagttgggggtgacaggacagtgaattactgtttttgtttttttgttttcttggggtttttatactgatcatagtcacaatgcctagcacaaagtgctcaataaggatttgaagcagaaaatgtttcaaatgggaaaatgcactcatttacccattttaaaaatttaagggagtgaggctaggcatggtggctcatgcctgtaatcccacgaaatcgtcgacccggaaattccggagcggtgccgc

SEQ ID NO: 80724 - DNA, 1700 bp, Homo sapiens
  sig_peptide (298)...(433): this location contains the signal peptide sequence, MTGPRPMILHFILVASASCWEVLFCCWQPCPLGIHATSNSPSQLQ, Run with SignalP
  misc_feature (3)...(377): similar to gi4753706 in the genepept database release 114, Run with FASTXY 3.3t00, default parameters
ttggtaaactgcttttagggatactggctgacttcaagtggattaataccttgtatctttatgttgctaccttaatcatcatgggcctagccttgtgtgcaattccatttgccaaaagctatgtcacattggcgttgctttctgggatcctagggtttcttactggtaattggtccatctttccatatgtgaccacgaagactgtgggaattgaaaaattagcccatgcctatgggatattaatgttctttgctggacttggaaatagcctaggaccacccatcgttggttggttttatgactggacccagacctatgatattgcattttattttagtggcttctgcgtcctgctgggaggttttattctgctgctggcagccttgccctcttgggatacatgcaacaagcaactccccaagccagctccaacaactttcttgtacaaagttgcctctaatgtttagaagaatattggaagacactatttttgctattttataccatatagcaacgatattttaacagattctcaagcaaattttctagagtcaagactattttctcatagcaaaatttcacaatgactgactctgaatgaattatttttttttatatatcctattttttatgtagtgtatgcgtagcctctatctcgtatttttttctatttctcctccccacaccatcaatgggactattctgttttgctgttattcactagttcttaacattgtaaaaagtttgaccagcctcagaaggctttctctgtgtaaagaagtataatttctctgccgactccatttaatccactgcaaggcacctagagagactgctcctattttaaaagtgatgcaagcatcatgataagatatgtgtgaagcccactaggaaataaatcattctcttctctatgtttgacttgctagtaaacagaagacttcaagccagccaggaaattaaagtggcgactaaaacagccttaagaattgcagtggagcaaattggtcattttttaaaaaaatatattttaacctacagtcaccagttttcattattctatttacctcactgaagtactcgcatgttgtttggtacccactgagcaactgtttcagttcctaaggtatttgctgagatgtgggtgaactccaaatggagaagtagtcactgtagactttcttcatggttgaccactccaaccttgctcacttttgcttcttggccatccactcagctgatgtttcctgggaagagctaattttacctgtttccaaattggaaacacatttctcaatcattccgttctggcaaatgggaaacatccatttgctttgggcacagtggggatgggctgcaagttcttgcatatcctcccagtgaagcatttatttgctactatcagattttaccactatcaaatataattcaagggcagaattaaacgtgagtgtgtgtgtgtgtgtgtgtgtgtgctatgcatgctctaagtctgcatgggatatgggaatggaaaagggcaataagaaattaatacccttatgcaggtgcatttaaccttaagaaaaatgtccttgggataaactccagtgtttaatacattgattttttttctaaagaaatgggttttaaactttggtatgcatcagaattccctatagatctttttgaaaatataggtacctgggtatcacacataa

SEQ ID NO: 80725 - DNA, 445 bp, Homo sapiens
  sig_peptide (26)...(161): this location contains the signal peptide sequence, MGAGLAVVPLMGLLESIAVAKAFASQNNYRIDANQELLAIGLTNM, Run with SignalP
  misc_feature (26)...(447): similar to gi5834394 in the genepept database release 114, Run with FASTXY 3.3t00, default parameters
ctacgccctgcttggcacgagggacatgggagccgggctggccgtggtgcccctgatgggcctcctggagagcattgcggtggccaaagccttcgcatctcagaataattaccgcatcgatgccaaccaggagctgctggccatcggtctcaccaacatgttgggctccctcgtctcctcctacccggtcacaggcagctttggacggacagccgtgaacgctcagtcgggggtgtgcaccccggcggagggcctggtgacggaagtgctggtgctgctgtctctggactacctgacctcactgttctactacatccccaagtctgccctggctgccgtcatcatcatggccgtggccccgctgttcgacaccaagatcttcaggacgctctggcgtgttaagaggctggacctgctgtccctgagcgtgacctttctgctgtgc

SEQ ID NO: 80726 - DNA, 2177 bp, Homo sapiens
  sig_peptide (1444)...(1579): this location contains the signal peptide sequence, MACCLPCRAFPAYPTGVWPTTWLWCWAVLPIPWPASWPWVCCAGP, Run with SignalP
  misc_feature (606)...(1370): similar to gi2736345 in the genepept database release 114, Run with FASTXY 3.3t00, default parameters
gccacgggtgagtcgggtcgtggctgctgccgggtcctgcgcgctccggactgaggtggcgtccctgggccggacggcggtgtcccggcgtggcgggaagccggcactggagcgggagcgcactgggcgcgggaccgggaggcgcagggaccggacggctcccgagtcgcccacctgacggtaccgagagggcggcgcccctccgagcagagccgtcccggccactcccctgggatctgacttggctcttgcggtcgcgggcaccgtgaagccctggggtgtgcgtggctcctcctggtaggcgccctttcccggcgtccggcttggggtggtggtggcgttgactccagccccgcctctccctggagaggagggctccactcgctccttcggcctcctcccctggggccgcagcgactcgggccggcttcctgcttccctgcctgccggcggtcccgctggctagaaaaagtcttcacttcccaggagagccaaagcgtgtctggccctaggtgggaaaagaactggctgtgacctttgccctgacctggaagggcccagccttgggctgaatggcagcacccacgcccgcccgtccggtgctgacccacctgctggtggctctcttcggcatgggctcctgggctgcggtcaatgggatctgggtggagctacctgtggtggtcaaagagcttccagagggttggagcctcccctcttacgtctctgtgcttgtggctctggggaacctgggtctgctggtggtgaccctctggaggaggctggccccaggaaaggacgagcaggtccccatccgggtggtgcaggtgctgggcatggtgggcacagccctgctggcctctctgtggcaccatgtggccccagtggcaggacagttgcattctgtggccttcttagcactggcctttgtgctggcactggcatgctgtgcctcgaatgtcactttcctgcccttcttgagccacctgccacctcgcttcttacggtcattcttcctgggtcaaggcctgagtgccctgctgccctgcgtgctggccctagtgcagggtgtgggccgcctcgagtgcccgccagcccccatcaacggcacccctggccccccgctcgacttccttgagcgttttcccgccagcaccttcttctgggcactgactgcccttctggtcgcttcagctgctgccttccagggtcttctgctgctgttgccgccaccaccatctgtacccacaggggagttaggatcaggcctccaggtgggagccccaggagcagaggaagaggtggaagagtcctcaccactgcaagagccaccaagccaggcagcaggcaccacccctggtccagaccctaaggcctatcagcttctatcagcccgcagtgcctgcctgctgggcctgttggccgccaccaacgcgctgaccaatggcgtgctgcctgccgtgcagagcttttcctgcttaccctacgggcgtctggcctaccacctggctgtggtgctgggcagtgctgccaatcccctggcctgcttcctggccatgggtgtgctgtgcaggtccttggcagggctgggcggcctctctctgctgggcgtgttctgtgggggctacctgatggcgctggcagtcctgagcccctgcccgcccctggtgggcacctcggcgggggtggtcctcgtggtgctgtcgtgggtgctgtgtcttggcgtgttctcctacgtgaaggtggcagccagctccctgctgcatggcgggggccggccggcattgctggcagccggcgtggccatccaggtgggctctctgctcggcgctgttgctatgttccccccgaccagcatctatcacgtgttccacagcagaaaggactgtgcagacccctgtgactcctgagcctgggcaggtggggaccccgctccccaacacctgtctttccctcaatgctgccaccatgcctgagtgcctgcagcccaggaggcccgcacaccggtacactcgtggacacctacacactccataggagatcctggctttccagggtgggcaagggcaaggagcaggcttggagccagggaccagtgggggctgtagggtaagcccctgagcctgggacctacatgtggtttgcgtaataaaacatttgtatttaaaaaaaaaaaa

SEQ ID NO: 80727 - DNA, 455 bp, Homo sapiens
  sig_peptide (23)...(158): this location contains the signal peptide sequence, MAEAFPFFSPFLGWLGVFLTGSDTSSNALFSSLQATTAHQIGVSD, Run with SignalP
  misc_feature (35)...(367): similar to gi882504 in the genepept database release 114, Run with FASTXY 3.3t00, default parameters
gtcgcactagtgattaggctccatggcagaggcattcccgttcttctcgccattcctcggctggctcggtgtgtttctgacgggttccgacacctcgtccaacgcgctgttcagctcgctgcaagcaaccaccgcccaccagatcggcgtcagcgacgtcttgctggtggcggcgaacaccagcggcggcgtgaccggcaagatgatctcgccgcagtcgatcgccgtggcatgcgccgcgactggcctggtgggcaaggaatctgacctgttccgcttcaccctcaagcacagcctgttcttcgcgacgattgtcgggctgattaccttggcccaggcctactggttcaccggtatgctggtgcactaagacctgcacgtaatagggtaagaaccgacgccggacagcgattccggcgtcagctatttctggaggaccgatgagcctgcctgct

SEQ ID NO: 80728 - DNA, 403 bp, Homo sapiens
  sig_peptide (160)...(295): this location contains the signal peptide sequence, MNKLLVAATAILFSLGCHEKCKIFFLKSISSPQSLFLADLCASEP, Run with SignalP
  misc_feature (406)...(147): similar to gi1177638 in the genepept database release 114, Run with FASTXY 3.3t00, default parameters
tttcgtaaagattttcaatgaggggcaaatctaaatctaaaaaatttgaattcaagttcaatttagatttcaattaaaacagtagtagtatgtcgggaagatatgggataaaaaaagtaagggaaaataaggaactattataattataatgcggaaaaaatgaataaattattagttgctgcaacagcaatactattttctcttggatgccatgagaaatgtaaaatattcttcttgaaatcaatatcgtcaccccaatccttatttcttgcagacctttgcgctagcgaaccgtaccttttgttcctgaacgctgttttgtcagcttgtaacacgatttcattcatttcggttcccgaatcctccggatttgctccttctcctcccgctatactgcttctag

SEQ ID NO: 80729 - DNA, 687 bp, Homo sapiens
  sig_peptide (32)...(167): this location contains the signal peptide sequence, MSQAWVPGLAPTLLFSLLAGPQKIAAKCGLILACPKGFKCCGDSC, Run with SignalP
  misc_feature (287)...(650): similar to gi1247386 in the genepept database release 114, Run with FASTXY 3.3t00, default parameters
cacaggaaagctcagtggcccccaagccaggatgtcccaagcttgggtccccggcctcgcgcccaccttgctgttcagcctgctggctggcccccaaaagattgcagccaaatgtggtctcatccttgcctgccccaaaggattcaaatgctgtggtgacagctgctgccaggagaacgagctcttccctggccccgtgaggatcttcgtcatcatcttcctggtcatcctgtccgtcttttgcatctgtggcctggctaagtgcttctgtcgcaactgcagagagccggagccagacagcccagtggattgccgggggcccctggaactgccctccatcatccccccagagagggtcagagtatccctttctgcgcccccacccccctacagtgaggtgggtgtctcatccccatccccaccttgcctctggccggctgtgcagcagagacagtggagggcccttcgatcctggagggcactctgcacccagcattgggtcacccctctccctggtaaccatgcctcagctgggatgggggagtggtggccagggccagggcccagaagactgacttctctcttttccctgcaggtgattctgaagcccagcctgggcccaactcccacagagccaccccctccctacagcttcaggcctgaagaatataccggcgatcagagggg

SEQ ID NO: 80730 - DNA, 377 bp, Homo sapiens
  sig_peptide (104)...(239): this location contains the signal peptide sequence, MGGAVAAWAWVQLQGCGGEGSSVSPFWAMRLMLGGRVWWALGGGR, Run with SignalP
  misc_feature (323)...(114): similar to gi717156 in the genepept database release 114, Run with FASTXY 3.3t00, default parameters
agaacgccgtgggtcacactgggctgggagcttgagatctggccgcccgccggagcttctggattttgttgtggggaacagttctctttgttcctgctgccatatgggaggggctgtcgctgcctgggcttgggtccagctgcagggatgtggaggggaagggtccagtgtgagccccttttgggcgatgaggctaatgctgggcgggcgcgtgtggtgggccttaggtggtggacgtgtaaatagtattggtgttcgccgttcggtgcatgtggtcaactcgggtattacgacgttgatgggaatcgttattacgctcgtgtgggaggttgacagtcatgtgttgctatatcagttatcgttcttgtcgtgagggg

SEQ ID NO: 80731 - DNA, 332 bp, Homo sapiens
  sig_peptide (89)...(224): this location contains the signal peptide sequence, MTQLGQGWCFGSLTGPGPLLPAAATHGLFLSLSTSWLWVCAGRSA, Run with SignalP
  misc_feature (191)...(74): similar to gi46100 in the genepept database release 114, Run with FASTXY 3.3t00, default parameters
aggcaaagctcttcagtgtggtgagggaggcatgtgcccgggcaacctggaagagcatctgtgagtggcagtgtggggagtggcctacatgacccagcttgggcagggatggtgcttcggttcactgacaggacccggtcccctcctccccgctgcagccacacatggtctctttctcagtctcagcacctcgtggctttgggtctgtgctggcaggagtgctccgaagccccacagacagttcaccgaggcagctgtgtctgccttgaccagctctggcctcggatgcctggccaggctgcactttaccttgatcaaactgtctctgcaag

SEQ ID NO: 80732 - DNA, 339 bp, Homo sapiens
  sig_peptide (69)...(204): this location contains the signal peptide sequence, MLSSLSLHSSLTFLILLLSLNTRPSEPHLQELMSRSFPYNPLSSS, Run with SignalP
  misc_feature (60)...(79): similar to gi4769071 in the genepept database release 114, Run with FASTXY 3.3t00, default parameters
ggcacgagctgacagtggaaacagcgaggcgtttagaccaagagtgtgaaggactttttctgaattccatgttgtcttctctgtctttacattcctctctcacctttttaattctgctactttctctgaacactcggccctctgaaccccacctgcaggaattaatgagtagatctttcccttataaccccctttccagttctcagtgtgattaaatgctttcctgatgtggcaaaatacatttcaagaaatacagcaagtcttttgggctgcaaaaagactggttctcattacttagcagtcttcatatgtgtgcatagctctttgatgttggaaaag

SEQ ID NO: 80733 - DNA, 717 bp, Homo sapiens
  sig_peptide (326)...(461): this location contains the signal peptide sequence, MQTFLGPFLCCGLISLPPWAAVNGSICCLPSSQCSPDAIRNSDGQ, Run with SignalP
  misc_feature (451)...(291): similar to gi5725927 in the genepept database release 114, Run with FASTXY 3.3t00, default parameters
ggcacgagagatgaggaccaaatatttataaagatgtactagatttgtctgagttggaaacaccttttgtaattaaacagggaaatagaagggagtgggcaagtagaagtggggatttggtggctatgaatttctgcctccaccctgccttgccttgaagtgcttgcatatgttaactctagtgctttatagaggcaggcccatcccttagtgctgcagaacagagacagaacttgctcaaagggcagaactaaggcctggaaagagcccttcctggttaaagtgccacttttctaggaaaacatttctgtgagcatggcactggatgcaaacatttttaggcccttttctttgttgtggcttgatctcactgcctccttgggctgctgtaaatggcagtatttgctgcctgccctcctcccagtgcagccctgacgctataaggaacagtgatgggcagagctggggaaagacgcacagtacactcttgtttctgacttgcaacaaggaagcagtcaggcattttgtgtctttgtggctctggatctgtgcttttgcactaatttttaaatataggttttcatttctcctactacagcagaatttgagcaatagattctgggtaggaaagcctaagactgtgtgtgtgtgtgtgtgtgtgtgtgtgtgtgtgtgtgtgtgtgtgtaaaacataaaagacaaacattctcgcgcgct

SEQ ID NO: 80734 - DNA, 5186 bp, Homo sapiens
  sig_peptide (2740)...(2605): this location contains the signal peptide sequence, MCCWIWFASILLRIFALMFIRDIGLKFSFFVVSLPGFGIRMMLAS, Run with SignalP
  misc_feature (2997)...(4507): similar to gi5640017 in the genepept database release 114, Run with FASTXY 3.3t00, default parameters
atggtctcagcccaaaatctccttaagctgataagcaacttcagcaaagtctcaggagacaaaatcaatgtgcaaaaatcacaagcattcctctccagcaacaacaggcaaacagagagccaaatcatgagtgaactcccattcacacttgctacaaagagaataaaatacctaggaatccaatctacaagggaagtgaaggacctcttcaaggagaactacaaaccactactcaatgaaataaaagaggataccaaaaaaatggaagaacattccatgctcatggataggaagaatcaatattgtgaaaatggccatactgcccaagaagggaaaacttaacaaacagaaaggacaaccacacccaaaaacccatcttgtacatcacccatcattcaaagacccaaaagtaaataaaacccaccaaagatggggaaaaaaacagaacagaaaaactggaaactctaaaatgtagagtgcctctcctcctccaaaggaaagcagttcctcaccagcaacggaacaaagctggatggagaatgactttgacgagctgagagaggaaggcttcagacgatcaaattactccgagctacaggaggaaattcaaaccaaaggcaaagaagttgaaaactttgaaaaaaatttagaagaatgtataactagaataaccaatacagagaagtgcttaaaggagctgatggagctgaaaaccaaggctcaagaactacgtgaagaatgcagaagcctcaggagccgatgcgatcaactggaagaaagggtatcagtgatggaagatgaaatgaatgaaatgaatgaaatgaagtgagaagggaaggttagagaaaaaagaataaacagaaatgagcaaagcctccaagaaatatgggactatgtgaaaagaccaaatctacatctgattggtgtacctgaaagtgatggtgagaatggaaccaagttggaaaacactctgcaggatattatccaggagaacttccccaatctagcaaggcaggccaacattcagattcaggaaatacagagaacgccacaaagatactcctcgagaagagcaactccaagacacataattgtcagattcaccaaagttgaaatgaaggaaaaaatgttaagggcagccagagagaaaggtcgggttacccacaaagggaagcccatcagactaacagcggatctctcggcagaaactctacaagccagaagagagtgggggccaatattcaacattcttaaagaaaagaattttcaacccagaatttcatatccagccaagctaagcttcataagtgaaggagaaataaaatactttacagacgatcaaatgctgagagattacataatggtaaagggatcaattcaacaagagctcctgaaggaagcgctaaacatgcacccaatacaggagcacccagattcataaagcaagtccttagtgacctacaaagagacttagactcccacacattaataatgggagactttaacaccccactgtcaacattagacagatcaacgagacagaaagtcaacaaggatacccaggaattgaactcagctctgcaccaagcagacctaatagacatctacagaactctccaccccaaatcaacagaatatacatttttttcagcaccacaccacacctattccaaaattgaccacatagttggaagtaaagcactcctcagcaaatgtaaaagaacagaaattataacaaactgtctctcagaccacagtgcaatcaaactagaactcaggattaagaaactcactcaaaaccgctcaactacatggaaactgaacaacctgctcctgaatgactactgggtacataacgaaatgaaggaaaaaataaagatgttctttgaaaccaacgagaacaaagacacaacataccagaatctctgggacacattcaaagcagtgtgtagagggaaatttatagcactaaatgcccacaagagaaagcaggaaagatccaaaattgacaccctaacatcacaattaaaagaactagaaaagcaagagcaaacacattcaaaagctagcagaaggcaagaaataactaaaatcagagcagaactgaaggaaatagagacacaaaaaacccttcaacccttcaaaaaattaatgaatccaggagctggttttttgaaaggatcaacaaaattgatagaccgctagcaagactaataaagaaaaaaagagagaagaatcaaatagacacaataaaaaatgataaaggggatatcaccactgatcccacagaaatacaaactaccatcagagaatactacaaacacctctacgcaaataaactagaaaatctagaagaaatggataaattcctcgacacatacaccctcccaagactaaaccaggaagaagttgaatccctgaatagaccaataacaggagctgaaattgtggcaataattaatagcttaccaaccaaaaaaagtccaggaccagatggattcacagccgaattctaccagaggtacaaggaggagctggtaccattccttctgaaactattccaatcaatagaaaaagagggaatcctccctaactcattttatgaggccagcatcatcctgataccaaagcctggcagagacacaacaaaaaaagagaattttagaccaatatccctgatgaacatcaatgcaaaaatcctcaataaaatactggcaaaccaaatccagcagcacatcaaaaagcttatccaccatgatcaagtgggcttcatccctgggatgcaaaaatcctcaacatatgcaaatcaataaacataatccagcatataaacagaaccaaagacaaaaaccacatgattatctcaatagatgcagaaaaggcctttgacaatatatgcaaatcaatacatgcaataaattaggtattgatgggacatatctcaaaataataagagctatttatgacaaacccacagccaatagcatactgaatgtgcaaaaactggaagcattccctttgaaaactggcacaagacagggatgccctctctcacctcaccactcctattcaacatagtattctgccccatagtgttctggccagggcaatcaggcaagagaaggaaataaagggtattcaattaggaaaagaggaagtcaaattgtccctgtttgcagacgacatgattgtatatctagaaaaccccattgtctcagcccaaaatctccttaagctgataagcaacttcagcaaagtctcaggatacaaaatcaatgtacaaaaatcacaagcattcttatacaccaataacagacaaacagagagccaaatcatgaatcatgagtgaactcccattcacaattgcttcaaagagaataaaatacctaggaatccaacttacaagggatgtgaaggacctcttcaaggagaactacaaaccactgctcagtgaaataaaagaggatacaaacaaatggaagaacattccatgctcatgggtaggaagaatcaatattgtgaaaatggccatactgcccaaggtaatttatagattcaatgccatccccatcaagctaccaatgactttcttcacagaattggaaaaaactactttaaagttcatatggaaccaaaaaagagcccacattgccaagtcaatcctaagccaaaagaacaaagctggaggcatcacgctacctgacttcaaactatactacaaggctacagtaaccaaaacagcatggcactggtaccaaaacagcatggtactggtaccaaaacagagatacagaccaatggaacagaacagagccctcagaaataatgccgcatatctacactattctgatcctttggacaaacctttgcttgagaaaaacaagcaatgggggaaaggattccctaatttataaaatggctgctggggaaaactggctagcccatatgtaggagaaagctgaacctggcatcccttcccttaccccttatacaaaaatcaattcaagatggattaaagacttaaatgttagacctaaaaccataaaaaccctagaagaaaacctaggcaataccattcaggacataggcatgggcaaggacttcatgtctaaaacaccaaaagcaatggcaacaaaagccaaaattgacaaatgggatctaattaaactaaagagcttctgcacagcaaaagaaactaccatcagagtgaacaggcaacctacagaatgggagaaaattttcgcaacctactcatctgacaaagggctaatatccagaatctacaatgaactcaaacaaatttacaagaaaaaaacaaacaaccccatcaaaaagtgggtgaaggatatgaacagacacttctcaaaagaagacatttatgcagccaaaagacacatgaaaaaatgctcatcatcactggccatcagagaaatgcaaatcaaaaccacaatgagataccatctcacaccagttagaatggcaatcattaaaaagtcaggaaacaacaggtgctggagaggatgtggagaaataggaacacttttacactgttggtgggactgtaaactagttcaaccattgtggaagtcagtgtggcgattcctcagggatctagaactagaaataccatttgacccagccatcccattactgggtatatacccaaaggattataaatcatgctgctataaagacacatgcacacgtatgtttattgcggcactattcacaatagcaaagacttggaaccaacccaaatgtccaacaatgatagactggattaagaaaatgtggcacatatacaccatggaatactatgcagccataaaaaatgatgagttcatgtcctttgtagggacatggatgaaattggaaaccatcattctcagtaaactatcgcaagaacaaaaaaccaaacaccgcatattctcactcataggtgggaattgaacaatgagatcacatggacacaggaaggggaatatcacactctgggggactgttgtggggtggggggagggggggagggatagcattaggagatatacctaatgctaaatgacgagttaatgggtgcagcacaccagcatggcacatgtatacatatgtaactaacctgcgcattgtgcacatgtaccctaaaacttaaaagtataattaaaaaaaaataaaataaaaataaaaaa

SEQ ID NO: 80735 - DNA, 643 bp, Homo sapiens
  sig_peptide (153)...(288): this location contains the signal peptide sequence, MVRVWSPWPCWVFAKETVLCSWGRFHHLIRAVVPKWCSLDHLYKM, Run with SignalP
  misc_feature (53)...(193): similar to gi555430 in the genepept database release 114, Run with FASTXY 3.3t00, default parameters
ggcacgagtgtagctagagtggcgatgttagatcttggggccagagagctttacaatgattatgaagatcaaagggcattagaatcaagctataaagagccactgtttgatgttgggatgtgaggatgctgcaggtggatgtctgcacattgatggtgagagtatggtcaccctggccctgctgggtctttgctaaagagactgtgctctgttcttggggccgttttcatcacctgattagagcagtggtccccaaatggtgttctttggaccatctgtataaaatgttcataggtcaaggataaaatggaaaaacagagaaaatgtcacagaaatgtgcccattggtgaaagaccaccagctgtcctttttggaggattgttctttattctaaaaatgtatatattctattctattaaaacatttttgtatttgcatttttttctcttttatgaaatgccatagggtagaaatttgtaatgtatccagatctcctggcttcatgcattgccctgggcggggggaggggatgtaaaaaaaattgtcgaaaaagagggggtttttctttacccacacaattgctgggttaaggataaacctatcccgggctccttctcgtggctgggaatcctgttggccccca

SEQ ID NO: 80736 - DNA, 3821 bp, Homo sapiens; identical to SEQ ID NO: 63708
  sig_peptide (655)...(790): this location contains the signal peptide sequence, MSQEPGRRHSKLTLTASRMAPCLWVWTSLCQAWSMSMGSLSMQTT, Run with SignalP
  misc_feature (3521)...(3320): similar to gi56588 in the genepept database release 114, Run with FASTXY 3.3t00, default parameters

SEQ ID NO: 80737 - DNA, 428 bp, Homo sapiens
  sig_peptide (94)...(229): this location contains the signal peptide sequence, MHSHGVSYWTVRTVIWPISSLVSKITTWEFNEVTSMSEHLKSCPF, Run with SignalP
  misc_feature (159)...(240): similar to gi15898 in the genepept database release 114, Run with FASTXY 3.3t00, default parameters
ctcgatcgatttgataacagtcggcgactgcccggaactacccgactcgaccgacgcggtcgggactgcgccttttgcagtgagaagaaaaagatgcattctcatggagtctcctactggacagtgcggacagtgatctggccgatcagcagcctcgtctccaaaatcactacctgggagtttaatgaagtcacctccatgtctgagcacctgaagtcctgtcctttcaacattgtagagcacaaatctgacccgattcttttgactagcatgtgtcacccccgtgagcaggcccgagagagcttactctccacctttagaatcagaccacgaggaagatacgtctcctattaattctgatgccactcgatgcacccttcttggattccttctcggagaaactgatgtatgacagactgcgtggatca

SEQ ID NO: 80738 - DNA, 489 bp, Homo sapiens
  misc_feature (1)...(489): n = a,t,c or g
  sig_peptide (375)...(240): this location contains the signal peptide sequence, MLINGHNFFCSFLIFYHLCHIWQVITCFKICFLIFFFLLALLFMS, Run with SignalP
  misc_feature (406)...(243): similar to gi456382 in the genepept database release 114, Run with FASTXY 3.3t00, default parameters
ganttgtnccnnnntnnnnnnaactgaaagcatccgatccccctcggaanntcggncgaccacgcgtccggactatgttccccaagcagctttgttagccttgggagtccagctcaggatgaagccttgtcttctgttatgcattgctgcctatctaaatgtgaagaataaaaagttcagaagccatttgtattcaaatagaatgcaattaaaaagtcccaggcaagcattataagctcataaacaagagagctagcaagaagaaaaaaatcaagaagcaaatcttgaagcaagttataacctgccagatgtgacaaaggtgatagaaaatcagaaaagaacaaaaaaagttatgaccgttaattagcatatggaaaaagataatcagaggcccccaaggaagctggattattaaaaatgcgacctccatttcaacaaagaaattccaggcagtgacacggttttgaatttataatgaggattgatgan

SEQ ID NO: 80739 - DNA, 1285 bp, Homo sapiens
  misc_feature (1)...(1285): n = a,t,c or g
  sig_peptide (679)...(814): this location contains the signal peptide sequence, MEAHQSFKHKSCTWAITVWFHFVCFLNTFSCFFNKLSPILESLVV, Run with SignalP
  misc_feature (961)...(1154): similar to gi299471 in the genepept database release 114, Run with FASTXY 3.3t00, default parameters
gacatctgcagattctaataaacaaggactattgctgatagtaggctgtgacatactgtcttgtgaaatggtttccttgacaaaatttaagctgagcttaaaagcaaaaaaacaaaaagtacacagaaatatttattaaaatgtaatacagtttattgaactttctaggtatggagtttgatggacagggctgcctttaatgagtgtgaaggtcactaagtcacttagacatctcaccgtggaagtttgtgagcctgcattaggagatagactgattaccatacatgacataaaaaggaacagtggatagctcatactttatggtggttcttctcctccgaaataatatactgcagaaatcccagacagagctccttacaaacctttaattgtaatatatttttgatgattattcacattgaatgcacagaccaagaattcagtgaatgtcattttttaaaaaactaatttgtattgtctgctctagtgatacaagttttactagtgataaactattttaatcaaccatactattcttatggaaaaaaatatctattttggcaggtttctgtgcctttatttccctcttctgaaaaaaagtctgtgttttcatagtttggtttgcattgtatatcaataattaatcaggaatgggttttggtgcctgaaaaattggccatggaggcacaccaaagcttcaagcacaagtcttgtacatgggccatcactgtctggtttcacttcgtgtgtttcctaaacacatttagctgcttttttaacaaactcagccccatacttgagtcccttgttgttgggagcatttccaggcatcttttaagggaactgtgacaaacagcctcgggcagatgaacacggaggctctctgttgtctgtctctgagatctttgtgtctgggaatgcctaaagattttatttttttttctttggttttattttattttattttatttttttgagacagagtctcaccctgttgcccaggctggagtgcaatggtgcgatcttggctcactgcaacctccacctcccagttcaagtgattcccctgcctcagcctcccgagtagctagggactacaggcgcatgtcacccaagcccggctaaatttttgtatttttagtaggaaacgggggttttcaccatgttgggccagggtggatcctcaatctcctgaacctcgtggatccacccgccttngggcttcccaaagtgccgggatttacaagcgtggaaccacctgncccagccagaaattaggattttt

SEQ ID NO: 80740 - DNA, 1128 bp, Homo sapiens
  sig_peptide (60)...(195): this location contains the signal peptide sequence, MWRGRAGALLRVWGFWPTGVPRRRPLSCDAASQAGSNYPRCWNCG, Run with SignalP
  misc_feature (256)...(68): similar to gi156066 in the genepept database release 114, Run with FASTXY 3.3t00, default parameters
ggaattcctctctttgcttttccccacgagtgaccacggctagataggccgccggccagatgtggcgggggagagccggggctttgctccgggtgtgggggttttggccgacaggggttcccagaaggagaccgctaagctgcgatgctgcgtcgcaggcgggaagcaattatccccgctgttggaactgcggcggcccatggggccccgggcgggaggacaggttcttctgcccacagtgccgagcgctgcaggcacctgaccccactcgagactacttcagccttatggactgcaaccgttccttcagagttgatacagcgaagctccagcacaggtaccagcaactgcagcgtcttgtccacccagatttcttcagccagaggtctcagactgaaaaggacttctcagagaagcattcgaccctggtgaatgatgcctataagaccctcctggcccccctgagcagaggactgtaccttctaaagctccatggaatagagattcctgaaaggacagattatgaaatggacaggcaattcctcatagaaataatggaaatcaatgaaaaactcgcagaagctgaaagtgaagctgccatgaaagagattgaatccattgtcaaagctaaacagaaagaatttactgacaatgtgagcagtgcttttgaacaagatgactttgaagaagccaaggaaattttgacaaagatgagatacttttcaaatatagaagaaaagatcaagttaaagaagattcccctttaattgtggatagtttaaagtttaaaaaataaagttcttgctgggcacagtggctcacacctgtaatcccagcactttgggaggctgaggtgggtggatgacaaggtcaggagttcaagaccagcttggccaacatagtgaaaccccgtctctgctgaaaatacaaaaattagccgggcatggtggcgcgtgcctgtaatcccagctacttggtaggccgaggcaggagaatcgcttaaacccgtgaggtggaggttgcagtgagcagagatcacgcaactgcactccagcttgggcaacagagtgagacttaatcttgaaaaataaataaatgaaaaataaaattcttgtaaaaaaaaaaaaa

SEQ ID NO: 80741 - DNA, 1285 bp, Homo sapiens; identical to SEQ ID NO: 80739
  misc_feature (1)...(1285): n = a,t,c or g
  sig_peptide (679)...(814): this location contains the signal peptide sequence, MEAHQSFKHKSCTWAITVWFHFVCFLNTFSCFFNKLSPILESLVV, Run with SignalP
  misc_feature (961)...(1154): similar to gi299471 in the genepept database release 114, Run with FASTXY 3.3t00, default parameters

SEQ ID NO: 80742 - DNA, 399 bp, Homo sapiens
  sig_peptide (32)...(167): this location contains the signal peptide sequence, MPFAQTGLQLLLRLCRVLHVLRLLGMLREQMHLLREKLLDLLPPE, Run with SignalP
  misc_feature (48)...(232): similar to gi305363 in the genepept database release 114, Run with FASTXY 3.3t00, default parameters
tcgtggtcgtctgactgttgggagctctagaatgccctttgctcaaactggactccaactgcttttgcgcctctgtagggtgctgcacgtgctccgcctcctggggatgctaagagagcaaatgcacctcctgcgagaaaagctgctggacctgctgcctcctgagctgtgccagcgtgtgcccagggctgcgactgctaaggggcataagagaagagcagctgctgtgcctgatgatggaacagatcttctcccacagggtatgagaacagcctgcactacccgcaggatctttaaatacaacactgagccatttgctgcatttctttttatactaaatatgtgactgacaataaaaacaattttgactttaaaaaaagaaaaaagagggcggccgtt

SEQ ID NO: 80743 - DNA, 366 bp, Homo sapiens
  sig_peptide (53)...(188): this location contains the signal peptide sequence, MNLEHVIVSLLTFYRVLLYKEIIGLHHCFQHFHVNAFLLSPLPPS, Run with SignalP
  misc_feature (337)...(305): similar to gi551324 in the genepept database release 114, Run with FASTXY 3.3t00, default parameters
atttgagtcagttcagccctttgagaaacctaggatcaagagttaatagaccatgaatctagaacatgtcattgtatctctcttaacattttatagagtcctcctctataaagagataattggactgcatcattgttttcaacattttcatgttaatgcatttttactatcacccctccccccatcatgactattgccctactttgagtagacatagattgagaatatgttttggctaaaaccatcacattcatcagttacgagccactgtttactatttctagaggtaattttgagaaaattgtgaatgacagcacttctctcctgggattactaattaacacttgagcagatttgtacaggcta

SEQ ID NO: 80744 - DNA, 755 bp, Homo sapiens
  sig_peptide (271)...(406): this location contains the signal peptide sequence, MVGFYLQSVLYFYFSQLIYLGDHAKSVNIVTSFILTAAYVNNSKM, Run with SignalP
  misc_feature (574)...(349): similar to gi1335199 in the genepept database release 114, Run with FASTXY 3.3t00, default parameters
cccacgcgtccggtttcagtgagccaagacagtgccactgtactccagcatgggcaacagagcaagactccatctcaaatacatatatatatatttagtttttgaatgagtacattaacatagctcaaaatttacaagaaataaaaatgtgtacagtaaaaattaatctcctttccaccccatgacccctagccactcagatctccccagaagcaaccgcttataaatatacattgtcttcccccgtcctttctttgctcatgaacacaaatggttggtttctacctacaaagtgttctctacttttatttttctcagttgatttatcttggagatcatgccaaatcagtaaatatagttacctcgttcattttaacagccgcatatgtaaataattctaaaatgcaccatactgtatttaactaagcccttgttgacgaacacataacatggcccagtatttttctattacaaacaattctacaatgactactcttgtgtgtctatcgttttacacaggagcaagcatatctacaagataatttcctataaagggaaatgctgtgtaaaaagaaaatgtgttgctaatctgtaatttaaaagagtctctctttttgaatttctcaagcattatgaaaagatacggactagtatgatgaactgctgaataccctatttagcttcaagattttcccattcatggctgggggatttaaaaaaaagggccctttctttcccacccaatttttgtaacc

SEQ ID NO: 80745 - DNA, 1509 bp, Homo sapiens
  sig_peptide (637)...(772): this location contains the signal peptide sequence, MQPIVAKALVVLLEVHPLQDQAESGRLGHVHLLCAPAALQHALRG, Run with SignalP
  misc_feature (980)...(612): similar to gi5262684 in the genepept database release 114, Run with FASTXY 3.3t00, default parameters
aagtaaaggtccttttccaaaattcccaagctggttttaatagggctccccaaaaggggaagagtattcgttgcgaatcccccgttaactttgggccccctaagggttctcttaagcgggccccccttttttttttttttgactaagcaaaatttgtacttgtttaataagaaaatcacttctttaaaaaaatagttctttacatgctgaggttcatctatgcaatgcaagagctgaaaacagattcgagaaaggctgttcctacaagggaaggtcctgaggttacaacgccggcatggccgggaaaacatggctgcagcgatcccagcttcttgctgcccacaggggtggcacatctgggcacacactgtgagctgctcagaggcactctggtgggcagctcccatcgcctcagtcagtgtctccgtccccttcactgccttccaggggactgggcaccttggcgcccgtgccacctgccgtgagagcggtggcactgaagttgtggatgggcaaggtgctcagccactgggccatggagcgttcgtcccgctcggtgccgatgatggtggggtagatgtgctcctccttgaaggctgcgacctttccttcctcctgcgcccagtccagcggctcatgcagcccatcgttgccaaagcgctggttgtacttctcgaagtgcaccctctccaggaccaggccgagtccgggcgccttgggcacgtccaccttctctgtgccccagctgcgctccagcacgctctcaggggcataacccttcacaatggccaccaccaggccgaccatcttccggatctgatgcatcatgaagctctggcccttcaccctgatcaccgcaaactccaggccctcccgcacaaagggttcctcgcagtacatctccaggatgtagcggcaggcactgggatcctgcggccccttctgcgaggtgaaattgtggaagttgtgcgtgcccttgtagcaggccaggagcctgttgacctgctgcagcgtctcggcgctcaggcggtaggtctcatcctgaacgtcccggtccttgtgcgcaaaggcaaacgtgggcagcaggtagcaataggtcctggcatcacatctgttcttggagttaaacccgcccgtgacccgcttcagtcccagaatccgaatgtgagagggaaggtggctgttgatcttttctagaatgtcgtcaatcagccacaccttcagggataccacctggccggctgcggacacacccttgtctgtccgggcgcagcgctggaaggacattttcctcatgtcctcaccatgattttcaggaatacagcctgaccggacgagggcggacaccaagtcatcttcaattgttttgaattgtgaggacccgacattcctctgcatgccgtggtagcccttgcccgaataggccatgagcagcacgatcttccgcttgggcggcttctcgcgccgctcctcgtcgccaccgctcttgagcttcttcgccggatgttc

SEQ ID NO: 80746 - DNA, 1245 bp, Homo sapiens
  sig_peptide (24)...(159): this location contains the signal peptide sequence, MWQKSLLILSFRVSFPLFLTYNYKLLSIRRTRPLSSFFSKLLQIA, Run with SignalP
  misc_feature (946)...(851): similar to gi3549278 in the genepept database release 114, Run with FASTXY 3.3t00, default parameters
agatcaataagtactttttagtgatgtggcagaaatccctgttgattctaagttttagagtgtcttttcccctatttctgacctacaactataaactactctctattaggagaactagaccactttcttcattcttttctaaactgctgcagattgccgtgaactctatcaatagtctcttttccgcaggcaaagtggcattttctaaacatgtttgcttactgccaggtggtttgaaatctatgatttactgcagtagtatgtgcttaaaacaactgttgaggtcttttaagcaggaaagttcaaaaggaagtgtcctgataatggtactggtttttctacaaatataagtagtcatttagaagtttgcaaccaccaccaagtctgagagaactctgggatattctgtgggttttggcatattagatagagaaaatgacagatctagatgaagggagcttttggatgtgtgcctttaaaaactgattatgtataaatactgatatttcacatacggagatatttgaagacccaagtctgcctttcacagagccctccattccaagtttagtttttgtcaaaatatgaatcattttatttgactgtactatcagtacacaaatgcatgagtatgtttatacagtgttagactgatgtgaatttgcatttgttacattacattgccagcgcatatcatttagcaagttggcattaacatttatgctttaattaaatgccagtatacctatgtgtgcagcagtaaaaaattagtgagaaaaagcaactttttgtcactcttaggaaatattttgtcttattagtgttcttggcacatgtatattactaaagtagataattccaatgagaaatactaccagattattgttataaaattaatttacaatgtccctgatattgagctaactcttaaaaaaaccaaacaaaactcgtatctgagtgtaactttgccaatattttaaaagccaaaatattctctggacaacaaatttgtattgctcagggacagtttaccttgcctggtaaaccttcccaaacagaaatatagctatactatctttggttttgtttttttgttttttttgtttgtttgtattagatggaatttcactcttgtcgcccaggctggagtgtagtggcgcagtctcagctcactgcaacctccacctcccgggttcaagtgattctcctgtctcagctccctgagtaactggaattacaggtgcc

SEQ ID NO: 80747 - DNA, 694 bp, Homo sapiens
  sig_peptide (119)...(254): this location contains the signal peptide sequence, MPAPTAWLLPAVSTCSNLRAKAGVILGTITTRPYVHTWGSADMAT, Run with SignalP
  misc_feature (341)...(592): similar to gi1296429 in the genepept database release 114, Run with FASTXY 3.3t00, default parameters
gcaggcaggagtcccactctcctgggtgcagctgcagccacccaaaccgcagctgcagacccaggcatccctgcactcttaagggcccgggaaggccctctccctcacaggctcagaaatgcctgctcccactgcctggcttctccctgctgtcagcacctgctctaatctcagagcaaaagcaggggtaatcctgggcactatcacaaccaggccatatgtgcacacctggggcagtgctgacatggcaaccccctaccaccttggccccttctggactttgggcactgacaagcataggagggaagccaatagggggcagagggcaatttggggctggcctacagggcccccttggcacttatagcctgagtgtcatgaatggcagcaggaggcagacaggtttctgtgtggaagggagtgagttccttgtgaggtcccaccttcaggccaggtagggcctgaaggctgggggctgggctgccagccccacggactgaagtgggaacctgtggggccttttctgagcctgcccagggcccccatggaccaattgggatggacttcctcccctctgcaccccaaaaaaccctgggctctgccagaacttaacagaagttgggaatgaaccggctggggggaagaagctaccccaatccggggcccccccctctgttgagaacccacccatgtc

SEQ ID NO: 80748 - DNA, 493 bp, Homo sapiens
  misc_feature (1)...(493): n = a,t,c or g
  sig_peptide (203)...(338): this location contains the signal peptide sequence, MVWSYFISTPVQVPTALVGLVMVHTRPGLGDKGGSSGLEHPTCLL, Run with SignalP
  misc_feature (232)...(375): similar to gi1019647 in the genepept database release 114, Run with FASTXY 3.3t00, default parameters
cggtggccgaaanaaatccgtcctatcagggtantnagnanacnnnnnnnaattnnnnggatgngaaccagcgcgttcgcttcttgagacaaaataacaatgttgcttttctgttccagggatctgccattatgcttgtgagagggtgtaggtggccttgttatttcctagctgaagttgcaaaaatccagggttattttccatggtttggtcgtattttatcagcacgcccgtccaggtcccaacagctttggtaggtctggtgatggtccacacacggccaggtctgggagataagggaggaagcagtggcctggaacaccccacctgtctgctatcagcactagacagctcaggctgtcttggaaacgtgtactttgttaactgccttcctgtcctcttgtctttgaaagctgtctcgcgttccacagtcagcttgagggcaagagtgggatgctggggaccggcttttccccgactgtgggggaactcg

SEQ ID NO: 80749 - DNA, 430 bp, Homo sapiens
  sig_peptide (288)...(423): this location contains the signal peptide sequence, MALFVVLIAGVDLLQIDISSTYINSRILWILSQLYFIKYLYICVK, Run with SignalP
  misc_feature (302)...(108): similar to gi330287 in the genepept database release 114, Run with FASTXY 3.3t00, default parameters
caattttaatgtaaaaattctataccattttattactaagatctccaaaacaaatggaatttactgtaattaatattgacttatcactccacctgttttaagaggtatgattttttttgtgtacctcttttaaaaaagtagtatttcatatcaaaatacatctgtatataactcatgctcagatgcttgatttgctctcattggggccgcattctgatttttctagcatggggtagggagtggggaagcgggggtgtctgattggcagttctgtcttgtggtctggcatggccctgtttgtagtgctgattgcaggggttgacttgctacagattgacataagctctacatatattaattccagaattctttggattttatctcaattatattttattaaatatctatacatatgtgtaaaatatgtgcc

SEQ ID NO: 80750 - DNA, 926 bp, Homo sapiens
  sig_peptide (723)...(858): this location contains the signal peptide sequence, MLCSSSSLLVILLNTLKKVQSALCIREFCIHGFNQIQIENIWGQK, Run with SignalP
  misc_feature (644)...(849): similar to gi2689233 in the genepept database release 114, Run with FASTXY 3.3t00, default parameters
ttttttttttttaatgttaattaactttattcacatttttccaagtaaatacaatattaactataagctaaaaacaatacatagttcttagaaaatacaaccccgaattattgtgtggcctgggctttgtgattatgtgcccagcctttgttcctccagaattttaaagtgaatgcagtgctcaaaacaaacttacgatagcacagggaaaccttccctaaataaagttttgttattagaagagaaatccaaaaagaggcctctactgccttcattcaagtgtcgagaatttcaaaatggaaataatattaaaagagcaatcgatttttttccatctcacactagtaggcttgaaggaggcaaatttggaccaaaaatctagacatagctccttgcatagggtttgatattaagcacacacttgcactgaataactccatatccaccctatagtacaaaaattcatttcaaatgcaaacgttgtgcaatgaccaggtcatatttttaagatcactctttaaaatatcattttactgatcacaaaattatataataaggatcttatatgggttaggtattaagtttgataccaaagcaactatagcatcaagctacataaatattagcaccattttttatctagtccagtgaaatgtaaaactatccatcaaactgttttttaccaaagcagtcaacaagaaaaattgttttacttctgatatatgctttgctcctcctcctctttgctagtaatacttttgaacactttaaagaaagtacagtcggccctctgtatccgtgagttctgcatccatggattcaaccaaatacaaattgaaaatatttgggggcaaaaaggatggtttcacttgtgctgaacatgtacaggcttttttttccttgtcattattccctaaacaatatag

SEQ ID NO: 80751 - DNA, 466 bp, Homo sapiens
  sig_peptide (111)...(246): this location contains the signal peptide sequence, MYQWGSSIILILWPLSMNIGCYSIYLKMVMLLSSKFSWKSFSKLQ, Run with SignalP
  misc_feature (288)...(34): similar to gi1619929 in the genepept database release 114, Run with FASTXY 3.3t00, default parameters
caagatgggccattctgggttctttgcctttttgtatgaattttaggatcacagggtcaaatttctgcaaataagtcagctggaattttgatgaggatagggttgaatctatgtatcagtgggggagtagtatcatcctaatattatggcctttatccatgaacatcggatgttactccatttatttgaagatggttatgcttttgtcttcaaaattcagttggaagagtttttctaaattgcagtttttattacttttgaaattcaggtacatgtgtatttgagctgaaaatggttataggctctttgataactgcattttgattagttggcagaatcagtctacagttccttcaactctggggatacaaagattttattttaaagtttagatacacaggtgtaatttgtaaaagacagaaattggagaccctccaaatgggctattgattgaacctttagggaa

SEQ ID NO: 80752 - DNA, 2258 bp, Homo sapiens
  sig_peptide (1339)...(1204): this location contains the signal peptide sequence, MLLTLCIRGCMFVWRCFFLSVGTCIYPSKFLFSFHFYIFMNLFYK, Run with SignalP
  misc_feature (1084)...(835): similar to gi1150673 in the genepept database release 114, Run with FASTXY 3.3t00, default parameters
ttttcacagtggaaataaatattagctttattaacactcaaagtgccattcatttatattcattccatagtccagaaggttacttattagagtaagcctttgcaccacaatctttcaaaaaaatgaacatgtaagaaaaagcagttttcattgtgctaattattgcaggccttcatgcacgtaaacctcaacaaaatgtgtgccaacaatatacaaatttccatataaacaaagtcattgatcactaacaaaatataaacatggtttcttttatattagatttttttttaaaaaaaagctatttaccagcaagaaaaaacaagtacctagaaattataaaactccagaaattgtatacatttttacaagcacaattttggaatgacaaaccaaaatcaaaatgtgcatgaaatgttgcacgtaccacactgtatctggcttctggtaggttttcctaatcacactggttccttttaacataataagcttagtgacattcaacttcaacagtggactttattcctaacacgagtaattttacatggtaccgcatatttaaaacaaagttttctttaatactacattgtctgattggaaatttcatttccaattctttttctgccagttacttaaaacacacagtacaatataaagacacacaacgtatgtttggacatttcaaaaccaatttatagtcaattacaaagaatcacaatatgccaatatattgttttataaacccagtctgaccttgcccagtgatagaaaaactaaaagttgaaatcttttggggtggaatacaggaaatattcaaagacaacagtaggacaggccaatagcaactggagatagaaaaatcttgacatctcgagacaatttagtttctcacatttttccatagctctgagaattcaaaggccatttttagcggtgtgtttttgctactgcttaaaacctatttttcccttaatttgcatttcacggaattctcaaagagaatttaatgctttttcttgcaagagtgttttaattggtagatatttaagtaaatctgcatccaattgtggaaatacaaatacattttgaatggttaaaaacaaaattaaaaaaatacttttgatcagccagctgaaaatatattcatatagtaaataatctctcagaaagcttttatatatatttaattatcacaactaaacagtacccttataaaacaagttcataaaaatgtagaaatgaaatgaaaataagaacttactgggatatatacatgtgcctacagacagaaaaaaacatctccacacaaacatacatcccctgatacacagagttaaaagcatactttcaacttagtaatggattttataatacattataaaattttctaatttctattaatgtcgaactcctgagttcttcaacaaagaaccatagataagtatagtttgtaaaagcaaaaaggtccatttaagtcagtaatagcagtgcagtaactgatggctacatcttgaaagaagttaaaacataaagacacagacagtagttcaatgcacgcattcatgatgctcatacactcatcaacaattattggtcagagtagtaaatcagtgtacaaattaaacatttccaaaaatgtgcaaaaatgtcaatcttaataggaaaaaaaccctttgtacataattataaactgcccagcattcaactgagattaaaaacatttagagagaaaccaataggttaaatatagagaatttaatggctacatttaaaaatgtacattattatgtcaaagggtaaatttacaaattgataatcatagtttgcaacaattcaaagtttattctcaaatttatccaagtttacttttatttacaatgaataaaaagaaccatgtgcaatgtaagagatgtcagacattaaaagtatttttgggtattaactcttataatatttcagaattcagggtagcaaattttaaaacscvaataacgaataggaaaaaatgtaaaccgattttactaattaaggattgcattaaaacgaattgttgggtctttaagagaagtattcttabtccttagacactgtactttcaattggaataggggtgtattgcaagattttgggcccacttccatattggccccataagcctctccagctcaaatgtttcaactagtcctctcttccttattcccaggtgggaaaaaaattccttgggaaaaggtaaggaatacatcaaatccattttggtagtc

SEQ ID NO: 80753 - DNA, 349 bp, Homo sapiens
  sig_peptide (16)...(151): this location contains the signal peptide sequence, MGRPWCSGGPGLKSTMVWLMFHYLGFASINPRPTASARAGTLLKM, Run with SignalP
  misc_feature (48)...(224): similar to gi5712119 in the genepept database release 114, Run with FASTXY 3.3t00, default parameters
ggcacgagctggggcatgggaaggccgtggtgctctggaggacctggattaaaatctactatggtgtggttaatgttccactacctgggttttgcaagtataaaccccagaccaacggcatcagcccgggctgggactttgttaaaaatgctaataattctcaggtctttttccagaacgagtttatgaaaagttctggggcccagctgcctgtgttctaagaaaccctgtagatgatcccaccgatctctcgggagggagaaccattacctctttaggatttatgggttttattgaatttagctgtggaggcaggctatgcccttgttaagcgaaaagataaaatact

SEQ ID NO: 80754 - DNA, 400 bp, Homo sapiens
  sig_peptide (133)...(268): this location contains the signal peptide sequence, MTYLLLHMLMITLNETYKQNTTYDAWCQHNKKKLFPLKGPFLSFI, Run with SignalP
  misc_feature (123)...(4): similar to gi450702 in the genepept database release 114, Run with FASTXY 3.3t00, default parameters
cctacacaagcgaatagtcttagcatttctgttcccagcaataacattcactgactgcatggagattattttcaatagagattttatgagaaaactattgctggaactataagagatattctagccataaacatgacctatctcttattgcacatgttgatgatcacgttgaatgagacctacaagcaaaataccacttatgatgcgtggtgtcagcataataaaaaaaaacttttccctctcaaaggtcctttcttgagcttcatattgacgtacagaatttcataccctgaaaactatgctgagaggactctgggaaccacacggcgaacgtttctgaaaggaaaaatagagccttatgcccatgctttaattcactgcagcacacatcagtgtttgg

SEQ ID NO: 80755 - DNA, 1153 bp, Homo sapiens
  misc_feature (1)...(1153): n = a,t,c or g
  sig_peptide (737)...(872): this location contains the signal peptide sequence, MCTFRGLLTGLLTFPLFSPVLYFCNKFPNKTNMFLLCFCKNYFLS, Run with SignalP
  misc_feature (1113)...(846): similar to gi288145 in the genepept database release 114, Run with FASTXY 3.3t00, default parameters
cccacgcgtccgtaagggttttgttttagtagcaggaagttgcttgaaggaaggcagggcatggtggctcatgactgtaatcccagctactcaggaggctgaggcatgagaattgcttgaacctgggaggtggaggttgcggtgagctgagatcacgccactgcactccagcctgggtgacatggcaagactctgtctccaaaaaaagtaatgggatactttagttgataacttttttaaaagaattgctttgctaaaagggttcattttatgtacagaaattgtatgttttaagtctgatgaattttaattatacttcacacctactagaagcaagtcacaagtcagtatataattatattttgctttgtttgcagagtacgttagtatatatccaagtactttatagtagattgataattctgtgaaggaaatgaaggcgtgagtatcagggtaaccaaatgaaagtttcctgactaaaggtagctggtttaaacctacaaacatttacatgtgattggtatgatgggtactgaatgaattgggttggatcagtataagttgatcatgtcatgtagaaagttattaaagtagagaaaagagtttttactccagactggtttagggcaggtctttctgatttaaaaacagtgtccaggaagctgcacagatgagcagtactaggtcatgctggtggctgagctggagtttggacctgaccctcaaacacaggtgcatgtgcacatttcgtggtctccttactgggcttttgacttttcccttattttctcctgtgctttatttctgtaacaaatttcccaataaaaccaacatgttccttttatgtttttgtaaaaattatttcttaagtactgttttttttatttttttgagacagagtttcgttcttgttgcccagactggagtacaaggggtgtgatcttggctcactacaacctccatcttacgggttcaagcgattctcctgcctcagcctcctgagtagctgggattacaggtgtccaccaacacacccagctaatttttgtatttttagtgtagagcgggttcaccatgttggctaggctggtctcgaactcctgacctcagtgatccacccacctcgcctnccaaatgttgggatacaggctgc

SEQ ID NO: 80756 - DNA, 649 bp, Homo sapiens
  sig_peptide (279)...(414): this location contains the signal peptide sequence, MAVEPLLAHFLRWSWLSARDFYSLGNVDPALWVPCFFLLFLLIIT, Run with SignalP
  misc_feature (272)...(71): similar to gi2982217 in the genepept database release 114, Run with FASTXY 3.3t00, default parameters
aagttgcttatttgtagcctccttttgaggctacaaggctagtccatatcaaagcattcattcatcctgtagaccgataggtatggaggggaagtattattggagagacctcagggttttctcacctgagaagggagagagccctggggtggtcagagctgggccctgagtggtgggatttagaaagaagggaagaggggagggcttggaagataggagaaacagcatgaacagcagcagggggaatgggtgagtgtcctcctgaaaggactgtggagatggccgtggagcctcttcttgcccacttcctgagatggtcatggcttagtgctagagacttttattccttgggcaatgtagacccagctctatgggttccctgttttttccttctcttcctcctcattataacagataataataatgattcctagctttcagggaacacatcttgtataccatgttctgtgtgctttacatggattgtctcattacagcttcacaacaaccttagagatagatgttctgtatcattatgtgcaccttacagttggtgcagctgaggcgtagagaggttaaataacttgcccttggtgggtgacatagcaaggcaggagttgggtgaggagtctaccagggcagcctgaaa

SEQ ID NO: 80757 - DNA, 883 bp, Homo sapiens
  sig_peptide (263)...(398): this location contains the signal peptide sequence, MENIRIPPHPNIWPVVSSSAFWIIILVWPFPIFPFLLLSFVFYLC, Run with SignalP
  misc_feature (97)...(265): similar to gi2224795 in the genepept database release 114, Run with FASTXY 3.3t00, default parameters
cgccagcttggacgaggactttcccgaacttcccttagaaaagttgggaacaagaaatgagattagtgtagagagcaccttaactagcacagtgtctggttcatagtaagcaattcaatacagtgtttttatttagtgtcttaaatgtagggaagttatgctgcacttgtccctatgtttccagatgtgcctcatttcttaaattgttatacagatacaatcttagctattcgaaataacttgctttaaggagtgtaaattaatggagaatattaggattcccccccatcctaatatttggccagtagtgagtagttccgcattttggattattattcttgtttggccctttcctatattcccatttctgcttctttcttttgtcttctatctctgctggaatattgcctctaaatcatttttactctttgcttctttgcccaaattcaggcaagaaaaggaaggtactttgtgaagcaaagcattcataggtgttaattgcctcttagggcatcccgagtatgtgtgacttacagtgttagaaaaaaagaggtaccccggccctatatttgtttagagaaaagaactgggttcagtgttactaggaaaatcatggaaaatcctccattattttgagcataattctagttagattcttccaccaagctttaaaattagcaaggtctcattctgaggtatgaaaaagaggtgaatcctgaattatttcataatgaagaagtgcttgaactgcaccctcataaaaagggaatttgcccaaaaaaaaagggggttaaaataccagtggaggtaaataaaagcccttttggatttcatttaatcctttgccattttgaccccccaagttttttttacttttgggaag

SEQ ID NO: 80758 - DNA, 372 bp, Homo sapiens
  sig_peptide (194)...(329): this location contains the signal peptide sequence, MLMHPVLYIYTYISCTCVYCLFYIFIHTTPRSWRLTSIAMSLTLT, Run with SignalP
  misc_feature (76)...(271): similar to gi862343 in the genepept database release 114, Run with FASTXY 3.3t00, default parameters
cttttgacagcgtacctgacttttagaaaaccttattgaagaactgtgcttgctcatgttgaattatgattattctgtctgtgctgcttcatcttggaacggttgcgtgctactaatgacacttactgaggactgcattttggaatatgctacaggtaactcatggcttatatgaacttttgcaactatatggatgctaatgcaccctgtattatatatatacacatatatatcatgtacctgcgtgtattgcttattttacatatttatacacacaaccccacgtagttggcgtttgacatctatagcgatgagccttacccttacaattacatgatatatccttggatgcatgagagagcattttgtatg

SEQ ID NO: 80759 - DNA, 1381 bp, Homo sapiens
  sig_peptide (186)...(321): this location contains the signal peptide sequence, MKVLWAALLVTFLAGCQAKVEQAVETEPEPELRQQTEWQSGQRWE, Run with SignalP
  misc_feature (126)...(769): similar to gi3716294 in the genepept database release 114, Run with FASTXY 3.3t00, default parameters
gcagggggagaacagcccacctcgtgactgggggctggcccagcccgccctatccctgggggagggggcgggacagggggagccctataattggacaagtctgggatccttgagtcctactcagccccagcggaggtgaaggacgtccttccccaggagccgactggccaatcacaggcaggaagatgaaggttctgtgggctgcgttgctggtcacattcctggcaggatgccaggccaaggtggagcaagcggtggagacagagccggagcccgagctgcgccagcagaccgagtggcagagcggccagcgctgggaactggcactgggtcgcttttgggattacctgcgctgggtgcagacactgtctgagcaggtgcaggaggagctgctcagctcccaggtcacccaggaactgagggcgctgatggacgagaccatgaaggagttgaaggcctacaaatcggaactggaggaacaactgaccccggtggcggaggagacgcgggcacggctgtccaaggagctgcaggcggcgcaggcccggctgggcgcggacatggaggacgtgtgcggccgcctcggtgcagtgaccgcggtgatggtgcaaggccatgctcggccagagcagccgaggagctgcgggtggcgcgtgcgccttccacctgcgcaagctggcgtaagcggctcgctccgctgatgcctatgacctgcagaagcgcctggcgagtgtaccaggcccgggccccgcgagggcgccgaggcggcggccgtcagcgcgcatccgccagcagcctggggccccctgggtggaacagggcccgcgtgcgggccgccaccttgtgggctccctgtgccgggcaagccgctacaggaagcgggcccaaggctgggggcgagcaggctgcgcgcgcggcactggatggagattgggcagcccggacccgcggtccgcctaggaccgagggtgataggagccaggtggcggggagggtggcgcccggggcccggccccccccaaaaaaagggctggagagcagcccagcagatacgcctgtgaggccagaggcctttcaaggcccggcctcaagaagctggtttcgagccccctggtgggaagacatgcagcggccagtgggcccgggctgggtggagaaggtgccaggcctgcctgtgggcacccagcgccgcccctgtgcccagccgacaattacttgaacgcccgaagcctgcagtcatgcgagcccacgccatctccgtgccttcctggctccgcgcagcctgcaagcgggagacccttgtctcccgcccccagtcgtactctgcgagttggacccctattttataaaagatcacccaagtttcacgccaaaaaaaaaa

SEQ ID NO: 80760 - DNA, 1845 bp, Homo sapiens
  sig_peptide (1221)...(1356): this location contains the signal peptide sequence, MNPHLGVFLVLVSFFLSLLDSQLHSWIVLHNSPSSRMWKSIIFFL, Run with SignalP
  misc_feature (913)...(1723): similar to gi2447219 in the genepept database release 114, Run with FASTXY 3.3t00, default parameters
ctatggaccaaggactacaggccgggacaggatttgcgcttgcttagtcaagctaccctgactttccatccaacagtacctagcccgtccacattgttggggttgctgccagctgaggacagctggttcacctgcttggacctgaaagacgctttctttcctatcagatcagcccctgagagccagaagctgtttgcctttcagtgggaagatccggagtcagcccttgccaaaacggtgaggcagcgttgtgtcagctgccgacagcatcatgcgaggcaaggtccagccgttccgcccggcatacaagcttatggagcagccgcctttgaagatctccaggtagacttcacagagatgccagagtgtggagggaataagtatttaccagttcttgggcgtacctactctgggtgggtggagacctatccaacaagagctgagaaagctcgtgaagtaacccgtgtgcttcttcgagatctgattcctagattggaactgcccttccggatcggctcagataacgggcctgcgtttgtggctgacttgctacagaagacggcaacggtattggggatcacacggaaactgcatgccgcctcccggcctcagagttccggaaaggtggagcggatgaatcggactatcaaaaataatattattgtcttccccgctggatatgtaaaacaacaccacgaggggcatcaaaccacctgctacattggagggaatcttatcctctccccacctcctccggtcccggatattagaggcaataacacaggggtaatgtacacccactgctttattgggagtaatgtcatcctctgccttcttggatattaggaacaatatcacagggtgacgtacatttcccgcgatactgagggcagtattattgtcttccccgccctggtcacggtgctgaggaacctgctcatcatcctggctgtcagctctgactcccacctccacacccccatgtgcttcttcctctccaacctgtgctgggctgacatcggtttcacctcggccatggttcccaagatgattgtggacatgcagtcgcatagcagagtcatctcttatgcgggctgcctgacacagatgtctttctttgtcctttttgcatgtatagaagacatgctcctgacagtgatggcctatgaccgatttgtggccatctgcccatctgtcaccccctgcactacccagtcatcatgaatcctcaccttggtgtcttcttagttttggtgtcctttttccttagcctgttggattcccagctgcacagctggattgtgttacacaactcaccttcttcaagaatgtggaaatctataattttttttctgtgacccatctcaacttctcaaccttgcctgttctgacagcatcatcaatagcatattcatatattttgatagtactatgtttggttttcttcccatttcagggatccttttgtcttactataaaattgtcccctccattctaaggatttcatcgtcagatgggtagtataaagccttctccgcctgtggctctcacctgccagttgtttgcttattttatggaacaggcattggcgtgtacctgacttcagctgtggcaccacccctcaggaatggtgtggtggcgtcagtgacgtatgctgtggtcacccccatgctgaaccctttcatctacagcctgagaaacagggacattcaaagcgccctgtggaggctgcgcagcagaacagtcaaatctcatgatctgttatctcaagatctgctccatcctttttcttgtgtgggtaagaaagggcaagcacattaaatccctacatctgcaaaaaaaaaa

SEQ ID NO: 80761 - DNA, 1019 bp, Homo sapiens
  misc_feature (1)...(1019): n = a,t,c or g
  sig_peptide (644)...(509): this location contains the signal peptide sequence, MLWALIRAALAQLHTEEPKKRKEEKMSPALSPPLPSVPISLGQNN, Run with SignalP
  misc_feature (406)...(426): similar to gi5802816 in the genepept database release 114, Run with FASTXY 3.3t00, default parameters
ttttttttttttaaaatttttctttttaattctcaccaagtcaatgtacttctacagaagggtgcgcccttacagatggagcaatggttgagtgcacaccctggacaaagggaggggaaagggttcttatccctgatgcacatggcccctgctgctgtgtcattcccctattggctagggttagaccacacaggccaaactaactccaaccttnngggggnctaatttaaagagagtgacagggtgaagtggttttggcgggaacaatggttatggcagagcatggaaatcggaatgagtcaggatggagcaggtaatcgaaaaaggttgctttatgaagaaagttaagtttccaagtagaaggcaaagaatttgaacatactgacattactggattctttaaagagaaatttagaactcatatctaacacactgatggctatagcatatcctctgtcctttttcctatctattggaggaggagacttaggtgagacctccgtttcctgttattttgacccagtgatattgggactgagggaagaggaggtgataaggcaggtgacattttctcctccttcctctttttaggctcttctgtgtgtaactgagccagggctgctctaattaaagcccataacattaaagattttactgggacctgatgcctttgcacctgatgttgtttaagatttctccccacttgttcccagagttctacatctagtgttctttcctctgggaaccatgggctttgtactccattattgaccacactagtttttaattccttcaacaactgaaattctagtggggtgtgttcatgaataaactgctgtggattattgggatcaggccttatggaaacaggaacagcgcaaggtcctaagggctctccagctatgacagcagagcgtaaaattctttgtattggggtttctatttgtgctactgaaggaggcagtacagatgtttctgcaattggaggagaattccaccacgtggactagggtttcgat

SEQ ID NO: 80762 - DNA, 470 bp, Homo sapiens
  misc_feature (1)...(470): n = a,t,c or g
  sig_peptide (206)...(71): this location contains the signal peptide sequence, MPCLAVICILFFFAGSGSLREGVPCACQVLMIRVWGSQHCDYLLS, Run with SignalP
  misc_feature (263)...(53): similar to gi206808 in the genepept database release 114, Run with FASTXY 3.3t00, default parameters
nttcgagaacattagaaagagccgnggnnttgaggacatctgtaccngcggnggaattcggagataggcagctcaacaaataatcacaatgttgtgagccccaaactctaatcattagcacctggcaggcacaagggactccttcccgcagagacccagagcctgcaaagaaaaagaggatgcaaatcacagccaaacaaggcattgatttcagatctttatagaattccaaccaatgctgcagagacactcagactgttactgtgcattccctgtatgcatggatggccaaagtgcggtaattttgggatggtctctgacactggcagcttctatttttaaagaggccttcctggggaagtgctgtcttcctgtccttgtataagttagtctgagactcaagatggagcaagagatctctgctttcaaagactgcagtagatttaccatgagtctccaattaataataa

SEQ ID NO: 80763 - DNA, 890 bp, Homo sapiens
  sig_peptide (859)...(724): this location contains the signal peptide sequence, MAWALLFLTLLTQGTGSWAQSALTQPASVSGSPGQSITISCTGTR, Run with SignalP
  misc_feature (419)...(421): similar to gi553488 in the genepept database release 114, Run with FASTXY 3.3t00, default parameters
ttttttttttttctggttgtcaatgaggatatttattggggtttcatgagtgcagggagaagggctggatgacttgggatggggagagagacccctcccctgggatcctgcagctccaggctcccgtgggtggggttagagttgggaacctatgaacattctgtaggggccactgtcttctccacggtgctcccttcatgcgtgacctggcagctgtagcttctgtgggacttccactgctcgggcgtcaggctcaggtagctgctggccgcgtacttgttgttgctctgtttggagggtttggtggtctccactcccgccttgacggggctgccatctgccttccaggccactgtcacagctcccgggtagaagtcactgatcagacacactagtgtggccttgttggcttggagctcctcagaggagggcgggaacagagtgacagtggggttggccttgggctgacctaggacggtgaccttggtcccagttccgaagacataaccactcaggctgtcatcccatgctgcacagtaataatcagcctcatcctcggaccggagcccactgatggccagggaggctgaggtgccagacttggagccagagaatcggtcagggacccctgagggccgattattgacatcaaaaatcatgagtttgggggctttgcctgggtgctgttggtaccaggagacaaagttataagcaccaacgtcactgcgggttccagtgcaggagatggtgatcgactgtccaggagacccagacacggaggcaggctgagtcagggcagactgggcccaggaccctgtgccctgagtgaggagggtgaggaatagcagagcccaggccatggtggagacgtcccgagagcgctgcctcct

SEQ ID NO: 80764 - DNA, 477 bp, Homo sapiens
  sig_peptide (22)...(157): this location contains the signal peptide sequence, MWWNSLMMALKCPLNSVALGVCKTQGDACSERGFQIPLCLQHLPC, Run with SignalP
  misc_feature (184)...(72): similar to gi296594 in the genepept database release 114, Run with FASTXY 3.3t00, default parameters
gaacggactcggttcgtatccatgtggtggaattcgttgatgatggccttgaaatgtcctctgaacagtgtggctctgggggtgtgtaaaacccagggtgatgcctgctctgaaaggggcttccagatccctttgtgtctccagcacctgccgtgtgcctgccccaagctggggtctgtgagctgtgccttggggcccctgcctgtccccgctctgctctctgctgtggcttgctggctgcagggttctccagtgagtgagggatccctgctggccatgcctggagctgagggtggagggaggcccagcagggagccccacaggtaggccccagtgagggtgcattatctacaggaaagttgcctgggacactctagtgggccgtctaggaaatgcagcctttaaggacctgaaatggaggggaatatttttagtttttaaaatttatttctcattaaaattataacacagcctcgt

SEQ ID NO: 80765 - DNA, 1016 bp, Homo sapiens
  misc_feature (1)...(1016): n = a,t,c or g
  sig_peptide (995)...(860): this location contains the signal peptide sequence, MAWIPLFLGVLAYCTGSVASYELTQPPSVSVSPGKTASITCSGDK, Run with SignalP
  misc_feature (985)...(267): similar to gi33395 in the genepept database release 114, Run with FASTXY 3.3t00, default parameters
tttccccctccccgttttacgccgccaggatttatttgggtcctataaaaactattaccttgccgcccgcgtcgaaaactgatccctaaaacggcccgccttttttttttttttctgattgacaatgaagaatatttattgagggtttattgagtgcagggagaagggtcttgatgccttggggtgggaagagagaacccctcccctgggattctggaagtctaagtttcccgtggtgggggggtgagggtttgagaaacctatggaacattctggtaggggccactgtcttctccaacggtgctcccttcatgcgtgaccctggcagctgtaagcttctgtgggaacttccactgctcaggcgtcaggctcagatagcatgctgggccgcgtacttgttgttgctttgtgtgtggaggtgggggggtggtctccactccccgctttgacgggggctgctatgctgcgcttccagggcnacttgtcacgggctccccgggtaagaagtcacttaatgagacacaccagttgtggccattgttgggcttgaaagctcctcagaggaagcgcgggaaacagagtgacccgaggggagcagccttgggctgaccttaggaccggtcagctttggtcccctccgccgaataccactgtagtgctgctgtcccacgcctgacagtaatagtcatccctcatccatagcctgtgtcccgctgatggtcaaagtggctgttgttccagagttggagccatagaatcgtttatggatccctgaaggccgcctgctatcttcatagatgaccagcacgggggactggcctgccttctgctgataccaggaagcatatttatcccccaatttatctccagagcaggtgatgctggctgtcttgcctggggacacggacactgagggtggctgagtcagctcataggaggccacggatcctgtgcagtaagcaaggacgccgaggaagagagggatccatgccatggctgagcgacctccgatgctg

SEQ ID NO: 80766 - DNA, 734 bp, Homo sapiens
  misc_feature (1)...(734): n = a,t,c or g
  sig_peptide (266)...(401): this location contains the signal peptide sequence, MGTYLVIYTRSLKLLVYCLYCILSSANHTTLPRVQIKYIKYKRKY, Run with SignalP
  misc_feature (424)...(256): similar to gi736710 in the genepept database release 114, Run with FASTXY 3.3t00, default parameters
cactgttgtgtaattcgtggtgacggtaggggtttttgttttgttttaaatgctgagaactttattaaatttgtggaattactgagtaaacactaggtggtgcagttgtgcaaggaccatataatgaagtatgcattttttgaaaaaaggtgtcaggatgaaattaaaattatagtttgaagaaactctttggaaataagaattatcaaaatactaaaatagaatgaatgaatcttgctttgctattacttggtctgggatttaaatggggacctatcttgtgatttacactagaagtctcaagctattggtatattgtttgtattgcattttaagctcagctaaccataccaccctccccagagtacaaataaagtacataaaatataaaagaaaatacgacaacaaaaaactgatccaatttggttttctgtaaaatttaaatattaaattgctctctgactacaattaaagaggcttaccttctactatttcaaattattctaaaatgccctaggatttgagtaattttctgtaatattatatctcatcgagtaattgttgatcagttaaaacttgaaaagtagctttccttttggcctatgtgtcttcttttattcactgaaaaaacccttgcattcctatgtatattcaagtcattaaattattaaagaatcagcttctgccatgaaaatccnacaaaaaaagacacactcacacacagagccgcccct

SEQ ID NO: 80767 - DNA, 727 bp, Homo sapiens
  sig_peptide (34)...(169): this location contains the signal peptide sequence, MPLLHGVYLARRSLICISFCHLCVLSIGLRVIVCVVGISEDRKRS, Run with SignalP
  misc_feature (586)...(418): similar to gi516536 in the genepept database release 114, Run with FASTXY 3.3t00, default parameters
gtcgtggaattcatcagaagcactgtgtgccgcatgcctctcctccacggtgtgtatttggcgaggaggagtctgatctgcatttcattttgtcatctctgtgttctctccattgggctgcgtgtgattgtgtgcgttgttgggatatctgaagatcgtaaacgaagtgccagtgcacccaccctaggtattgtacccctgcatgccagccttcaccagcactgtgctccaaaccaatctaatccctgctcttggcatctgtgatctctagaaagcgatctgacagcaatcagaaaatgtagttctctattccggagtgttctttccaccttctgctaaaaaggactctgtagaggctttgcttccaagcctaaatgctgttttaaccaatactagtaacactcactgtgtgaatagctttgagaggacctagacgtgtgcagcatccctcagagtgcagggcaggaatgtcctggcattgtacattgcagctctttcagccttgaagtgcatattaccacacactaactcccaggtccttgcagtccgttctccatgcttacatttcccccagcctccaaaaagaaatttttttggccatatagggaggtttatagaagacattgaataatataggtttaggcttacttctcttaggggaacatttttctgacgtttattactttgaagaggaaaaatatttaggatgacgaagctctttcttttt

SEQ ID NO: 80768 - DNA, 352 bp, Homo sapiens
  sig_peptide (181)...(316): this location contains the signal peptide sequence, MNQFQPWAPIILYICLKTLIRIPALSLISCNTGYLTFLSLKILIY, Run with SignalP
  misc_feature (91)...(262): similar to gi29674 in the genepept database release 114, Run with FASTXY 3.3t00, default parameters
tatctttttgctggtaccttttataaaggaacttttcactccctggcaaatttaaattcatgctttaagacaactcaaagcttcatataccctctttggtagaacattcctgttccaaagattctaccaatccccaagcaaaactaatggtttagcccccacaatcatatacgccaatgaatgaatcaatttcagccttgggctcccataatactttatatatgcctcaaaaccctgattagaatcccagctctgtcacttattagctgtaacacagggtacttgacctttctgagccttaaaatccttatctataaaatggaggaaatctctacaccttcatgaactgtaa

SEQ ID NO: 80769 - DNA, 659 bp, Homo sapiens
  sig_peptide (124)...(259): this location contains the signal peptide sequence, MNPSASLVCLLFAFSSCRIWSVLCQLCVPSPWPSPLCLCPQTDVA, Run with SignalP
  misc_feature (467)...(335): similar to gi908755 in the genepept database release 114, Run with FASTXY 3.3t00, default parameters
caagccccttcccaggattctaatttcacctgcgcttctggccacagagagttagctgcttcctggaacgtgttggctagttgatcaccttaaatgtgtgctcaatccctcttcactcagaacatgaacccctctgccagcctcgtctgcctcctctttgcgttttcttcctgccgcatttggtctgtcctttgccagctctgtgtgccatcgccttggccatctccactttgtttgtgtcctcagacagatgttgcacccatctgtgctgtccagccgtctctcttctgcctgggctcccgagagcccctgtggactgtgcttgtggggagctgccccctccgtgcattcaccaacttgtccgtccgtccgcccccggggcaccactccatccacctcctcacatggctggcttcctcgtctgccgccgccaccaccgctgcctccactgcctctggggccccccattctgtctgagtccccaccctgaccgtcttccctctttcaggtggcctgtgggcccgtgtaagtgtctctcccacattcccctgctccctgcagcacagggcagaggtggcctgcgggcctctggaagctaagagctttatgcaaaccaggttctggacttgcagagacataggcagggcacacagaggagg

SEQ ID NO: 80770 - DNA, 764 bp, Homo sapiens
  sig_peptide (22)...(157): this location contains the signal peptide sequence, MWWNSSGYHMSWVAAPPLCLSSGCCISETCRPAITQCSPTRMEDL, Run with SignalP
  misc_feature (60)...(231): similar to gi3688372 in the genepept database release 114, Run with FASTXY 3.3t00, default parameters
ttttgtcgacatcactagtccatgtggtggaattcctctgggtaccacatgagctgggttgctgccccacctctttgcctgtcttctggttgctgcatctcagagacgtgtaggccagcaatcactcagtgcagtccgaccaggatggaggatctgtgcttttggccaaattaggggttcactggtaatgagcagtgggtagtttgtgggacccatggaggatggactggccctctctccttgggtaaactacagctcgtttgaggtgtgaataaggcacttagggtgttggatttttcattagtctgagggtagcaaggacagttctactgcagaggcaatggcaaaaatattttcagttgctcttggaggctctgtctagggagttgcgaagttgctactggctcaatagctctggcaatgattggctagtggcccaggcctggagaacttgcccagtgagaatatatgagaacaggcactcatgtaacagtctggccacttttctgaagggctgctgcagtatgctgggtgtccactgcagtttctagtcacctcagattttccagtacctgacgacattatcaccagtgaatactgtaaaacagcaacaatggcagcatgcccttttttctaagagctccatctaagggaggtatagacctgtttccagccccaaagcaactgtaggaggtagctggaaacccctgttgaaaggtcttacccagtgaggagatcatgactggcgacccacttaagaaagc

SEQ ID NO: 80771 - DNA, 700 bp, Homo sapiens
  sig_peptide (451)...(316): this location contains the signal peptide sequence, MAGCLAWKSPGWLAIIEFTLLLLGEMGVRFPRDPCPPIRQPQPNF, Run with SignalP
  misc_feature (250)...(346): similar to gi1402644 in the genepept database release 114, Run with FASTXY 3.3t00, default parameters
aaactgagtttctacattccgtggttgtttgggacctcaggtccacgggccccaggattgctcccaaattctctcacctctctttcagcaagatgactggcttgtttgctaagtggtgtcagagtttgaactaaaggagatgtttaccctagttccctgtgtaggctgtgtgatggaaacgctacagagagcctcctaaggtccctgttgcctgccctagtccaatctctgcaatatttgtttgcatgtctatgggtctgtagtgcacaaaaggctgacaggacctgggagagaagtgatccagacctcttagaagttgggttggggctgccttatgggtggacagggatctctagggaacctcacacccatttcccccagaagcaaaagagtaaattctattattgccaaccaaccaggacttttccatgccagacatcctgccatgaggaaatttcagagcgaggacgcccagcatgccgcccttctgtaggaatgcaaaggtaggcctcctttctttcctgatttgggctggaaggagcttattacctttggggaagaatgccttttggttagaaagaattgaaaataataataccctctgggaaaaggctcaaagtcagaaaatgagatacaagacatccttggtgatgaggaaacgattacggctttaccgaaacactcttaaagagtcaagtag

SEQ ID NO: 80772 - DNA, 2068 bp, Homo sapiens
  sig_peptide (1199)...(1064): this location contains the signal peptide sequence, MWAAVGGFLFAPRCFLLPWPLRAPLSSLFVLPRLLLWPIPYPVLA, Run with SignalP
  misc_feature (1345)...(2064): similar to gi5911857 in the genepept database release 114, Run with FASTXY 3.3t00, default parameters
atggccgaggccgcggagccggagggggttgccccgggtccccaggggccgccggaggtccccgcgcctctggctgagagacccggagagccaggagccgcgggcggggaggcagaagggccggaggggagcgagggcgcagaggaggcgccgaggggcgccgccgctgtgaaggaggcaggaggcggcgggccagacaggggcccggaggccgaggcgcggggcacgaggggggcgcacggcgagactgaggccgaggagggagccccggagggtgccgaggtgccccaaggaggggaggagacaagcggcgcgcagcaggtggagggggcgagcccgggacgcggcgcgcagggcgagccccgcggggaggctcagagggagcccgaggactctgcggcccccgagaggcaggaggaggcggagcagaggcctgaggtcccggaaggtagcgcgtccggggaggcgggggacagcgtagacgcggagggcccgctgggggacaacatagaagcggagggcccggcgggcgacagcgtagaggcggagggccgggtgggggacagcgtagacgcggaaggtccggcgggggacagcgtagacgcggagggcccgctgggggacaacatacaagccgagggcccggcgggggacagcgtagacgcggagggccgggtgggggacagcgtagacgcggaaggtccggcgggggacagcgtagacgcggagggccgggtgggggacagcgtagaggcgggggacccggcgggggacggcgtagaagcgggggtcccggcgggggacagcgtagaagccgaaggcccggcgggggacagcatggacgccgagggtccggcaggaagggcgcgccgggtctcgggtgagccgcagcaatcgggggacggcagcctctcgccccaggccgaggcaattgaggtcgcagccggggagagtgcggggcgcagccccggtgagctcgcctgggacgcagcggaggaggcggaggtcccgggggtaaaggggtccgaagaagcggcccccggggacgcaagggcagacgctggcgaggacagggtaggggatgggccacagcaggagccgggggaggacgaagagagacgagagcggagcccggaggggccaagggaggaggaagcagcggggggcgaagaggaatcccccgacagcagcccacatggggaggcctccaggggcgccgcggagcctgaggcccagctcagcaaccacctggccgaggagggccccgccgagggtagcggcgaggtcgcgcgcgtgaacggccgccgggaggacggagaggcgtccgagccccgggccctggggcaggagcacgacatcaccctcttcgtcaaggctggttatgatggtgagagtatcggaaattgcccgttttctcagcgtctctttatgattctctggctgaaaggcgttatatttaatgtgaccacagtggacctgaaaaggaaacccgcagacctgcagaacctggctcccggaacaaaccctcctttcatgacttttgatggtgaagtcaagacggatgtgaataagatcgaggagttcttagaggagaaattagctcccccgaggtatcccaagctggggacccaacatcccgaatctaattccgcaggaaatgacgtgtttgccaaattctcagcgtttataaaaaacacgaagaaggatgcaaatgagattcatgaaaagaacctgctgaaggccctgaggaagctggataattacttaaatagcccctctgccctgatgaaatagatgccctacagcaccgaggatgtcactgtttcttggaaggaaagttctggatggagaccaccctgcccttgctgcctggaacgctttacccaagccccatattattaagaatgtggccaagaagtacagagattttgaatttccttctgaaattgactggcatctgggagatacttgaataatgcttatgcttagagatgagttcacaaatacgtgtccagctgatcaagagattgaacacgcatattcagatgttgcaaaaagaatgaaatga

SEQ ID NO: 80773 - DNA, 1276 bp, Homo sapiens
  sig_peptide (1263)...(1128): this location contains the signal peptide sequence, MLVSKLMLQIVMAVPHYIMPVEMKNQSLIPLLLEARADPTIKNKH, Run with SignalP
  misc_feature (847)...(670): similar to gi5531906 in the genepept database release 114, Run with FASTXY 3.3t00, default parameters
agacaaataatccagatcctacctcattgtatagctctgtttcttgtgaagaactttatccaaataagttacaataatattttacatctatcaataaaataaacaaaactaacaagcttggcaaccaccttgtatttacaaaaggatcatgaagatttttttaaacgaacattttcatagttgcatagtcttgctcaaaccaagatggcttttatttgtaaaccgaaatctctagtggtatgctggtaaacgaactttatggaaagtaaaaaacaaaaaaacaaaaacaaactctgatttgtcaatttgccaatttctgtggtgtaaacacactcaccgctgacacttgatagatgtttttattgaaattccttcaccaaaggaatatttacttgtgaatctctaagcccacacacatacacaaataccattctgtacaaacatacgtatttaataatttgattcttctgctcaatactcaaagggggctgggaggaacagtttgtctcctagggcatgacatagactggacagtctttttataagagtgatacaactgggaagggagaacgctgtttcagaagataactcagatcctcttcttcaggaaagactgagtttggaacaccagggcttttgttttctcctttcaggtttgattgtggcagggtggttttaggacaggacaagagatctgggtgctggctgctctcaaactcctgagttcaagtgatcctcccacctcagcctcccaagtagctgggattacaggcatgtacctactgtgcctagctgaaacatcagtttctgactgaagtggagactacaacaactttagtgtttcccttagaaggattacggccatggtgaacttgactgagtaaacaatgctataaataaaaagctcttccaaaacattaaccatggtaagcatcattatccccataaaatggtggcatccaggttaaatggcccacagaccaaaagtctaaaatgaagatagaatccagtcgttaactttttctgtatctccatcggtgtggtcacaaggattacaatgctttccttagcattaattcaatctgggaaaattttaatctccgtgcaatatccagtgagctctcaccatgcttattctttattgtggggtctgcacgggcttccaagagcagagggataagagactggtttttcatttccacaggcataatgtaatgcggtacagccataacaatctgtagcattaacttcgacaccagcatcaagtagcattcgt

SEQ ID NO: 80774 - DNA, 417 bp, Homo sapiens
  sig_peptide (136)...(271): this location contains the signal peptide sequence, MNYRRSTKFPVLIMKVCVFLLHPDLPDGLSHSGVVRTNVNGASFV, Run with SignalP
  misc_feature (356)...(163): similar to gi1161054 in the genepept database release 114, Run with FASTXY 3.3t00, default parameters
atgacattgtacacattaaagaattatttttcatgctccttctcaaagttgatatgaatgattttcacttaatttccttttaagtttctttatgttcgagttactttggaaatactaaaaacactttatattaacatgaattatagaagaagtacaaagttcccagtgttgataatgaaagtctgtgtgtttctgctgcacccagatcttccagatggtttgtcacactctggggtagttagaacaaatgtgaatggagccagttttgtatttggtcatcacatcacatgttttcttctgagtagatgccagggacactttacatattgaggcagtaaacaaatagctagtaaattgttttcttccctgatctcttaactcaaaatggactataaaatatatccaaatgatattgtt

SEQ ID NO: 80775 - DNA, 1220 bp, Homo sapiens
  sig_peptide (617)...(752): this location contains the signal peptide sequence, MCLGLVTVAGAGGGGHRLCCCWACVSLKTFLSWRPLRRAALDLVC, Run with SignalP
  misc_feature (383)...(525): similar to gi1333929 in the genepept database release 114, Run with FASTXY 3.3t00, default parameters
gggtctatagccaggtttgtatgtgggggattcatgtatgcggtacgagtgcccctgaagatagacaagaaaacccttcttctggcaaagcagagggcactggggacccctcaagagggaaacattgctgtgtcagtctctgaaccaaaccgagggtcccagtagctgtgattcccggctctgagttctccctcctcactccttgctctcctcacccattgcggtttgggctggttctgcctccacaatgaccaggctgatgatggccccggcgctcaaactgcccctggtggagcctctctctgaccaccctgtcttctttgcccttttcctccccaggtggtagtcaactctccagccaagttagtatcaaaggacagcatgtgtgtgcgcttgcgtgccagccccagcatgtgtctgcgtgtgtctggcgtggatagagtgtgcctgctggcatgtgtacatgtatgtgcatatgtatgagtggggtacacttgtacccctgggtgagcctgcatgtgtgaagctggagtagaagcatttgggggtgggagtgggggctccatccgatggttctaatttcattcccaatttcctgctgcagcagctgcttaagatgtgcctggggttggtgacggtggcgggtgcagggggagggggacacaggctgtgctgctgctgggcctgtgtgagcctgaagacctttctgtcctggcgacccctcagaagggctgcactggatcttgtctgcccggggagcgcacctatccattggagggaagagccttctgtgggtagaggatggccagctactcagcacactggacttgagggggcctgggcagatggagccctgctctgaggaagaagcacattccctgaagcgtctggaagatcacagccctgggccaccaagggggtggcctgcaggaagagccccttcacggagaaaccttgctcagaatgcctgtgggtgccagtggagacgcttttcgcctttgttgcaatctggactgaactagcgatgccgattgcgacccctacctgctaacccatggttgcgatttcccctgctaggggaaaaggcagcatctttctcgggccggtcagcccttgctttacccggaggggggagcctccgcactcagaccaggccccgacggggaacctggggcaaatccgagtaggggaagggtagaaccttagtatggcccaaggcg

SEQ ID NO: 80776 - DNA, 2398 bp, Homo sapiens
  sig_peptide (1182)...(1317): this location contains the signal peptide sequence, MGAGCTPVVLGAALWLWRWFSRWGLGGLCWRPCTCTPCHSASPGA, Run with SignalP
  misc_feature (2310)...(1978): similar to gi33616 in the genepept database release 114, Run with FASTXY 3.3t00, default parameters
gagtccaaatatggtcccccgtgcccatcatgcccagcacctgagttcctggggggaccatcagtcttcctgttccccccaaaacccaaggacactctcatgatctcccggacccctgaggtcacgtgcgtggtggtggacgtgagccaggaagaccccgaggtccagttcaactggtacgtggatggcgtggaggtgcataatgccaagacaaagccgcgggaggagcagttcaacagcacgtaccgtgtggtcagcgtcctcaccgtcgtgcaccaggactggctgaacggcaaggagtacaagtgcaaggtctccaacaaaggcctcccgtcctccatcgagaaaaccatctccaaagccaaagggcagccccgagagccacaggtgtacaccctgcccccatcccaggaggagatgaccaagaaccaggtcagcctgacctgcctggtcaaaggcttctaccccagcgacatcgccgtggagtgggagagcaatgggcagccggagaacaactacaagaccacgcctcccgtgctggactccgacggctccttcttcctctacagcaggctaaccgtggacaagagcaggtggcaggaggggaatgtcttctcatgctccgtgatgcatgaggctctgcacaaccactacacacagaagagcctctccctgtctctgggtaaatgagtgccagggccggcaagcccccgctccccgggctctcggggtcgcgcgaggatgcttggcacgtaccccgtgtacatacttcccgggcgcccagcatggaaataaagcacccagcgctgccctgggaagtatgtacacggggtacgtgccaagcatcctcgtgcgaccccgagagcccggggagcgggggcttgccggccgtggcactcatttacccggagacagggagaggctcttctgtgtgtagtggttgtgcagagcctcatgcatcacggagcatgagaagacgttcccctgctgccacctgctcttgtccacggtgagcttgctgtagaggaagaaggagccgtcggagtccagcacgggaggcgtggtcttgtagttgttctccggctgcccattgctctcccactccacggcgatgtcgctgggatagaagcctttgaccaggcaggtcaggctgacctggttcttggtcatctcctcccgggatgggggcagggtgtacacctgtggttctcggggctgccctttggctttggagatggttttctcgatgggggctgggagggctttgttggagaccttgcacttgtactccttgccattcagccagtcctggtgcaggacggtgaggacgctgaccacacggtacgtgctgttgtactgctcctcccgcggctttgtcttggcattatgcacctccacgccgtccacgtaccagttgaacttgacctcagggtcttcgtggctcacgtccaccaccacgcatgtgacctcaggggtccgggagatcatgagggtgtccttgggttttggggggaagaggaagactgacggtccccccaggagttcaggtgctgggcacggggcacggtgggcatgtgtgagttttgtcacaagatttgggctcaactttcttgtccaccttggtgttgctgggcttgtgattcacgttgcagatgtaggtctgggtgcccaagctgctggagggcacggtcaccacgctgctgagggagtagagtcctgaggactgtaggacagccgggaaggtgtgcacgccgctggtcagggcgcctgagttccacgacaccgtcaccggttcggggaagtagtccttgaccaggcagcccagggccgctgtgcccccagaggtgctcttggaggagggtgccagggggaagaccgatgggcccttggtggaggctgaggagacggtgaccagggttccctggccccagacgtccataccgtagtagttcttcagaccgtgccttatggggatatcttttacacagtaatatacggccgtgtcctcaagtctcaggctgttcatttgcagatacagtgagttcttggcgttgtctctggagacggtgaaccggcccttcacggagtccgcggaatagattctactactactactactaatagttgagacccactccagccccttccctggagcctggcggacccagttcatggtatagtgactgaagctgaatccagagcgttgtacaggagagtctcagggaccttacaggctggagctcgcctccgccacgactccaccatcggcgactgtcactggataaatcttaaaagagcaacgagtaaataaacagctcagcccatgctccatgttgagtcctctttgttacagtgatggtctccgaatggaaacaccgccgacttctagtgctgggct

SEQ ID NO: 80777 - DNA, 6358 bp, Homo sapiens
  sig_peptide (1351)...(1486): this location contains the signal peptide sequence, MKDHLEFPFLDLLDLTDSLGLLGFQGLLALLALTFLLVMRYVNQA, Run with SignalP
  misc_feature (372)...(5185): similar to gi1314210 in the genepept database release 114, Run with FASTXY 3.3t00, default parameters
ctcactgtccctctccggctctagctctctccatataaaccctcaagattatgtcaattggttagagccagccgggaatttcgtgcgggtgctgaaggagctgcgggagccggagaagaatgaaactgcgtggagtcagcctggctgccggcttgttcttactggccctgagtctttgggggcagcctgcagaggctgcggcttgctatgggtgttctccaggatcaaagtgtgactgcagtggcataaaaggggaaaagggagagagagggtttccaggtttggaaggacacccaggattgcctggatttccaggtccagaagggcctccggggcctcggggacaaaagggtgatgatggaattccagggccaccaggaccaaaaggaatcagaggtcctcctggacttcctggatttccagggacaccaggtcttcctggaatgccaggccacgatggggccccaggacctcaaggtattcccggatgcaatggaaccaagggagaacgtggatttccaggcagtccccggttttcttggtttacggggtccctccaggaccccctgggatcccaggtataaagggggaaccaggtagtataattatgttatcactgccccgaccatagggctaatccaggatatccaggtcctcctggaatacaaggcctacctggtcccactggtataccagggccaattggtcccccaggaccaccaggtttgatgggccctcctggtccaccaggacttccaggacctaaggggaatatgggcttaaatttccagggacccaaaggtgaaaaaggtgagcaaggtcttcagggcccacctgggccacctgggcagatcagtgaacagaaaagaccaattgatgtagagtttcagaaaggagatcagggacttcctggtgaccgagggcctcctggacctccagggatacgtggtcctccaggtcccccaggtggtgagaaaggtgagaagggtgagcaaggagagccaggcaaaagaggtaaaccaggcaaagatggagaaaatggccaaccaggaattcctgtaatgcctggtgatcctggttaccctggtgaacccggaagggatggtgaaaagggccaaaaaggtgacactggcccacctggacctcctggacttgtaattcctagacctgggactggtataactataggagaaaaaggaaacattgggttgcctgggttgcctggagaaaaaggagagcgaggatttcctggaatacagggtccacctggccttcctggacctccaggggctgcagttatgggtcctcctggccctcctggatttcctggagaaaggggtcagaaaggtgatgaaggaccacctggaatttccattcctggacctcctggacttgacggacagcctggggctcctgggcttccagggcctcctggccctgctggccctcacattcctcctagtgatgagatatgtgaaccaggccctccaggccccccaggatctccaggtgataaaggactccaaggagaacaaggagtgaaaggtgacaaaggtgacacttgcttcaactgcattggaactggtatttcagggcctccaggtcaacctggtttgccaggtctcccaggtcctccaggatctcttggtttccctggacagaaaggggaaaaaggacaagctggtgcaactggtcccaaaggattaccaggcattccaggagctccaggtgctccaggctttcctggatctaaaggtgaacctggtgatatcctcacttttccaggaatgaagggtgacaaaggagagttgggttcccctggagctccagggcttcctggtttacctggcactcctggacaggatggattgccagggcttcctggcccgaaaggagagcctggtggaattacttttaagggtgaaagaggtccccctgggaacccaggtttaccaggcctcccagggaatatagggcctatgggtccccctggtttcggccctccagggcccagtaggtgaaaaaggcatacaaggtgtggcaggaaatccaggccagccaggaataccaggtcctaaaggggatccaggtcagactataacccagccggggaagcctggcttgcctggtaacccaggcagagatggtgatgtaggtcttccaggtgaccctggacttccagggcaaccaggcttgccagggatacctggtagcaaaggagaaccaggtatccctggaattgggcttcctggaccacctggtcccaaaggctttcctggaattccaggacctccaggagcacctgggacacctggaagaattggtctagaaggccctcctgggccacccggctttccaggaccaaagggttgaaccaggatttgcattacctgggccacctgggccaccaggacttccaggtttcaaaggagcacttggtccaaaaggtgatcgtggtttcccaggacctccgggtcctccaggacgcactggcttagatgggctccctggaccaaaaggtgatgttggaccaaatggacaacctggaccaatgggacctcctgggctgccaggaataggtgttcagggaccaccaggaccaccagggattcctgggccaataggtcaacctggtttacatggaataccaggagagaagggggatccaggacctcctggacttgatgttccaggacccccaggtgaaagaggcagtccagggatccccggagcacctggtcctataggacctccaggatcaccagggcttccaggaaaagcaggtcggtctggatttccaggtaccaaaggtgaaatgggtatgatgggacctccaggcccaccaggacctttgggaattcctggcaggagtggtgtacctggtcttaaaggtgatgatggcttgcagggtcagccaggacttcctggccctacaggagaaaaaggtagtaaaggagagcctggccttccaggccctcctggaccaatggatccaaatcttctgggctcaaaaggagagaagggggaacctggcttaccaggtatacctggagtttcagggccaaaaggttatcagggtttgcctggagacccagggcaacctggactgagtggacaacctggattaccaggaccaccaggtcccaaaggtaaccctggtctccctggacagccaggtcttataggacctcctggacttaaaggaaccatcggtgatatgggttttccagggcctcagggtgtggaagggcctcctggaccttctggagttcctggacaacctggctccccaggattacctggacagaaaggcgacaaaggtgatcctggtatttcaagcattggtcttccaggtcttcctggtccaaagggtgagcctggtctgcctggatacccagggaaccctggtatcaaaggttctgtgggagatcctggtttgcccggattaccaggaacccctggagcaaaaggacaaccaggccttcctggattcccaggaaccccaggccctcctggaccaaaaggtattagtggccctcctgggaaccccggccttccaggagaacctggtcctgtaggtggtggaggtcatcctgggcaaccagggcctccaggcgaaaaaggcaaacccggtcaagatggtattcctggaccagctggacagaagggtgaaccaggtcaaccaggctttggaaacccaggaccccctggacttccaggactttctggccaaaagggtgatggaggattacctgggattccaggaaatcctggccttccaggtccaaagggcgaaccaggctttcacggtttccctggtgtgcagggtcccccaggccctcctggttctccgggtccagctctggaaggacctaaaggcaaccctgggccccaaggtcctcctgggagaccaggtctaccaggtccagaaggtcctccaggtctccctggaaatggaggtattaaaggagagaagggaaatccaggccaacctgggctacctggcttgcctggtttgaaaggagatcaaggaccaccaggactccagggtaatcctggccggccgggtctcaatggaatgaaaggagatcctggtctccctggtgttccaggattcccaggcatgaaaggacccagtggagtacctggatcagctggccctgagggggaaccgggacttattggtcctccaggccctcctggattacctggtccttcaggacagagtatcataattaaaggagatgctggtcctccaggaatccctggccagcctgggctaaagggtctaccaggaccccaaggacctcaaggcttaccaggtccaactggccctccaggagatcctggacgcaatggactccctggctttgatggtgcaggagggcgcaaaggagacccaggtctgccaggacagccaggtacccgtggtttggatggtccccctggtccagatggattgcaaggtcccccaggtccccctggaacctcctctgttgcacatggatttcttattacacgccacagccagacaacggatgcaccacaatgcccacagggaacacttcaggtctatgaaggcttttctctcctgtatgtacaaggaaataaaagagcccacggtcaagacttggggacggctggcagctgccttcgtcgctttagtaccatgcctttcatgttctgcaacatcaataatgtttgcaactttgcttcaagaaatgactattcttactggctctctaccccagagccccatgccaatgagcatgcaacccctaaagggccagagcatccagccattcattagtcgatgtgcagtatgtgaagctccagctgtggtgatcgcagttcacagtcagacgatccagattccccattgtcctcagggatgggattctctgtggattggttattccttcatgatgcatacaagtgcaggggcagaaggctcaggtcaagccctagcctcccctggttcctgcttggaagagtttcgttcagctcccttcatcgaatgtcatgggaggggtacctgtaactactatgccaactcctacagcttttggctggcaactgtagatgtgtcagacatgttcagtaaacctcagtcagaaacgctgaaagcaggagacttgaggacacgaattagccgatgtcaagtgtgcatgaagaggacataacattttgaagaattccttttgtgttttaaaatgtgatatatatatatataaaattcctaggatgcagtgtctcattgtccccaactttactactgctgccgtcaatggtgctactatatatgatcaagataacatgctgactagtaaccatgaagattcagatgtacctcagcaatgcgccagagcaaagtctctattatttttctactaaagaaataaggaagtgaatttactttttgggtccagaatgactttctccaagaattataagatgaaaattatatattttgcccagttactaaaatggtacattaaaaattcaattaagagaagagtcacattgagtaaaataaaagactgcagtttgtgggaagaattatttttcacggtgctactaatcctgctgtatcccgggtttttaatataaaggtgttaagcttattttgctttgtaagtaaagaatgtgtatattgtgaacagccttttagctcaaaatgttgagtcatttacatatgacatagcatgaatcactctttacagaaaatgtaggaaaccctagaatacagacagcaatattttatattcatgtttatcaaagtgagaggacttatattcctacatcaagttactactgagagtaaatttattttgagttttatcccgtaagttctgttttgattttttttaaaaaacaaacccttttagtcactttaatcagaattttaaatgttcatgttacataccaaattataatatctaatggagcaatttgtcttttgctatattctccaagattatctcttaagaccatatgccccctgttttaatgtttcttacatcttgtttttactcatttctgactggacaaagttcttccaaacaattctgagaaacaaaaacacacacgcagaattaacaattcttttccctgtgcttcttatgtaagaatcctcctgtggcctctgcttgtacagaactgggaaacaacgacttggttagtctcttttaagttacgaaaaagccaattgatgtttcttattctttttaaattttaaatattttgttataaatactcacaggataccttatttccctagctatcatctccttgacttaatgttttttaaacccaccgaatataaatttaattaaagatatatgttgtaaaaaaaaaa

SEQ ID NO: 80778 - DNA, 1432 bp, Homo sapiens
  sig_peptide (229)...(364): this location contains the signal peptide sequence, MTARFLLARPAYSSALLRGLGGPRTPLIQFSRCGMMSIRLLGLFP, Run with SignalP
  misc_feature (868)...(480): similar to gi1710216 in the genepept database release 114, Run with FASTXY 3.3t00, default parameters
tttgttttttgatgggaacagaggtgtttagagaaagcctctgagtatgcctttcagattttgaacaagcggccttttctaaacatcgacttctactactctctagccttaaaataccttctgcttagatccagggcccttctactggagataggaaaagtagaattcaggaattaaaagaattactctttattcaatttgaggaacttggtgaaagcccctcctcttatgacagccaggttcctgctggctagaccagcctattccagcgctttgctaaggggattgggtggtccacgcactccgctaatacagttctccaggtgtggaatgatgtcaatacgattgcttggccttttccccctgtgcctttgctcggtgctctggtttcctcagcaacactccttgtaaggggcagagacagggtccaccaactccccaagatgaagaagccccttcaggccagtcgtggtggctcatgcctgtaatcccagcactttgcaaggccgaggagggtggatcacttgaggtcaggagttcgagaccagcctgaccaacatggcgaaaccccatctctactaaaaatacaaaaattagcttggcatggtggtgcgtgcctgtaatcccagctactcgggaggctggggcaggagaattgcttgaacttgggagatggaggctgcagcgagccaagatcgtgccactgcactccagcctgggcaagagtttttttaagactcttaaaaaaagagcctgggcaatttttttaagactctgtcttaaaaaaaactaaaaagaaaaaaagaagccccttcactctacaggggacaggagaccatggattggaccccaaagggattgaactgcatctgcatgtctgtcctttgaacactttctctccctgcccaaaaggaaacccaaattatttgtgggatactggggaaattgtagtgaagggcttaatgtagttaataaaagttaaaagtcagtagaaaacaggtgcctcagccttcaaatggttgctttttttccattttccctcatgaatagactcaccagcattttacccccttgttataaaactgtgcagagcaagaagatgatacttatttttgaatttgtatttttaaaactagatttatagactttttttttttttaactagggcacttggtttcttttttagttaaaacccccagctgaaatttttcagggaattttggtggtaactcacttaaaacgggaataaaaaggttccgggaatttctaattttttcccctgcctatgaaaaaacctcatctaattttgacatctttcctaggggaaaaaatatccaggttaatacccgtggttggggggaaaaagaataccacttttaaaaccggaaaacctttttatgaaggcccttgtcaccttggggtaaaaaaaaaa

SEQ ID NO: 80779 - DNA, 4434 bp, Homo sapiens
  sig_peptide (923)...(1058): this location contains the signal peptide sequence, MDSTFLATRAVRGQLYLWISMLTIATGKLCARCYPENQDHIIQML, Run with SignalP
  misc_feature (60)...(3458): similar to gi1502311 in the genepept database release 114, Run with FASTXY 3.3t00, default parameters
ttttttttttttgccgcccactcagactttattcaaagaccacgggcgaccggagcgcgatggcgggggcggcgggactcacggcagaagtgagctggaaggtcttggagcgaagagctcggaccaagcgctcagttttaaaattgctatagcttagcctgcgacgcttatgattagagccaacaatttgaaatggcctgctcacctgatgcagtcgtctctccgtcttccgctttcttaaggtctggctcagtttatgaacctcttaaaagcattaatcttccaagacctgataatgaaactctctgggataagttggaccattattacagaattgtcaagtcaacattgctgctgtatcaaagtccaactaccggtctctttcccactaaaacatgcggtggtgaccagaaggccaagatccaggacagcctatactgcgctgctggggcctgggctttggctcttgcatacaggcgaattgatgatgacaagggaaggacccatgagctggagcactcagctataaaatgcatgagaggaattctctactgctatatgcgtcaggccgataaggtccagcagtttaagcaggatccacgcccaacaacatgtcttcactctgttttcaatgtgcatacaggagatgagttgctttcctatgaggaatatggtcatcttcagataaatgcagtgtcactttatctcctttaccttgtggaaatgatttcctcaggactccagattatctacaacactgatgaggtctcttttattcaaaaccttgtattttgtgtggaaagagtttaccgtgtgcctgactttggtgtctgggaaagaggaagcaaatataataatggcagcacagagctacattcgagctcggttggtttaggcaaaaggcagctctagaagcaatttaatggattcaacctttttggcaaccagggctgttcgtggtcagttatatttgtggatctcgatgctcacaatcgcaacaggcaaactttgtgctcgctgttacccagagaatcaagatcacataatacagatgctgccctgctcccctgcatcagttatcctgcatttgccctggatgatgaagttctttttagccagacacttgataaagtggttagaaaattaaaaggaaaatatggatttaaacgtttcttgagagatgggtatagaacatcattggaagatcccaacagatgctacctacaagccagctgaaattaagctatttgatggcattgaatgtgaatttcccatatttttcctttatatgatgattgatggagtttttagaggcaatcctaagcaagtacaggaatatcaggatcttttgactccagtacttcatcataccacagaaggatatcctgttgtaccaaagtactattatgtgccagctgactttgtagaatatgaaaaaaataaccctggtagtcaaaaacgatttcctagcaactgtggccgtgatggaaaactgtttctttggggacaagcactttatatcatcgcaaaactcctggctgatgaacttattagtcctaaagacattgatcctgtccagcgctatgtcccactaaaggatcaacgtaacgtgagcatgaggttttccaatcagggcccactggaaaatgacttggtagttcatgtggcacttatagcagaaagccaaagacttcaagtttttctgaacacatatggtattcaaactcaaactcctcaacaagtagaacccattcagatatggcctcagcaggagcttgtgaaagcttatttgcagctgggtatcaatgaaaagttaggactctctggaaggccagacaggcccattggctgcctcgggacatcaaagatttatcgcattctaggaaagactgtggtttgttacccgattattttcgacctaagtgatttctacatgtctcaggatgttttcctgctgatagatgacataaagaatgcgctgcagttcattaaacaatattggaaaatgcatggacgtccacttttccttgttctcatccgggaagacaatataagaggtagccggttcaaccccatattagatatgctggcagcccttaaaaaaggaataattggaggagtcaaagttcatgtggatcgtctacagacactaatatctggagctgtggtagaacaacttgatttcctacgaatcagtgacacagaagagcttccagaatttaagagttttgaggaactagaacctcccaaacattcaaaagtcaaacggcaaagcagcacccctagtgctcctgaactgggacagcagccggatgtcaacattagtgaatggaaggacaaacccacccacgaaattcttcaaaaactgaatgattgcagttgtctggctagccaagccatcctgctgggtatactgctcaaaagagaaggccccaacttcatcacaaaggaaggtaccgtttctgatcacattgagagagtctatagaagagctggcagccaaaaactttggtcggttgtacgccgtgcagcaagtcttttaagtaaagtagtggacagcctggccccatccattactaatgttttagtgcagggcaaacaggtaactctgggtgcctttgggcatgaagaagaagttatctctaatcctttgtctccaagagtgattcaaaacatcatctattataagtgtaacacccatgatgagagggaagcggtcattcagcaagaactggtcatccatattggctggatcatctccaataaccctgagttattcagtggcacgctgaaaatacgaatcgggtggatcatccatgccatggagtatgaacttcagatccgtggcggagacaagccagccttggacttgtatcagctgtcacctagtgaagttaaacagcttctgctggatattctgcagcctcaacagaatggaagatgttggctgaacaggcgtcagatcgatgggtctttgaatagaactcccaccgggttctatgaccgagtgtggcagattctggagcgcacgcccaatgggatcattgttgctgggaagcatttgcctcagcaaccaaccctgtcagatatgaccatgtatgagatgaatttctctctccttgttgaagacacgttgggaaatattgaccagccacagtacagacagatcgttgtagagttacttatggttgtatccattgtactggaaagaaaccccgagctagaatttcaagacaaagtagatctagacagactggtcaaagaagcatttaatgaatttcaaaaagatcagagtcggctaaaggaaattgaaaaacaagatgacatgacttccttttacaacactcctcccctgggaaaaagaggaacatgcagctatttgacaaaggcggtgatgaatctgctgctggaaggagaagtcaagccaaacaatgatgacccgtgtctgattagctagtggggaaggtgtaggaagctctgttgagacacatgttctgaagtgtgttgtgtttcatgttcaagcttaatcaaggcagccattaatatacgaactgagcatgctggggaggtgaatgccacatccttggcggggttatggacctcttgcatgtcatagccaatctaacggtaatggtaaatgcttttaatcaagcaggaaaaagttctcatgattatgccaactataatagtaatcctcactgagtgataaaaatagtttatgaattgaaaatttgccgctgcatgttgtatgatcaaatagttcatcaaaatgaatctttgctctttggactgaattcttaccatactgccattaaaataaatttgccaactagtaatgcatactggaaatcaaaagatactgaaagaatggtgaacttctcttagtggtattgtcatgctaaaagatgttaatatacatcataaaagcaaagtcagccagctgatattttggttctcaaaaactgcattattaataatattttagtatacagagctattctacagtttttacattgtaaacatgactgtggttttgtatttgctaaatataggggttggactaaaatataataaatctgtaccttatcaaacattttctttgagctcctgctaaaaataggacatgtctatgattgttcaaaaatatgttaaatttaggctcagcacagtagctcacacctgaaatcttagcacttcgggaggctgaggcaggtggatcacttgaggttaggagttcaagaccagcccagccaacatggtgaaaaccctgtctctactaaaaatacaaaaattagccaggcatgatggtgcatgcctttaaacccagctactgaggaggctgaggcatgagaattgcttgaaccaggagacggaggttgcagtgagctgaaatcctgccactgcacaccagcctgggtgacagagcgagactcc

SEQ ID NO: 80780 - DNA, 858 bp, Homo sapiens
  sig_peptide (49)...(184): this location contains the signal peptide sequence, MMAKSVRFCYVLFVEEIRFAVLVVQRLAKSDLWAKSGLLSIFIFI, Run with SignalP
  misc_feature (329)...(477): similar to gi1171585 in the genepept database release 114, Run with FASTXY 3.3t00, default parameters
agagggtgggaaagaagttaaagttaattattttaggagtggtgtggaatgatggcaaagtcagtcaggttttgttatgtcctttttgtagaagaaataagatttgctgttcttgtggtgcagaggttggcaaagtctgacctttgggctaaatctggcctgctctctatttttatatttataagcaaagtgttactgaaacagacacacctgttggtttgtaggatgtatattgctgcttttgccttatgatggcagaattgagtagttgcaacagagagtatatgagctgcatagatgaaactatttactctctggcccattacaaaagtttaaccctgatctagtgaagaaaaattacctaaatttttccaagttgaagacgatcaatgtatgaatttttatagaagtgttacattttttacaaagggtacgtcatatggttaaagctactaatttgaatctgtttcatttttcatttgatttctgataaaaggttatctttggagtttaccaatttttgacattcgtgattttaaaaatattttctctgaatagaccactttgcactgaattgcgaatttttttgctatcctctttcactcggaaacacgccatccatgaagtcaactctttctacaatgaggcctacaattttccatgggtccattatcctggggagcaaaaataacccacttgaagggtatttttagaaacggctcctgcgggcttgaatgcgaccttgtctctggccctccgcctgccaccgaggcgaggtggggcccgatactttttttttacactttggggcacgctctccccgcgcttgccccaaccgaacggccgccggggcccccg

SEQ ID NO: 80781 - DNA, 3530 bp, Homo sapiens
  sig_peptide (684)...(819): this location contains the signal peptide sequence, MIYFLSTPLLLTLFNILMTFFFVAPPLNLLNKTHFCFFSSYSLKD, Run with SignalP
  misc_feature (3088)...(919): similar to gi4759949 in the genepept database release 114, Run with FASTXY 3.3t00, default parameters
ccaggtctaattcctgcatgacaaggatggctctcaaaactgctgcagtgcagagaggcgctagaaaagtggggaataacaagtgctctggggactgcaaggaagaggcatttaaactgcatcttgaaggaaaaagtacttgctggacaaaaagagccatcatgcaatttaatatttgtaaaataaatgaaaaataagtaaccctatccaacagaagacttttaaaaagatggcccagtaatgaagagcagagaaattaatctttctttcccacagtaggctttaaagggactgaagcctgttatcactcgcctgctacagcttgggcttctaaagcctacaaactctccttacaattcccccattttacctgtcccaaaactggacaagtcttacaggttagttcaggatctgcgccttagcaaccaaattgttttgcctatccaccctgtggtgcccaacccgtacactcttttgtcctcaataccttcctccacaactcactattccgtgcttgatcttaaagatgcttttttcactattcccctgcaccccttgtcccagcctctctttgctttcacttggactgaccctgacacccatcagtcccagcagcttacctgggctgtgctgccgcagggtttcaggggacagccctcattacttcagccaagctctttctcatgatctactttctttccacccctctgcttctcaccttattcaatatattgatgaccttcttctttgtagcccctcctttgaatcttctcaacaagacacacttctgcttcttcagcagttattctctaaaggatttcaggtgtcctcctccaaagctcaaatttcttctccatccgtaatctacctcagcataattcttcataaaaatgcacatgctctccctgccgatcgctggccatcatgtctccgtgcagccgctgctgctgccctaatacttgtagaggccctcaaaatcacaaactatgctcaactcactctctacagctctcataatttccaaaatctattttcttcctcacacctgacacatatactttctgctccccggctccttctgctatactcactctttgttgagtctcccacaattaccattgttcctggcctggacttaaatgcggcctcccacattattccggataccacacctgaccctcatgactgcatctctctgatccacctgacattcaccccatttccccatatttccttctttcgtgttcctcacccttatcacatttggtttattgatggcagttccaccaggcctaaccgccactcaccagcaaaggcaggctatgctatagtatcttccacatctatcattgaggctactgctctgcccccctccactacctctcagcaagccgaactagttgccttaactcaagccctcactcttgcaaaaggactatgcgtcaatatttatactgactctaaatatgcctttcatatcctgcaccaccatgctgttatacaggctgaaagaggtttcctcactacgcaagcgtcctccatcattaatgcctctttaataaaaactctgcttaaggccgctttacttccaaaagaagctggggtcattcactgcaaggggcatcaaaaggcatcagatcccgttgctctagacaatgcttatgctgataaggtggctagacaagcagctagctttccaacttctgtccttcacggccagtttctctccttcacatcgttcactcccacctactcctccgctgaaacttccacctatcaatcccttcccacacaaggcaaatggttcttagaccaaggaaaatatctccttccagcctcacaggcccattctattctgtcgtcatttcataacctcttccatgtaggttacaagccgctagcccgtctcttagaacctctcatttcctttccatcctggaaatctatcctcaaggagatcacttctcagtgttccatctgctattctactacccctcagggattgttcaggccccctcccttccctacacatcaagctcaaggatttgtccctgcccaggactggcaagttgactttactcacatgccccgagtcagaaaacgaaagtatctcttagtctaggtagacactttcactggataggtagaggcctttcctgcagggtctgagaaggccaccgcagtcatttcttccattctgtcagacataattcctcagtttagccttcccacctcaatacagtctgataacaggtgagcctttattagtcaaatcagccaagcagtttttcaggctcttagtattctgtgaaacctttatatcccttaaggtcctccatcttcaagaaaagtagaatggactaaaggtcttttaaaaatacacctcaccaagctcagccaccaacttaaaaaggactggacaatacttttaccactttcccttctcagaattcaggcctgtcctcagaatgctacagggtacagcccatttaagctcctgtatagatgctcctttttattaggccccagtctcattccagacaccagaccaacttagactgtgccccaaaaaacttgtcatccctactatcttctgtctagtcatactcctattcaccattctcaactactcatacatgccctgctcttgtttacactgccggtttacactgtttctccaagccatcacagctgatatctcctggtgctatccccaaactgccactcttaactcttgaagtaaataaataatctttcctggcaggactatgctgaatctccttaagcactctctaatcagacatcctgagtcgtcccaattcttagaccttttatacctgtttttctccttctgttattccatttagtttttcaattcatacaaaaccgtatccaggccatcaccaatcattctatatgacaaatgtttcttctaacaaccccacaatatcaccccttaccacaagacctcccttcagcttaatctctcccgctctaggttcccacgccgcccctaatcccgcttgaagcagccctgagaaacatcgcccattctctctccataccaccccccaaaaattttcgccaccccaacacttcaacactattttgttttatttttcttattaacataaggcaggaatgtcaggcctctgagcccaagccaagccatcggcatctcctgtgacttgcacgtatacacccagatggcctgaagtaactgaagaatcacaaaagtgaaaaggccctgccccgcattaactgatgacattccaccattgtgatttgttcctgccccaccttaactgagtgattaaccctgtgaatttccttctcctggctcagaagctccccaactgagcaccttgtgacccccacccctgcccaccagagaacaacccccttttactgtaattttcctttaccaacccaaatcctataaaatggccccaccccatctcccttcgctgactctctttttggactcagcccgcctgcacccaggtgaaataaacagccatgttgctcaa

SEQ ID NO: 80782 - DNA, 11519 bp, Homo sapiens
  sig_peptide (2697)...(2562): this location contains the signal peptide sequence, MLFIVTALLCCGLCNGVLIEETEIVMPTPKPELWAETNFPLAPWK, Run with SignalP
  misc_feature (10705)...(3539): similar to gi1216394 in the genepept database release 114, Run with FASTXY 3.3t00, default parameters
gaagttaaatagtgaatactctttttattcagaagaatgcatttttaatagaatttcatgcgccagtaaatcagtacagtgaggagttacaggggtggggaacctctcttcaggaaacatctcaccctggcagagctctcaactcccagaatcccctttacccagctcaggtgattagagaccaaggaacagcagatggggctgacttgcagggtaactggttggatttataggtctctgagagcaagagagaggagaggaaagctcttgtaaaggaggagattattatattggaacgggcagttccacagagattctctgagaggttgatgaaggagaattggcaggggtgcctggttctccttcttggttacactcttcaagggcaatggtctggtctcttccgtctgtctctgagcctctggttcgcagtcgaggccacttcttccactctatggctagcactacccccaaggctacaacaaccaccacgattaggctacttcggacaatgttccctacagtgcactcctgagcaacaggccctgctgcccccaccagctccaggggatcactaggctctgaccagatatcagggtaggcctggaggcggtagctgcagctgtagtttccaatgccttttccttctacgttgttgatgacaaagtctccatcctctgaaaactgctgaggtgcttcttctccatcatgttctagaacaaattcaacacctggcaggggtcctcggcactgaagggtgatgtccttccctaacttgaacatggtgctgggccaggctgacagagagggtttagggggcttatcagtcacccagatctccagggagtcactgtgatttgaagctgcaaagggagtagagtccaaataataaacacagctatagatcccagagtcttcacctctcactgctggcatccagaagtcagccctgtacccacttggcctctgttgctctaaaggctcctgagccccctccttcaacaggacaaatgttgagtctggcagttccccttgacactgaagagtcatattttcgccaggggccaccatgggaccaggctgggctaataggctgggtttggggagtaagcctgtgactaggagttccagggtgttgctaggttgtatcttgatagaactggtccagtcagggtggtagcagcagctgtaacgccccatgctagtaccagatatattggtgatggggaatgccccgtcattactggtggatccccagagctgcattgaagtggcttctccttctttgtgcagaatgtatcctactccatggaccggccctcggcaccagagagtaacattctgccccatgggaaccacagaactgggctcagcaaacaaccatggcttagggaatgtgtcagtcacccagatcataaggggcatactgagatatgaccccctgtttgacatggttgtctcatagtagatacagctatagttcccagagtcctctgctccaacagtgtggagaaggaagtcagctgagttccctgagacactccgaaactgtaagggaacatgggctccctcctgcaagagggcgaacctcatgccctggaaagtcccttggcagcgcaggatcacactcttcccaggaaacaccacaggacctggctgtgccaggagagtgggtttggggtagaattctgtcaccacgagctccacagggtcgctgggctcagaccagatagaaaagtcataatatcggcagctgtaattccctccatcaccaatgcccaccgaaatgattagaaagtgagctgcactggcccccggacttgcccaggacctgtcactggatgctatttcacttccatctttgtaaagaataaagctcatatgctggtggggggtggagcaattgaaagtcactcgggcaccaggggtgaccacagggctggcccatgtcttgaagaagggcttagggtacatttcttttatgacaagctccagcggctcactgggctcagaccacttgaaggggcgtttttcagtgtgagtgcggcagctgtaattgccttcgtctttatcctccattctctggattgtaaagaaggcttctcttccaacagcaccaagttgctggacaggttcttgctctccctccttatacagagcaaaccccatgcctgccagccatcctttgcaccggagttgtagttcctggccccggattgtgggggaagcagaaatgacaggtttggggaggatgtctgtccccaccagctcaagtgcctcactgggctccgatacagccatctcctcccatgaatggcagtggtagctcccggtgtggctctgggtcagggcgccaagggggaaggcagcccggacctgctctgaggccgggcgagtggcgatccacccggtcccatccttcagcaacacaaactccttagttgagccagaagggcttctgcaccagagggttaagttcttccacggggccagaggaaagttggtctctgcccacagctcaggcttaggggttggcatgactatttcagtctcttctatcaataccccattgcacagtccacagcagagaagggccgtgactatgaagagcatggtgaccccttgagctgttcccagcaaccaggcttctctgattctgagtctccgacacttccaccttatccacagcactaccaacagcaaggcaacaagctgcatgattagagacaacctgatagcttcattcagaacgtaattccaggtgagatagcctgctggccccatcagcttcaggggctcactgcgatgtgaccagatgttaggatgtgtctctacgcgatagctgcaactgtaggtccctgtgcctttcccgtcaacattactgatgatgaagtctccgtttactgagaatttttggaatgtttctctttcttcccattccagagaaaactccagtactggatgagatactcggcactgaagggtgatggcctttcctagcttgaacacagtgcttggccaagctgacagggagggtttggggggcttatctacaaccataagctccacagtgttgtgtgatggcatcctaatggaggtcttccaggtgagaagatagtggcagctatagatgccagtatcactgtaggttacattgttgaggaagaatgatgtgttgtcatcgatgctggtggcatccaaaaattgaagtggtttgtcttctcctttcttatagagtgcaagacccactccatccactggtcctcgacaccgtaggctcacattctgacccatttggaccacagcactgggccgagcaagtagccaggtcttggggaaagtgtcagttacccagattttcaggacatcactaaggagtgaacctctatatgatgcgtcatagtaaaaacagaggtaatgtccagtatcttggatcttcaaagactggaagaagaaatttgcctcattttttattgtcttcttgtggtaaaaggacttctccaagtcttcaaccctcattagagcaaaggtcattccatagattggcccttggcacctgagattcaggctttctccaggtgccatgatgggcccaggatgggctgtcaaagttggtttggggtagagtcctgctacaaccagcttcagggggttgctgggctctgaccacagggtggggagcatctggatatgagtgcggcagatgtaaaccccttcatcctcaggtgtcaggttgtcaatggagaatatggccattgtcccagttgggacttggtaatccacaggctctgcatatccctctttaaacagcatgaataccaaatcctgcagccagccatggcagaggatgttaacattacacccaggaagagcgggggtctcagcctgaatccagaagatgggcttgggcagttggcctggtgcctccaactctagaactttactgggctttgaccagcctgtctccttccagtagcagcaccggtaaagacctgcattggactcagtaagggcacctataaggaatgaaacttggaaggtcttgtgggaagggcggatccaggtcatctgtgtcttatccttcagcagcaggaacttgcttgatatccgagaggggcttcggcaccaaagcgtgatgttctcccaaggggcctgggggtagttggactctatccacaactccggttgagggtccatcagaatgcaaaagagcaaaacagtgaatgtcttcagcatggtggccccctcccctggtctgtccagggtcatggggcctctggtgctggctgtgtgctctgagtcttgaagaatttttctcctcagcaggtggtgggatggtagttgaaggcccgctccgatgttggagattctccagtgagctcctccagatgcagcaaactgtagtcccagccactcggaaggctgagaggcaggaggatcacttgaacccaggaggctgaagctgcagtgagtggagatggcaccagtgcattccagcctgggtgacagagagaggctttctttcccctctccaggatgtgtgtagaaagaagatatctggaatttctcaggagactgagaaaacagcaaactcctccttcaacatctcttcttctcccacttttatccggtcagtttcatggcccagacccagtcaagaactcttcttctctgctagtgtttctcataagggtatagttgtctgcataccaatagctggataaacactaaagctctttcttaggaacgctagtagccagaaaaatctcttccatctcactgatcccaaatcttcccatgttgcagccagaaaccaccttgcaaaagtcaccaggcagagtcttcacttaggctggtatcaaataatgattcattcatcaggattgaattgaaaactcttgagtgccagaaaggattccttgttagacaggatggtctcgatctcctgacctcgtgatccacccgcctcagcctcccaaagtgctgggattacaggcatgagccactgcgcccggccaataagctgattcttaatggagatgacaggaactattctgcttgaccagtagagtgctttccaagatcttgatcatcatttcactggtagattattgcagaaaccctcatgctcctaaacgaccataagaaactgagctcaaatttgaaggcatcacttgtatcttaaaagcagaatggaggagccaagatggccgaataggaacagctctagtctacagctcccagcgtgagcgccgcagaagacgggtgatttctgcattttccatctgaggtaccgggttcatctcactagggagtgccagacagtgggcacaggtcagtgggtgcgcgcaccgtgcgcgagccgaagcagggcgaggcattgcctcgcttgggaagcacaaggggtcagggagttccctttctgagtcaaagaaaggggtgacggacgcacctggaaaatcgggtcactcccacccgaatattgcgcttttccgacgggcttaaaaaacggcgcaccacgagattatatcccgcacatggctcggagggtcctacgcccacggagtctcgctgattgctagcacagcagtctgagatcaaactgcaaggcagcagcgaggctgggggaggggagcccgccattgcccaggcttgcttaggtaaacaaagcagccgggaagctcgaactgggtggagcccaccacagctcaaggaggcctgcctgcctctgtaggctccacctctgggggcagggcacagacaaacaaaaagacagcagtaacctctgcagacttaaatgtccctgtctgacagctttgaagagagaagtggttctcccagcacgcagctggagatctgagaacgggcagactgcctcctcaagtgggtccctgacccccctgacccccgacccccgagcagcctaactaggaggcaccccccagcagggggcacactgacacctcacacacggcagggtattcccaacagacctgcagctgagggtcctgtctgttagaaggaaaactaacaaacagaaaggacatccacaccaaaaacccatctgtacatcaccatcgtcaaagaccaaaagtagataaaaccacaaagatggggaaaaaaacagaacagaaaaactggaaactctaaaaagcagagcgcctctcctcctccaaaggaacgcagatcctcaccagcaacggaacaaagctggacggagaatgactttgacgagctgagagaagaaggcttcagacgatcaaattactccaagctatgggaggacattcaaaccaaaggcaaagaagttgaaaactttgaaaaaaatttagaagaatgtataactagaataaccaatacagagaagtgcttaaaggagctgatggagctgaaaaccaaggctcgagaactacgtgaagaatgcagaagcctcaggagccgatgcgatcaactggaagaaagggtatcagcgatggaagatgaaatgaatgaaatgaagcaagaagggaagtttagagaaaaaagaataaaaagaaatgagcaaagcctccaagaaatatgggactatgtgaaaagaccaaatctacgtctgattggtgtacctgaaagtgatggggagaatggaaccaagttggaaaacactctgcaggatattatccaggagaacttccccaatctagcaaggcaggccaacattcagattcaggaaatacagagaacaccacaaagatacttctcgagaagagcaactccaagacacataattgtcagattcaccaaagttgaaatgaaggaaaaaatgttaagggcagccagagagaaaggtcgggttacccacaaagggaagcccatcagactaacagctgatctctcagcagaaactctacaagccagaagagagtgggggacaatattcaacattcttaaagaaaagaattttcaacccagaatttcatatccagccaaactaagcttcataagtgaaggagaaataaaatcctttacagacaagcaaatgctgagagattttgtcaccaccaggcctgccttacaagagctcctgaaggaagcactaaacatggaaaggaacaaccagtaccagccactgcaaaaacatgccaaattgtaaagaccatcaatgctaggaagaaactgcatcaactaacgagcaaaataaccagctaacatcataatgacaggatcaaattcacacataacaatattaaccttaaatgtaaatggactaaatgccccaattaaaagacacagactggcaaattggataaagagtcaagacccatcagtgtgctgtattcaggaaacccatctcacgtgcagagacacacataggctcaaaataaaaggatggaggaagatctaccaagcaaatggaaaacaaaacaaaaaaaaagcaggggttgcaatcctagtctctgataaaacagactttaaaccaacaaagatcaaaaaagacaaagaagggcattacataatggtaaagggatcaattcaaccagaagaactaactaccctaaatatatatgcacccaatacaggagcacccagattcataaagcaagttcttagagacctacaaagagacttagactcccacacaataaaagtgggagactttaacaccccactgtcaatattagacagatcaatgagacagaaagtcaacaaggatacccaggaattgaactcagctctgcaccaagcggaccttaatagacatctacagaactctccacccccaaatcaacagaatatacattcttctcagcaccacatcacacttattccaaaattgaccacatagttggaagtaaagcactgctcagcaaatataaaagaacagaaattataacaaactgtctctcagaccatagtgcaatcaaactagaactcaggattaagaaactcactcaaaaccgctcaactacatggaaactcaacaagctgctcctgaatgactactgggtacataatgaaatgaaggcagaaataaagatgttctttgaaaccaacgagaacaaagacacaacataccagaatctctgggatgcattcaaagcaatgtgtaaagggaaatttatagcactaaatgcccacaagagaaagcaggaaagatccaaaattgacaccctaacatcacaattaaaagaactagaaaagcaagagcaaacacattcaaaagctagcagaagacaagaaataactaaaatcacagcagaactgaaggaaatcaagacacaaaaaacccttcaaaaaattaatgaatccaggagctggttttttgaaaggatcaacaaaattgatagaccgctagcaagactaataaagaaaaaaagagagaagaatcaactagacacaataaaaaatgataaaggggatatcaccaccgatcccacagaaatacaaactaccatcagagaatattacaaacacctctacgccaaataaacttgaaaatctagaaggaatggataaattcctcgacacatacactctcccaagactaaaccaggaagaagttgaatctctgaatagaccaataacaggagctgaaattgtggcaataatcaatagcttaccacaccatgcacagtccaggaccagatggattcactgccgaattctaccagaggtacaaggaggaactggtaccattccttctgagactattccagtcaatagaagggagcgggaatcctccactaactcattttatgaggccagcatcatcctgatcccaaagccgggcagagacaccaccagcacagagaattttagaccaatatccttgaggaacattgatgcaaaactcctcagtaaaatactggcaagccgaatccagcagcacatcaaaaagcttatccaccatgatcaagtgggcttcatccctgggatgcaagtctggttcaatatacgcaaatcaataaatgtaatccagcatataaacagagccaaagacaaaaaccacatgattatctcaatagatgcagaaaaagcctttgacaaaattcaacaacccttcatgctaaaaactctcaataaattaggtattgatgggacgtatttcaaaataataagagctatctatgacaaacccacagccaatatcatactgaatgggcaaaaactggaagcattccctttgaaaactggcacaagacaggggtgccctctctcaccactcctattcaacatagtgttggaagttctggccagggcaatcaggcaggagaaggaaataaagggtattcaattaggaaaagaggaagtcaaattgtccctgtttgcagatgacatgattgtatatctagaaaaccccattgtctcagcccaaaatctccttaagctgataagcaacttcagcaaagtctcaggatacaaaatcaatgtgcaaaaatcacaagcattcttatacaccaacaacagacaaacagagagccaaatcatgagtgaactcccattcacaattgcttcaaagagaataaaatacctaggaatccaacttacaagggatgtgaaggacctcttcaaggagaactacaaaccactgctcagtgaaataaaagaggatacaaacaaatggaagaacattccatgctcatgggtaggaagaatcaatattgtgaaaatggccatactgcccaaggtaatttacagattcaatgccatccccatcaagctaccaatgactttcttcacagaattggaaaaaactactttaaagttcatatggaaccaaaaaagagcccaagaattggaaaaaactactttaaagttcatatggaaccaaaaaggagcccgcattgccaagtcaatcctaagccaaaagaacaaagctggaggcatcacactacctgacttcaaactatactacaaggctacagtaaccaaaacagcatggtactggtaccaaaacagagatatagatcaatggaacagaacagagccctcagaaataataccacacatctacaactatctgatctttgacaaacctgacaaaaacaagcaatggggaaaggattccctatttaataaatggtgctgggaaaactggctagccatatgtagaaagctgaaactggatcccttccttacaccttatacaaaaattaattcaagatggattaaagacttaaatgttagacctaaaaccataaaaaccctagaagaaaacctaggcaataccattcaggacataggcatgggcaaggacttcatgtctaaaacaccaaaagcaatggcaacaaaagccaaaattgacaaatgggatctaattaaactcaagagcttctgttctttgctggggtatctgaagactgaaaacacagcaaaagaaactaccatcagagtgaacaggcaacctacagaatgggagaaaatttttgcaatctactcatctgacaaagggctaatatccagaatctacaaagaactcaaacaaatttacaagaaaaaaacaaacaaccccatcaaaaagtgggcgaaggacatgaacagacacttctcaaaagaagacatttatgcagccaaaaaacacatgaaaaaatgctcatcatcactggccatcagagaaatgcaaatcaaaaccacaatgagataccatctcacaccagttagaatggcaatcattaaaaagtcaggaaacaacaggtgctggagaggatgtggagaaataggaacacttttacactgttggtgggactgtaaactagttcaaccattgtggaagtcagtgtggcgattcctcagggatctagaactagaaataccatttgacccagccatcccattactgggtatatacccaaaggactataaatcatgctgctataaagacacatgcacacgtatgtttattgcggcattattcacaatagcaaagacttggaaccaacccaaatgtccaacaatgatagactggattaagaaaatgtggcacatatacaccatggaatactatgcagccataaaaaatgatgagttcatgtcctttgtagggacatggatgaaattggaaatcatcattctcagtaaactatcgcaagaacaaaaaaccaaacaccgcatattctcactcataggtgggaattgaacaatgagatcacatggacacaggaaggggaatatcacactctggggactgttgtggggtggggggaggggggagtggggagggatagcattaggagatatacctaatgctaaatgacgagttaatgggtgcagcacaccaacatggcacatgtatacatatgtaacaaacctgcacgttgtgcacatgtaccctaaaacttaaagtataataataataaaataaaaaaaaagaaaaaaaaacatgatgagaactgtgttctgctcccaccccctatccctctagtcctcagggcccctgctcattccaaagcaaatctggagggcttggtctggggttcatggtatgcaagtgcatctgtccccagaattcaagaggcctgtgaacttggatgggaaaataactg

SEQ ID NO: 80783 - DNA, 860 bp, Homo sapiens
  sig_peptide (122)...(257): this location contains the signal peptide sequence, MLIAVFQQFFFLFIMSFFFPRFILNISMLRDSLWWAGLFSLIYFF, Run with SignalP
  misc_feature (793)...(238): similar to gi5702177 in the genepept database release 114, Run with FASTXY 3.3t00, default parameters
ggagtggatggaagggttggggagtggggagtccagtgttagaggtgaaacttgtcttggatttaattttttctagtcatcaatatttcaattgagagttaactatacttgttagatctttatgttaattgcagtttttcagcaatttttttttctttttataatgagtttcttttttccacgttttatacttaacattagcatgcttagagacagcctttggtgggctggattattctcattaatatatttttttaagtatataagtgactaaattccagtaaacttttgactgctttagaagtggtttcacagcctatctttacagatggagaaatgtgaaggtaaaaagataaacctctgtcaatatcaagaattatgaaaatgggataaaaatattcttaaggggtctttagttcagactttcagaaagcaccttaacttgctgcctttaataatttcacatgctaatacgttttctaaatgacaactttactgttaatactgtaccgttggatatttgtaataacttatgtgattatttttcgtgtacaggattgcagaagtggtagcgattttgggctcatctgacatttaatgggagctttggggttaacttaataggtaaaaacggattacggaactctttatttgacctaagcgttttggacggggaaatgaatttatttctgagcctccttttaactggaaaagaatttgtgtaaatggggcttcacgccccattcaaataccccctgggccacttttacgcccacaggtttgtaaaatatttgttttggcgccccccgcggcaggaacccaaaaagaccagcttcggggtggccttcccgcgttaactc

SEQ ID NO: 80784 - DNA, 672 bp, Homo sapiens
  misc_feature (1)...(672): n = a,t,c or g
  sig_peptide (189)...(324): this location contains the signal peptide sequence, MKVRHNFNTLLGFSLCFLTLKIPIILSFRVRDRPLKSWQYSLSSL, Run with SignalP
  misc_feature (28)...(276): similar to gi4049785 in the genepept database release 114, Run with FASTXY 3.3t00, default parameters
cccacgcgtccgggagagggagtaacatattactttaaattatatgtaataatatacatacattaaattatatgtaataatataatattattatttgcagtatacttttttatttccctttaactgagcttgttcatgtttcaaagggtgttccattgcctgatacataatttagttaatattatcttatgaaggttaggcataattttaatactcttcttggcttctctctctgctttctcacactgaagataccaattattcttagttttagagtcagagacaggcctctaaaatcatggcaatactccctctcatcattatatatatttttcaacctttctatattttattttcgaatatatcttcttgcagatagaaacggtattgaaaaagagtgcgcggntgttctataataagtaatgaataatatgccaccaggaattcatatcattccgctttaagtgttaacctgaatgtggcgcaattatcccctgctttcagtctggcgggtcttcgcctgaaagggtaaacggagcgggggttccccgctcgtttcttttgggaaaagggggctccgattccttttccccgaaaaatgggctacctttccccaatntagnttaaattttccctcggtttgggaccccccccccctttgccttttcctct

SEQ ID NO: 80785 - DNA, 412 bp, Homo sapiens
  sig_peptide (32)...(167): this location contains the signal peptide sequence, MGPLLCPRILPPTAARTHRHVSCSHLRDWRALLLLSWWEWLPAGA, Run with SignalP
  misc_feature (225)...(35): similar to gi211358 in the genepept database release 114, Run with FASTXY 3.3t00, default parameters
tttcgtcaaatcctcatctgctgtattgacgatgggccccctgttgtgccccagaattcttcccccaactgcagcccggacacacagacacgtgtcatgttcacacctgagggactggcgagcgctactgttgctgagctggtgggagtggctgccggcgggtgcaggggcccccgagatcccttctctgccgcgcctgcccccggcctggaatccagcttcctctcacacggctcccaggcctgtgcacgtgctctttgggaagagccatgcctaaagtaacttcccatcaaagagcatggcttggtttcgtaaaaacctgtcttttgtcatactagattatcttcaaaaacactgacccctggccctgagcactgaaagagcggttagggtgatgcggctggccacggca

SEQ ID NO: 80786 - DNA, 688 bp, Homo sapiens
  sig_peptide (398)...(263): this location contains the signal peptide sequence, MSSGTELLWPGAALLVLLGVAASLCVRCSRPGAKRSEKIYQQRSL, Run with SignalP
  misc_feature (465)...(608): similar to gi522145 in the genepept database release 114, Run with FASTXY 3.3t00, default parameters
agctattagaaggattatggatgcggttgcttgcgtgaggaaatacttgatggcagtggggtctatgtaggcttcctccgacccgtgtctgcttcctttgctgaagttctggtacctggaagatgctggatcctccaggctggggtagaattgcaacagcttgtccttccttgtgggtgccatgtccgccaggggtcctggccatgcctgcccgaccaaggagtaggtccgggaccccgtaaagctctgttggtcctcacgcagacttctctgctggtagattttctctgacctctttgcacctgggcgtgagcagcgcacacacagactggctgccacccccaacagcaccagcagcgctgctccgggccacagcagttcagtccccgagctcatgttggctcctggtgttgcctcttgtgatgcgtggcctggtgaatggaggcgtggccctctcgagtgggtttccaagaactgttgcaactaggaacagaccctggccaggagcggtggctcacgcctataatcccagcacgttgggaggccgaggcagggaggatcgcttgagatcaagagctccagaccagcctaggcaacacggtgaaattccatctctgagagtccagggttcctcaccacggccgccccatcctgagcccgcacacctgcccaagcggacgcgtgggtc

SEQ ID NO: 80787 - DNA, 454 bp, Homo sapiens
  sig_peptide (248)...(383): this location contains the signal peptide sequence, METVVLKLVIVSFRQAPLSLWQVQLVLRCTLAMLGPHAQGEGLPH, Run with SignalP
  misc_feature (235)...(413): similar to gi11073 in the genepept database release 114, Run with FASTXY 3.3t00, default parameters
tttcgtctgctccatctgctcccttgtgcttggaggctgaacctcgggccccacgttggagctggcccaggccccagccgtcccaatgagtcccaagtgctgccgctgagccagcctggaagctgagctgccacgttcacaggctctcccttacggtcctcatgcagttgtgattaatttggaagagcctgcggcttaaaaatcaaccaacactttccacttaaatcacttaggtatacattttcttatggaaactgttgtgctgaagttagtaattgtaagcttccgccaggcccctctcagcctctggcaggtgcagctggtgctgcgatgcacccttgccatgctgggcccacatgcacagggtgagggcctcccacactggcaagagctcagcgatgcaggggctgcttcctttaaaagctttgtcatgccattgtccccacactgtatt

SEQ ID NO: 80788 - DNA, 403 bp, Homo sapiens
  sig_peptide (89)...(224): this location contains the signal peptide sequence, MLSIFLLPLSCVCHGPPFNKAFLLVFMAGPPGVASFPDSRSPSPE, Run with SignalP
  misc_feature (317)...(176): similar to gi431578 in the genepept database release 114, Run with FASTXY 3.3t00, default parameters
tttcgtctgttgcgttgttgcattgattaaaaccgcaagcgcgtgggtttctccgtttttttaagatttcttactagaagttgttggaatgctgagtattttcctccttccactgagctgtgtctgccatgggcctcccttcaacaaggctttccttcttgtattcatggccggaccccctggtgtggcctcatttccagattcccgctctccctccccagaaatggtttccatatgtgaccccacgcgctctgggcaggcacctttggaggggctgacctcccagctctcttctctgcaatcatcaactcacacctcctgggtttccttccaggctgcagagctgagagctgagagctaagagcccacaggcagagggccctctccaggcaggttttatctg
